United States Patent Application Publication US 2014/0057251 A1 - sequence listing, part 136

SEQ ID NO: 252937 - DNA, 775 bp, Cannabis indica
gatactccaagtgttactttgtcaacctctcttgctacagatcctcagctaactgttactcactctgaacaacatctggacacacagcatctcaccacaattgagcctcctgctacaactgatgctcagctcacttctggtttgagcagacctggattagttaatactgttgttactccagcaatgacaattggcaaaaatactgttcagggatgccatcaacctcttgaccatcataacacacatcatatgaagactagatccaagtctggcatccacaaaccaaaagctcttttagtaaccaaagaaccatcatctcttcaagaagctctaagtcaactagtttggaacaaagcaatgagtgataaagtgttagccttggtcagaaacaaaacctacacccttgttagattaccaccaagaaggaaggcaattggttgcaagtgggtttacaagaaaaaagaaaatcctgatggatctatcctcaaacataaggccaggcttgttgctaagggctttcatcaagaatatgggtttgattcactgagacttttagtccagtagttaaattactattagggttgtcttggcaatggccttgtcaaaaggttggtttattagacaattagatgtcaataatgccttccttaatggagacttataggaagaggtgtacatgttacaacctccagggtttgaggtccctggaaagacagacttgttgtgaaaattgcacaaggctatatacggtcttaaacaagctccaagagcttgg

SEQ ID NO: 252938 - DNA, 784 bp, Cannabis indica
attaatggagaactcaaaattttctctttcaagaaatgataaacacttagatatttatctaagttttactacaaaaaactgttatttttggtgacaactgtttaatcacaataaaatgttaattatttgtgactaaaacataatatttgaatacaaattgtcattaatttagctttagtcacaataagtattcactaaaactacatttagttacaaaaattgtaaattttgtgactattacttttagtcacttttagtcataacataggaatgataattatattagtcataattttttcacttttactcacaaattttattgtgactaaaactaaaaaattttgtagtgtttagtgaataatatatattcagacgtgtgtatatatattttcttttggatgtggtgggggattattgatgtaactgttggtttaatattttaatataatttttatttgtaagtcttaggtttcaaatttttatactcggtataccgttttttaatcgaagataagtcatacatggatttatcatcaatttgttagagatattattacaatggaagaaaatcaagatattacaactctattgcaatataatacaaggatcaacaaagagattaaataaatgttacaacacataatatacaatatatatacactacatatattatatataagaaaggtagaagaagaagatacaacacatgtaatataaaatatgtatatataaaacaagagaataatatatatatatatatataaacactcactcacaaccttga

SEQ ID NO: 252939 - DNA, 902 bp, Cannabis indica
aatagaaataaaaattgaccccttaaatgaaaaataccattaacgttcggactaagctttaaaaagttccaaactcgatttctaactcaaaatcacttcaaatcaacaagaaaatatcgtaactagtcccatgactacccgagaacaattctataaggtcaaaaccttcataacaattctagttcacaaaacccctatacaaaaccaattgtttttaaacttaaaacgaaattaaaccataccttaagctttttcttttcaagaatttgctatcatgctactaccggagcttagatcgctaagttttggattgaaaatcaaagaaaatagatataggaggagaaggttttatcgaagggagagaacgagggtttcgttcttcgttctttctactgttataacttaaaacttaatttatatatttttaaaacgatatataataatagaatattaataagaatatattaataataatataatattaataaattttttattattaatagttatcttattatttcttagccattaagaaatctctatttctaagatatttggccaactttgagtaccctaaaataccctaatatttctaaaatcaacctatcttaataattccatcaatatttctaactaaaactgttgtgccattttttgcatccaaaaatatttttatttcacaaataactcatattatatccacgtatttcaattaaatctctgtaattaacaaattacacttatttactctcttataccgaaatttacattttatgctaaaataaattagtaggatcataatcccacttattaccttattaactcataatatacatataaaccctaattatttaccattagacttattgggacattacaatgttggtggtgttttaaggact

SEQ ID NO: 252940 - DNA, 840 bp, Cannabis indica
ctggtaaaataattcccaatattcggttcttttgaaaagttgatcatgaaaaaaatttaatctggcatgacagcgatagaaagctagatggtaaagatgagagatccagctggctcaccctcttggaaatcaattgatgctagatggcctgaattttgcaatgaacctcggaatacgtgtcttggtctttctatggacagaatcaatcgacatacaacccttagcagtaagtatagttgctggccaatttttcttgtgatgtataacttgccacctttattggtaatgaagaggaagttcactatgcttacaatattgatatcagacccttcacagcctggtaatgacctggatgtgtacttatcccctctagttgatcatttcagtcaattgtggtatgagggtgttcctacatacaatgcctttaggaaagaaaaattcaatcttaaggccatattactgtggaccattaatcattttccagcttttgaaaatctttctagatacagtgtgaaagggtataaagcatgtcctatttgtgaggagaatatgttttatgtatttaaaacactcgaaaaaaatattttatatgggacaccggaaggctttgccaaaagaacatgtgtttcagacttggaaaaaagtatttgacggtaagcaagcatttgaagtgccactacaacctttgaaaatttgaataaagtttaattccactttagaaagcgaaaagctaatccaaagaaaagaaaaggtcactgtgagaaaagtgacgatgttaaaaatgaaccttaggggccatggcagatgaagtcaatattttttgagctcgagtattggaag

SEQ ID NO: 252941 - DNA, 641 bp, Cannabis indica
tctctccttcgcgttgccagtcttctttaccggcgatcaacaccaaccctcagccttcaaacttcatgtaagttctgagtatactttacacttgcgtactgtctgtttgtattgcatatttatagtttctgggttgaatgtcgaacttctgggaatgcgtttgcctgagtttgttgtgtaacgcataaaatctccttttcttgtgccttgattgtttctttttactacgtttccttttgagaatcgcctttatctttcataataacgcctttagggcttagagtggttcgtgctttctcaactttgtcttttttcccttttttctctttctttttgcaatgtcactgcctttgggatttttgcacccgatgcttgccaaggaaagtctcttggattttcttattttgcaagcatccgaagggggcctctttccagcggttaggggacccccattccctttttaaacattagggtttggttttgggcctaactgttggattttttaaccttttcagaaccaaaatgtctgcttctgcatctagctccaagtcttccaagaagggggcagtccaactggccaccctgcaagaggtcatgaaaagggtcccgtggcccaggaaaattttaagtctcgtgccaac

SEQ ID NO: 252942 - DNA, 725 bp, Cannabis indica
aagcagccagagtggcgtactcgtgaataagagccattcagtccgtgggtgtaaggacctaatggaggcttgaagcggggacgttacaagttagatttttcatcttcaagatgtgtactcatcaacactcatggatcttttcttggtgctctaaatggcaagtcaaagttgaagctgtcgagccttcaattgagtggcgaagaggcttgcaaagacgattcaaatatcagcaacagattcacagtgaagagcatgtccaagcatagccttagagaaagaattcataagccaactcattagtagagcatcataacgagtctaatgatcaaaaatagggttaattgtgttcgtacctgcaagaaatgaatttggtcgtggagtggtaccaagaagagtttcttcaagtccacgtgcacgaacggagggaagaattaacgagcgccagtatgagtaattgtgtcgatcaagtcgaatattcagaggaagaagattagccataataggtatgataccatgtaagagcagagaatttagagagaaaaagaaaacagaaagaaaatgaaaaagaaagctcaatcaaaatgtgagttgttatgggcttatatagaacttgtaaactgaattttacatcagacaacaacaacaagataacagaaagtgacagtgttgcgatattttgcacacgcaagtgtacgtattgtttcaagtagtagactcactaggag

SEQ ID NO: 252943 - DNA, 504 bp, Cannabis indica
aaaactaaattcatcatacaaaattattctcacaagggaaaagaaattctcttaaaagcagttgttcagtctatacctatgtattatatatcgtgtttcattattccagaagaaacttgtgaggaaatagagcgattaatggctagatattggtggggttcattccaatcaaagagaaaaattcattggcgagcttggcaaaagctttgtttatctaagtgaaaaggagggctaagttttcgaagatttgttcaatataaccaagcgccattagcaaaacaggcatggagggttttgataaatcctacgtctactttggcacaagttctaaaggccagatatttcccacaacaaaattttttagaagctacagaaagctctcatccatctcaaatatggcatggtatagtttggggtgaggaattacttattaaaggattgagaaggagaaatgagaatgatgataatacaaggttgtttgaagatccatggattccacgtcca

SEQ ID NO: 252944 - DNA, 551 bp, Cannabis indica
ctaaaaagaagtttttcaaaaaatcaatattaagagaggacatttactgaatataaacgaataactcattctcggagggttgttgacgcagcaataatggtacactgtacggctcactaaccttctcacatgccacaaaggaaccacattgtcgtcgacagtcttcttttgttagggatgagcagtattctttcagttgggaaccacctttagttttgaactgaaaacaataagaacattagtgacacaaaggagaaccgaaatgaactaaaaaaatgtgtgtaagcataagaaaaacacaaagaaagcacattcaagagatcaaatttacaaacattagcaaaatctcaataactttaactagtaaaagaaaatttgaaagttacatcagttcttatgtccaaccatatcataacaaggcatcagtgatttctaattgttaaagtaagtttgaaaatgctaaccaagaccaaaagagttaagatacatcatccaagtaccttttacatggacttaagtactcttcatttacttatctagctctcttgact

SEQ ID NO: 252945 - DNA, 619 bp, Cannabis indica
gcttcactccttggccggataagtaattacttcacttataggtacttgctaatgagggttgaaaaaacctgatgatgaaagaaactttctctggttgtttgactttttgattctctctgttttttcctagagttctacattggcattatatgtctttttacagggatatgattcagctattatccaattctcttttctttttaatagttaggtttgtcgtaattagtttgtaatgtttagttctaagatttagaattgtgtttaattagtttatatgtgttaataaactctttatgtggtaactttggaggattgggttggtccttctaatgcgattgaaggttatgtaccgcagagagaacggaatttcaagtcggtgggttcgaaaatttccaagaaaggtattgaaagtttaaactctttatgtggtaactttgagctttttctgattttgataatagctttgcttcgttatttgcttgcaatgggtggcaattcaatccaaacctgacctgtttataaatgaattcacctgacataataacttttacttgtttaataggcatttaacatgttaacatgtttattgatttatgtaatcaatcatttaatatgtttg

SEQ ID NO: 252946 - DNA, 1051 bp, Cannabis indica
ctctgaatctgattctaatgcctaaaatatgttcgtggtatgtctagtttatgttatgatgcaaaattcaacccatttgcactaagactattccaaaaactgaaaccctaattaaggttgtcaacctggacgttaggtgaaaccctaggtgtccaagttgatttttgaggtgttgattcgtgtattttttattcctggggcctggacttgaatgcttcatgtcttcatggtatagaatattgaaagatagtgagttaaaaacaacttggcaggatctaaacatccatttcagagttctcgaagtcaacctaggtgcagggctagggacccctctcaggtcaacttgctatgattcgagactactcaacttcgagatgttttctttctttccacatgtcaaacattgatgtccacatcatcagggctacttttggtgtaaacacagacttctatcgtaatcatgatgaaaaaggtagctcagtttaatctagaaatggatcaaatggatgtaaagacaacatttctctatggcaaacttgaatagcaaatatacatggaagaactagatggctacaaaagtaacaaactagatcaggtatgtctattactgaaatctctttatgggctcaagcaagtaagtccccagacaatggaatttgagattccatgggtgcatgatctacattggatatacaaggagtgattatactccatatgtgtactataataatgaaccaatcttgttattattgtatgttgatgatattctcatcatagaaaagaaaagagatgcaatagacgaattgaaaatgcaattaagctcagaatttgaaatgaaagatctaggggaggcaaagagaatacttggaatagatatcaaaagagaaagaccagaaaaaatatcactatcttagaggaactacatatagaaaattattcacaaattttgtattagtgaggcaaagcttatcagcacccttttagcacaacattttaaattgaaacaaaggacacacacctaagacagaagaagagaagatgtatatggata

SEQ ID NO: 252947 - DNA, 528 bp, Cannabis indica
tcttccggcttccaagctgtggaacgcctaggattgctcacggagtgggttagggttccttcgatgcaccgcaccgcccctacctaactcttcctccagcacgccaaggtcttctccacatatgacaaggacggacttaatgtggtggacttagtcacaactgcaaactgtaggagggctaagcttatcatggagagccagtcggtgaacgacttcaacttatccaaggttctttgtcccaatattcgcaccccggatgttaaaaaggcgcttcgagcggacattattgcctcagcggaggaccgataccagaagtacctctttaggagggaataggagttagcttatattaaggctcaagccgcttccaggagggctcttcgggtaggagctggcagagagtaggtgccttcccggcctaagctattgcttccgattcccaacactagggctcttgacgccagcacctccagatccggtaagtctcccttagttgttcatcatgtgccctctgctcaagattattct

SEQ ID NO: 252948 - DNA, 1225 bp, Cannabis indica
ataaatttaaaacagagtctgtaatattgacgaaggtaggcgaaacttatagttttacaaatattaggtacttaggtcatctctaatgacactttaaaaacctgtatataatgtgtggtatagttcctccaaataaaagaatctccattagattgttctagtaatggaaagttagttgtctcttagaaggatgttcccagctaacttgtccatccagaagtagtcttgtggaatgatagttgcctttcggaaggaagttcctagatgactatcatgtccactccgagtgtagtctttaggatagctagtcctcctctggaaagaagttccgaatggctagttgttcctcctagaagggagatccagatagtcgactctagctggctcttttcctatccaggaattccttcagcatacgcctcgatcctttgtctcgggaacgtatgtctcatctgaaagcactctgtcttgtgctgacgtgaagattatataatgaggaggttgttaagtttgttgtggcgtaactaacttaacaacttaagttgcagccatcgactcaggatctttatcctaagtctataaatatcacaaacacttaccatttcaaacacgctgagttcagatgagtttcgagaggagttttcgagattgcgagagaaaacaaaattagaggtaaagagagaggcacgtagaaaagagagatatttggtttggattttgtataaaaaatcttctatagatgaaaaaagattcttaggtaaaagtgtgagagttgaaacactttaagagaattcaacagataatcaatctcgattatattaaccattattcttgctcaatcaataaagatgattaggtggtattttaaaattggagcagagccataaatcacatcgatttatagaacttgaaccggtatatatcttggtgttgattttattgttttactactttaatcatttttggttctcttatactctcgttcatcattgttttctttgattaattgtttgtgattgttaaatcttgttattgttaactgtgtgctgattaaagttttagatgtttttaattctacactttgagtcctaattttcccacataatgtagttaatttctccaacaaaatgctccgattgagaggtaaaactcatcctattttgatgagagttatagtgtattagtgggacactgtagaccactgtatattttttttttagttttt

SEQ ID NO: 252949 - DNA, 958 bp, Cannabis indica
ttttttattcttatatttgatttcttacttaaaagtatatatttttatattgtgtgaattgcgttcttcaatactattttattgtttttgttgtgttgtatggtgttaagttctgtttatgtattgttgcgttttgttattaagttatgttgtgagtttttgaagatgtggagacttcggaagatttttgaaagatcattaaatctcacagctaagtttttcttcttctttctattattttaacattttattttctaattttatttatttattattatttagaaataagatagattcttgcctctatttatttttttgtgtgtattttcaggttgttcatcatgttgcagtttacaaatgtaggagttggagaaaaatttattggggcccaaactatcattgagcgaaatttgtggatgcatttttgtctccattttcttttgaattatctgcttgtttagcgttgaatgttttcaccaaccattatactatgcaattttttcaagtttgctatccaattttcttgaagtatccccagtccatgtcattttttgtatactctatttatttatatattttaatgatatgttcgttattaaaaaaaaaaaaagtcattaattagtgaggtccatagaaggagcccctccccaacaaattgactctaaccataaaaattaaattgaccaaaaaaaaaaatacaaatgtgttagaaaaaaccaaaattacaagaattaaagcatctacaaccaccttactattcgcaaaataaagattttttcaataatatacttaaaatataaatcatttataaaaatacttaaataaattgcaattataataatacattgccacgtcataaaaaatactttaattttaaaataatatacctaaaacaaaattattcccgaattcaattttttaatcattttcctgaaatttcaaaagtaagttacttatg

SEQ ID NO: 252950 - DNA, 574 bp, Cannabis indica
tgagggagttatgaccgttttacctaaaggttgttcacccaggttaacattctgacatcaacctagatgctgggtaagtgaaaaaacgactcggacttatatttttggatgccaaagtgatatgttgacatcacttagtcaatttcttcattttggtgaagttgttcaccagttctttgagatgtcgtttttttataaaattgagtagactcgaaactccccaattttgccaatattccatattgcaaaaaaggtaaaatatcaaagtgtaaatttgacttgtcacaagtcacatctcttgtttactacaaaaaaaaaaatagttagatgctcgagatggcattgaaataagataagcaaaacctagctcaccaggccatatgccaacttaggcattgggtgctcttcaggagactcctcggggcttgttttgatacttttatggaatttgagattgcgaatgacgtctccaaccccatttttaacaaaaataagaagaatgcaaggagaaaaatttgtgtttgaggagcagaaacatgtaaaccaggttgcatgtcaacctaggcgctgggtc

SEQ ID NO: 252951 - DNA, 512 bp, Cannabis indica
taggatgttaatgaaacatacatggtagtaaatctagatcctggtaaaataattcaaacatgaataacttcaccagaatatgaaaactagctaagtgatgtcaaaatatcacttaggcctcaaaatatacatcattaacacgtttttctcttggcccagcttctaggttgacatatgatatcatcctgggtgctagtattaaagcagccttaagtaaaatagccataacccactcattattgatctgattgatgcgatttgacttgtgtttcaaagttatttcaattctctatcaagtcatggttcacactccaattgaaatttaagatttcaagtccaaatgttgtcctcaagagaattacaaatttcaactacaacttaaccgaagtgggccctgcggatgcaattcaagctctgaaaattgatgactaacctctagagtaaatttcaccgttagatcatcatcaacaattaaaaatagcttaaatgtatttttttcatttttttttttt

SEQ ID NO: 252952 - DNA, 1145 bp, Cannabis indica
ctcgggaaagtttctgggctttgatgtccatgcccgaggaattaaagccaatccagagaaaattcaagccctccttgatatgaaatcgtcgacaagaaccaaggaagtacaatgtttaactggtcggatcgtcgcactgagcagatttgtctcaaaatcaacagacaagtgtgttccattcttcaacatcctgcgaaaaaataagcaatttgagtggacagaggaatgtgaaaaagcttttcaagagctaaaaatgcaactcgcaaaacctcccgtactctcaaaacctcttgatgaagaagaactcggaatatacttggttgtcacggaacatgctgtgagtgccgtgctgattgaagaggaatacaacatacaacacccggtctactacattagtaaaagactcgttgaagccgaaagccggtaccccttgatagagaaactcgcttactgcctgattctagcaacaagaaagttaagaccttaatttcaagctcatcctgttcgtgtgtaaactaaccaaccaatacgtcaaatattgcaaaaaccggacgcttttgggcggttgctcaagtgggcagtggagctaggtcagtatgagattactttccaaccacgaacaacaatcaaaggttaggccctagcaaattataaatttaaaatacaaattaattttataaaaaaactatacaaacttttattatttcatatttaaagttatctgatgtctttaaataaacttattttatgaaaaaatgtattttcaagaaaaaaaattataaggaaactaatggtatcttaaacattttgaaaacaatattacaaaaacttaattttagccttttaggtacactatattatcttttatttaagatacttttacgttatcttttttattaggaatagttttttacttaaaaaaattattaataaatataagcacttaccatataatttaataaaaaaatggttaattaggatttttgtccactgaactttgacatgtaccaaatcatgcccctgaacttttaaggtcattaaaaatgccccctgaactattgacattgttggatttaaggactttttttaaattttaataaaaaatctaacatggatgaaaacccaaggaccatgatttagtacat

SEQ ID NO: 252953 - DNA, 509 bp, Cannabis indica
cttatgccactatttacccatttgaagtttaaatttttactttattaccgcaatccaaccaccaatgccgaccaaaatcctgccgccacgcacaaccatattaacacaatcttaataatataaaaaaactctaaaaaatttataaaattaaaaataaagcaatgtacattactaaaactagtagaaattagatttataccttaatgaacgatgagatacaatattttatccactaacaccgttggccgaaggtataaccaccacaaccactacctataccttcggtttacccaaaaaaaaaggaaaaatgtgatctttttaggtatataattttaagtatgaaaaatagaagatttagaaacaaaaatgagctaaaatggtgaaagacaaagggttataaacctattttggggtttctctggtttgggggtttctgagttggttgatcgaatgagaaagacaaagggttataaaccctttttcacatcgattatttccaaataaccgac

SEQ ID NO: 252954 - DNA, 510 bp, Cannabis indica
accacgagagttttactctcagatctggaccagttctctttggatcttggatttgggagctcgaggctagggtataaccattcttctcttctctcttactctctgatctgtgttctgtaatagatcttaggttatttgctttgaatcctacttttatattgttgcagagtcggttgatcacaggtttaggagttagttacaatttcagttgtaactaactactaaatcttgatccactagaggcgaagccacctaggatcgagtctatttgcttgtttctgtttatatgttgcttatgtggatatttgtaagtgtactggactggttataagtggaatttattcaacaacatccacttagattgtcaaagcaatacgttttggtgtggcttgtgtagctcgagaccataatagcttcttactggcaggtattacaaagctattcctaggctcaattcaccctctaattgcagagggtataagctttcgtgaggccttaagttggaccaaa

SEQ ID NO: 252955 - DNA, 972 bp, Cannabis indica
ctcgtacgaagaaaactacgcgtatggttactcttctgatcccttggtggctcggcttgccaccctgcctgacgtcgaacaggatttggcggccccaatggaggatgaccgtgagggggacgctgaagtccaggaggttgaagagctggacgaggcacgtccgggcagccctctcggttctaagggagaggaggagattgaatcccctaactatggggagtacaatgaggctgggcaaccagttgatgctgacggggatgtcctggttgcaggcgtcgactacgtcaccgagaagcttggtgaggcggttcctcataggaggcagggtgccttgggtgccagatgggtgagtcctccgtccaagatttcggaggcacgcctccgcactctcgaccacgatggatacttgggcgagttggactgcttcattcccgcccatgacaatcgtgctttaaacccaagtgaggagatgtacgcctggtcgggggctcacggtcagcaacgggcgttgatgcccttgcacaaatacgtctaggatgtggcggacttcttcggcctctgcccagcccagatcactcccaagggcattaagtatctgtctgccctcttcgtcctctatgcttcccaggaatggggtgttccttctcctcacgaggtcgcttggttctttgacctgaagtctacccctaagcaaggcaggtccgggtatttttacttctctcagccaggcttcaagtggttgagcgggacggacaacaaggccatcagcaaaatagggcattttgttgatgagtacttcatggtgaaggatccgaacatcacccggactcggtttcagcaaattccgacatatcaccctcctcccctcactcttacccttagggatagggcttagaagcttgcccggttgccaacggaagacagggatattatctagttgacctccgaagcaaatctggtgcagtacgggct

SEQ ID NO: 252956 - DNA, 1101 bp, Cannabis indica
gagtttggggttgagttcgggttggagttcgagtccttgtctgagttttggttcgggtccagatttcagtctagggtcagatcaggctccgggtgtgggttcgcctcctgggtcttggtctaggttgggtccgagtcccaagttccaataccgatctgagtatagattcagttctgggtctaagtcctttgttttgatttttctctgggttcgagtttgggtccgtctccaagtctagctttcgctctgattctaggtgtgggtttgagttcgagtccgagtctgtgtccgggtatgtgtcctggtctggaccccaatctatgtctaggttcgagtctaggtccaagttcgggtcccgagtgcgggtccaagtttgggtctgggtcaggatcttagtctagatctaggtccagcatttcgatcccagtcttggtcttggtccgagtccaggttcgtatctggatccctatgtaggtccaattctttgtttggaacgggtcccaaatttaggtccaggtccgggtctcagtcccggtctgggtacaagaccgtgtccgggcctgagttccgttctagttctgggtccgggtcctggtcacggtcgtagtcttgttctagggtcttggttcggcgatttttgttaggttctaattttgggtcccaggtctaggtctgggttcgggtttggctcttcctcttggttcttgtcctagtatgagtcccaaatctaggaaccgacttctggtctgttgcaggcacctttacccgaatcctgagtgaagatctggatcactgtcacgggtctcggtatggttcttgttcaggtcccaggtccattttctgagttcgggttcgggatcgagactggggtgcggttctaggtcccgacacctgttttgcgtccttagtcaggttccatgattaggtatgagttcaggtttggttcgggtcctaagtttaggtttgcgttgggatctgggtccggctcccaattcgggtctaggtctaattgtgagtccgggtcctggttcggttacggttctgaatctaggtccaatttcagttatgaatccaagtccaagtcctagttccagtcccgat

SEQ ID NO: 252957 - DNA, 677 bp, Cannabis indica
ccctgctagcaaatgctactatcacttcgatgtctccttcatcccaccagccaacaacaacaatcaaaatcaatcctataacagcagtactcagtcacaaggcaacaatcaacaagcctttgtagctaaatctagccagcacactcgtaccgatgatacaaattggtatgtggatagtggcgccacaaaccatatcactgacaccaccaacaacatacaagcactggctgaatacaatggtaagactcgcatcacagtaggtaatggacaatctcttgccatctcacacattggtaactctgtcattaattcaaatagcaaggctgttaagttgaacaacatcttatgtgtacccaacattgcaaaaaacctcttgagtgtatctcaacttactagagataataatgcttatgccaaatttgatgctaactcgtgtgttttgaaggacatggattcgaggaaggttctttttcaagggaagcttagcaacggcctttatcaactcacaacaccagtaccacgatctgcaagtcacaagttcactcaacaaccagtcccaaagtcacctaacacatgtcctagtcttaggtctaatgagtcttgtttttttttatttccactagtgaatcaagtttgtggcatcataggctaggccatccttcctctaatgtactcaa

SEQ ID NO: 252958 - DNA, 1061 bp, Cannabis indica
tttttttagtgacataagtacccaatgtttattaaactgtaattttcttccagttttatcagtagactctgttattattttaaacatgacacatataaaacccaaattttagattatttaatctgaacgtaaaatatgtagtatcaattacttcgaaatctttttttaaatacgtagacccaagtcaacttgtaattattattattattatttgtttggaaaaaatattaaattttgagaaaatgtaaacaggaattgttgcaaataatggtactggagaggtttcagtagaccaatatcaccgttacaaagtaagtctacattttctttttggattttaattttattttagaggaattgttgtgattgggaatttaaatttagacaattataattgaaattattattttagtgatattttataataattattaaattaaattttatgaaacttaatatttaattatgataccagggtgatgttttgtaatattttcacctaatattttattgaaaaaaaaacacctaaattggtaaaatagtctaagatttgacatattcctagtgatttacacaattattattttgctaacaaatgtttagttaattagtagtacttattgtttgtcaatttagttcatgttatattaagtgttaaatttaatttaaattttatcatatgtcaaatataataatattttttaaaaaaattatgttaaccccgtgtttcactttgtttcggctgttactttactttgattctcacattagtatgatattgtctgctttagtgtaaaccctcacagttttatttttggataccttccaaaaagacctcatattaataaagtaggtagaacacttatatccaaaataactcttacacattcttacaatctgagacttgggtttgggttgatcttgataccccaacacactattttctagcacttattaaaaatttgtttgttttttgcaggaagatatcgacattatgaaaaaactaaaattttgaatgcttatcgatttcgtatttcatggtctcgtatttttccaggtat

SEQ ID NO: 252959 - DNA, 643 bp, Cannabis indica
aaaatcattgaaattagtggttcgttttaggaatagctaccatcttcttgataaaattcctcattctgctatgaagattatcttaataaaacaagcacataccccttcctccattgcatttgcttttctagttcagagatacagtacagtaaatgagcgaaaataagtagtaatgttatttaaactctttcacacacttctgattttgaggaaatgcagcagagaacatactgcattatacattaaattgatatgagattattaaccaaccctttatcatgtcatgcttctttcccgtctcatcgtatctctggctttcagaagcagagaaaatgtggagtttccactatttattgtgccttttgctttgttaggccacataaccacaacaataacaatgatggagggaaagactaaccaatgctgtttttttgataccactctctctttaaccctaagatagggttttgagacaaaccaacttgaatttaaaactactcaatagttttaaattttactgaaagcttaggttgacagaattgatcccaagttttaaggccaaaatctatccttttcaacaaaaactttcttactagatcattcaattctggacagatggccaaaggtgttggaaattatttta

SEQ ID NO: 252960 - DNA, 1390 bp, Cannabis indica
aaagcattaaaatattaaaattttcattgggttttccttgacaggcaaactaaagcccactactttcacttagccaacattaaaatattaaaaacctaatcaaacatagtaaactttcatattctcattctcacttctcccattaccgcataccaaacagcccttaagtactccacttctccatagctctttatatcatgtgatgaagtcatgcatgcttgatgcattaattgcaatatatatcacttaagaaattttgttttgtcctatgcacaaagaaagaaataagcaaataaatgtatatcatcttttccttattcctattccaatcacaacatgccacatggaaggtcttatgtcttcatctctccaaaagccatgcctagcctggcattgaaaaaaaaaatagaggaattaccccatatactatttttttaaatttacggtttggatttctaaagtggttgcagcgttagttgcaatatgagtttttgtacgattttttgttgcaatttaagttgcagcgctagttgcaataggggttcctatgtagaattccgtaaaaatacaaaaaaaaaaaactgttttgaagtgtaaaattgagaaaacccaaaaaaatatcatcttccaacaacatagttaataatgaattagattttatttttaatattatttttttattattcctaagaccttagtttatttctattttatttttttagttcttttgagattctataaataatagctcattttagttgtgaaagataacttaaacagtaatttttagtgtagaaaaactaaaacaaattttttcttctcatattttcttcttagaaatttcatgagaatgattagcataattgtctaatcttctttggaaggttagagatgattccatatgtaaattgaggttattttgtatctttaattcacttgttgtaatatttatttgagttatacaaattcttattctacttttatttttatgctctttatctatctatactattatatactaaatgtataaataaacttagtcacgttctttttatatgtgataatagtaatagtggtatttctcttgttctatcttttatgatcatttttatttacttgttgttaaatgatatatggatttagtcatgttctctctatgtgtttaaaaattaataaaatatatttcaatgttcatttcctttactatcaatcatctctatatctttgtcattatttttactaaaaatatataaaattagtcatgttcttcttcctatgtattactatttagtaaaaaataatattatatttaatttttatgttttaatctttttattgtcattattgcttgatgtataatgttatttctaagttctacataagattaaat

SEQ ID NO: 252961 - DNA, 582 bp, Cannabis indica
cagcaaatcaagcatcaagaaacaaaaaaccaagaccaatattaagcaacagccttattaagcaacaactccaatattatgttctttgctgctaatgaatgttatattcaggaaccttctcagatctcgaaaattgggattgttaaaagatttggtagactttactacctgcaacaagaagatgtttcagcttccaattctaatctttcttgtaatatacaaatagacaaacaccaatggcacaatcgccttggtcatccatctgtaatgatttcaaataagatcaataaacatcttaattttcctcataatatttcttctaattttcattgtccaatatgtcatttggccaaataaaagaaattaccttttcaatcacaaaataatttttctaaagcaaattttgatcttattcatctcgacatatgggggccatatccaacaccatctatcgaaggtgataaatattttttaactatagtggatgaccactcacggttcacttggatctacttactaagagccaaatatgaagcaccacaaataatccaaaaatttcttcatgtatgttcacactcaata

SEQ ID NO: 252962 - DNA, 870 bp, Cannabis indica
tgtatggagtagtacaagtgattttgatgatcatgtccatttttgcatagagaaggagagacaagctcttctcagcttgaagaaaggctttgttgatgatggcaatcgtctatcctcatggacaagtaccaggcgagattgttgtgcatggagaggtatcaggtgtgataactcaactcatcatcgtattattagtcttgatcttcattctgaccgtgatgttccaaaatcactttatttgggtggtgaaattggtccttctttggttgagttgcaacatttgaggtactttgattttcgtcacaataattttattaaaattcctaagtttattggttctttaagtagactcacatatctcaactttgaagacaatcctatcatgttcattccttattctgagcttaggaacctcacaaggttgcaagttctcaaactagatggtacttataacattagtactaatcttgaatggatttctcatctctcttctcttagaatcttaaagttgagttacatcaacataacgaattcgaaatccacagattggtttcacttgattaaaagtgcacaatctttatcaagtttagagttatgtggatgtacacttcaaccaatagatatcttcaccaaaaaaaattcttcaaactctctcaccaatcttgatatttgggagagtaccatatctcccaaaacacttccttggttgctaaatatgagtaccaatctagtgaatctcacctttacagataatgaaataaatggtcctcttccaaattcttttggaaacatgagatctcttgcgagcattattttggctggaaatggattagaaggtgaaatacctaaatcattggggaatctttgtaa

SEQ ID NO: 252963 - DNA, 597 bp, Cannabis indica
tttgaaaagtagttgagatattctctcaagtagttgagagattccctcaatcggttataagatataaacaattataaccaaatccagttatattatttattcaaataatttaatatgatttgataaataatttaaatttaaataattaattaaataaaatctttattaggtttatttaaatataccgtataacaaatttatatatagtttttgatatagaatttttcaagtaacctttttgaaagcctataatgtattttttttttctctctatcatacaagaaatagttcttgcttatgtgttgagatttaataaagaactgtacatacactattgttctactagcccacattagtccttgtgtatgatggaaggtctgtaagatcaaggtgtgagttttatcattaccgtttgaaggatgcaacatacgaaaagaatcaagaatacctcgataggctttgagaggtaaatgttcttttcatcctttttacattcagtttaatatatatacatatagtgatcttggacatatggtgcaatgataatcaaaaagaactcttccaatgcgtacctgatttagtaccataaaactaata

SEQ ID NO: 252964 - DNA, 880 bp, Cannabis indica
gggcacaaaacccaacagatcttgggtgaaggtgatgggaagattcatcatcctaggatgttgtgctagagactgcaccaacgcacacatttttgtgatttaggagctagaggttgacctactccctccaaaggatttatggcattttgttgtccagaacgatcatatgcctgtggaccaccctctgtatgggataaatgattggagtctagacccattgtcctggatgtaccactctgaccaaagtctcgatctcttatttcagagaatcacactcattagtggtgtggcctttttctccacaatactcacattccttgttctggccacgcctattccttcctctgtgcaacatttacgaaggctttctacagtggaccatatcgtaggttgctctgtagacattttctcgtgcgtctaccaaaccagtatactcagtatatttgggttcatattctttccttggcttttttgaagaatcattacggttgttgcctttaccccttctattgttctgagtatggctcacatttgattatggatccaggagccacactacacgaagtctgtgtcactccgtacccgaaaaaatgggtctatgttggtgcgagactggaagcagctagcggatccgtcgtagaaggaactagagctcgagggactctaaaggcttgtatataagcatccctaaagtgaataatgccttgggcttttgagataaatacagtcaatgtttcagctctctttctttgcatctgtccccgtagcagagaaccaacatctagtccagactgaagggccatcaacttcatgtcatcactgacctttgttttggctgcagcctccatcatcctcttgataaaagccttcaagctttcat

SEQ ID NO: 252965 - DNA, 789 bp, Cannabis indica
tcactgcagtgagcagctatccaaaaacaaaaacatgaatgtccatttataatggtactttttctttattatcgtatttacaaacacacggtaataattggtagttgaaaaggaaaagaaacatagaactgtgagtgaaacacgcacaaatcatgtctttaaattccaattcccaaataaacaatatagccataacataaacaggagaatgagatttaaggataccttcacagtttcatcacccgaatatgcctctgcaatgtcacataattttccggtgatatacgcagcatcatacttcccatcagcagttccatattcccccaatacccaacaaatgacctacaacaagaaccacaatcttttattatactttgtcgaactatttcaggcttgtcattttgttgacaagtggaaaaagtagaacaaatatacctgaagaaacactgatggcaatttgggctcattaagaatatacaaatacgactgtacctgcatgattacaaccaaacttatataaataaataattaaaactagagagcattaatgacaagtttgcacaaggataacagggctataagtaatgagtgttggggtggcagttaatgctttgaaaaatgtaaatgagaccacagctacaaatagatagaaaatgtataaccaatcaaaaaagcctcacacatcatgtggactcttcctcagcaaacacacgataatcccagtgaacaaagcattttacaatttagctccagcatatccaatttcaggtataagaacaatgacaataa

SEQ ID NO: 252966 - DNA, 1687 bp, Cannabis indica
aaaaacttaaaacaaaaaaataccatataaattggtcaaacttaaatgtgccatatttatcataagaacttttaaaatttcatactaagtgtaatttcctctaatccactccaatttgcattgccttgctcatagtacattcgataggccgattttatttattagatctaatctaattcgcataatagttcaaatgcaattcaatttgcacagattaattaattggttacattttattattatattttacataattagcaataaaataaaataaattattgttattttatgtctcaaataacaaattaaaataaataaaataacaaattcaaagaaaaaaaattatgtatttatgtacaaaaaaattattcataagaatagaaatataattgtattatatgtattaaatttttatattattattttttttactaaaatattaattgtatatataattttgaaaaattctataatacactcccttaaaaggaatgcattaatacatctttaaatgttatagtatccgaactaatttttttctcacagtcatataaattatagttatttagaaaattctgcaaaattttaagaaatttgaaaaagtttaacacgccgaaaaattgctttcaaatagtgtgttgcgctcgtgactactttattttatacgcatgtaaaatagactgtatgaatataattttccatgttgtaaattattccgaatttttcaaaattttgtaaggtatctaaaatagttataacatacgtgaatataaaaaaataaactgaaaaattcttctagatggtaaaataagtagagagtgcattagttcatctattttataggagtccattgtagaatatcctataattttttaattatctactttgcaaattgaattaaatcattcagattgaattaaatgagctattttatgaacacctgaattttgtttttaagagaaataatcacccaattaatgaagtcaacctaaaaactaatgaacaaaaatgaactacacctacgtgtaacgtgtcttcatggatccgtcttctcttcattcgggaattttatcgaacacttgggcagctctccttcattttcatcacgaacaaacgtcttagaggacacgtgccacaaacccagattaatcatctgagctcacgtgtctctactctctacacccagtatcttcctttttacaccgccattgctacttcttcatccgccgtagtcatcttcaatccaaatcctagaacaactcacaatgctacgctctaaacatgcccttctgttcccaaaaaccatttgggtcaatctatgtcactacagaagcctccatcggaaagcagacctcgaaaaagtgggtcctttagcttccctcctcaaatcccgctccgtggtccggttccgaggaccagacaccgtcaagttcctccagggactgttgaccaacgatgtacgacgattagatgaacccgcgagtgagaaggattcatcgactctggtcacgcccaatttggctacggtctccgctccacccatgtacgctgcactgctcagtcctcaggggagattcttgtacgacctggttctgtatagaccggcgagagctgatgataagcttaatgaggctagatcaggacccgggtcttacccagatgaggcttttgagctctttgctgatgt

SEQ ID NO: 252967 - DNA, 745 bp, Cannabis indica
ccccagccatttaaagaaaattttagtatttactttaaaacgtgttttggctccaaagttgattcaaagtgtcctaatcttattggttgagacctaggaagacttttacaatatatatagggtttattagagtgaaaatatgatgatcacatattttctctttctctctaaacctctccctctatatctctctttaactttgttacttattctcttcaagaagtttttgacttgcataaacttcacaagacttgtatatccacttctctttcctattaaaaaagcttcaagcatcaatagagatattaagaataaagaatgaagagaaataatatttgtattatatttcttttctatatgtattgtacaacctagagctcatcttatatagagtatttacaaatcaaataaagacaatatatttaatacagaataaggaaaaatcccttaaaatatgaaacaacacaaaattaggaaactaattgatgtgattttatttcccatctgtcaacactccccctcaagctggactatagatattgatgagtccaagcttgttaactaggaaatcaaagactcgttcagataacccttttgtgagaatatcagctagttgttgatctgtatggacatatctaatgctgataatctcttgatcaattttttctttaatgaagtgacgatccacctctacatgcttagttcggtcatgatgtacagggttatgagcaatgctgatggtgga

SEQ ID NO: 252968 - DNA, 719 bp, Cannabis indica
cgatcatgttgtgggtcgagataagcttgtaagtgatgcggacctaacccaactaacatatcttcaagctgttatcaaagagacatttcgtctacacccgtccaccccattatcacttccacgaatggcaagccaggattgccaaataaacggctatcacatccccaagggatcaacccttctagtcaatgtgtgggccatagctcgtgacccagaccaatggactgacccattggagtttaggcccgaaagattcttacctggtggtgaaaaggcccatgtagatattaaaggaactgactttgaagtcataccatttggtgctggacgtagaatctgtgttgggatgaccatgggcttgcgcatggtccagctattgactgcgaccctagtacacgcctttaacatgaagttaccaaatgcgatactccctgacaaattgaacatggatgaagcttatggactcgctttacatagggccgcaccattgataattgaacctcagcccaggctagctcagcacgtctatcgcacctaatcttaaaattaagtgttcaaaataaacccccctttttttttgttattcttattatttaattatggagcaaaatatatgtgtttaaaacactttgttatttcacaatgtaaatagctaaggtttttatatcctttgaccttgacaacaaaaaattatgtcaaagtcattaagagatactagt

SEQ ID NO: 252969 - DNA, 529 bp, Cannabis indica
tgatattgtagaaatttcttgttcaatagaaggtggttgtggctgattccttggcaaatctagaacatgaaattcaggctaattttcagatgattgagtggctggtaactcaccaaaaataggccaacattcaggagcactttacacattacaatgagacctagtttgagacaattgagtggctggtgactcacccaaaacaaccccaattttagaagcattaatcccaatgtgatccacttgttcttcactcaaacaagatcaacttgcatcacctactaaccctttctcaataactaaagtagaacccttttttgtgtaatccaaattactaaagtagcactgaaggactttactatttttaataaattgactaatcttctcaactaaaactttgtcactatcaacacactccaatgtttcattatcccacttaaaataaaaactcatttcaacaagatttgtgtgaccaatatccctagctatcccatgtagcctaaacataaacatggtatcaatatgacaataa

SEQ ID NO: 252970 - DNA, 712 bp, Cannabis indica
tggagtggttgagggggttggtggataaagtctccatgtaactagcatgattgaaccatagtaggccaatagtaatccatcgaatgaacgctgccaaaaagtcaaccaaagcttgtccttttattgctttatgggagacaaagttgatttcaaattctgacaaaatcatggaccatttggcaagtcgtccagacaacacgggcttggataggatatatcttagagggttagcttttgacactaaagtcacagggtgtgagagcaaatataatgtcgtagttttgtgacggtaaaaattaaagctagacacactttctcgattggagggtagttttgttttgcccatactaaagttctacttagatagtaaagagcaacttcttttccctcctcattgttttgcgccagcatgactcccaaggagcggtcgagtgaagggatatataatatcaatggctttcataaggtcggagctctcaacactagtgggtgcaacaagtacttcttaatgttttcaaaagcgttttggcatgcctcatcccaaataaatgggacatttttttgcatcaaccgcgaaaagggttgacatctatcagagaggtttgagatgaatcttcggatatacgcaagtgtttcctgtagaccatgtagttgacgtaagttacgtgggggattcatttgatttttataggtcaatttcaattcctcgatg

SEQ ID NO: 252971 - DNA, 736 bp, Cannabis indica
atatcaattaccttaatttgatagagcaatactatcaattaagtcttcctccctatatctctaaatcagacgcagatttactttatctgattatcaaaagtatgcaattgtaataagataatatgtatttatagaggaggagacttagctacataactctagttgaattgggtctgcttatcaaagacttcaattaactagaaaagtccacacttctgcttcaactaaactttatactgatattaagcctattaattatagatcactaataatatgagttaacacaataaataactatcaaattaacccatactttattagaagcaataaaagttaatgtaaatccaaataaaaagtctaacctcaaatccacacttcactttctttgttttagcaactataaattgaacttaaatatccagcacaaaaaacagcacgaacgagacgcgattaagctcccaaatatgagctaacatagcacaatccttatttgaaatagatcctacacgacactttttagacccataattaagctcatttcaaattatcataagtataaacaaatagctagattacgctataagagaaaaacatatataagtaatattattatattaattaaatatatgaactaaaaatatatttaatttgaatttgttatacataaattaattttgattatataggaatgttattaaacgattctcgatgctatattatatgtaatttaagtatt

SEQ ID NO: 252972 - DNA, 534 bp, Cannabis indica
aatattttctattctgaagagaggcgacgatttcttcgttcaaatccatctccgtgaatggagcttcagagatcagtgatgatgaggctctttctagggtttctgctactgtctttcgcacctatctctattcatggaagattcgtggtggagaagaacagcttgagggtaacatcatcagaccgaatcagcagaacaaatgacagcaccattggaaactttggaatacctcaatatagtggtagcatggctgggaatgttttgtacccaaaagataatcaaaagggttgtaaggagttttctgactttgggatttcgttccaatccaagcctggagctcttccgaccttcgttttgctggatcgtggaggtaaacttctccatttcactctcccaatcccaaaacgatgaatagctacttccaccgactttggcttcttaatagtgtttcgccaaccttgttggaacacaattggaatttctcttggcatgcgctgctttgaaattacacgggctgctttgaaatttctcttg

SEQ ID NO: 252973 - DNA, 1073 bp, Cannabis indica
atttctaactaaaactgttgtgacatttttggcctccaatcgggtctccagggtcgccaaacttgaaaatatttttatttcacaaataactcatattatatccacgtatttcaaataaatccccgtaattaacaaattacgcttatgtatccacttattaagtctccagggtcgcccaacctgaaaatatttttattccacatatagctcatattacattcacacatgctatataaatctccgtaattaacaaattacgattatttacttacttatagcaaaatttaaattttatactgaaatagattagtaagatcataatcccactaattacctgattaactcatagtacaatataaactctaattatttaccattaggcttatcggaaaataaaaaaaatgaatatctgagtgtatatatatgttaagtgcatatgcatgcttatatgttaattacactaccaacacttgtacggttatggtacaaagtgcatttgtatagtgaatattatttaagagtacagtacagtgataccagcataagtacgggaaagtacagggtgtttgtggtatgtcactcattggtactcggggtacgaaacaaaccctaccaacactcgtatagtgtggtacatagtgtatgtggtatagtggctgtaccctagtatggaacgtttttactcatctattaagccttgtaaataggtgtatcgacgcttagatacaagttagtattatatgatatgttatatgcttttcttaccaagtatgtcgactcacagttctgcttccatgtgtaggtaaaggaaaggcgaaaactaaatgggaatgagcctggctgagatgagattgtacatgtcatggcggcgtgacctggagtgtttggtcttgggacatgtggggatattatttggtagtcgttgtgcgatcgattgtgtattttgacatattttgaataaaagtttagaaacgggatcccgatgtttgtaaatgactatgtaaattataaagtttaataattattataaaagttttaatttgacacgtttttcgagaaacatctttgattag

SEQ ID NO: 252974 - DNA, 754 bp, Cannabis indica
gggcataaaacccaacagtcaattcatagatgttggtgattaccaccattgtaataccaagtgtgaataataaagattaaagccaaaggctgttccatccagggagtagacagtttccactgccaagcaaatgattaaacctcgttaaattggtgtgatttgatttctctttttgcatttatatttttattctctcgattagttagttcatgttattgtactaattttaatttttgttgttgatttttttcaggtgattaaaacaccagattctacacttttatttgtcctttttccactagctacttgaacttataatcatgaatgtaacaagctcctcgattaaatatttcctgcttaggaaagtgattcttgctaaaagatactgatcatttatgttgttccagatcatccacgtcgtttttcaaacaattcaaaatcatttaacaagaaattctttaagtctaaatgttgaatttctaaataaaatttcataaaaagagtatgtttcgaaaaaaatttaactctagaacaaccaattgttgagtaagtcacagtcacattgcaatagccacataaaacaagaaggaataggaatgaattctttgttaagcaaattatgagtggtagggataatatgattgtaagatacccaaataaagtgtttaattttgaagggaatctaattaggattccaaaaaaagaccatgaagggagaaataagaagtaaaagctagatggtatgtagatttga

SEQ ID NO: 252975 - DNA, 950 bp, Cannabis indica
cgttgctaaaataattaagcaactgtttataaccgtcagaaaaaattgggtattctcgacgacttagaacactcattacaaaaataggcaacagttttaactaaatatattctcctatactcgactgttttaaaccgtcgggtataatgccccaatttggcccattatttcacatgtacacccacctaataacttcagacctaacttcacacaccaacacaactgcgcctccttcctctctctcgtaccctaacccagatccacgcaaaactaaccccaaaacacaaccaggcctcctccttcacaattatctagctcttgcgtgcctccacaacaaccattctctaacctaaccccaaaaccagcttaccatctctctctctctcctctctctcttatatctcattatctctctatctctctctctcttctttcttcatcgttgttcgtgatcgcatccccagtacttgcttctccatcgttctgatcctccaacaaactatcacggtaaatatctctctctctgtttttttttttctttttcgtagactgaattcattccattttatatagccgtatttcgatattatgtgaattgtgatagtgttttagttggtgtatatactgtttgatataatgtctgtgtgattcgtgaaagaattggttatattaagggccagtgatcacgattctgaagcaacttttctgtagtttaatacctcttgatcatattcattgttcaagttaccttaagagttttctattttaattttctttgtctatcgtttgttgctgtaaatgagttcaatgtttttctttctttttttgtttcacaactctttttatattctttcttttttcaatgtttttcttttttgttataggtttgttttatattgattttgttctattttgcgccattatttatggctttggcgccttacaaggct

SEQ ID NO: 252976 - DNA, 843 bp, Cannabis indica
ttttccatgtctatttttttaaaaccatgtctctaacacttctcttgtattgcagatcccatggctcaatagatgcttgagatgtttgacatggaaaatgcaatggatgcagtagatttagagcttgggctaattgtgcgaatcctgaacgttattgtaacctcaaggggtccattcagtcaatgtaagagaaaaaagaggtgatcctagtggaggaggcagttgttccctttgaaagcaaaacttccaagcgaaagaagtactcctctccaaataaacctagctcattaaagaggtcttgctctaagggctccacgtatagggcttagtctggaggggtttccaacttagggattccttgttaggagactcggatgccagaggtccccgccattccactaatgcatgtccacctaacgatgctcataggaagttgagaaatttaaggcataactttgccttggaggaaatgtcaaaaggagagttgagacttccttactaaccaagtgtttagataggcgtcaagatagcaaactttgcaggcaatactttgggaaggcgtatgatctcaacatagataccatgaccaattggtttaaggattacgtttgtttggacttagctcctttggacactgaaatgaaaagttccttggtggtagagatagttaaattcccgactcagaggtttgtttttgtgctttgtccaacccaatttactaggctgacttaagaaattgactggcttcagtaagattgttaggctatttctagcctatattttggatcaattttatgttcgcttttcgttgttttaggacagaattatgcttgttttctatgt

SEQ ID NO: 252977 - DNA, 879 bp, Cannabis indica
agagtacacaaggatgtcgtcgataaataatatgacacatatattgagaaaatccttgaataccctattcatcatatccataaaggttgccaaagcattggttagtccaaaagacataaaccaaaagttgatagtgcctatacctagtgcaaaaagtagtcttagaatgtccttctctcgaattctcaattgataatagcctggtaggagattaatcttagagaattttcccctaaatctaatcgaacaggtcgtcgatcttagggaaaggataattattcttgatattcaatttgcttagttcccacgagtcaatacacatgcgtagggattcatctttcttcttaacaaacaacatgggagctccccagtgtgacacactaggtcatgaaaaccctaggtcaagcaacctctaaagttgaatcttcaattctttaagctctaccggagcaattttgtaaggtgctttagaaactcgttctgctctatgtcctaaattgataatgaaatctatttcccgttgcggtggtaaactcagaagtttgtcgagaaatacatctaaaaattcttgaaccactctgatgtcctctggctgaattgatttaggtcgtgtgttatcaaataccactgccaaaaatcctaggcatcgctcttgtaccaaatcaatagcttttaatattgagactacaggagtctgggatccttgaaccgatcccataaaaacaaatggttccttaccctcgggttgaaagatcaccatcttccacttacaggcaatactagcagaatacttggacaagaaatccattccaagtataatatcaaaatctgctaagtcaaattccactaaatcaggactaatttctctatcctcaattt

SEQ ID NO: 252978 - DNA, 769 bp, Cannabis indica
caaataatcaggatcagactaatgttcggaatttggggctaggaccaagccaaggtctagacggatgctagggtcgattcgcactatttgttatagtgcattcaatttacattaagtgcggatttcatatttagatccaaactagttcgcacaataatttaaatttaatcgaatctaatttataaaagtgcagattgaattaattatataaattttttgaattaagttttatttattacaatatataatttagaattcgaatttaagactttcaatacacacagttttctatagccatttaaactagcctcaagtcattttcaattaattatattagattagtcactttttgttgttgtattattttttgagcattgctaattgttatagtggtgcctaataccttctcgacatgctgcgttgtaattaactaatgatactctctaaaagctattatattaaattatataaaactctaggtgaatgctaagcagtactagtgtcattcttttattagtattccacatagctagttttgcaaatttcacattttttcccttttatttggactatactttgactagtgccctgtgctcttctgatcattcctacctcactttggtgtgagtctgagtctgaagcttaaagctttgagcttattcccttctctctctttccaaatgggtttcttcttcattggaggagtttatctttataatggttcaacttcgatttcccttcctcctttatataatatatatattaaaaa

SEQ ID NO: 252979 - DNA, 954 bp, Cannabis indica
atgaaaattgagtgagttatggccgctttactgaaggcatttcaagttccagcaccaaggttgacattccagcacccaaatggacatctgatgtaaacttggacgttgtaaaagtggagaaacatccaaaagaagtcctttgagatgcctaagtaatggtttgacaccccttagttcttttaaatgttttggtgaaactggtcacacattctcggaaataatgttgttttgcagaaacggaagactcgaaatattcagttttcagatgagctaaaattgaagttatgaacttgattgatttgatttcatggatcattgcacttgtgaaaaacttgacgaactgtcgaaacgacatcagatttgaataaacagaacccatcaaacttgccaaatactgacttgggagctgaggcctttaaaccaagctctcgagactttatttttaatactttcaaggcttccaaggcttttgaacttaaggacagggtctcttctcccatctttgatcatgctagatttagtcgtcgtactagattcagcatttaagcaattgaaggcagcatcccaggttgattgtcaacctgagcgctgggcccaacaacaagttaacctgcgtactaggccctatttatagggactcgtatttttctccccgagtttacttgactcttcattatttttgatgacgatgaagattcctagagcaatttttgctgaactgaattagaaatagcctaggttgacaaaatatcaccctgggcgcaggtcccagtcccaagtgtcaacttggacgctgggtccttctttttcacatttgaaagtttcgtttggtccccaaaaaatagttgattctcaatattttgtaaagacaaagatgatgatcaaaagagctctgggaaaactcaattttttgtggcccatgttgataaattgtcaacctgggtgtaggggcca

SEQ ID NO: 252980 - DNA, 1468 bp, Cannabis indica
acaaacaaaactcactttcagctaaaaaataatcaaaaagaagctccaaacaggctccaaaaacttttccagttctctttcattgttggaagatcatcatcaatgtattttagtgcttttattatcattttcgtgttcttattagttctttttagggtttttaaactcatttgctatatctcagagggtatcgccaccggagaagctcgcgaagaaagagatcgaagaagatttcatctctctattaggtcacaaacctcctcgccgacctaagaagcgaccaaggaacgttcaaagcatgtaagtcaaatgttctgaacgtgatttgcctacataataattgtttagttttctagtctcaaaattgtagattttggagggaatctagttgaaaaaattaagtattttgatgtcatacttggtgtgtatttcatagtggaggaactggttcgattccgccaggtcggaattctttttttatttatttataaatttagattctgcaaatacgacttcttcttcttcctctttgaactagaattcttcttcttcttcttcttcttttgtgccctataaatcagtcttccgtaattgcgttttttcaacaaagaaaaagaaaaagaaaaattaccctacatttccaattgtacatttcatgtaatggccttttgatttttgtttattcattatgttgtgttgctgcttgtttctatgtttgttgttttagtatgaatattgtaatttgttgttggtttgtatatgaagtgcaaagaaatccaaattttgtttaatagtttggtgattgagttttggggatttgtattgatatttgatttaattgagattttatatctatatggaatttggtttgttacagataatgaatgaatactaaatagaatttggtttgctgcatgaattattgcacgagtaaattgctttcaagtgtctttactattcattttatgatacaacgagtagctatgatcaacttgaaatgatattctagtattgctcaaatagtctctagagcttcaattttcaattttgtgcttttgagctgtaaaagtgagagttatggcagtgtagtgtgctttactaaaatggcttctcggtatcacttcatttactaaaatgaattctcattagtatatataagaacaagctttgattctaataatcctgttcttcttgcctctaataagttgattcagagcctttactagagttggaaaaaaattgaattctagaaataatttgagaatttcaagcctcctattaatcctctctttttaagctataactagtttttgaacgtgcgttgcacgtgtaatatatagagttgaagattgtaatgtaaaaaaaaaaaaaaaatacatatgttattattatgaagataaattatttaaaaaaatatataaagatcgtaggtattatcaaaaattaattgaaagtaaattatgaatat

SEQ ID NO: 252981 - DNA, 713 bp, Cannabis indica
ttctcacttgtcccttgctccttaatgttgagggaacccgtttgaacaaatttcctttcatagtttgtcaggagtgacctgtgccattctcttatggcataggtcatttaaggtgactcctgggccaaaaatgatatttatcacttgtcccttgctccttgatgttgagggaacccgttcgaacaaatctccttccatggtttgtgaggagtaacctgtgccattctactatggcagtggtctccaaaactagagagcaccgccattttcttgtggcactagtcacttattcctctttccttgtggttttagtgctattttaactttatgcataaacccaagtcattttcatgtccaaacaagtcaagtccttattggtttccttggcggattgaggtctctagggtgaaaacgcttgtgcgggtccatgaaccctagtttgggcacatttggtgtgtgagccccagcgccaaatggttggtttacgttttcgagccctctagaagtgccatgggccctcaagaaggatgtcttgccttatttgacatttatgagtcttggtcaaagttgcaaggttgactttagtgtcttcaaggtactcttagcatgtgggccctggtgcaagagtagccattttgtttttttgcgaaaattaggtataaaactatatttttaaaaaataatgatagtgatacaatattcttaatttgtag

SEQ ID NO: 252982 - DNA, 563 bp, Cannabis indica
ataactaatcagattgtaaagggttctatttagggcacaaaacccaacagtaaccctacaggtcactgatgttcagccttaacttgctgacacgtaaggcaccttgcaacatactcagcaatgtcattcttcatgcctagccaccaaaacctggttttcaagtcttgatacatcttcgttgaccatggatgaactgagtaaggagccgtatgagactcattcatgatctctattttgatactctaatccataggcatacaaacacgattcccaaatcgtaacattcccgtttcatccactgaaaaatcactagcttttccagccgaaaccctatttcgggtttttaccaactctggatcttgcatttgtacttctttaattcaatcaaaaagagtggatttcacggtaatattagccaactgccccacaatcaactcaatcttagctcgggtcatctcatttgcttgttgttgggagatttgcttctcagtacttaactcactctaacccttcctactcaaggcatcaacaactacgttggccttaccagggtgataaaggat

SEQ ID NO: 252983 - DNA, 505 bp, Cannabis indica
tagcaaagagaaaaaacttctctagtttcttatgtgcactctctttccaaatagtataaaacctatggtatttattaagatttgatcgaagtcttaatatgccttacatcaaatttatatacaaactccaatttgagagcaacacatgggtgcgtgggaaggaaaattattatataatctttaaattaatttttggaatgataccaagaatttcttttctatttagatagggaatttgatattgttcgtacatattacatctatatatacatacctatatatttataggtatattaatttgtaagagtcaaaagctgatgagaccgtaagacgtcattattattagaataattatcaattgatcaaaaattttgtatagttcaaattatcttttggtcaacattttatttcagttcaattcttttcttacaatcatggctaatttgagcttttctttattatttcttttacttcttaagatggaacaaaccaatatgcattagaa

SEQ ID NO: 252984 - DNA, 613 bp, Cannabis indica
attatggctcggacagtaagccgaatgtgggtggttgatcctgttcttgttaaagctattggggttaaggaggtgttaagttggttgaaagaaaccgggcgatgtggtgtggtggtggagtcggacagtgtgatcacgatctaagctatccgaagttcgttagatatgacttctgtttttggacttttcatatcagagtgcagacagattttttctagtttaaatgatatctttttgatttttgtcaagcaatttactattcgtgttgctcaatattgggctagaacttcgtagttaaatgctagttgtacctattcacattctacgatttcaagtagtttacttgatattcttttaaatgaattgagttaataaaattgcatttctattaataataatagaggaaattcttattattttcctctttttgctattgatcaaaattctccccacaaaaattgtatgatcttttcgtagcccaataaaggcccatcctcagtcttacaaaaggatgaggcccaatcacattacctccacgatagagacgtttacaattacatcctatggtacactttgattttctttataaaagttttaacacaaattctttaaa

SEQ ID NO: 252985 - DNA, 741 bp, Cannabis indica
ttatgtgttagggcatccatccaacacaaagctttttgttcaggtcagccaactcacgtgaattcaaaaatgtggtaacatcagtataatggttgcatgtatgtatacatgtttagcgtacatgttagttgtcattaggataggcaactctatagccatcaaattagcatatcagggcatcggtgatgtgtacataaacttcactgagatgccaacagatatatgctaggctatcagatagtatgaactaagtgctaccacatttgtacgagtagagtactgagtataggctggagtagcaattagtcataatttgtcgagaacgtttctgactcaattagggttatggttggatgtatgggcgcctaattataatccaggttattgatatcatattatttatacttttcttactgagtttgtcgactcacagatattttttgcacgtgttggttagggaaaggccaaggttgagcagttgtgagagcaagcatatgaatattgtacatgtcagggtggttaggcctggaacgtacggtctttgggatagctgggcttattatgtatagtcgctaggcaacaaacttttgtaatatgcacattgaaacttttgtaaatattttgtgaaatgggatcccggttcaatataagtatgttattttattaattacaaatagttaaataaagttttaatcattcacgattttcaataaactcgttgattagcaatgagttgcacag

SEQ ID NO: 252986 - DNA, 502 bp, Cannabis indica
tcttgtccaagattgacaaaaatcgcctactttctttttttgcctaatattaaaatttgtcatgttaaacggtctactaacaaagccgaacattgtctggctcgtggctctatattagtctgaccgtatcttctttgggagcaatgattcttctgctcttcacactattagcgtatttagctatttaataaaatatctacttttataaaaaaaaaaaacatattattatatgcttctttaaagtatatgtaaatataaataatgattatttaatgttatgaataatttcttttttattggatgcaaattctttgcccaaaaatgttctcatttcatgtttagtcatacccataaagtacttttaaagaaaaattctattatgatatatacccaaaaaaaaaatgcactattaatgttgtaaataccaaatgtgttacatgacaatgtatactgtattagcaatatatcttttatcagttttttttaaaaaattatgagtaat

SEQ ID NO: 252987 - DNA, 1851 bp, Cannabis indica
gagtcaaaaattctttttgacactttgggttaaaagaatatatatgcatgcaccaaacctatgttttgcatggagagtgagagtgactcgtccgtacgcatatcatatgtggaccattctcaagaatcatgtggagtttaagttgttaattatatataaatgaccctatacaaatatgaaataataataataataataaaaggggtagttagaatcagtttcaagaatcaaaagaaaaataataaaatgccatatcatgatcatctttgcatatgttccaaaatcccaatatatcttgaccataaaactacatcgatccaacgatcatggttggcaagacggtgcgttataaactcattcatcattatactaatttatatatatataagactaataaagtctctatagctttatcttaaaaagatactaggaggatttacacatacaaagctataagttttctttttaataaaatgtcataattgacggaaagctgtatatatggaagaatcataatcttctaatcattaaaaatacccatcgtttgcatacatttgtggaattgttttgctatttaaacttataaaataatggtttgaaaaagatatatagtaaattttttgaataaatgagtcaaaaaggatgggaaacgaagacatatatgcacataatcaattcaccttaagaacccctttaatgaaagcaaatacaaaagatcgaagaggtatatattcttccctctcactcatggaattgttgatctagtacccttgttaggggtagtgtaccatgcatgaagattaaagagttggacccaataagattttcattgatgaccacaacaattaatctaccaacactttgaattcttatttcttcaacatgttacatacatatgcttttatataagtttgaaaaatttagcagggagaagcatgaaccttatctaacaatatataataatctgggtgtacagtactattttggtcctctatttcaactttgtctatatatgtgcttctatgatcttattctctcttcgagcccgtgttgccaatttttcgattttgggctcggtgctaggctaggttgtaattgggcctttttttttgggacaatttacattgcccaccctttttcttattattatttcaaaactgacgtaggggtaagttgaaaaataccccttttattaatcaattaatcaaatttgcctctaattttatatttatttgaaatatacctctttttatatgtattgtacccaaaataccctgacataagagagccacatggagagtatcttgaagtgacagggacgaaattggtacaatatttaaaaaaagaagtaaaaataatagactttaaaaaagatggtaaaaataaaaaaggacaatataaaaagggtatagagtctaattttctcaatattataatagcagtttttacaccacttactcaaaatttttagagtgttttcagtttttaaaattgtatttttaaaagtgagaatagaaaatagtttttgtcattttaaaaattttatggtgtttggcacaattttttaaaattatttttaaatttttttcttaattaaaaaaatcaatattttaacactatactatgacatgaacccatccaggttcgggttcggggtatgggttccaagtctaggatttgagtatgtgacaaaaatataaaaatataatatgtcagacaaaaaaaaaacaaatatttaaaaaaatttgaaaaacaaacattttaaaatgttttactgttttaaaaaacttaagtgtttaaaaaaatttttaatctaaacaactactatagtttttaaaaactagtttttac

SEQ ID NO: 252988 - DNA, 600 bp, Cannabis indica
ccacttccaaaatactccaaatgaaatgtgatttgtgttttttttccctattttattattattaattaatatatttctttgcatcgcaaaatgaaatttgttaaaaggaaaaaagaaaaaaaaatcgtaaaatgaagtatttccttttgatctgccaacagcaaacaatatcctaggaaaaaataacactcgagattgagttataacttcaggctaatataaaaagttgagtttgaatttaaaattatacattaatataatatataaacatttaaatcaaaaaatatataatatatacagtccttaatccaatacaatgttatggaggggtgtttggaatgggttaatactaacaatggaaaggtaatgtgaaatattaccttgtttgttttgagtctttagccttagaatgttattcccttagtattataactacccttgaggagggtaatgttgatactttaaaaaaaggtaggattgaatcattaccttctattatattaatttgaatagaatttttgaattaattaataaatttaaataccaataatattatcatttattataaataaaatattacagtatatattaagtttgtga

SEQ ID NO: 252989 - DNA, 752 bp, Cannabis indica
attcttagttacattatcaacttccagaggttctcccaactggcctacgattttgaacagataagtctttccccagtacttgatgtccaggccttttaattgtacccaagtaggaacattagtaacctcttccttagtgaaatcttcaataggattccagggcttcataaccattggtttgcgatcaaaaaacacgtacccttgttgcagcactttgtccctttgctcgagattctagaacctgataatgaatatgcccttggccagtagtccaaccttcaccacttcatccttccagagtctcctcacgaatccttccagaatgcttattggagggttagctccaataacatagcagaccaaggatggcttccagtagtttacttcatctgccatattatcaaaatcaatcttaattgtcttcttaacctctgccttccctatatccagacctgatttatcgaacgatgactccaaattcctcacaatgctagatctgagaatcgggggagaaatcctcttcccagtgctaacatcctgagtagctcaatttgcaatcgtgagccagtccgaaaaatcctgtcaattctcactctgtctattgataagtgcctctgattcctccggtgagaaaattttctcaatgtactgttccattggtttttggcactgttcgattgatttgtcagcttcctcaacttctaattctgtatccccagtacatcatccatagatctagtcttaatgactct

SEQ ID NO: 252990 - DNA, 1630 bp, Cannabis indica
gatctccctcccctcctgtgttattctcattcccaatctctgttattcccatctcaatcccaacttcttcaacattccaaggttcttcactaagggactcagacatattcctcactgttgttctctctgattccttcattggagtgacttttttgcctttattgactttctgaaaaccctgtccatctatctggttcccttcatccttgttagcttttttggcatccatacctgttttccagcttctttcttttcttcttttttcctgcactctgatgttttatgtccaattccagaacaattatagcatactaagggcagccattcatacttaacatctaattccacttcatgatcaaactcatcaataaaggaaattttctcaggaaattcttgtgctaagcttacctgaataagaattctggggtattgcaatctatcccgattcttagttacattatcaacttgcaagggttctcccaactggcctacgattttgaacagagaagtctctccccagtacttgatgtcaaggccttttaattgtaccaaagtaggaacattagtaacctcttccttagtgaaatcttcaataggattccagggcttcataaccattggtttgcgatcgaaaaacacgtacccttgttgcagcactttgtccctttgctcgagattctagaacctgataacgaatatgcccttggccagtagtccaaccttcaccacttcatccttccagagtctcctcacgaatccttccagaatgcttattgaagggttagctccaataacatagcagaccaaggatggctgccagtaatttacttcatctgcaatatcatcaaaatcaatcttaattgtcttcttaacctctgccttccctgtatccagacctaatttatcaaacgatgactccaaattcctcacaatgctagatctgagaatcgggggagaaatcctcttcccagtgctaacatcctgagtagctcgatttgcaatcgtgagccagtccgaaaaatcctgtcgattctcactctgtctaatgataagtgcctccgattcctccggtgagaaaattttctcaatgtactgttccattggtttttggcactgttcgattgattcgtcagcttcctcaacttctaattcttgtatccccagtacagcatccatagatctagtcttaatgactctatccgaggatgagggaccagttttcttgcccttcgatttccctttcccggccatcttcgctctttttgccatagctccggtgaaacaccgaaagagagagaaggagcgggaaaaggttgctaatcaattttaagttaacgtaaattaacttaacttcttatatatattaagttataagtgaaacagaacagaacaaacgaatgaaaccctcgttctccctctttcgataaaaccttctcctcctatatctattttcttcgaatttcaatccaaacttagcgatctaagctccggtagtagcaggatagcaaatccttgaaaaggaaagctaaagtatggtttaatttcgtttaagtttaaaacgattagtttttataggggctttatgatttaaaaggttatggagattctgacttcgtagaattgttctttg

SEQ ID NO: 252991 - DNA, 851 bp, Cannabis indica
ttattttggagtagaatttttttgtaaagtattgagtaagttttatactagatactgtgttaagtttttcacagttgttctacgattattttttaattgttctactattgttttaattgtcctattttgttgttttacattgttttataaaaaagtgacattaaaattgtaaactcttgcttaaaattgtaattcccaattttaattatgtcttgataatatctccccttggcttacgggcctgcgcccaggcctttaattttgggcttgtcaaatgttctctacaatacatggcacacaaactaacaatagttgatgacgtttagaaactccaagtcagtcaggcaaaactagaaataaaatcgggcgattatatattttatatttactggacttcaaaatcttaataaaatttattgaattagatataataaaattaaaaaatagttcataaataacttaaatgactaagtttaaaattacttaccagtgcaccaaataactttatttagtataaatagaccataaaggtatttatacaaaggcccaattttatttttcttagatttaggcccttagtaccggtttaatttcaagtgaagcagctgccctactgactccttgcagcttcgcccaacacatgcatgtaaatatattggtaccatctagcaaatgttaaaaaactataaaataaaaaaccatatttcatttagtctttttgttttatttaagcgtttatatattacaaccatattttactttggaactcgaatccaagacctccaacacacacacccactattttatttagtcatagactaagatgaaggtgacgattacagctacccgaa

SEQ ID NO: 252992 - DNA, 943 bp, Cannabis indica
agctcatgattttctttttcaaagccccaccagatatcccttaccatgccattaattttagctaccattcgattagagagtttcatggtttgcatagaatacataagcatggcaaaaaccacagacttgataagagtagcctgactagccttagaaagagttctcactcttcaccgagttttgaagaaataccaaatcttaatctcatgataaaattttggtaattagattaatattacgtgtgtgattgaaatactaaaaaaaaaaaaaaatacttgtgtgtgcattttgtttcacattgttcatggtaaaatgattataagatttatattacactcataattaaaaggcctaaaccccatttaagtcttgtcttttgacatggtgaatatgttctaaacagtgtttgtcttgttatcgttatcttaatcatggcgtctagcagttactcagtgacggaaattgaagaactctatggaaacatagagattgaaggggaagatgatcgcatcactacaattgagtttgaagaaccagcaacggagattacacagattgatctatgcattgttggccgctttctcacagccagagcaatagattatgatgttatgcggcatatgatggcatccctttggcaaccgggcaggggtatgtacgtgaaacaattagagcctaatcgattcttattccaattctaccacgaactggatctcaaacgagttatcgaaggaagcccgtggactttcaatcgaatccaatttgttttcacaacgcttaaaccaactgataatccccgattagttcctatcaactctcttgatttctgggttcaagttcatggattgcaatacgggttcaaatctgaaaatgtgctacagagagcaggcaaatatatcggtacattcgtcgaatccgatctgaagaactttcgaggtctatg

SEQ ID NO: 252993 - DNA, 528 bp, Cannabis indica
ctcttccagttgcaggttcctcatccttagttcactcatttcctcattgtgcattcgggtccgtgaaccggaactcacatagtaggttcgcttctcctttcccagtcgatggcgggaggttcccgagtcttttgacccaagcggcagcgggtgtcttatcggagacagaaccttcgaccgtcgggctccgttgccttcttccagcatgagggaggcggtcattccatcctggggatggttcaccagatcatcctcgcccacccattttcctcattcgtcaagggccttttgccattggtacctcctccattctgtggtgtctcatcaccagcggctctcccttcgacggctgccactggcgggggaggtatcgaagtgatcaactaatggtcatcaagctgtacttctacttcttgacggtggcgagaacgtctcgtcatttttgttgtaactcatagtagggaagaaacgttgctttagaatgtcgctacccacagacgccaccaaaacgttaacggtctgaactcg

SEQ ID NO: 252994 - DNA, 626 bp, Cannabis indica
gaggttattcttgaatagagtattcttaaatagaggttctactgtaattttttcatatgatcatagatcaggatggcatatatagttatagtataagggtctgtttaataattttaaactacccaaaatttattttactgacgttaaacatacaaatattagctctaagaatatatatatatatatacatatttttataatttattattatactatcatttattttttgtttggactcttgagcatttctatcatgttagtagtgctacatcaacaaattatttaaaaaatgagcataatgtaacttaaggggtatatttataattattttataattcatgtagaaattttacaacaacaaaaaaattaaactctataaatgttatagttagggagactaatcttgtttattcttaaaataaaaaatacaatcttggtataattagaggtattcattcaattattatataactaggacagatatcttcttctcagtactggaggtaaggttcattctggcattcttttattttgttctctctttaataagattagagttaagttctttttagtttttttgtcattttttcatcaatgaaataatgtaagtttgttctgttctaatc

SEQ ID NO: 252995 - DNA, 1178 bp, Cannabis indica
tggaaactgaagagaaacaacctgcaacaacttctctcttacaatcctgaacaataacaccaaagccaattttacaatctttatctctaattgaagcatccacacttagtttataagttcctaatggaggaggaacatcgtcctaagcaagactatcattagaacaatttaataaagtgttggaagcttcttcattgttgttatctgatgagattataagcttgtcttgtgctacataaaacttctgcaagtaagagttaacccagaattttatatccgcaaaagaaggcttgtaagctatgaaaataaatttgttacgactattccagacattccacaagataccaaaaaataaaggcaagtcatctttattaaaaacctcaaaccctcttaagaggaattcctttatattacaatctttgttagtataaaaaaatgagcaaatcttatagttaaccaacctttagcagctctggaacaccttaggagagagtgagaattagtgtcgacatgaagagagcaaatggaggaataagggttatcaagcaccatcctcagaaagagattaagaccaaatggaagcaaatgattgaaagctttccatacaaagtgcttcattttaggaggcatcttaataaaccaaacagttttccaccagcatttaagaaaactaggattagaataagaaagaaaagagagagtagggttagcatgatgataggccaagtttacaataaaatttctagaagaatgatgcccccaaatgagagagcactttctagcaagatcatagggattctaagaatagaagtaaccacattctctgagaaataagaattaagtttgtcaatatcccagaatccatcctctttaatgaaaaaagaaattgtatcctcaagaggataaaaaatcatttttatataagatacaactctcaagttcgggatccaattaggactagtcatttgaatagatttgccatttctcaccttccagactaagcccttataaaggagttcccttccccaaagcaagcttctcaaagtaaaagaagggtagtgaccaagggaagcatggagaaaatcattatttttgaaatatttagctttaaggaaggtggccagaagggaatcaaggttaatgaagatctgccacgcctgcttagcaagcatggcttg

SEQ ID NO: 252996 - DNA, 800 bp, Cannabis indica
aactatgccaatgctatcaacgataaattattacttaaaattattgatccaaaaactatcattagagaagctttctctaaaaatagtaatcttgaaggttcgtcaaccatatgtgttgtaacacacaacaacggtatgttgagatgtgcgaacataggagacagtggattcttgttgtttagagaagggaagttaatatacaaatcaccaactcaacaaaagcgatttaactgtccttttcaattggggaaccataaggggagtgatggtcctgaatgtgctgtggaaatggagttgggtgttaaggaaggagatgttgttgtgatgggaagtgatggattattggacaacttatttaattgggaaatacaagacattattaagacagaactgaagttggatgatcatgatgataagtataataataagtataaagatttggcatttgcaatagctgaagctgcttactataggtcgttggataaatatggtgtgtctccttatgccattgcttctgcaaaggtctggcaaaaaacataaaggaggcaaaattgatgatatttctgtgttagttggtcacattgtctgcaattgggatatttcttcatcagcatcctcctcctagttttttttttattcacattattcatttttgtaatgtaatttttaattttatttttctgaattaattgagcaataaaagaacagttataacttataattgtttctcatatagtactctctaggtcaactgtaaccttttttatgtaaattttctaagtgaatttatatgaccaaat

SEQ ID NO: 252997 - DNA, 777 bp, Cannabis indica
ttttttaagcaattttaaactatattttaaaatgtagaaaacatatatattttttttcgatataaaataggctgatcaagataaaagtaatctttttgtttttttttatatactttttttctggttacttttttattttcttagcaacattttcattacatttaaaatcttcttgagaatttaataatgtataataaaatataggtacttaccatataacctattaataaaattagaaaatataatagcatttataatataagaaactctataatgttttttttttgtgaatgaaagaaatttttcattaggccttaagaaacaaaataagaaaattacattaactctggtaatccagacaactaaactcttccattatcaagagagaaagtcactttggcaagattaagagcaatagaattcgcagagcggttataaaataaaaacttaaaaacattcagattattacaaactaagtaaatatcttgtaaaattgaggcatagaccgtcaagcacaactctttcttgttcaataaattggaaataacttgggaatctgtttcgcttcaacattgacataaccaagacgagaacatagttggagacccaccaaaatagccatagcctcggccacagatggagaaagaacacccgacgaagaagcagttgaagcaacacaagttccattatgatcacgaatgactgctccaaagcccatacgacactcactaaacctcaatctgtattccatgtctagcttaaacaccccaataggca

SEQ ID NO: 252998 - DNA, 552 bp, Cannabis indica
aaattaaaaataaaacaaatataattaaaatcaaaacaaaataataaatatttaatgttcatattttaattaaattaaaataacataaattattaattaaaatctaaaacctaaaactaacaaataaacacaaaagaaaaatgaaaggtcatccccttcatcgtcctcttcttcttcctgccattcttcttcttctagaaaaccagtgtaatcttgtctacatctctatcccatttctctatcaaaagccctaatttattttccccattttgcatagttatagtgttatagaaagaaacatagagagaaaacgaaagagaaagagctatggcgaatttgaaggcaatacttgttgtgctttcagtaatagagaccttggcatggatgcccatttcagagtgtgccaagaaacaagtggctatggctagaaaggatctacatcaaatgacaggtctgtgagaagctcgctgcccagctccaccaacaagttcagaagaagcaagctaagatctctcgaagaggaaaaagatgttagcctctaaaactgaggag

SEQ ID NO: 252999 - DNA, 637 bp, Cannabis indica
aaagagttttatttagggcataaaacccaacatccttgtggttttttgaatggaaaaataataacttgaagtattagttgggactcttagtttgtgtaggtttaattttaaggtcatagaacacaaagaaagttgctgctgctaaggggaacattgtgcaagagatgtaagaatttttggagtgaaattctttgcttttaatttgaagtttgtgtacatgacataggactaggattttttaggagttcaatgttagtactaaattttgttggtttatgcaaggaaaagaagggactttatgagattgtggttagagtaaactgtggaaggaaaacaaatgttggataaaaaactaaaatggtttcagtagcgtcttctttaagttagattgagtagaccttaaagaattttacaaggcatcaaacttattttggattatttgttgagaatatttagatgaattacaagtggtttatttgaccaaggttttgatgtattgattccaaaacagatagtttttccattgctgctatatttaagttgctatagtgtttgaattttagtttgattatggatggatgcacggtgtctgtaggtcaagtaggaagctacagcgtgttggtattatatttatcca

SEQ ID NO: 253000 - DNA, 665 bp, Cannabis indica
tatctaagtgtttagcccaagcgggccttcttgtctaggtgaggagcacgaggaagaggggagcgtgtaggcatgtgcggagctaaccgtacgcgggggggggggggggtgttgggcatgcggggtccatgagcgcaggggaccaggcgcgcaggaggccaggtgcgttgggagctgggcaactgtaggggaaaaagaggaataaaatggggctcacatacattttatctttttgtgaactttcctttaagttcattctgagattttttctctttaaattatatggcctctaaataatatacctagtaaatgtttaggggtcaacaattgtcacctagtctaaatgagtactttcaagtactctttttgactatcttgttgagctaccttcgggctattcttaaagtaccccttttagtgactcgtctaatgggatagattgaggtgttgatgagacaattaatagagttgatgggtggtgcacgaactcctaggtggacgtgtggcgctttcctacccattgattcattgatcatccaaaggcccatatttatccttcctttctataaataggtttctctaactcttcatttcttcctcacatcattcttttccaattcttcttccttgctaccttactcttatgatttcttcttctacccaag

SEQ ID NO: 253001 - DNA, 1260 bp, Cannabis indica
ttttaaaattcgatcaatgtaagttctctgagacaaccgaagaatacctttagttctatcccaaaggatctgtatcccaagtacatatgaagcctcaccaaagtctttcatatcaaaatggtcagataaaaattgctttttctcagacaacaaatttttatcattagaagcaagcaaaatatcatcaacatgtagtaccaggaagatgaagctgctcccactgaccttcatatatatacattgatcaactttattctccatgaaatcatttacagtgacaactacatcaaacttgagatactactgtcttgatgcttgtttaagtccataaatagacttattaagcttgtaaaccaaatgctccttgccaggctccttgataactctatggtatagagttattttttatgccttaaagttgaaaatattgtgaggagagtagtaaaaatgtgtttggttgcttaattttaagtagttttaggttaatttccatttagtaagctaacttttgagtcttgtgaaaattattgtgttaattgtgtttttttaattaaatgttacttgtttgttgtgggaaagaggaattaacttgctaggaaaattatttagcggttatgcatcgtatggggttcgttggtaagtggatcaatttaattatgaaatgtgtcacttctgtacgatattccattatacacaatggtcatatcatgggaccgattactcccttccgaggtattcgaggagatccattatcaacttatctgttcatcatttgtgctgaaggcttctcctccctaatcagaaagtttgaagatgaccatattattcgaggctgttgtgtgtctaatggggctccttctgttacacacatgctctttgctgatgacagctatctcttttgccaagctactacaagtacgactgtcagtgtaaaacaaatgctccattcttttgaaattgcctctagccaaaaggtgaatgctacaaagtctttcatcttttttagtcccaataccgaagcaacccagcggcatcaaatctattcatctcttggtatgcctgaagctactgatgactcttgtaaagaccgcatatgactaataccttgtattattaaataattaaggtttatgtatgagattaattaataattatgaaatgcatattttggaaatatatttaatgtatcatatatgttgttatgctattttatgtctaattacctaatttctgtgttgtgtttggaagctgtggaaagcg

SEQ ID NO: 253002 - DNA, 1043 bp, Cannabis indica
attcaagactcaaactcaggcccagacccagaactgaaccccctgggacctgggaaccggacttggacccgtactggaaccgctcgggacccaaactcggacctaaggcatgggactcggacccggacccagacccggacccagaaccgaaccccttgagacccaagaatcagacttgtacccagactggaaccattcgggacccaaacctgaacttggacccaaacacccgaacaccttgtcccagacccagacccgaacccaggaccagacccacatctaaacctgagaccacacccggacccaaaattgacttgcacaaaaacccgggacctgaacccgaacccagacccaaacccaggttttgaatcgaggacttagacccaaacccaaactcagacccgaacttgggcccaggacactggacccagacttggacccaaacccaaacacccaaacctggatctagacccgaacccgataccgaacttgggatgcggaacccgtacccaggatcggacccagacccgaacccgaaatttgacccgcacctaaacccgagacccaatgttggacccaaagccagataccagacttagacccgaacctggaaccaaacttagacttggacttaaactcaaacccaaagctgagacctagacccagactcgagacccggattcgagaccaaacctagacccgggacccgaacccagaccaaaacccgaactcagacccggacccggacttggacccaacccgtagttggtgttagggttgagtttattaaaaatatattataactttacacaatctattaatacaagccaatatcaaacatagtattgtattaaataatactaatacaaaattataagcttagatataaatttaaaattcttaaaagaaaaaaaagatagtcagatctgatccaatccgaatatctgatctaatagggcgggcaaaaggtggctcattacataatatggatcaattcgaatcataacttaatcactgacctgatccatttataaagctactcg

SEQ ID NO: 253003 - DNA, 614 bp, Cannabis indica
taatatttgaatatcacacagctgtgattaattcgcttttactgggtcaaagtaaacgtgtattaaacacgttataaatcataacatttcgggatgtctcgatagggactcactaccaatggccttgatagcgagctggagcttttctcatatctttccgaggttgataatgttattctcgtcgcttttactctaaagtcataacgcttcatatgacaatcgcagttcttggtgacaaggtgaacttaaacaaccaatgttatttgaatgtcagcttctatctgagagaactggctcgacggagctgtaaatcttagtgaaagatgtctggagtcgactagtgaaagtacaaggagcgtgccatcttatagcgagatgggtgcctcgctattagttgcttgggtttacctgattgttgtacttagtttatgtactgtatattatgagctaagtgtcttcgcaatcattatatctcgcttacgtctactcatgcttagcgagattgatgcctcgccctgcgcatccactgccatatggtttctcgttaatatatgaggcaagagtttgtatatctttgtcttgcgtaagacaatatagtcagcaagttgtaaata

SEQ ID NO: 253004 - DNA, 896 bp, Cannabis indica
gctgcctatacctaataaggtataacgcccagcatattgcatcacctaatcaggtgagcctatacctacactcggtactcatatgttattatcgcccgtacctaataaggtatgacgccaacatatcacattacctaatcaggtgagcctataccgacgttcggtactcatatgtcactaccgcccgtatcaaataaggtacgatgcccagcagatcgcatcacctaatcaagtgagcctgtacctacgctctgtactcatatgtcactaccgctcgtacctaataaggtttgatgtccagcatatcgcattcatggtatcatcacattatcattgcttaatcaatcaatcctttcattatataacaataataaccatatcttaatatatataaattcacaacaatactaattgtattacaatacaacatactatgcaatacaatatacttttcttacctttaatctaggttcatacatgttggccaacccaagtggagaactatcccctattatctcggccctatgtcacaacaacggtaaaccaataggtgtttatacgaaaatattgcctaatattcacataagacaatcaagggttttctaccaagccccacggtatatatacactaaaataaaacttatattttggctctaaacatatatataccatattgtagagctctttgcaagctttggaagggtatatagaacatacaaaccagacacccgagtgaaaagtcaatgacaaaaatacaatttttgatctcctaggaatttctaaaaacggaatactcaaaaattccaaatttcgcactcaccaaaacttatccaaacttcacatggcacatatatttaccatttttagataacaaaaatttaaatttaccccttaaa

SEQ ID NO: 253005 - DNA, 1280 bp, Cannabis indica
ggaagtcaaaaccttagtctggcagggggtatattaggtcaatttgaagggtttcaatatctgggaatagactcacatgaagattatcaaaatttgggttaaacactcacaatgttcttgcatccactagcaaaggaacaactagagaggaaaagctcgtagaagaaatttggagtctggtaagaaaactaaggaaatgaagaatatgaaaataaaaattgtggaaaaagaagaaaaaaaaaaaaaaaaaaaaaaaaaaagaaggaccatcgaaaccaatttacaattcaagaggaaatcaagccttttggaaaccaatggtctagatctccatcataaagtatcagtagatccatcatttgaggagttgaaagggttgaaaacatttatttgccatgattttcctcgagtctaccaaccaataaaggagggtcttttcaaatcaccctgacatcggttccacctttttttaacaaatgcgccccagcatgcgcgtgatgaaccaacaagggcatttaatatgtcgcataatcgtcatgtcagcaggtcctaatgattcatttacccctaatggattacagcttgccaaaaagaagcgtctacgaccctaatagttagcatgtgtcaaaggttagcctcaagggacccaaggaggagttacaagctccaaaacttcacatagtcctgaaagcttgggggtaaatgttatcggtgtttttaagcaggagacatgtggtacaattagaggaaaatatttattaacctctcggattaacaatgacgaccattacaatcctcacagagatgtgtcattaattttggaagggcttaatgaaagcttgatgtagcgagctatctctggcctagttagcatctttgacacacaaaaggatcatactgtccccaaactccaagaagtcgtggaacaatggtttcaccacttgacatctggataacgactctcttatccaatcacaaattttgacacctacacgaatgtggatgaccacctcaaatttacatggaaatcaacctacagatggtttcacctttttctgacacaaaattagatcttgtcccttgtgtcaggccatggtagtgtgcgtacatacctctggacacatcttttttcctgatggctcatctagagggtaatttataaaggagaaacatttgtgcgacacgtgtccctaatctagacggtactactcaccatccctacacactgcacgatcaagaatcttcttcaaggctagacggttagatttgaagttgtattt

SEQ ID NO: 253006 - DNA, 787 bp, Cannabis indica
aagttccaaacgatttctaacttaaaatcacctcaaattcaacatgtaaagatcgaaactagtcccatagctaccaaagaataattctataaagtcagaatctccataactattctaattcacgaaactcctatacataaccaactgttctaagcttaaaacaaatctgaaccatactttaagctttccctcttcaaagatttgctatcctgctactactagagcttacatcgctaggttttgggttaaaaatcaaagaaaataaataaaggagaatgagggtttcgttgaactgaaagagaaagattttattcgttccttctgcttatgtttttaaaatatagaacatataaatgtatgagattcgtttataatgattatataatattataataatataataatataatattaataataatattaataaaaactttattattgataattatcttatcatttcttagccactaagaaatttatatttttatggtattttgtcaattccaagtactccaaaataccacagtatttctaaaatcaacttatcccaataatcccatcaatatttctaactaaaaccgttgtgatatttttggcctccaatcaggtctccagggttgtggaactttaaaatatatttatttcacaaataactcatattatatccatctatttcaaataaattttcgtaattaacaaattacgtttatttatccacttatcgagtcttcagggtcgtcgaatttgaaaatatttttattccacatatagctcatattacatt

SEQ ID NO: 253007 - DNA, 1949 bp, Cannabis indica
tttgtttagctttaggacaaatatagcaagtagtgttttcatgaattatatcaacattacactgcaatttattgcagagaagagccaatcttttgtttgaaggatggcccaatcttgagtgccaagtgtcagcagagacggcaaagttgtaagcatgagtggggtctttctccagaacatagagtccaccacattctttacctttgccaatcactttcttgctgagagattcctggatataaaaatcattagtattgaatttaatcacaacattatcatcattggttatacaactgacagataagatattaaacttaaaacttggaacaaacaacacattcttaaggatgatatctttggtaatttccactgttatacactgttgcacaactaaagattcattgttaggcaaaattaatttagtaataggagctaaacatatagattgaaaaagtttaacattattacatagatgtcttgtagcacccaaatccataatccaagaatcttttgtcatgtttatagtattatatgttagaaccatactagtgttgtttgtggaagtgctagcatctggtgtgttttgaaccggttgctgattggctaggagatttagaagttgttggtactgagatgcacttagttgcagaaggagagtgtggctttcctcagtcgagctactaatttcagcacccgtttgcacctgatttgctgtagcttctttgggtttgttttgtttgttgaatcctggaggataaccatgaatcttgtaacacctttcgatcgtgtgtccgtgtatgttacagtgagtgcaaaatggcctgcctttcttgggaggataggttttattcccttgattgtcattcttgttctgcatatttttgtccttttgaaaggcaaaagccatatcagcattggggttatttactgcagccatgtttcctttatggttttcttcttgaataatgagatgaaaacctcgattgatttcaggagagggtccatgagcagaatgctactgcagacttgagagtaggtattcgtgagccccatgagaaaagatattatatattccatgtgatgaaattcttgaatcttcttaactccaccacatgtacaaccattacaagtacatgtgggtttgtagtttgacagttcctcccaaatggatttcaacttggtgaaatacatcccaaccgattgtgtatcttgcttaagattcatcaatcctttcttcaaattgtaaatatgtggtccatttctttgatggaacctaactttgagatcaacccatatgtttgcagcagattcatcataaagaatgctggaagaaatttccttagaaaccgagtttaagatccaagatataaccatgttgttgttacggacccacgcattatagagaatatgatcagaaatatgaggtttaggaatggatccatcaagaaaacctaacttatttttaacagagatggaaagctgcatagctctactctaagaaacgtaattgtcttgaccaagaagctgagagacaagaacgttacctggtttgtctctgtgatgcaagaagtatggattagcaggatcttccatgggattcttttggctgttgattcaaagaaattgattttcatgttgaatcgaagctggagaagtatctacgcctctagcttgttaattcgcagcatcggactgggttgatgtttgatcttcatcagccatgtcgaaaaagaacagaaggaacagaaagaaaagaagaacagagtattaaaaaacatagcacgatactcgtcaccggagaaggtgaacggaaagacagaaattaggatcgattggagaaagtacctctttcccgctctgataccatattgagaaatgaagaaaacaggaaaagtttgtatttcattaaattagagaaaggagaccattacagaatatatatagcttca

SEQ ID NO: 253008 - DNA, 1088 bp, Cannabis indica
gtgtttatgaaagttttttacattttagtatgtggttttcatttgaatgtattctccaccaagataaatgtagtttgatgataattgtaaaatgggttgcaaaaatattatctgttttttatcaactaaaaatatgggatttatataaaaatgttagtgacagaatttttctatgtgaaatgtttacataaaaagataaattttaataaatatgtagatatgaaatttatattttaaattgtatgagaattgacttacgcctcactcagttttaataattttttaaaattatatatagaaaaattcattgattacgattaaaattttaagtataatttttttttaataaataatataaaattttataacatacttataaatatttttttatatgttattagcacaaatattaatcataatataatttttataaaaatacactttgcatgaagttatttatagtaattgaaagttattataatataaatttattttaaatgagtcaaatattaataattaataaaatatatattattatagactacacaagataaattttaaaaattataaataattaattgaaaaaaaataaaaaatggcaaaagaaatattttgtatatatatacacatatagataataaaataattattattatagaatatagattgtatgaactaaaatatatatatatatatatatatatatatataattgattgattggataagactgatttaatcgattacctcataaggagattaaatatatataatttttagacaaattaaaatagaaaaagaaagataaaaactataaagcaaaatatactcacaaaattattacaaagtaaataggagtagaggttactaactagttatatcatttatgataataaaagcacatgataggaataaaaattagtaactagttaatagttaataaaaaatataaaaacacatgaatagaaatagaaaaaaaaaaaaaaacttaatatgtaaataagaaaataaataaaagagttcaatttttttctcatcttacatttacatttatttttgtaaaaataaattacatatacatatataat

SEQ ID NO: 253009 - DNA, 951 bp, Cannabis indica
ccaaagccgtagtcgatttgttgctccaaagtacatcattccgtgccagccacaaacgccacaaaatcatggcagtttcctccgcctgctgcttgctgctgtgcaataaaatatcgctaaaccagctggtaaacatgttttcttccacaccagcagccgtgacagaagaaatgttccagcaagatcgtgcaaactcacaaccaaagaggacatgtgatgttgattctggggacttagtgcagagaggacaagtgagatcaacatgaatgtgcttattggaaagttgaactttagttggtaatgaaccagcagctactcgccacaccagatgctgcacttttggtggaacatgcagctgccaaattttcttccaaaaagcattagcaccatcattcggccagtctccattctgttgctgcaacagtttgtaggcgcttcgaacagagtacaccccacttgtttccttcgaccaataccagcagtcacctctacttgaatcactcaattgaatggacagaattaagtcctgatcatgtggaacaaacatgtctttaatcaactcaacatcccaagctctcctttccatctgtaacaagctatcaaccgatctaccagcaagattggggtgataagttgtgacaaacttattgtctatacctggtagccaaggatcttgaaggatagaggttgttttactatcacaaatggatcttcgaatgccagcctgtagtagttcttttgcctccaagatactacgccatatgaagcttggattcggacccaactcagcattcaagaaattgccttttggatagtatctggccttatacagcttagcaaccaatgactcctcattcgtaattaaacgccagccctgttttcccaagtacgccaagttatactctcgtaagctcctaaaacccaaccctccagcatctttatgtctgcata

SEQ ID NO: 253010 - DNA, 1216 bp, Cannabis indica
gacaagtgggaaagccaattatggtggatgcaatcactaagcaaagagataaattggcgttccctcgagtcttaattgaagtactacttaatcaacctctgcctgacctgatttggtttgagaatgaatttggctccaatgtctccgttcaggtgaaatatgagtggaaaccaaatgtttgtgggcactgttttggtttgggacatagcacggaggagtgtcgcaagaacgtggcaaagaagcagcaatgggtggtcaaaccaatagggcagccgggtgctgaagtgaaagttgcagagggaaaagccactgcaattgattctgatggtttccagccagtagtaaaagcttggaaaattaaagagaaagagcctgttcaacaattgagggttggaaacactttccaagctttagttgaggcatctacaagtgaggagcatgatcggaatgagagtgaagatagtgcagcagtcataaaaatacaagcactagtcatgctaatcggaaagggtattgatggggaaaatgacaatacaggaggagggggaggacctcctctttgtaatggataaaatagtttgttggaacgtccgaggagcaaataatcagcagaaacaaggcgtaatcaagcaatttattgctcgacaaaaagctggttttgtttgtctccttgagacaagagtcaaggcttctaaattgggagccctgtacacaaatgtttttaatggttggtgtttcacgtcgaatttgccttggcatccaggaggtcgcatagtaattggttggaatcctcatagtttcaacattaatattttgaggtgtactagtcagcttgtgcattgtcatattacaacaactgatgggaatatctctttttatgctaccattgtatatgcttacaatgatagggaaggaaggaaggaattgtggagacacttacaagagattgatacacaggacccgtagttagtacttggggatttcaatgacattttgacaagagaagagaggatagggcataaagttagaggagatttggcgcctgaatttctactttgtgtggagaattgcaagcttgaggatgtcaagtatagtggtaattacaatacttggaacaacaagcaacatggcgaagctaggatctattccaaaatagataggatccttgcaaacccaaactggattaataagtacacaggggctgaggttttgtttt

SEQ ID NO: 253011 - DNA, 1510 bp, Cannabis indica
aatgtctatatatacctttagcagttggctttgaaggcatccaacatgctttcacagttggcaatatgagccaaaatcctaagttccaactgtgatatgaacggatatcaatcaacagatgacatcttattactattatatttatttatttattttataattttttttattaaagatgaaatctcacttttcaaatttgtccacacaaaacttacctgtccatagtcagcaacaatgagggaatttccaggtgcagctataaatgcctgacgtatcttatatcgatctttctccagagcaggttgattctaattttacaaagtgggaaaaatatacagtaaataccagctacaatccaatatagtttggatacagtcatccaattggattgaatgataattgatcattttgaaaatacaatgtaaaagtaaaaataacctacaaatttgaccgtctatcacataaacttccagtttctcttatataatttctcataatttattatttaatttctcaatctgttatatattagttcaaatattaaaatatcagttcaaatattaatgagatttgtttaatttttattttattattttattatatataaataatattttattattttattaaatataaataaaaaaccaatccatgaatttctcataaaccaagaattcagttatatagccacattttatatagaatagatattcatttcataaggtataattttaaaataatataacaagcataaaataaaatagggaaatttacgcctggtactgtattttctacttttatttcatttttactgttgaacgttatttattacatttttactgtgtcttaactttttgctaaacaaatttgttattccattttaactgatacatgtcacactatagattatttatattcatttttattattttaatgagtgtaaaagttatgatttgattgattaaagctgaacaaactttctttttcaagtttattatcccatggattatttgtattcatttttattattttaatgagtgtaaaaattatgatgtgattaattttgtggcagcttttttatttatttattaaaaataatgattaaagttgaacaaaccttcttttacatgtttatttttatttattatttttatttttattaaattaaaattaaagatgataaagatttgagtcaaaacgtgtcttcattttactttttgatgaaagtgagccacactccatgaaagtgacaacacaccagctcctatcacacctgttattatatgagccactgcagtccatgtcgtccctactcatcacattcacaaccacaaacaaattaaactttcagaccaaatatctacaaatattttatcaaacacctttccttctaaaatatttgcagaacaagaacaacatgaagtacctgttctttttagaagatgggtggactcattgatgaacatgaagataaggtgtcatgtaatgtaattgctcatcttctgttctt

SEQ ID NO: 253012 - DNA, 626 bp, Cannabis indica
agaacaatatgatctttgagaggctagaccgagttatggaaaataataaatggtggaatcactttgtaatttccaaggttaaacatttaagtcgttggtgctccgatcattgtcctctattggtgacttttaaagcaattccaacagataataatcagaaacaatcatgggggtatcgatttcactatgaaagcgcatgggctgatagagaagactgccacagaattataaaggagagttgggaggacggctgaataattagttcagcaacacatttgggaagcaagttggatctttgtggagaagttttggggcaatagaacaaacagcaaagaagagaatgccaagctcggattaaagaattaaaaaaagaagtagaaattttgtctcaggatcattccaaccaaggctttaccagattgaaagaaagggagagagacctgaatggccacttagcaaaagaggaacttttttggaaacaacgtagtagggcgatttggcttgctcatggtgaacgaaacacaagatatttccaccaaaaggcatcttctcgtaggaagaaaaatcggatccatggcctttttcatcaaaatcttaactggctgatgttggaaattattttacca

SEQ ID NO: 253013 - DNA, 1098 bp, Cannabis indica
aacttaggcaccgggtgaaaccctaggtgccaggttggcttccgggttgaggttcatgaatttcagctcctaaatcttggattatgttgctccatgacttaattgtatagaataatatatgatagtgtgttggattcgagttattaaagtccaaacatccatcccggagttcccaatgtcaacctgggtggaaggctagggatccctcccaagttgacctgctatgactcaagacttctcaactccgaaatgtcatctttcttgtcacgtgttaaacttttatgtccgcatcatcaaggctactcttggtgtaaacaaaattgactcgatatcgatcctaaggtagcaatcaattgtcaaagagttttatcgtggaataacttaaacaaggttttatgtgtttttcttgtatgctctcatgcatcgtgtttatattaatttcgaaatgatatttattattcatgtataatcttcatgttactttatttatttcggtcatgtctaccatgccaaataactttactactttactagcccttgaaaaatcgaatggtgataacttttataaaaataaatccaatctgaatttaatgttggtttgtgagaatcacaaatttttccttactaaggaacatcctaaggagcccgctgccaatgatgctactcgtagctacatgaattgtaagataaagaacagtgtccctgttataactcatgtattgcacatgattaagctaatgcatgaggtagagagagacagagctatcattaacaaaaggactcaagtgagtatgatacttgagtcactatctcctttatttaaggctttcaccacaaactatgttatgaataagctaaagttcaacatgacttaatttttgaatgagttgatcgtgtttgaaaatcttaacaaggataagtccaaggaaggtgaatcaaatattattgaagcaaaatctatctctccttcttcttctgataagaaaaggatgtgcaacagtaaggaaacaatggtggcaagcacaaaggcaagaagtcacctaatgccaacaagaacgaagccagccccaagtcgaaagacaaaaaaggcaaaaagtc

SEQ ID NO: 253014 - DNA, 990 bp, Cannabis indica
ctttttcttagttgaatgtgtaactccttggggaaaagtttatctctcttctgttctcagttgcactccagcggttatgaggcttcgtcttctcctctccttttaccaaaaagataaatgaaaatacagagagtactcttctgtgtttccacagcggctacctactccattttaaattttttagggtttgcattttgctgggaaaactctatttacaccactatatttacactattttgtgtcaatttcaatatttacttaaattttattttcatatatttcttttatttttgtaataaaatttcacatatttttttattttaatttaataaatatattatgaatatgaattagtagatttttttttaaaaaaaaagaattaatataattaaaaatatatattttatataaaataaaatttattaaaataaagtgtatttataaattgttaggtacaaataaaacttatcatttccttaacattatttaaccaaaataacgagtgtaatcttgagattcatataaaaaggaaaacaaaatacatagaacgataagatttaataaaatgatttaaaaaatataaaaaaataaaatcttaatattgttttctaaaattattaaacaaatattagcgcttcaagatataaattataatatcccctcaaagctcaaataagaatgtttattatagagaaaccaaatatatggcaatgctattattgttatttttattcaatcacattaccattcttattataataaagtaaacatcacctaaactagtatttgattgaaggtaataaaataaaatagaatagagaagaaacaatttttattccattcttttagtggttgtatttcaaagtttgaatgtcattttaatagaataatttctccatcatttccttagaataataattgattatgccattttgaaatagaagaaaagatcattcttcaaattttttgaaaaatatacggtccaattta

SEQ ID NO: 253015 - DNA, 621 bp, Cannabis indica
gagtgaccatagttcttcacatgaccgagagtgacttcaagccatgtttggccaagtgactttggtcttcatatggtcgagtgacattctttctcacgtggctgaatgactttaagccatcactactacaaaaagtacaatacccattagtttttgagtgtcatttaaagaaatatgcgtcaatttcctgccataatcgcaaatagtttcttattaacgtcgtttttgaaataacgcaaaaaacaattatcttcatttaaaaaccgacaaaatatacactcttcttttttatcttttgcgtcagtttgaaaatgacgcaaaattattcgtggcatttccaaacagtcactaaaaacttataccgttggttctaaaatgacacataaattgttgaaataactttttttcacctattgcgtcggttataaaatgaagcataaatatagatatggggaaattgtaaattttttttcacctattgcgtcagttatgatatacgggctcgtcgcgaccaaaattcaatttctttcttcgatctcttttagtaaaatatgcataactttcacatacaaattacaaatgagttgattcaaaatatgttggaaagatgaaaaagagatc

SEQ ID NO: 253016 - DNA, 1235 bp, Cannabis indica
gtaagcacaacatttgcaaatgctgaattgtcagagccaatccaaaacagcaagtagtcctccatttttcgctctgcacgtaatccccagtgcaaacctccgatcacgtatctgttactagcgaccaccccaaaacttttattatcagtcaattcctcagctggtagcactccatgattgcataggtttagattatcagatggtaagatttctgaacacaaaatgtctgcaaattggatttctaactgggatctagactcacaagcttccatcacttcttctttgatgttctgtatcaaatgtgcatattccagcccaaataggacctacacttgcaaggaaaaaattgtgaacacaattctttccaaaaaaaaacactacagtacctctcgataacactaacgctgttgtttcagctagtacatctagcatatatagaattcacattacacattaaagaaaataaatcccaatttaaagtcatcaatcaaaaacataccaaaacacgcttgttattggttgtagcttgatctgtgagattcttaacgcaatctgacacactcatgggagctttgccaaagacgaaaaaggctggaagcttagtggtcctgccaaaaacatttacgaagacaaagtgtgaccatgctttttaatttttttttttaaattgatacctttccagaaacaaaaaatgtaaaacgataatgtagatgaaaatagtttcaattatactaatgctatagaatattcttcccatacgtaataaaaatcttaagcattaatatttgaaacccataatttgcatgaaaataaaagctttagagaagatcttgttaagtacttacgggctgagacacgcatggccataatgcacgacgcaatcagctccgatgtgggaagctccaacctcgtcaacacagcagctaccgtacgccgtgtccgccatgacaaacatagaaacttctttaaagtcgttatttcgttcggtttccaattcacttagccaccgaagcttgtcctttagagacttcacaactcttactgagtccttcaagagctcgtctggaaactgagaataatcaatatttagaatgaattaattcattattctcttcatgaaccagattaaaccctcgaaaaagagcaaaataaaacattattgctcattaaacaccaaaagagagagagagagagtaatcacttgcaaagccgccttagtgaagtttccactgcgt

SEQ ID NO: 253017 - DNA, 1109 bp, Cannabis indica
aaaacattaaaatctattttgagaagctccatagtctaaagttgataagagaagaagaggaatctggatgaaaatggttatggaacatgcaaaatggccaaaccaaaggtatttgccctaatttcttttccctttaatttctcttcatctccattctctacgtgaaacctgatttgtttattgtaggaagatggtggttgtgattgttagatgtggtacgacccacccatatgtgaacgatctgtggttgttattcctaggttgttgaagatgattcacaagatggagagtaacttgtctacatgtctaaagcgcttgaaatggtaacattgtctacagttgttgaaaacttaatttatacatgagagcagtcacaatgtagtagttccactgtgggtggctgaaaaaattaaaggtgaacaactcaaaattaaaatactggaaaatatttaaaatttttattgttgtaatatctcaaaaaatatattgatattttaattgggcatattttattaaatatgtgatttagtgtgtattagagtaagattataattctacttaaactaattacgagttaattagggaaatatgagtaaatgaataatcaaacgtaatttattaattacataaagtgtattagaatatgtaggtatcgtagataccatatttgaataaaatattttcgggcctggcaactgtgaaactcgacggagtggtcagaaatgtcacgatggtagaaattgtgttatattagaattatacgagattaggttaaaaattgagatttcggtttaaatcgggatagttggtttgaccaaaatacccttaggttagtaaataacttaagtttttttgagtgacggtaaaatagtcatttaccaaggttttatcctttagtgctttctaggcttgagaattagaaagttagagtaaattgatataatgttttaatttatgtattgcctaggaaataagaagattatcaaagcaaaaaaaaaaaaaaaatataaacctcattctttcttttctttctaaccctttcgagccctaaaaatcagcaacaaccaagtagtttttcttcatcaattccaccaagcttaagctaaatt

SEQ ID NO: 253018 - DNA, 585 bp, Cannabis indica
agaaggtggattggtctttagatactttgtgcatttcaaccaagcctttttagcaatgcaagcttggcgtatttttcaaaaccctcatactctgctaagccgtgttgtaaaggttcgttactactccaacaatgatttcatgtccactactgttggtggattgtcctctttaacatggcagagtatcgtttggggtagagagttgttaccgaaaggattaaggattaaaattggagatggtactactgtgaggtgtgcttatgattcatggattcctggccatgaatattttaaaccattgcgctttactggacaagctgagaatcaagttgcagactacatatcaacatcacgggaataagacttggagctcctacaggctaatttttcaccagctgatcatgtagagcgaattcttactattccattgcctttccatccctgcaataatagatggatacatggcattatgattgttcaggggaatacactgttaaaacaggttatcatttggcctaatcttatgaagatcgtgatgtgttaggttatttttagtattaattttagattaagtttagtatattt

SEQ ID NO: 253019 - DNA, 507 bp, Cannabis indica
tatttccagttttttgctaagtatttttgtgttcttaatttgaatactcaccattctggatcgagtactcgcacgtattcttcatatcgtattattattatttatttttggtgttgtaaaaatttcttcaacaacatttacgaactctattaagcatataacacacattcaataaaaattctctccactaatgagaaacaacaccaggatttaataaaatagcaacaatagacttagtaagagttctgtttttttttctttcagctttacattcattttaagtgaataaggtgcaatcttatcgtgtatgattctatgtgagttataaaattcaacaaacgctgtagaatcatattcagtgtctctattgcaacgtaacttcttgatctttctgctaagttgattttcaattttagcctcaaatagcttaaacatatcaagagcttcacttttattttcattacatacacaaaggtaaatcaaaacaatcatcaataaaaatgataa

SEQ ID NO: 253020 - DNA, 1156 bp, Cannabis indica
agataaagtagcgagttgagaaaaatagcttagtgtaggttattttcctcaacgagttgagtctagtggtgaagacagctcgtcaaacggacactggaggtaagcgaaaaatccgttcaaagtttgaacaaccaaactttgacttgtaatcccaagctaacggcggcgaaagaagcggcgccacttgggggtgaggtcgttggcaccagggggttcgaatggtccggcacatggggctggtcagtggccggaggtgggtcgccggagagtggtgatgatggtggtttgtgggtttccttttgtgttttgaagagagaaaaagagagagtgagtgaggaagaggacaaaatgggggggggggggggttaaatctggacttttggattttttttttatatacatatatacggtcaaattgtggtcttacatttctaaccgtccaattaactcgaataaaccaatttataagtgtatataatatattacataaattacatttattagttaaattattttaaatttaaagtttgggcattttagggtttaatttaaaatttagactttatagttaataatttttaatgtatttagatattaaagttgaagtttaaaatctacaccatattattacttatattattattattttattcaactattttatgttcactcaattatatttatcttatattaaaatttttaaaattaatttagactatagcattttttaacttattaatgtataatatatttttatttttttaaatctcattctttgaatactagaaagtaacaataataattatataaaaaaagtgaagattagttttctaatttttaattaggcggtttacaattaaatatttacaactcgaaaattatattgggttggtaaaaatatgttgtaacccgaccaaaccgaccaaaccgaccgacgtatatccctactatcagtggcggtaaaaataggtgtaccgaaaacatcaccaaaaatagggatgatgtatatcaaaacgaccaactcgatgagtagatcacacccatgccaactatttgtggaaacggcatacgatatcgcctgaaaattgtcggaaagagacgaagttataaaaacgtcattaaaagtagtgggatggacgaaatggcttagagtata

SEQ ID NO: 253021 - DNA, 932 bp, Cannabis indica
taagagaagagtacgaacatcatgaactaatagaccgaaagaggatgacaaagtaatttggctatcaatttctaaaatcaattgtccccacaaatgacggtccatccagtttaaagcttcttttatgccaacaaattcatctatttaaggttgcacctgccatttcagcataaaaataactgccatgttctccgccgcctccattcgctaataactactcgacgccatggacacccgaatgaacctaaaaccaagaaccagtaactaacgccagaaaccaataaaccaaacccaatgagagaaactatagaaccatgtcaaaagacaagactaatgggaaaacctaattagtttcaacacatgaaactaaaaattctaaccccattaaaatattaataggaattaacctaataatagtaaaaaataaaagatcaaccaattgttcactgtacagcaaccaattgttgactgtaactcacggaaacaataaactaaatccaattgttcaataaaagaacaaaagaactaaatcccaaaaaaaaaaaaactaataacacacggaaacagaaactaaaaccaatcaattgttgactgtaactcacggaaacagcttgaaccaatcttttactctctttaatcaacgacaaggaacaatggctgaaatcgcaggaaccttcacaccgacgtcattgacgtttgcgagagggagatcgtcgtcgttgacgtgcaccgccagcgtctgcaaacggggaagagcttacaccgccgtcgtctgcaaatggggaggcaccgtcatcagcagatcgtctaggcggctgggctgaagcgaaagatgaaaccccactgtaatattacgattggacgcccttggacgctgacggagttaccgcggctagaagcgaatgagaaagagatttggaccgtggatggcc

SEQ ID NO: 253022 - DNA, 600 bp, Cannabis indica
tttatttttaaaatttattagcgacaggcattagcggcggaatgccctctgtcagtattaccggcaggacccacaagtattaattgaaattccactagtaataaaaaaaggtcagaattccctagcaataccagcggatctcgcccctaataatccgctagcattgctgttttcaaaatttgggcggtaaaatttccaccctcattaatagtggtggattttctgccgatattaaattttttccatcggtatgaatatttttatttaaaaaattacaaattaaaatttattaactattaccagcggatggacttttctgccggtaatacctttctgccagtaatatatatgtaaatttgttgtagtatatatatattctcttgtagacacaaattatataaaatatattataaataataaaaatagataatatatataattatataataaatatgtgaataaatatataagaataagtacataaacacacatataacaataatgataaaaatactaaaagagttttaaaataattttagtcagatgagtatatataaatatatatttagagtaccacgactttaaaataattcaagaact

SEQ ID NO: 253023 - DNA, 692 bp, Cannabis indica
ttcttcaaagaagaacattgaaggaagaaggttgctgggttttcttaggttttctctgagttttcatttgtagctgtttatgtgtgcaacaaataaaagataatatatatatatgagtgtgatatgtttttagggtttctaattaacaataaaacgacctgtagcaaataaatggtggttgtcgtttttcttggggtttaaatcagagtcaaacaaaactttcttttgactaagtaaatgtcagttttaaccttaggttgctgagttgtctttgctgtgtgtagggcaaattggaataaagattcatacactcttccatgtagatattcatttcatctagaatataactcttataatgtatatagtattttttttagaatggacatttcgtacattttgaactttttatataataatttgagcttgcaagttttattacaaaacaagtattatattaaaataaattataatactttagaaataaaaattgtcacgcttttttatgtaaatataggaagaggttttaatggttacatttttattataaccatcatggttatatttttttaagccactggttactattaaatggttgtgattaatttgaaaattaaataaaaatatataataaataacttgtaacgtgaaagtaatctaataatttatttccttataaaactttaattaagatt

SEQ ID NO: 253024 - DNA, 528 bp, Cannabis indica
tgtgcaatggccctaagggcattttgatcatttgacctttattattttacatttgattaaatgggtttttgatgaaatgaaattagaaattcgggatttcttctctctctaatcgaccttctcaccctctctaaccctcttcttcttcaaacttgacttttgggaagaaaagcttgattcttggcttttttggagcttgatgcttaagggttaattgtgctaagctttgaattggaacttgaggtagtctttataactttgattctcattttgcttgtcgaattttactgttgaaaatgcatgaatatgatggtaatgatgatgataagtatatgttgcatgaagtaatgttctttggttgatttgattatattttggttgaattcttggtggggaaagttatttgagctattgatagaattctagggtttttccttatgtcttgaattcaatatgttttatggtggttgctgctaaaagtatttgggtttgttggaatttaagctcaagttcaagagcttgaagttt

SEQ ID NO: 253025 - DNA, 608 bp, Cannabis indica
gattaattagttgtaattttgtagatttttttaatgtattaaactcttaatttttgtcatatttgttattgttttaaatttaattatttcaaaatatatgcatatgaagttatgtctactgctgttgcttgatcccatggtggagatggtaggagtcaacctcccccaagccttagtaggatacccacaacgtgtgaggtaggtagttgtttttgttaattaattacataatgattttttgttaatattctaatataagtttttattcaaatatagcgcaagcaaagaaaataaaatcaaagtctaaatcactaaatttggaggaggcctttgagaataataaacgaaaacctctttgaggtcacttttgatgtaaaaggtagaacattgaaagctgttggtgataatggaaattgtttattaggcttataggaaatattattggatttaatgtctctccatattatggttgttaggaaaatgttcctaaggcatacaagatgccaatactacccaaactttcgttaaaatatttatttcgtttttaataccaatatttttattcataataactaatattttgtaattttggttgaaggaatattttc

SEQ ID NO: 253026 - DNA, 894 bp, Cannabis indica
atttatatatttcttaagtgttttataaaacctaacaagaatttttagcttgagaatgttccttttgtatgtatatcaatcaatatatatatatcatatctggccggtctattattattactttgttatagtagtgagggatgaactgtcatcgtcttgaggacgagacggattcttgttgggcattggtgcaagagaaagttcgtaaagcttatttcttttcctttttcttttctttcttcaatatatattctcgattatatatataaattaatatttttatatctatacaacacaagagttgctaggccgtttcagatatgctttatatgagcagatcacgtttcttgaataagaattaatatttataattaaatacgacggttaattacgatatctaattaatttggtcaatgacaattatatatgatatattttataattattaagtaggactttgagggtatacaatcactggctaaccattaggaacgtacctaaatctcaactttgtatctccatggttttacttcgaacatcttgaacacaaaaattcacatacaatagtgaacctaagcctttctgtctgagccaagctatattataaaataaactattttttctttctacgtgcgatctttcaaattatattgtttccaattttgcgtctgcatatttgtcgtgtcaagctagggtaatttacgcactcggcttttgggtttatcattaattaactaccgaagaatacaaaatttcatacttgttcattgttttttttttggagtaaatactagcataaatacttattgtttttttaatgtttatttgtagtagcataataatactatatgttcgtaaaactgtaatttttttttctaattttgtcagtacaga

SEQ ID NO: 253027 - DNA, 1253 bp, Cannabis indica
ttgacatttatagagttagaattaaaagatgacatttgagaaaagaaagataagttttaataaaatagcaaaattgaaatccattgggcccaataggatttcggccaacgatgattaataaagctatttttatatttttttattccatttgaattctaaacctatccttaatagccaccttataaatagaataatatgacacttattttcagatgatgatcagactccttttgccagataattaaaaaataaagagagctattattattttgaaatcttcttcttctcttctcatctcaataatttgaagcctatagtgagtgaaaatatgcccacacatgtcaaagcaatacttaggatagtgaggaagattgtgtagttcaaactgtaaactgaaggagaagatccaggttcagatcttgataatgctttgctatagataggaatcaagggctagagatcagaatggaaggagtcatattattctgttgccatcattgtaaggattccttaattttttatgtgttttgttatacccgattttcaaaaaaaattagaaaaagtcaaccttgcgactttgaccaagacctataaatgtcaaatgagttaagacgtccttcttgagggccccatgacactttaaaggactcaaaaacatcaaccaagcatttggtactaggactcgcacatccaagtgtgcccaaactagggttcatgggcccgtgcgagtattttcaccctaaaaacctcaatctgccaaggaaactaacaaggacttgactcatttggacaaaaatatgacttaggtttgtgcatatagtcaatatagcatcaaaccctcaagaaaaaaggcatatgcacccactgccatatagaaatgacagtgcccttcaattttaatgggcactgccatgagaaaatggtagttttcttgaattttgatgggcactgccacaagggaatgacagtggtcgctccttacaaaccatgaaggaaaaattatttaaatgtgtttcctcaacaataaggaatgcaaaacaagtgatagagatcatttcccagctatggctaaccctagccaatcattgccatatggaaatggatgtgctcatcaatttgatgggcactgccacaaggaaatggaagtggtcggccatggagaagaaacgtgagatttttgccaataatgcattctcaccaatgaaaccaagtgaaagaagctaccaagtagtattgaaaccacttagggagtg

SEQ ID NO: 253028 - DNA, 889 bp, Cannabis indica
gtcgagagatttcgtcatttctagaaattggtaagttttttcactttcctttaccattaataattttctcgaattgaacttagcaatcctttattttatgggtaccttagaaaaatcctcactttcagataataattgaaacttgatttgtagaattctaattcaaatttaattgagaaatttcaaccaaataacaaagaagagagcaattaccaactacaaattcattccctctttgcataatcttatggtacatatatataagcaatttttcatgtttgtggtttcattttggtaactatgacagagaatcattcaatctatatcttcttatgcgacaatcttcttctactcctttttcattaagctttgatctctttcgatgatggggtctcctttttcaaatctggtttaagtaagaacgaagatggatacgatttgaaatcttctaatggatacgattgagttttgtaaataactaatatgtcaatataatattaaggaggtaatgcaatgagagattttgaatattttggcattttatattttcttagtccccaatttagtgtggatgtaattttaatttattttttatgtttgttaagttggcattgtcaatttgatgtgtgagaaatgatgcatatatgggcatgtgccaaatatgttatgcaacctatctcttcataaataatggtaaggcaagctcaccttacctctagaatgtgtttacttgtctttctataaataatcgtaacctatttctaatttgatgcatattataattgattgcatttacagtttttgaatctaacactacaagaaaatgttacattaccggcggaattattaggggtggactaaatcccccgctaatagtagggtttatttt

SEQ ID NO: 253029 - DNA, 1945 bp, Cannabis indica
tcacatgccacaataccatacccgtatccattttcagactcaaaggtagccccatcaacgttgatcttgatcgtattaacagcgggattagtccaatgctcaaagttgttaccaacatctaatgtagaaggagataacaaactcattttatcttgagctttagtccagtgatcaaggatagtccaagctatagagacaacctgaggcggagaagaagcttttttgtcccaaactaacgtatttcttgccttccaaagtgaccagcacaacatcacgacacgacaagaaatatcatcgttgaaactagtgaacacaagatgaagaaagtgtccaatagtcccaacaaaattagcataaggaactaaatcagctttttgccagcaagctagcgcaaaagagtagttgagtaagatgtgtgtagcagtttcagccgtatgatgacaaacagggcacatgggagaaacacttaccccttttgaaacaagttgaagacaagtgggtagcacatcagataatgcgcgccacataaagttcttcactttgggtggtatcttgaggtgccaaagttttcgccaaaaactagaattgttatctccaggtctgttactcttctgagtttgaagcaagttgtaagcagatttgacagaaaagtggccagttttttcaccaacccatgcccaatgatcattagtagcagagaagctgagaggaatgctcaatattagagttgaatccctaccattaaacatatcgcgaacaagagagacatcccagctgcgagtatgaacatcaaagagagattgaaccgtatgatgattgagccccggagtagtggaagtcacaaaaggattatctttattaggaagccaaggatgagaaagaatacttgtagtcgttcctgtgccaataattcttctaacacccgagcgaactaaaccttgagcactccagatactgcgccagacaaagctaggattactcccagtttcagctgtgagaaagtctgaacgaggataatatttagctttaaacacctggctagcaagagatgactcagaacatagcaactgccatccttgcttagcaagcatagcaaggttaattaaagtcatgaagatgacgaaaccccattccccccaaatctttgtgaaccgccaaccgatcccatgacttccaaatgattccctgaccattagcactcttcgttttccaccaaaaccttgccataagcttttcaatatcattacagattttcagtggaatcagaaaaacactcatggcataagttggaatggattgaatgactgtcttcagaagaatctctttgcctgcacgagagaggaatttaccatcccaactattcaaccgagcaataatcttgttcttgagaaagccaagaataatattcggcaaccctaagtagaaagaaccatcagtagcttcaggcattccgagagtggaacaaatctgagctttaaccgcaccattagtattagggctgaagaatattgaggacttggaagcattaacacgctgacctgaagcaagctcaaaagaatgaagaagtctattcatgctatcagcagcattttgagtcgcttggcaaaataagtaactatcatcagcaaagagcatatgagttaccgagggagccccattagccacacgacatccctgaataatcctgtcagcttcatatcttctgatcaaggaagaaaacccctcggcgcagatgataaacaaataagttgacaaaggatcaccctggcggatacctcgagaaggagtaataggacccattatgtgaccgctatggataacagagtatcttaccgaagtgacacatttcagaacaagatgatccatttgctagcaaaacccatacgagacataaccgcagtcaagtaaccccattcaaccctgtcgtaagctttactcatatcaa

SEQ ID NO: 253030 - DNA, 507 bp, Cannabis indica
agtattttagtatagcagggcgataaaattagacattgagaatgtcggtattagtcttgagttagaaatgactattttacccttagatctttttattatttagttatgtggggaagggtattttagtcatttacccttttgttttgtggctgaattttaaggtggcagctggtcacaatttgttattaacctaagtattgtattggttttgttattagagaattaaaaacaaagtgtgaattagagagaaaacctttttctctctttctcttgttcgaaagccctaggaatcagcagcttgtaggatgtttttcttgctgaaatcagagttaaagattagttgttagtgacccaatccaaggtagaattcttggacttaatctctttctttttcttaagcttcaagtaatgaaattttgcatgaaagtgggtgtttgagctctgtgtttgttgttggtgtttgagtttgttttttgaagtttgattatggttatttaaggtgattca

SEQ ID NO: 253031 - DNA, 690 bp, Cannabis indica
ggaaatttatcctgggtttttgtattaattcttaaagtagaattgatatgttgaattgaatcgattttgaaatgggtgtggttaggtcattgaatgatttatatgtttgggttgttttaagtagttgtatttttcttgtctaagagtaaattggtaaattgtattagaggaaatggtgaagaacaacagagaatagagaaagtttgcatatttctcatacttcaactcatactagtgtgttgaatggggtgatgagggttgttgatgtatgagaaaatataatcgaagtacaagtgcacagtgctctaatggttcttatttatggttagatttatgatgacattcatcataaaatgtcatagagaggagacagttgttcattggcttctcatttcaattttgagattgattacagactaaccatttcagttttgtcagtttgagttaggagttgtgttgtttgagctcctagataattttaaaggttctacattttggtttatgtatattaagttagaatttgagatttctaagcttgaaatgattggattttcttgtttaattgttctacaagggttcagatagggggccgtgcgagattcttcggacaatccctgtcctaatgcgtgtgcagacctagagatcactcgtgtccgcgcgtgcacgtggacatccctttcctgatttttt

SEQ ID NO: 253032 - DNA, 1200 bp, Cannabis indica
agaagtcttagggtggtgagactctgtctaaggagaaggttccaattgatgaggtcattgacctttctgaggagcgatccgtggtggaccttccagttcagaatgtctcaaaatcaaagagttctagagggggaagctcggaccgatctgaacaagttagcaccccttcaacaaacgtggcgctgtgcacagaggcctagagagtcaaagacatggtccaacattacctgaaccggtcacttcctgaagtgaatgatcagctatccggagtagacagtgacttattcttggaactggtcttaggaggggttttgaaggaaattactcggttaaatctctttcttttttatttctttctgtttttttgtagctcggactttgacgcatttgctgtgcagaccaatgtgaacatggcttacacgtactcccgagccaaatcagctacagtcaagaaccttgccaccaccaacacattacagagggatgtggaattggccaagaaggaaactaaggatatgcggagccagctcaaggtcatgaggaatgaactgggggaacaagaagcttcttgctgccaacaccaaggttgatgagctgaccaaatagctacaagatatgccttcgaccgagcaactagaggctgacatgtttctttatctaaagaggtcaatagtctcaaggatgagagggagagtctctacactcttctttccaaactggaggaggatgttaagaacaatcagactagggaggaggaacttgtgaaggaggtccgacacaagcagtctagggtggaggagcttgagaaggaggtggatgtcctaaaggaagttgttcttgatgttttctatgatttttggaaggccaatccgaaaggaaaccttgattatcttggtgatactaagattatgttgagttttgtgcactaaataaaacacatttcaatataatcagatttactaattaataaagatcaaaaatcattttatgttgcatggttcagatgatttatttcatgtttatatttaatgtataaattctattaagtccagaacatatgtatttgttcatgattatagtgttgtcagcacagtggaataaaatcatgattatatgttcaaaagtttagatagtagtagcctttaaatttgaaaatttgatatttccacaaaaatagccttatggttaattttgaaattt

SEQ ID NO: 253033 - DNA, 786 bp, Cannabis indica
agttctgaattgcagaggtgaccaagtgtcgttgtattttgtcagagaagaagttttgtctgatggctaggaagctgagatttttaatttgagaggtggattgcagcaacagattgtaaaatcgactcggtacaattgagaactcatctaatgcagagagcttcctattgtcgttttgacccgacctgtgagatctgaagagacagctctaggattgccgtgattgatggaaataaccttatcggcggcaaggggtttgatttctagttttgggtctggatttcagtgtactactaggagagatttcttgtttatgagtggaacgatggcgtagaagaatcgatgttttgagatttcacatttaggggctgtaacttatcgtctccagtcacggtggcaaaggtcgatggtgttccttaccccatgttcggaccttggctctccttgtcctcggcgtatgacgacgtgttttctgggccgtcgtacggtgttcctcgtcgtcaaacggtgatgaaaagctctgatgtcgacggtgatggttcaaagaccgggcgtgctctgaaggtccggcgtccgagatgtcccgtgaatgcgacttctcgtgctgctgctgtccctgggaagtcgcaggtgtggttccctaaacagcgtgctgaaggagtcgagtcgggagtttccattccgagcttggatggtacgtctggggctctggtgattagaaaagggtctgaacttgtatctgttttgagaggtgatgaggtggactgttcattgggcagggataag

SEQ ID NO: 253034 - DNA, 500 bp, Cannabis indica
aacatacttgtgagtagatctaagatcctggtaaaataaattccaacacgaagggtttcaacaatggaaattttagcatgattttttcgaagatttgaaaataaaataagaaaaattatttgctctagttttctaaaagttaaaatggatcaaagaatccctaaaaagatttaaaacccttttataggtatttaagagggataattaattagtttaaaattcgaatgttctgtgagtttctccccaaaaaggaatgttagcacttattatagcagtataaacatcatgcatgttgtaccgtgtaaactgtcagtgcgtgattttaggtaaaactttcaagtcgcattaaatatctcaaacactgaagagacgttcaatcaagtcatgtcagatcaaagatgacaactagacacacgtcacccatctggacaacttccctgctgaataagtccacatgcgaccaaatagatctcgcacggacataggggcaaatgttatcc

SEQ ID NO: 253035 - DNA, 915 bp, Cannabis indica
aagaagggctcactgtaagtaataatgtgtgtgtgtgtttatatatatatggcatgttccttcattaatttggttactaaacaatttgctgtattaataatggaatggaatggtgcagagggatgaaggagtgaagatggtaagtgaggcaatatgctctggcatttttaacgacttgggcagtggaagcaatgtcgatatttgcgtaataaccaaggtttaattctttttcattttcatttaaaatattaatgtaataagtatcatttatcaccatgcatgtaatataatataaacctttgactatgtttcagggacacacagagtatttgaggaaccatttgatgcccaatcatcctccaacctttgtcagtgaaaaaaataaggaacataaattctctgagaagtttggttagtcacacaaattaacttgaattgcctttaattaattttcaaagtccttgttagctaatattacaaattgattgaattttgcagaggttctttcaacaaagattactccattgaaggagaaggctgaaataattgaagaaggaaattcaatggaagagtgaaaagtttggagaagcaaatgagcatttcttctaataagttttaagaatggaataaatgtactcgtaatcatttacttttattttacatttacatggtctttgcttttggaaaacttaatgacacaagaaattttcaccatttttattgatgcttaaattagcctatatataatttttgagtacaaagtttgcttgcttttgtttttgttgttgtggtgataaattacaagctatttaaaatgaagtgaaatgtgtttttataatttctttatttataatcgaaagtacttaaacttaaatattgacgctacaaattacatataaaaatttattagtacat

SEQ ID NO: 253036 - DNA, 818 bp, Cannabis indica
gcatgaacatagtccggaaccgatttgtgaacacagtcaataacttcatggcatgatgaactagaagcttgaaaaagggatgtaaaataatcaaacattacctgagaaaggccatgctcccaatccacccgaaccccattctcatttttcaagctcacgatttgattattcctcttcctagttgacgccgccttgtgaaagtaattgctattttgatccccctcctttaaccaaagttgctttgcccgttgcttccaaaaggcttcacgttgatcaaggacccgaaacaactcttctttggcttctttgtgtctttgaatggaagtcgaatctcttctagttgccagcctttgtatctcctttttacaacgcttaatccgcactttaaaattaccggtaatctccttgccccacacacttaacttatccgcacaacgagctaatttgcttgagaattcatcctcaacaacactatcccaacaatcacgaacaatctcaaaacacagaggttcttttagccaagcattctcaaacttaaacttgcgattaacagggaaaacactactcggctcaggaaaaaattgggcaatggtcagaagaggaaatttctaagtttgtaagagaagcaccttcgaaaaaattacaccatgacggattgactaaagcccgatccaacctaacctccacccagctgttcgtccccctccctttctcccatgtgaatgggtaaccgcagagttccatatcagccagattacaatcgttgagggtctgctgaaaaccgtttatgagaccttgcgggtacacccttccaccac

SEQ ID NO: 253037 - DNA, 1230 bp, Cannabis indica
aaaaaaatgataaaaaaagttgaaattggcttaactattttttcatataaatatatttttgatatagtgtaaaaagagttatttttttgatattttctttaattaagtagcctaaattaaacatataaattcaaaattttcttttattattcgctattggactaaaatttaatagtgtaatatttttaaaattattatttatagttaaatttgtttattacctgggtaatacgcattaagaagtattatatatatagcacacaccaaaatttctctaatatttaagggtatatatagacgaatcacacattgtgcaatataatgtatatatgtagaccaataaaaaaacaacaagattttagaaaattttgttacacacaatttttttttcatatatatatatgttagattaaatgtggtcatataacataaattagtttttttactttaaaaaaatattacaattcaaattaaaatcactacatatatatctcttatgttttatttatattagatatggctatataatgtaatagttttttttaatattacaatttaaatttaatatgttttaagtcttgacttttgtcatggtttgtcagtgctctgtttcctagttttgtctcttgtgttattgtcctgttggttcgaatttttgtcttggttattacccacgattttttatgatggcatcttctagtaatcttgatcaacaactattcgaaatagccattgaagaagagtcagaaggtggactcgatctggaagaactgggtcctagggaggaagaggagtttgtgtacgattggcgtttatgtctggtgggtggttttatcactgcaggggcagtggattttccgtcaatgcaactgaccctagtggctctgtggaagcctggtaagggagtatacataaaagaattggatgctaaacgttttttgtttcaatttttccatgaaattgacattaagcgagtgattgaaggcagtccatggtatttcaatagaaaatctctaattatctaacgaatgaagaacaactccaaccctcgatgtatcactctcggtacgttggacctctgggttcaaattcatgatcttcaatctggatgtatgacatctacagtgtttcaggcagtcgggaactacataggggcatttgttgaatcgtgtcctaataattttatggtatatggagggattatatgagaattagagtcaccatcgatct

SEQ ID NO: 253038 - DNA, 959 bp, Cannabis indica
ctttctttctctcttttctttctatgtctttctctctctttttcttggttgaagcttatcaatggctaaaagatttaacaaattgtaataaaatctttaacattaactgcatgttcacatataattttcccctatttggtagtgtcaaccttggaagggaaagaaaagagaaacgaagagaatactttacttacaaataaatttcagttaaaaaactagatttaatattgtgtattctttatcctttcaaaatcttaagcattttcggaaattccacattaaggcccaatggctccataattacttgcatttgaacatatttaataaagaagcaaaatttagaagaaaatataacttattatgaaagctttcttaaaacaaaacaaactatgattatgcagttaacttgacactgtccttttcagtttcacatatgaaaatggatagtatagctagcttagctagttactttcatgccagaacatataaatacaattattaagtagtaattatataactactacctactaagttcaagtttagataaggaaataaagaaacgataacaataatatatgtatctatagatatggggaatatgaccattatgatattatcatcatggcttcttaaagggcttaaaacaacttgaactagcatgattaaactcagacttattagtaacaacatgatcattgaacattgctccatccatctcatcatgatcatgatcatgatcgtacggtggtagataaacacttgaccccataatttttaagactgtagtagtcactggatcatcagattcttcatcaccacattataagatttaatgcacttgaacttgagtgttgaaatcccaatcccaatcccaaacctaacttaagcttttcccatcttcttctcttgatgacatcatcatcaacaaatcattatttgctgatgatggtgatgatgag

SEQ ID NO: 253039 - DNA, 917 bp, Cannabis indica
gatcttcagcaaaaggagtttcagcatcaaagattcagagaaagagatccaggttcagatcttgataatactctgcgacagaaaggatacaagggttagagatctgaacggaaggagtcatttaattctgctgcacccaatgtaaggtttcctaaactttatatgtgtttatttcatcgttttagaaagttcatatttagggtgttaatcaacatacttgtgagtagatctaagatcctggtaaaataatttccaacaccagagccatcatcgtgaccaagaaaaaccgagtcaaaagaaatccacaatgatctaagggggaacctcaatcgaagggccgctactgaaaaataagcaccgccaccggttgatccatgccttagggaggtatcgaggaatacactgctagacctccgagaaaagttgaacaagaaaagacaagaacttgatagagagatggaagacctttgacgaaggatagcttctgtcgcatttgaagaatgtaattgggacaaagatgactttgatgatgaatcacctttctcgagggaaatctaatctgagctgctacctccagattttaaggaaccaaacataccaccctatgagagaattatcgatccaaaatatcacttagataccttcattaagatcatgaaaatgaagagggtggcgagcaaggcaaggtgtcaattctttatcgtgatgctcagaagtgtagcatataagtgatataagaggttggctactggatcaattgccttgtggaaacaattcactgatgaattcttggcctaacaccatgcctcgtgagactatattgtcctaagggcaagcttggccaacatcaaatagggagagacataaagcctgaaaagctacattcaacgcttcaccgctaaagcggccaaggttag

SEQ ID NO: 253040 - DNA, 858 bp, Cannabis indica
gcttgaatttcagctttattttcttgcagaattttctctattctatagattgttgttttccgaaatttgatcaattgatatattccaaatataataatatataaagaaggaaaataactttaaaaagtgaccccaaacgtaagctaaaaatagcctaacaggcttcagcctatcactctttgttttaagaagaaaaaaaaaagcaaactactctttgtgagcttgtaaaacgggatatgttgagaaatactctttttttgtatccatcaatcaaaaatacttttatattacattttattaattaataccgtgttgcctaatatactctcaccctacacttaagtctagcacataatttatattaactggtataatggagacatcatctataaaagttggtatatcttaaagaatataaaaataaagataacaatttaaacaaataaaataaagtagatatacaatgtaattgtctcttttagaacggatagtaaaggcccattagtctttttttaaaaaaaaaaaaataaataaaattgctccttgtgaactaaaaggaaaatttctatataatttatcatttacaatagggtttttacatggtatattgtattttggcattttattatttttatactgccataagatagaaattacaaaaataatgtacatttatactgcccatgctgccacttgtcattttgcatgcctttctctatttttttattaattaatttttttaaaaagttgttgttgtgatgctcatggtcaaatcatggcagctcacattttttttttttaaaaaaagtgacaaataaaaaaattatatattaattttgttttataatcacacgttac

SEQ ID NO: 253041 - DNA, 558 bp, Cannabis indica
acggtggttcgtggttgttgacttttgtggtttttattgtagtcacgattatttttgattttattgtactaatttgtatatgttatatacggaaaaaaaaaattgtaaagtaatgattttttttatctgaaaaatatatgaataaatattgtaaaacaatgaattgataataagatattttaggtctgattatttttttgttatattttttgacatttaatctcagttttttcataaaactcgggataaaaaaacctcctttaaatccaagttcttatgtaaaaactgggacaaaaagaggccttttattttggtttttacataaaaattaggataaaaacatctttttatcccggtttctataagctctttttgttgttgtgaacattagaaaaatcatgacagctcatgtattaatcgttttaatgtttctgtttcatctcgccagatttaatggttgttttttaactgttctggtgttgttgtggtggttctgtttgtgggtgtggaaaatggagattttattttttatttttggtgtttacagtataaaagaaa

SEQ ID NO: 253042 - DNA, 649 bp, Cannabis indica
gttgattgaattttaatatatatctttagtgtttgaaaagattacctataatttgaactgagtacatttcacgtatttgtttaaccacttaagtacacaataacatatactagaggtaattaaagagtttcaattacacactttaatttcaaaaccacacaagtccataaatatttttcattaccaactcatttgccaaataataaaaataattatttatatataattatgatttgacattcaaacacacctaaataattttagattttaaaattctccgttactttagtattattttttgtatgcttttgattaagttaacctctttcctaagtcttgtaaatttaaatgaggaacagctcaaacggatagttcaaaattggtcaaaacatgaattttagtagtaattataaatgggagtgagccaaattttagtagtaaaaataaacaaataagtgttttatttatcaaaagcatatgttttagtatcaattgacagcagtacattttactatgttgttgggaaaaagaccatttgatattaattttagaaacaagtcttttactaaagatcaccatcaaaaggcaatattttataaaggaaccccatttgagatttctatttcaccaaaggagcaataaattactt

SEQ ID NO: 253043 - DNA, 905 bp, Cannabis indica
tcaaaatattcagtcctattataaagtacaagatatattaaagtgtaaaaaattaattaataattataattaatttaattttaaaatataattaatcttaattaaagttttataaggaaataaattataaggttacttccaggttacaagttatttattatttatttttatttaattttcaaattaatcacaaccattcaatagtaatctaatggcttaaaaaaatgtaaccatgatagttacattgaaaatgtaaccattgaaacctcttccataataatctattatctaagtgtaccaaatttgatattttcaaaaattataaatatagtgttgtatatgttatgttttattaaaacgataaataatccattattgacaaatgaaacatagatatgtgaatataatggtaatcatatttcatactactacaaaattggattttagtgacactctttagtgacccgcacacaaaagtgcgggtcactaaaaggttaagggtgagttttagtgacacgcacaaaatgactctacaaatttaatgttagcatcttataatgtgtgtcactaaaaatatgaggtgtgactaaagagtaactcccataatttatattattttttttaaaaaaaaatattagtctgtagtgacacactaggtgcgactaggtaagtgtgtcccgaaccacttggtgcgtagctatatccaactttattttttttaaatatagctgtaaacaaaaattaaaaaatatatatttaatataataataataataatcacgcttatctctctttttcaactaatttttattttttcttaaataatctttctcaatcaattacatcatcactattatatcagcaaagaaaataaatataaaaaaaattaaataattaaatataaa

SEQ ID NO: 253044 - DNA, 731 bp, Cannabis indica
tactcaaagtgtggatctgtttcctgtgctcgtgctgtatttgataagacaaagactaaagatttgatattttggaatgcaatgattacaggctatggaattcatggactgggaagagaagctttactgctcttcctcgagatgacagaaaatttaaaacccgaccacacaacttttgtttcacttctttcggcctttagtcactcaggtcttgtggaagaaggacaaaaatggtttcatctcatgcgaaatgatttcaagattcaaccaggggaaaaacattatctttgtatggttgatcttttagctcgagcagggcaagtcgaagaggcttatcagctaatatgttccatggatgctgaacctgggcttcccatatgggttgccctccttgcaggttgttacaatcatgggaagttgttagtcggagaaattgctgcaaaaaatatacttatgctaaacccagacgacttgggagtttatgctttgatctcaaacttctatgccaaggaaaataattggaatgaagtagctgatttgaaaaacatcatgaaacattctggaataaagaaaatacctggctatagtgccgtggaagtgaaaggaaactttcattattttctgatggaagataacagccaccatcaacataaagctattcttcattttctgaataagttggatcatgaaatgagatttatgaaacatgtgccagaagctgaacttctgtg

SEQ ID NO: 253045 - DNA, 529 bp, Cannabis indica
aaaaggtcagttttgaccttggatttctgatttgtctgttgttgtgtgtaggggcaatttaggaataaattcctgcaaaagacaaagatgaaaataattagagaagaagcttaaactcttattgcaacaatctgagtatttatacaagcttacaaggatctaacatgtaaatggagttagtgaaattagttaaatcaattagctttctttaactatttctgcttgtcactgtaacagtttattggtttgctttcttgattatggttcagtgtattggtttaaacaccagacctctttcatttaataaagttaggctttgttttagctaaatttttttcttttttttctttccctgttctgaaattcatactctaaattcttacatgatatcagatgcctttgaatgacgttgcccatgaaatcttcttccacaaatctgaccaaagctccacccattcaagcggtccttactcaaaccaccgctgcagcatcaaaccaattctaactggaatccattctccagctccct

SEQ ID NO: 253046 - DNA, 906 bp, Cannabis indica
taattgttcaatcttgaagaaaaatattaaaaattttctaattgttaataagtttcactcattatcttcatcgtcgatttgctctccataatccatagatgatcagcaatttcatcattgatattcgccattttcactaatttgatctcttgaaatgctaaacccaacaatatcattcaaagtttcgtgagtgctttgtatagtagcatcttgtacttcatagatgtcttcatctccatcaaaatatatgtctttttctacatttgtccttataaaattgtgaattccacaacaggcaagcacgatgtacttctgtattttcaaatcatacaaaggcatttgctttaaaattaaaaaacgagcctttaatacgccaaagtaccgcttgatgatatttctcaaagacgaatgtcgataattgaactccttttttcctgaatgattatgatctgtatattgattcaaatgatatctttctcctcgatatgggaaaagaaaaccaggcatatttgtatatccagaatcaatcagataatatttttctaaacaatgttaattgatattattttttcatataaattatctaatcaaaattcaaagatagataacttcttaaaagtaacttctcatcctaattagcctcatgccaacctaaaaacagtaagcaattgctacagctagccatgacccatacatcattcttttcattctaagaatacttcagattcattatttcatttcataaaatagtcaataaagatgcaaacaggagatactacagaacaatcgtccatattttgcaagtactgaaacaacatgaactttattaagactagaccaaaaccttgaataagcaaatcaacatatcaacatgaaatttgaattaatagacaagaaatataatta

SEQ ID NO: 253047 - DNA, 529 bp, Cannabis indica
aaaaaagtatattaaagtaattcactaatgctaaatgacaataatataaataaaaagtatgtattaattgtatgccaagttttgtacgatgttgtatcttgtgttaaatttagtcaaatttttagcatgtggcaaatttggtaaagtttagcatactattggataaggattttttactaaaataaagcattttgcatcacttttttagcactctattagagatgttcttatttagtacaaaacttgatgcatttattaaaaaacaatataaaaataataactttattattaattgtattgttatttcatggtaaattgcggcataactcgcaaaacccaaaatttgacggcaaatctcgcaaacacgcgttctattaacaattagccatttacatccattttcatattaactgtcaggttagttgtccacatgtatacaatgtactatttatatggatacagtgtaccattttcaattcttcacttttatatatactatcacgaacccatggagagagagagagagaga

SEQ ID NO: 253048 - DNA, 688 bp, Cannabis indica
acagctacgactcctttcagtaaacactctgagccatctcttttaactcaagcttgatcgaaacaacttctctttatggaagactatgttgtttaccatcatttgtggtcataatggtcaaaaagcttgtctgcaagaattcatcacagttgagacaactgatgagaaaggggaaataacctcataactacttaaaaatcttaaatatgcagcatagtcttcatatttgctcctagtaaaagggtatccttgattggattttctaatgatgacttggcttgttgtcccgacaataaaaagtcagttagaggttattatgtttactttggcgagtccttaatttcttagtcctctaagagacaatctattgtggctcgcacaagcactgagtcgaagtgtagagctttggctcatcttgctgctgaattagctttgttacaggaattattgactgaaatgaagtttaaattactaagtattcttgttacctggtgtgataacttaattaggagcaagtgtgttagccaccaaccctgtataccacgcaaggaccaagcacatagaacttgatgttcactttgttcaagacaaggtgttggagaagaagctcgaaattcaatatgtaccttcccatgatcaagttgttaaatgtttaacaaagtgactaacaacaaccaggttccaatcc

SEQ ID NO: 253049 - DNA, 1470 bp, Cannabis indica
ctttattgatgttgaataaaatagattacattgaaatggagttttatttagggcataaaacccaacagttagcacgtcatgtttactcgaaaagtaactttggtgacgtcaatttgggcgctgaatgtcaatttgggggctaggtgtcaacctgggcgttagctgttgaacacccttcagtgaaatggctataaatccctcaatattaatctaattgatgtgattcaactattgagttttaaagctctttccaagcttttttaagtcatgtctcacactcgtatcgcaattctaactatttcaagtccaaatttcatctccaatgtgcattttgtctaaacaaaactgaaaagagtaattttgagttgaattaagttgatattcagttgatccaacttgaggagatttatgttgaaagtcgaaatgcctcgcttgagaagatctagaagaaacctgaggaatatgacccacacgtgtgttggggtttatgccatgaaaagtatgtaaagatatttctgattattaaataaagagttaaacatttgatatgtatgtgaatgttaaattgttaatatttattattgaataatttatattaaatatcgaaaaattcattactcatatataaggttgtggcttgtagctgtacagagagctaataccacttagctatgaaataaaacaatcaataatatattaaaattatgaaatctttattcaatggttgctagtacggttcactgatgccggttctacggtgcaagtaatatcggttcagattactaatgtagtgaaacatctaagtgaaggtgctttatataatagaattatatatgacaaggactaggggtgttcatcaaaatgttcaaaccgcccgtatcaccgcaccgcaaaaaaatgcggtttgaaattctttgcggtcgcggtttaaatttttcctaaaccgcgcggtgcggtgcggtttgcggttttgaattgttaatatgcggttcaaaccgcaccgcaccgcacattataaaaataccaatttttatatttagttaggtccaatatgtgaatgtccaacccaaagcccattaattattgtattattgaaacttattttttttcatatttattttcaagccttatggtatttttaacaagtgttgctcaagctttgttgtatttgtgatagtttaattattagtgatagtccaaaccgcaaaaaccacaaaaaccgtaccgcatcatttttcgcggtgcagttttttagtttcgcagtgcgggtgcggtttgagaaattggaaaaaccgcatgtgcgggttggtttgaaaaaatggtcaaaaaccgcaccacccacaccgcgaacactcctaacaaggactgatatgaataaagttgtccttattaacatgtcgttatcataaaaatctaattcatatcataacacgatcaatagtagataggcctaaatcctaagttatcatg

SEQ ID NO: 253050 - DNA, 588 bp, Cannabis indica
atcttattcatggtcgatgcctcagttgttggaaatgatgcggggctcggaattgttcaaacaaatgttccaagggaggttgcaatttcggcccaggctttccggactgtgctgagtgttttagaagcagaatttgaagccattctactatgtttggagttgtgtgctgatttgggtttggaagaggtttgcatccactcggattcttcgactgcagtcaaagccttacaagttcagtcgctaccctatgcttggggttcttatcaaagttttgctaagtgtttgtctctattaaactcttataatcagtggtcagttgtttacatttcccggtctgaaaactcggttgcagatcagcttgcccatctcgctcgagtgaatcgtgtttgtgtttcgtctgtttttagggaagcagctccccttgtggctgctatttagcctttgtgctttgtgaaataaaagtcttgataatcaaaaaaaaaaaaaaacaacaataataaaatttactaattgaacaaaaacaattgtaacaaaattttaaaaaattaaaaaaacaaaattaacaaataatagagagaaaaaataaat

SEQ ID NO: 253051 - DNA, 1020 bp, Cannabis indica
aaaagatcaaccggagactgtaactttccatgattgcatgcactccattctttctttagctctccccaatgtcgtggtcctttcttgcttgattctccatagtcaaattctctttcatcacctgcataaaccaaatcaaaccctataaatatatgtaatattattgtgatatagggtttaagattttatttacaatatgtgaccattgataaataatcgtacccttgtaattactttcccaaattataattattaaatctattttgatcatatgtactaaacatattctaaagattaatattattattacgtaccaacttcttgagctgaaatgagtagcattgtttggtgcaagtagaagaaattgcatatgatcactgcaaaccaccaccagcttaagctgtggttgctttgatccttaatcatgattagtatcagatcttattaattagagacttgatatgtattgtgttatgtattaattttgttgcaatactaaagagctttccgaatggggtatttatttataattatacattggagatatatatgcgtctttgtctttattattattttcggttaatgctatattttgtcacgggaggaaaggacaataacaataagcaagtatgaaatagtattcatacattattatatgtgtatacacacaaaaataatgggtaatacaaattaaggaatcccttgtttggactgggttggacagcttggaaggtctcgggttgttttcagcctaagatacagaggtgttgacacttaggaaggctgcggttcaatgtgctcaatttggttttacaaagatccagtttgagttagattgacagagtttgatgatttggaaaattaataatcatgacagcactttgggagacattgattattcttgtaataattttcatgatgttagatttctgtattgatccaaacagttaatttggtagcgtattctttagctaatatgcattgttagctatttggtggcttgattatcatgattgtgtg

SEQ ID NO: 253052 - DNA, 1131 bp, Cannabis indica
ttgagatgttttatggttgtctggtttgtgatggttgaagacaggtttgggaggggttgtgtgggtcgcgactgccatggtcatatcgtggaggctttcaatcggggtcatgtagggagggttcaacctgaagttgctgagatggttgacatcaaagaagcattaagttggattgattgtcacaattggggacaagtaattttggaatcagacagcttagtatgcgtacaagctattcaaagtaaagtctctatgtcatcttcttttggccttttagtgcatgatgttcgtgcgttgcttttatctttagacaatgttgaattgcattttatcaaacgatctgcaaactagctggctcattgtttagccagagattcttgtttctctccaggtcgtgtgcttcagttggaggattgttcctctaaagcacgttctataattttttaacgatttgattaattaataaagataccgatttgagtaaaaaaaaaaataagatatatttttatatttaaaatatttgatttagatttaatttattatctatatttttccaaggaattaaaattattgtggtattttaaaagtgaagaattggagtgaaaaaaaataatatattttttttacaaaaaagctcatatttttggaccctgatcgaagcccacacgcgcgtagcatcctctcctcatcagagccgtccgttctttgatcgagtggcccagacaggcgcgtcctccccactccagataaggacacgtgagccctgttctccttcctgcctctgcctgcagcgtcagacgcgtggggccctcctactgcagcttgtctccccacaacagccactagccagctaccacttgtccgcctctcgttcaatccgagatccagcagccttcccatgtgcgccaagtgccgtctcctccttccatccaccattttcaaattattttgatgctgccaagtgtcccaatgcatgaaaaagtactcaaaatgtcaattacaaaaatacattataatttcctattcctttgtatttatttggctcattttccggttttactatttttctcagccattaaattacacatcatatattttaccatgctacccttctcatatcccacctacctc

SEQ ID NO: 253053 - DNA, 560 bp, Cannabis indica
gcagaagttaatgaatgaaggtaaagctctacttcccacatgaacatctgcctccaccttaatattctcatatctcacttcaatagtgggaaggtcaattccaacccttaacaaaacaaaaattaaatgtattaattattattgtaattctttaattagatataaaattaagttctaatttggacccgttataaataagaataaattgtaattagttatacattttttaagtcccgtattaataaagtacacatttgtataagaataattacattttaataaaatatatacatataatttatttatgtagaattaatatttttattctaaattgtaatacatgtataaatattatatttactcaaaaataattttaaattgttatattgatatttttaggtattttgattttttattctagtgtaaatttatttagttataacttctcaattagaatataatttgcttagtgttaagtgttagaggacactaagtcttattaactttataattggataaaaaaaaaaagttgtaataatatcattattattattataatt

SEQ ID NO: 253054 - DNA, 2117 bp, Cannabis indica
aatgataaaaattaatggcacctcgacaaattcttgctttagtaaattctttggatattagtttattttttaaaacttgttgattcttcctagacaaaaaaaaaaaaaaaaaaaaaaacaaataaaactcaaattatcaacaacaagacataatatgttttgcccattcaaattccaataataaaaacagaattactactagccatcaaggtcactactaagcttgaggcattgttcccatagttttcttgtccttaatgtcatgtcttgtaatctaaatgtgaaagaaaattaatgtcccaaaattgttaaaagagaataaacaaactagtatacatgcatattagtgaaatgaatcttaaactttattattgagtaaagaaaggtttatatacatgaactaagtaacagaaatctgttacaaggaacagaaaagagcaaacaatatacaactaactaaataacaaaaataacagaaaatataatctctgtaatacgccccctcaagatgagctatatatgttgatgatgcttatcttgctcaagagaaagttatgttgagtgggaaagagagctttggtcattatatctgcgaggttgtgccgagagggaacatgaatgagcttgagtcgatttttgttgacttggtctcgcacaatatggcagtctatgtctatgtgttttgttctctcgtggaaaacagcattctcggagatgtgcaaggcagcttgattatcacagtaaactgttgctggtgtggagtgtgtaatgccaaagtctttgaggatgttgaatagccagagaagttcgcatgttgtgtttgctaaggaacgatattctgcttgtgcagaggatttggacacggtaggttgtttcttggacttccaggagatgagggagttacctaagtctatgtctatgtgttttgttctctcgtggaaaacaacattctcggagatgtgcaaggcagcttgattatcacagtaaactgttgctggtgtggagtgtgtaatgccaaagtctttgagaatgttgaatagccagagaagttcgcatgttgtgtttgctaaggaacgatattctgcttctgcagaggatttggacacggtaggttgtttcttggacttccaggagatgagggagttacctaagaagatgcaatagccagtaatggagcgtctagtgtcaggacatgtaccccagtcggcatcggtgaaggcatggagttggtatttattcgaattggcagggatgcttgagctgaataagagaccttgccctggtgtacatttaagatattgaaggattctgttagcagccttcatgtggggttgtcgaggatcactgaggaactggcttaggcgattgacggcataggtgatgtcaggcctagttatggtaaaatatagcaacttcccgattaagcttctgtatgaagtagggtcagaaataggtggtccagtgtctttgctaagggatgtattggcatccataggagtggaaacggccttttttccaatggagccagaatctgtgagaatttgaagggtgaaaggcctttgggagacagaaattccagccttggatcgggctatttctaatccaagaaaaaatctaggatagccgaggtctttgagatgaaactttgagtggagaaaggacttgaattcagaagcatcttgggcattattgctcgcaatgattatgtgatcgacataaacaaggagtgcaaggaaggttgtaggggatgttcgaatgaacaaggagtgatcattgggagattgagtaaagccaatgcttaggagagtagagctgagtttggcaaaccattgccgagaagattgttttaatccatagaggcttttattgagtttacaaacggcatttgggggaagttcaccatcatgaatatagccctttggaagtgacatgtatacatcttcagttaggcatgtaagaaggcattgttgatgtccatttggtgtaaatcccaattgtttatggcactgagagcaaagaataatttgagagtattgaacttagccacgggggcaaaagtttcgaagtagtcaatgccatgttgttggttataaccttttgctactaaacgagctttg

SEQ ID NO: 253055 - DNA, 972 bp, Cannabis indica
ctatatctttttcggtttgtcttaagaaatctgaagtatttgcattatcttttagctgtcatgctcaagagtagttatttttgtagcagcatacctattacttacagaatctttatttattttactttgttcgaaagagcagttggaatttggtctgccaaaatttaattgtgttgctatgattttttttttcaattatatatttgtcaattttaagctcatatggttttagttatcgctgcctatattatttgtaaaagtcagtttgctttgctcatttttgtgtggtttgatttgatgatttaattttctgttcaaatgtttcctctggctctaatacggttctgtacatttttcttatttcgtttaaaccagtatgggcttgatactactgagtttacatacaatccaaatgactcgagtagattcccgcaagctaccaatcaaccaacagaagaaagaagccgttgcgccatcatgtgagagagcttaagattttaaccgaaccgaaagtttaatctaaagttggtgtctgaagactgatcaacgcgaccatggtttgtaacctcgagcatctcagaattcccttcatcgagtttgtgtagaacagaaaacagtcgagtccttttactgtattggtgtgtgtataattgtgttgttactttggtggagtcaatttgagtatatagcttgttattcaagtggattccactttgagcataatatgaaatttaaggtgcatttatgagacataaaattgattttagaaggtgtttaattgaacatcaattttatttttcttttttatttgtatttttctaagttttcagtgttgcagttttacagggcagaattacatttttttgggttgatgtctgttgatttttccatcttgaagtgcgcatcagtaattgtaatgaattggctcaaccgcaatgctatttttgtcttctttgttatgaaaaagagtaa

SEQ ID NO: 253056 - DNA, 845 bp, Cannabis indica
gtaaaaaaatcgttttgaggaccgtcgcgaattctgatatttgtagtagcatttaaataatatttattgatcaagaacactaaatgctatataaaaatatttattattgaatatttacatatgcaaatatttaaacaataaataaatagtaaaataaataattattcattgtaacatttaagcaattataatgtttatcttcaacaataaattggctattttatcaaaagtaatgttcatcgttaacaacaactgcataattaaatttattgccaccaatagttgatctacttctgtgatatcaaataatataaaagtcatcgatctttcatcttcgacaagtcttcaaaatttgcagcattggtcaattttattctgcacatagcaaataatcaataaattttatcatataatatatgtgcttgaattctcaaaattcgacaagaagttaccttccataatggataaccataaaacaactcgtaggtaattctattttttcttactacacagtcaacaccatatcagtattttccattagaagagtcgctattcttctttatatcaattgggccactactcttttccattatactatgctacaaaattaattttaattaatttatagggaaatttacggcataaatacttattttgttcattttgttgctaataagtacccaattttaaaaaattgtagcattaatactcaaaatctcacttcttaaactctgccgttggtaccacctaacagacttactactaaggacacgtgtagtgtcctgataattcctcttttttttttcttcacctaaacaaatcaataatcatttaaaacatatatg

SEQ ID NO: 253057 - DNA, 642 bp, Cannabis indica
tgtaaataataaattaatataatttatataaataattattatttatataataatataattaacaaattttagaaatgaattagaaaaaacttttttattaaaaaaaaaaagacctttttaacaaacttaaatttaattatttatatcattcaaaaaaaattaattatttatattaagttgctagtaatataccattagagactcgcaggcggacgaattagaggccattgctgcttacgcttgatcctgcagtataggaaaagttgttggcttggagaaccaagctttcatctgacagttagtgtcgaagtgagcacattattgtcggggaactacttagattttagtgacgtacctcaacattttaaggaacaacttgtgcagagaatgaaggtaatcaattgatgggcataataaattttcttcataaataatcaaacaactaactaataatttaattctttaaatatagtattattatgatatcgatggtcacccagaatccgaaaaagtgatgaggactctttaccatgagatgggcaaaagatattcagaaagaaaaaacattaggcatattttctttcaaaaatattacgaagaaaatcatgataatttagaagtggcactcaatgctacgcctga

SEQ ID NO: 253058 - DNA, 955 bp, Cannabis indica
cgcggggacccgcccctagtggactggggatttcccgtctaaatgaggaacgaggcggtgacggtgattattttttgtcctcgaatgttaaacgggatggggacggggatcacactctccgcctcgataggaatccgtttattattttatcttatatttttagtaatattttataatttataatttatgtttgcattttttagtatattagtattttttttctataatttttaagttgtgttttagataataattagtttattgaataataagtaatgtgtaatattttaatttttatgtagtttaatatttttgtattttaaaaatttttatggagacgggagaagcactccccgctaattttctgccccgtgtgcatccctatttacaatacacatgtatagaatatacataaatatattttaaacatgtgcatttcacaatttaaatatttttctttaaaatttgaattaaatatattctttttgttgaaatgaattgactaatttaatttgttaaagtaaaacattacaaaaattaatcaaaactaatataaaaatactaaattaaatatctatttaaaactaattaaaataaaaaaaaatctaaaagaaaattgagaacaaaaaaaaaaaagatataaacaattctatggatcagtaaattacatcttacataacatatatatacttatttataattattaatcaaatcaaagattttgaattgtctttttcttttattatattcaccaacttttgtcttacatatcatatgttcgtgtaaatttttgcttattatattttcatttggacactctatacagcttgtaggttgtatagtgagatttaactcccttttatctatatagacttttttaaccattcacaatatctattaacatcttcaatatttggtccaaaaccataatttttagtctcctcaacatcttctt

SEQ ID NO: 253059 - DNA, 640 bp, Cannabis indica
ccttggttacttgcatgatgcgattgtatttggacaaaaggtcctttgggtccgtctgtccatcatacaattcaatctagggcatcatgaaaggctccgacaatggtgcatcaatgattcttttcacgcaaggctctgtatcctcttcctctaagtcagatacggcaccactctgtttcctacaaatcttttcagtgatcttcatcaactctttaactttgcattcaagatgttgagttttatcactagaggattctcttccccaaacacaatcgttggtgtgattcctcagatcatttccacgaggtcttgcttttttggccttagccttttcctgtttagcatctagctttctttggaggttgttggttgaaagacctctttcactattattagataccggatgcacttgttcaacctcctcatcatggttgctggaatcactgagagggggtgcttcccttcgagactctggcttttgttggaaatattttaccaagatctagatttactaacaagtatgtttcattaacatcctaatatgaattctaaaacaatgaaataaacacatataaagtttagggaacgttacattggatgcagcggaatataatgactcattccgttcagatctctagcc

SEQ ID NO: 253060 - DNA, 948 bp, Cannabis indica
gcgaccatacagggtacctatatataattattatatgtgtgtgttttttctaatgaattatgtgttatgatgatcaatattttgaaaattaagaagtcatatccgggtgttaaaaattagtacaagtttttatcaattattattgagtaatttgggtcgtaaatatttaaaattttcttttatttacaaataaataattagttttaatttttgactataataatacttaaattatattgttagaatctctatagatattaattagttgtgaagtcattatcaattaagtatatttaaattaatttttcaataaaagataaaaatttaatgacctgccccaatcgagaactgtcacacaaggccgattgagtgagccttaagaaaataaaaattattaggctcttgtattacaatatatctacttaaaaataggaattatattgtatacccactttattttagctattttaatttttacctttatttctatattttttataatatacccacttttatagatgatgtcttcattataccatttaagttaatgtaaattatgtgctagacttaagtaaaaggtgagactatattagacaactcactcacaaaagtgggtactttttaatgaaatataatatgggagtattttttattaatagatataaaaaataaatattcttcaacttattcctactaaaaaatacatatatttttttaaaagaaaatatttctttgggcccctgggatgggtgggctctaggcgcgggcttaatttgatttagctcaggcctaactctgctgccacgtaattattgacttgacacttaatgttcatgtacctactaaagttctataagtataacttagtattattagcgtcaaaaattaatttatatatttatctataaattattattccatatatatatatatatttttaagaaaata

SEQ ID NO: 253061 - DNA, 570 bp, Cannabis indica
ccattattatttggatgatactagtgattaacctactatgatatgttcaagaaaggaactttaaaataaaacaaaaaaaaagttaatctaaccattcacatggacaataataacttatcagaattatgaggataagaatgaaattttacaatatatattcgaaagaattaggcacaattcttggtccttatggaatgttttatggtagctctagtgattacttaatcttaagcaagtattttacgttaatgttaatattagaatgctatgttgatgacttagtctagaaggaacttaatgtttctaaactaagataaaacgtcacaacaagatgtccttcagtaccaatattaagaggttaaatgcgcacttgagtatgcattaaaccatactcctactgttgagtgagagctctcaaagatgtaatcagacaaagaatattaggagacaatcaagaaagaatctctaaaagttacctatatgttaggtgataggggtgtatatttagaatccctaaatcttcatcaactcagaacttattattagagatggtggttactctggggtgga

SEQ ID NO: 253062 - DNA, 575 bp, Cannabis indica
acgtccattttgcatctccaaagtgggtcaaattttcaaatatatttccaataagaaactagaagaaaagttgtcacacacaattttggaatggtggttttataaggattaaatttaccgttacacctccagttatagaattgtccaatgtacctttttggatttcaaatagtttatcttctttgttgacaattgttcagtagtatagtttcaaagtcattataaatccatattttctgtcaaaattcaaatggggatatggggcatcatttgttagaacttgagaattgatgtgtttatgtagtagcaaagatcatagttgctttattttggtattggagtcatacatcgtgcattgttgcatatgaatgtttttgtcactataatatctggtttcaaagttgatccttcagtaatgttgtttaggtgtagtttttcataatatactttgtttttttaatcttacacgaggtactttgtaagttgcaactttaaacgttattgcaaaacttctacgaattttctaattcggatgtaattgattttcccttgcttttttgagagaatgaatgaac

SEQ ID NO: 253063 - DNA, 621 bp, Cannabis indica
aaaataatttccaacagaggatcagggcgaggcccgtcctaaaactccatctaaagtcgaggaagagggagttgctctgggatcgccttttggggcttcaacgaggaaggggaacccctgtccaaggccgatgaagtcttggtagaggctgaagactatgttactgaggaatacactgaggctgttccttagagaaggcaaagtgtcataggagctcgatgggtttctcctccatctatagtaacccaagccaagatgaagaatttggagaagcacgactatttgggaaatgtcgaatgcttcttcccctttccaagtcactgggcaactagtccaaagtaggggttttgtgcctggtcgggcgctcataccaagcagggtgcaatgctgcctttgcttccgtacttcaagaggattgcagactactaccacctctgcccgacccaattcactctgaagggcatcaaatatttatccgccctgttcatcctttatgcctcgcaaggatggggcgagccatccccacacgacactaactggcttttcaacctgaagtcaactcccaagcagagcaagtcggggtattttttacttctcccaactggatgagaagtggctgaa

SEQ ID NO: 253064 - DNA, 885 bp, Cannabis indica
gggcgagggcgtttgtttttggaagctgcattagctgcaggagcattgtcttgggaattactggatgttgcagcagccaagggaggaaaagatccatgacccaaagttctttgtctttcttggttgactaccatagaaaagactttgtttaaaggggggcatggatcaaggagtagtatttggtcacgaactgcatgatatgagtcattgagacccttaaggaattgaagaacatggtcatggttttgatgatctaatctttgggcagcagcagaacatgtgcaagaaatgcagggtcttaattgattaattttgtccctgattgcagtgagtttagtgaagtatgcactaacggagtcatccccttgattgaggtatgttagtgtttcgtttaattcaaagatccgtggaccattgccttggttaaaccgattgtttaacacggtccacatctcagatgcagtatctaagtacatgatgctgctttttatttcgggtgaaaccgaatgcaagatccaagacatgacaagttgattgcatctattccaagaatcaaagagggaatcatgggaagggggttgagaaagagtaccttcaagaaaaggagttttgtttcttgcaccaatggagagtttgaagtcccttttccatggttgaaagttcttgtctgtgagaacagatgtgaccaagaccagaccaggatggtctgcagtactgaggtaatagggtgatcgaacgtcttcatatgctggtctttcgactggaagaggacgatgaacagcagaagaaggaagagtgttcgttcgagatggattgtcagcggaagtattcgatggtggaggagccgtggggacgtcaactctggaaggatcatcagaattggtt

SEQ ID NO: 253065 - DNA, 1210 bp, Cannabis indica
tgtgagatataattgattatatatatatgtatatattatttattttcaaaaactaatctatatatataatttagtaactagtaacttgttactactttttataactagtaagtaattaaataattaaaattttaatttgttgtattttattatattgtaggttgtgagctaatttttaaggttcgacataatttggtgttgatcagattttgacttcctataggtatatacattcactaactttttttttgttattataattaattatcaatacatgcttagtagagtttgaatgtattaaataatcatccgtagtgaagtaggttctgtgatatattgtactgcggtcggatgagtgtaataatatgcatgttagttgagtttgaatgtcttaaatattcaaccatagtgaagtaggttttgtgaatacatgtatactgcggtcggatgggtggataaattttatattgttaatgttattttgtttattatgtattgttttatttgttttgttagatacgttagactatttttaaaatttttgggaaggtccaattacagccgttatgctgccaaaatttcagtagaattatgataaattttactaaaaaaaatataaaaattaaagaaaaagtacattccattcctggatccattccaatcaactaaacactaccctagttagttagttagttaaaacttatacaacttaataagatgaactagactataaaataagaattatagtaatatataaattaatatgaattaatagtgagaaacttagttagttgtgtaagtagtaactagttataattagttactaattactgcttttttttgttaggatttttgttatgggtaaatcatggatgcgtgaggagagagacacactgtgattttaagtagggttcaatgcatttttagagttttccttaaagaattttaaaaatcccgaacgtattcattgtccgtgtgtaaattattataatagatctaaaggaaatattacaataaataaggaccatgtgtattgacgaggtttcaatagaagttatactacttggtattagcatgacaaacatttagctgatgatccatatccattagggaagtagggggtaaatgatattgtgtaaagaccgcttagtttaaatttgggaattatcagataattagggttttaatatgaaaattgtttattgatatt

SEQ ID NO: 253066 - DNA, 923 bp, Cannabis indica
ccccaagacatagggagagaaccaagattgagaccattgacagccacactacagtcagattcaattttgattctcttaaaccccgcctctgaagcaaaagaaagagctaaggaaatagcagcaagttcaccttctagagcgctactggctaggcagtaatccacagcagagtccccctagagttaatagcagcaatcccagcccaaccttcagctacggaagcatcaactgtgaatgtagtagtgttttcgggcatagttgtagtccaatccttcttttccaaaagatgtctatcttcctcgtttgcttcgatcaccacatcactcgaggagaattccacaaaacgtttgaggcagtcattataaattagctgagtgtcccaggtgcagtgattgtgaaagatgttgttgcgccaaaaccatatggtatcatacaaacaggccaagaataccaacaattcatggtcaagaagattagtccaccattttccaaagtccatgacattgttccagcccattgagtcaagtcttaatccccatttacttttgaaccataatcctctggtgacattgcatttggctataaggtggaaggcatcttcagtctcactgttgcataagaggcaatgcctgtcaggattgtttaggaaatacatctttccagaagttggaagacaatcccccaaaatttttcatataatcacggtgaatctttttcttccataattctttccacactctgtttgaattgttaaacctttgatgttggtatagccaatgggcacttttgacagaaaattttccttctttggccggtttccagaagagaagatcactcccgtcttgaataggcttgatgttgatgattgcctcagctatatctctatcaaagcaggattgcattaggggcacattccaagtcct

SEQ ID NO: 253067 - DNA, 559 bp, Cannabis indica
tttaggacacaaaacccaacatgcactacaatgggcacaacaatctcgtgcttaagtggaaatggcaccaagatttagaattgcatattttgcattcaatttattagtgttaagtaattgatcatgcatgtacatgataaaaatagataattaataacaaacttccaaaaaaaaaaattaagtttattaagagttgaatattatacttgcactaaattgatatcggctaggctcctataacaaacatattataaaagtccttaatgtccgtcaattgaagccaaattgtgtcatctcttgccttaaacaggtcttcatcaactctgaattcgattatggccctgagaaactagttccaaaaacagtcaacttggaagtcattcaagtgggaacataacgacctccaccaggtcgtttatttggcctctcaaggtgttctaaaggttgtgtatgtggaccgattgtaacttcaactttttatctctttggcatgccatgttattttccaagctgttgtttttcatgttgatgtgtatatagaaaaacatttaaaagttat

SEQ ID NO: 253068 - DNA, 1224 bp, Cannabis indica
gaacatatctgacagcaagttctttggccaatatttgatctctaatgaagtggagatcgatttcgatgtgcttgcttcgagcatggaagacgggattggctgcaagagcagctgctccttggttatcaacccaaataactggagtagttgctggtttaatgtgaagttcagacagtaaattgagcagccatttgatttcggcagaggtgttggcaaggcttctaaattcactttcagtgctcgatcgtgccaccacattctgcttcttggcagaccatgaaaccaagttgcctccaagaaaaaccacataacccccggttgatcgtctatcatcaacacagctggcccaatcagcgtcagagtaagcacaaacctccatagtagctgctggtctgagaagtaatccgtgagatagagtgcctttgagatacctaagaagtctcttgcatgcttcccaatgagtcacagtaggagcatgaataaactgactgagtttattaatgataaaggcaacatcaggccgtgtcaaggtaagatattggagagccccgagtgtacttctatacaaggtaatgtcttcaaatggttccccatcagccaaagataatttctgtgttgaacttgttggattgggacaacttttgacaccatctagctgaagccgaacaagtaaatcagtcacatatttactttgagagagatacatccctgcagcatctctatatatctcaatgccaagaaaataatgaataggccccaaatcctttaaggcaaaagacaaattcagatcagcaataagtttggaaattagacttgaatcgggtccagtaaccaatatgtcatcaacgtacactaggaggatgatgagagttgacttagagccatagacaaatagagaagtgtcagatttggaagccttaaacccccactgcagtagtgtgtgaccttaatttttcattccaagctctaggagcttgctttaaaccatagagagccttatgtagtttacagacatgagttggtttggtaggatcctcaaagcctcttggttgtctcatgtacactgtttcttgcaaataaccatttagaaaggcattgctaacatccaattgtctaaccggccatgctgaagtgacagctagtgttagaacagttcgaacagtaaccggtttaactacaggactaaaagtctcttcataatcaataccaggtgtttgtaaatat

SEQ ID NO: 253069 - DNA, 923 bp, Cannabis indica
tataattgaaatataaccggtttgtaacataatgaataaaaataaataacacaaaataactcaaatcagttataattaaaatagaactagttttataacaatgttataatgaataaaaacaaataacacgaaataacttaaaccggttataactaaaatagaactggttatataacatcatgagtgagtatttttgaagtaaatatggtatgtgtgtaattatttggtgggttgaagcatgttgaacgggtgtttttgtttgaattattttacttaactggtttttgtgtgtgagtttttattctagctgctttacggaactaatttttttgtctcaaaattttaactagttgataaatataactggtttctttatattatatttgagttattgtgtgttattctttgtgtttatttattttgttatagaaccggttcttttcatatttatatctcaatatttttttggaattgatccccattttttctaaaaaaagatataatcggttttatgacgtattatgtgttatgatgtatttttattgtgaaactagttttgtttttaatttatgtttcagtattttaggaactgattttctctttgttttttaattgtaatcggcttgagttactgcgtgttacttgtttgtattcattgtgttatataaccagtttatttagtgataacccgtttgagttattttatgttatttatttttattcattgtaatagtcatgcaattttattaaaagcaatcaattaaaataatagtttgtaatttaatcaggacatcttccccattagagacacgactagaattagaattaaaaaacgagaaaaataatcagtcgcctattttctaaatcgtttcacaaaaaaaaaaataaaaataaaatcaaatgaaaaatattgtagcatcaca

SEQ ID NO: 253070 - DNA, 681 bp, Cannabis indica
caactattttcaaaatacctagagagaaaagaaacagttttctcctgttcttgctcatgcattgagaactcaacaagaacaaagcttatacaatttatcctaatagcccacactattccttgtgtgtggtggatcgatttggaagacactagtgtgagtccaattgtaatttcctcatcatctagattaaagatacaacatacaagaagttttgaggataccttgataggtttcaagaggtatactctggacttattatttttattattttgatttaatgtacacacatctgaagattcattgggatatggtacaatgataatcagataatataaaacccttccgctgcatacctgatttcgtaccataaaactaacaacctcaggtcgtggtttctcgaccaccaaatcatcctcctcggtatctctatagagcccatacttgataaatttttatgttattgttagcagtggtatgttccaaaaaaatgttgacatctccagaattgcctgggctttatcccgtaatccaagtgtaaaacttggccaatcgtaagtcttgacatactggaaggcaaaatgaccagcctccatcttagggacaatatagtatttgcgaagaaacctgccaatcttcgagatagaggagtggtttgtgccgatcagccacaggcactcaagt

SEQ ID NO: 253071 - DNA, 905 bp, Cannabis indica
aaaataatttccaacaattagtactaaagaacaccgaagatttttcaaagttcacttgttaaccagtagccatagaaaacagttgaagcaattgaagcacacgagtgacttccccatttgtagccttacagtggaggaagctatcatcaacaaataacatatgagacaccaacggtgcaccattagccactttgatgccatgaatccacttcttctcttcaaaccttctgatgacagcagaaaaacattcagcacacacaaggaacaaataaggagagataggatcaccctgacgaagccctctacttggaacaatcggtcccaaagtatgaccagttattacaatctaatactgcagcgatgataaacaaccaaatataaggcgaacccatttatcagcaaagcccattcgtctcaacatagcacacaaaaaatgccaatcaactctgtcataggccttacttaaatccaatttcagcgccatgtaaccatcattgccaactttttcctcttcaaatagtgtaagacttcaaagctaaccatgatattatttgtaattaatcttccaggaattaacgcactttgattcaaagatataatctcagataataatcccttcattctattagccagaactttagtaatgatcttagcaataacattacaaagggatataggacgcaactcactcatccgatcacgtttcttcttcttaggattgagaacaatattggtgtcattcatcccattcggcatgtactcattacagaaaaagattctaacagtattgatcacatcattaccaataattgaccaatatttttggaaaaatttaggattcataccatcagggctcggtgacttatcgggtgcatttgaaaaaccgcatcttcgacctcatcatc

SEQ ID NO: 253072 - DNA, 957 bp, Cannabis indica
tacgactaaattttttaatacaaagtatgttgtattatttaatacataataaatgatattagcttatattataatatttacaaaggatttggggttaacaccaatctccgaaccggacgcggaccgggacccgagactcagacctggaccccagaccccagacttggaacccgacccggatttcgaacccgggagccggtcccagtcccggaccccggacctggatctaggacgtggacccaggactcagacccgtagttagtgttgggatcgaatgtattaaaaatatattataattttacacaatcaattaatacaagtcaataccgaacattgtattgtattaaataatactaatacaatacaacacaatccaacacaatacattacaatacggcttaccaaacaagccctaagtgcacagtataatacaatatgtggttgagacaaaacacccatttcatatacaaaataagtataaaatgttacttttcttctgcaaccatgaagaaattgtgaatagtagtctcctgcgaccgtccattatttaatggctacaaatgtctcatatttcctgtcctactgccactatatatgtacatatataatgaagaaatcgattcagaatatataaaaactaaataggaaaggagaacaattgaagaatttccttcaatcgtttttctatacgattttttttttcatttttagtagtgctttgatacgataaagccttatcgatttcaggatgatagtttgaattttttttctttcttggaaatggttaatggttaacgtcaaacgtcaatattagcattttgagaaaaaaacattaaaaagaaattgttaaaataaagattctgttacataatcacacttggattaattaagatttttgcccctaaactttaacatgtaacaaatcatggctctaaatttttttaatcgttaaaaatt

SEQ ID NO: 253073 - DNA, 1683 bp, Cannabis indica
aaaaacgacagtttgactattacgttcgaaaacgaaacttgcagctgcgtgcgacccaccttttagcaagacctcactgtatttttttccatcggaatcgcagtgaaattttaggccccaatgtttgaatgtagtaactattgtaactttttcactcacaccatctacagaagagaacattgtcaccataacacatgggattatcattaatattacaccaatgttatgcctcattttgcctaacaatataagtagatatatcttttaattgtacaacgattaatattattatctatgtaatgtttgttttcttttataggttcttggacagatttattaggaaaatggtgaccaatgaattcatcaaaattaaattagacatgaactaatggaaatgagaagtttttgccgactatgaagaaagattatgaagaataatattttgagaattaggcttattatagaaaagtacttgtaaatagataactcctttactattttttgcaaatcatcttgtgtattattagaaagagcatcaaaatacaaatcattaaatacaacaagcatttgactagaaataagagttcattttattgatttattaattcaaaataatttaaaaaatcgtagcacattaaacatgtaggctattattattaagaaatttatttgttttcttttttgacagtattaatactaattacttttcactattttgtgtctgttttattcaattaacaaataacttacaataaaagttaactaatacgcacaaattgtgacacaataagattttactttaaaaattaaacaccaacacaattttttaaaaataacctgtaatatagttatataaataattatgtaaccataatgattaattgtttcacaaattaagtaattaatttaatttatattaaaaccagttctcatttatcccttagctctatgaaaaaaaaggaaaattgttccacctttcatagttaatttacaaaaataacttttatttcttatttatttatttgaaaaaaaacattttatttattcagataagttatgcacatagtattctttttttttactagaaaggatgcacataatgttaactaggatttttctttatccccacgtgtcaattacctaatgccaagtgtcaactttctctcttactctacttactactagagcattgctattaggcaccagtggtgcctagtactttctcgacatgtcacgttgcgattggttagcaatatatttcctaaaagctattatattaaactatatgggacccgatacttagttggaccaatagcgatactgacacataagagggtgctagacaccacttgtgccctttagcatttcccttaccactaaagtaaaggtgtggtaaatttttctatagctaggatcgtttatggcagtaaaactattctatatgcaacctccccaaatggatcgattttcaataaaccttacctctaacttcaaatttcaagggtctccattgtctgtttgcatacttacgtcgacgatctatgcactacaagaaatgtcacttttaccagcacatttttgtgctggtaaaagttagtattgcgctggtaaaagttagtattgcgctgtgttggcaaaagggggttggcaaatcaatgttggtattagaacttttgccagcat

SEQ ID NO: 253074 - DNA, 646 bp, Cannabis indica
tggtcttcccaatatttctcctgcaaccaaataaagatacttaaataaacaagaaccgagtcaaaaatacatataaataaaccacataacaaaatttcacacaaacaagaaaacatgcaagatacagaaggtttgaatttcgttacgtgagtcgttctccttcatgactcaactcaaaacaacataaagtaccacatttgttgtcgttgtcgatatgataaattattaggaaaactaccatgacttcaataatgggaattgcatcccctaaatatttgatatcgactgttctactttgagaagctgaaagtagaaaggacagcataaattcattaccaaattaatcgaaggaaaatagcaatgtttttcttcccaatcgatcatggactaagtttgaaagatcaggccgtatcagcatctcttaaaaagacaccaatgccagaaagcatacacgagctgaggtgaactacagtgctcaatagttttgaatttactatagtattctaaccaagtaaaattctactccaagtcatgcacagaaacacctacaactgtcgcaacaaaaggaatgcaccaaaataatttccataaatcaacactccttgggaacaagtgtaaatcactcaaaagcacacagcataagcaa

SEQ ID NO: 253075 - DNA, 921 bp, Cannabis indica
taaaaatatagtaaacttaatctgtactaaaaataacctaacagtcttcttccttcttcatcttcaacctatcgcctcctcctctctcttctcacaggtttcatctccggcgcaccttcgcctgaccccgatgaggcattctaccacaaccgatggacaaggttcacaccaccaggatcgcaaattactcttttatttttcatccattatctcaacaaaatgaagaaaaaaaatcattagcagtttatatccttttttgaaccaaggaaatttctaagcaaaactctataaaacccaacttcagtcctcttccctaactctttccaacatgaaagtaagaaaagaaaatgaagaacataaactcatctcttcctcccttaccagactccaacccaaaaaccaaagaacaaacacccagagaaattttttgggttcaaaatagcattcagatctatagtgacagaaggtaatttagagagagaaaaagttaccatccgatcaaaagggttatggtttcataaccccaccatttacagatttgtacctaagaaaatgagaagatcaataccaaaagacaatgaaggtcatgatgcgtggatgaagagagacttctaactgtgctggtgttggtatccgtccaccattgatgtcgacgaagagaagggagattggcagaggaagacgcacaaagaaggaaagagggtcggttcctgcgattgaagagagaggaagaagaaattgaaggagagagaaagggtgaggctgtataattttagggtttcatttaattttttttttagaattttaacgatttttttaaaatttataattttttttataataaaattataaaatcatggttttattaaaattataaaatcatttttacgttaaaaaattgaattttttaaatatatgtta

SEQ ID NO: 253076 - DNA, 720 bp, Cannabis indica
aacataaaatgttatttctgatctttattaactagtaatctgattatattgaaatagattttatttagggcacaaaacccaacaacaacaagtaaaccttccaaaaatcatccctctacttctccccaaacacgaccctcagagatcaaaacctaatttttgattacacgggcatccctgttaacctcctttgagaagtacctgggacttcctcaacattttggccgctctaagaactaagaagcaagtcttccaatatctcaaagagaaggtttggagtcacctcaataactggaagcatacgattttttctaaaggtggcaaagagatttttctcaaatcattcatccaagcgattcctacttacacaatggcttgcttccgtatcccggttgccacttgccattccctaatccatcatggctaacttgtggtggggtttcaatgcgaacaatcgacctaaggtccactggcaaagctggcaaaaactttgtaagtcaaaaaaggatggaagtttaggctttcgatcattagttcactttaaccaagctatgcttgctaagcaagcttggcgaatacttaagcatccagactccattatggctagagtctttgcagccagataccaccatcgaacctctttcaccaactgctcccttggccactccccttcttttttttggcgtaacatttattggggaaaagaattactgcataaat

SEQ ID NO: 253077 - DNA, 840 bp, Cannabis indica
ttaggaatggggatgcaccccatgcgcgctcggacaccacgtgacacacgtgttcgaacaaggtgtgtccaaggaaacacacacacggggttgtttgaaaccccactccacacacagaaaggctgctagcagcctcatctaccgaggtttcttggttgtgcacccatgcatgcgcgcgctgatggtatgcactccataccatccgcaccaaatgcaattttttacattttctcaaattttcatgaatttttcaaggaaataatttcgaattttttgtgtaattttatatttagatttttatttttcaaatctcaaatctaattatcagaataaaattcattaattttattttaattaattttagatattagtatattttgaacttgaaaatggataaaatctaattttttgcttaattagttatcttatttttttttaaaaaaaatgattattttatcttatttttaaatataaggttagatattttatattttacattatttaattaattttataaaatgaccttatttgaaatttaaaataagatatattttaattaaaataatctagaaaatttttaaaatccaactagatattttgtcaactttcaaatttttgttattttatttaagttaaattataaaataagataaatgatatttatttatcattttattttattagacttttaattttatttcttttaaatataacataaattttgaaaagttagttgggtaacctccaaagattaatggaatattagaaatttgctatgagcatatttgataatcttagaataatctttttgttgggatttagtttaccaggatcttagat

SEQ ID NO: 253078 - DNA, 1233 bp, Cannabis indica
ctctcaatctcgaagtctccccttgaaacttgccaattctttatatctctgaaatgataagtgatgatgatatttataaccttaggatcaagatcctaaggtcggtggctggaagaaacgaagttgttaagtttgttagacaataaccaacttaaccaactcttctttgagcgagatctctacgtcagcataagtctaagagcatacaagaacatatatgaagttctaggatcacagactgagggcactcactgaagggacttccctataggatagagccagttggagtcaactatccagaattacctttccagaaagaaaaactagccatctagaatttcttcctagagaaaggctagctgacccttcccggaaggacaagagagcttttcatgactggcttccatgagtgaataactttctaagaatgacttttggagatctttttcatttggaggaactataccacatttatctcttttctcggtctctactatcttaatctcacattcgccatctctttaggtagcaaaactagtggatgccaaagtttggcttgatgatgcctacggatagtaaggatgggcttttgggtcatttactaccaaggtcaattgaactttgcaagggaagcatgtttcattttttttgttccatttttcaaaattcttgtgtttatttattttttttttttacaagtgtgaattgtgagttttgatttcatatttcagtctcattcaattgatattaacaaagaaagactgcttaaccccgttcatcttcaatgcaagagcgctcgatctgtaagctattacacgcatctctttcaaaagtggttgtttcaaggcaaacctcctagctctcttgttaattttgaaaggagctctctaaaattgctaagaagccatttttagggagccactttgagatgctcttaatgatcttgaaaatgtattgtgaacatactaattgtagttgtgtcaataattgggatcatcaaccatgatctccttgacaaccacgacattcctaacacttgtttggtttaaaaagaaagaaattagagaaaaatatatatgaagaaagaatataattaggttgtgtttggttggaggtaatgaaatgacatacgttgtatgtggaccctactagtttttctttttctaacaaaatgatctttctactattttagtggaatgactattttattttaaaatgaaaggaaagactatt

SEQ ID NO: 253079 - DNA, 1001 bp, Cannabis indica
ggagtaacgagcattttcgtgctctctctcccttttagttagaagcaatttccacccaaccctttttgtatataatggagtcgtaaacttccctgttggcgctttaaataagtttgcttcgcatcttaaatttcctaacggtttagaagtcccacatgttgggcttagtggtggtcttttgttgctctggacacatgatgtggatgtaactttgctttcatataatataagtcattttcactgttatcttaaatttcctaatattcctgctttcacttttactgctttttatggtgcgccatctccaatgaataaaccgcattcatggcaactgctccatcgtcttggaagcacttctcgcttatcccctggcttatcacgggtgattttaatgattatctatccttgacggataaaatagggggtgacatgtcacgctctccctctgctcatttccaaacttttattaacgattatgagcttcaccctctccatcagtctgggcagtccattcacttggactaatcgccaaaagcatgttggaagttattttaccaggaacttagatctactcacaagtatgttgatttaacaacctaaatatgaacttctaaaacgatagaaaattaaacacataaaagtatcagaaatcatacattgaatgcagcggcatatatgtctcctcccactcagatctctaacccttgattcctttctgtcacagagtataatcaagatctgagcccgatagtccttctttgttgtttctcaattctacacagccttcctcactatgattgaggtattacttgatgtgtgtgggcactactctaccacttatagatttcgaaacagtgaaggaatagagagagagagggtggcggctcagagagtttttgagtgagaaaattctgtcagaattatgtgtgttcaaaaactgaagcctttgccttctatttatagaagaccacctagggctatggttgaattaattgacattt

SEQ ID NO: 253080 - DNA, 2449 bp, Cannabis indica
ggttgtcgtatattgaagaaaagcattaaggttaattgatatcttaccttttatattagagtttggtgttgtgtagggtttgtatggtctttttgggcctccttctctcaatgatgggtgatgattattttttcttatctaacagtttcagcgataccataaactttatggtattgtgatttttgttagctatcaaatctgctactaagattggtttgtagaatttttttaacttttgttagcttgtgtcgtgaatggagaagatggactaaaagggtggacggagcacctgggtttcgagcttgccaaggatcagagttggtgctgggttttagtttggcttcttggggtggtttctgggcatcaacaacgagaagaagaagataaaagaaaaaaaaagaaaataaataaaaatttgtttagtttttttttttcattttaaattattttaaattaaaaaatataatttggaccaataaaaaattgactcttggattttatttgagtttaacggatgttagaaaatggaccaacgaacttacagaaaatgcgaccttgaggactattaccgccaatttttgagattggggactaatctgcatcaactctagttttttggaatttttgctgcaattatctcttatttttatgtatttatgtataatataaaagtattgctatttgatattagtagtgcacaatattttttataaatgatattttatgattgattaacgatattttttaaaaaatatatttttttaagttatatgagacttcatacataattaggcaccaataatattttttaacattttttgtaattaaaatataaagtcacattctccctcgaagaaaatgaagaagacttcatacttaattagacacttttgaggaagatgactttttctttttatttttcttttcaatgaagaataataattaaaaaaaaaaagaggaagtaagaaatgcaaagaaatctgattaattgttgtgatgatggggtacaattaattaataggtaaataataataaaaaaaacatatataattaaagacttagtagtcatgaaaatggtttgttctccttgtggagcaaaaagagaagcaacccaagtgggtgagccatctgtggagaaaagattttggttttctttcatcaaacactcgagaccgttcatgcttccttagcatctccctcagcggctgcgcctgtgtctgtgtctgtgtctgtggcgccgtgtacctcttcgacgattctcccgttggggaaccaaaactatattatttatatatataatcacaaaaccatattaattgtcaaattttaattatatatattattcaatcaaccactataatttttaaataattgttcatcaaacaaattaaaattagatatatggatcaatttaaattcaatcaatctaatatgattgacattataagatcgaatcttcagggttggtgattacatgttagaatttgtaatggaaatacaaataagtgatgtatatataaaataaaatttaccttatcaaaaatatacttcaatattggattaaattgtgatacaaatatctcacataataaaaaatgatccaaatttaaatcataatatataacatgatgtaaaatttgcatgcatgattattaaaatttatatatttatttttgtataattattattttatatttttaataaattattagattagcattaaaaaaaatattaaattttacattaaaatttacaattatacattaaaatataataataatttttttttacaaaaatatcacaaaagtaatatttatactaaataaaaattaatttttgtatctctccagtctaagagccttatatacatatgtataatgtaacatgtatatatagcctcttccacctttattaaaatatattcttaaactagaaaaatatcatgaattttaattttgagccttcacttattcaactaatttgtataatgagggtggtatttgctactccacttaatgggggagtaatatgttaaagagggcattttatggtaaccaacacactatatataacatgtcatacatttattgataaatcttatgtatttcaatctaaaataaatatgtgagaggtactatatatatgtatatgttatattataaagtgtttggacttaaaatataatagtgtaaattaatatgtttggtttcagcttggagctcttttttagtcttaggagtgtggtattaattttttttttttttaatttgaaagttctttttctttttttctgaatttttttaatttaaaagtccttatagtaacttttctcagaagataaaaagaagagtaaaacttttacttagttttaagtataattaagggaaagtagaaacttacataggaaaattgaaagagcggttgctgttgtaactctcatcagaacggt

SEQ ID NO: 253081 - DNA, 585 bp, Cannabis indica
gcacctaactttatttaatagggtttgattcatcctttcagcaacaccattttgctccaggattttcactacggccctatgcctagtgatccgatattcttgacataacttgtcaaatttggagttaacaaactccaacccattgtgtatcctaatgttcttaactttaagattggttttgttttccgtctgagttttccaagttcaacatttttctaggcattaattcttagttgctagaaaataggtccaaacacacctactataaatcattaactatagaaagaaaatatttattcctaaagtcagtaggcacgttgcatggccctcaaagataaacatgcacatattcgagtatcttctttgttgtatgccttgctggtgtaaaatttcagcttatgttgtttccctaaaacctaagttttcacaaaaatggtaaggcataagaatttaaatttttaattatatcttgtttgtatagtcttttagaccttgttgattgatattcctaagtttgtcatgccacagctgcacatccaattttagccctttcaccaaacttgcttctttggctagacaatttct

SEQ ID NO: 253082 - DNA, 520 bp, Cannabis indica
tcatattttctaatgacccaatcaggacaaaaaaatcaacagtttacatcatctaacttcgtcacccgccccctagacataccacaaattacggtaaacaattcaattgaatatgttgttaattttgattttgactaatgaacctactctcctagtattttagtaggcaaaatcatatcaaaaatgaacgcaccctcatgacacaaaattatcatcaaacatgctctccaaaatgtagataaaaaatgcaacctgtatatattggccatcctatgatcactcagtcaaaggctagaattctcaagccaaagacttatctaagtcaatctagctgggaaaaaattagtcatgagcctcactctgttgctgataccctaaatcatgctaggtggaatgcaggcatgaatgaagagacattcagtcctgtaattaaagcctctacagtccaacttttcctcactataatagtgtctcgaggatgggatgtgagaaaattggacataaataacgcattcttaaa

SEQ ID NO: 253083 - DNA, 510 bp, Cannabis indica
ttatcttgagactccattgtcatagagagtgcataggcaataatgtcagcttcagcatacttagcagggggtctgattcctctcctagctcaatctcgagccaattggtaaccatctaaagtctcaactccatcatctggatctgcttcagattcttctgagttctctgctgttatttcttggtcaggaactgttctttccagctcgatttgagtactgatttgttcatttccttgcttacctgaaaaatcagaaaccacaccttcctcatttctatttaatggaaaatcattttcattaaaaatcacatctctactagttacaattttattggtttctagagaatagagtctatagccttttactccattaggatagcctagaaatatacatttaattgatcttttctcaagtttgtcttgcacattgtgtgcataagctgcacaaccaaatatcttcaagtgtgacaaagatggtggcttaccaaaccacagttcttcaggagttttc

SEQ ID NO: 253084 - DNA, 683 bp, Cannabis indica
tcatatttagggtgttaatctacatacttgtgagtagatctaagatcctggtaaaataaatttccaacaagagtcgacactagcccctttgattatcgtgtaatctccctaaattaggtttacaatgtctgacatgtcctcttatgggcgctcccagacgttttctccatgctgcattaaatgcgaagtgactgttcaactcaagcctttctagtccgaaggcgccttcttatgtcttgactcccggaggggaagataaatcttctgctcacattcgagagctaacgacatcaaccatacttgttgcttctctaattcaacttccaactcatctccgggtgacatgcttattttgtccacatgtcacacacagcggcaaccacgtatattgagaataaatcggggcaacaataacaaatagataattcacagcgtatctatatcgtggaacatatagagtgttctatataattgagagtgcaattccaaatctatagtggtgcaatgaggaatcaataagttagggaatttacttggtaaattctagatctgcttattagaagctcgattatataggccccatgggcccccatactagttgagataaaactgcttgtaagactcagtaattgatttataatcaatataaatcaaattagactgtctatttatgaatcttcact

SEQ ID NO: 253085 - DNA, 880 bp, Cannabis indica
tcaaacttatctataggaattgtattacgaacaagagactttatacaattgttaaacttgttgctatagtcgtttattgtgccccattcaccatatgaaatctaaatttcaatttttgacatgcaagctacttggccagttcatatgaatgacactcacatgataatgatacatcatttattaaagagttgtataagtgtatttctaatggtgaagcatcaaataggtgatgccaattatattgcaaaaaaacttgcttcaaaagaattttaaaagttgtgccaaaattgatacattacaaaaattatactaattttatcacataatataacataatttaaaatttatatcactataaatacattattatttatttatttttatatattttaatattatattaaaatatgtagttataggtcataacgttatattataatttgtttacattcttttttatattgttttagataataagataataatagaattagtgataaatgttttttttaggtattttaatagaagtactagttgaaaataaatttgcacgaatcaaattttataattgtgagtacaatgctaaaaattaatactatttaaaaagtggtccttagaggcagttttttggaacttacagcattaaaacctaacataattcatttatattttacactgcaaatagttcaaaaagaatattcaaaaaagaaaaacaaaataaaagaacacaagttaatagtagtcctaaagaatctttaatatacaaacttatttcctctttttaaaagaaaaaaccaaaagtaaaaaaaaaaagtagaagaatgtatactacaaaaagtagaaaattaaaaatatttttttaatgcaaaattatgaaaag

SEQ ID NO: 253086 - DNA, 679 bp, Cannabis indica
taaggagattgacaccaaccgttatctatttcaatttttctatgaaatttatttagaaagggtagtagattaatagagttcagtttgtttttcagaagttaagaaggggagatgatccaaaaagggtagtgttaaacaatctcgacatctgggtgcaaatccacggcttccaaccggggtttaaatctgcgagtgttgtgaagaagttgggtaattttattggtacgtatgttaaggctgaccctaagaattttcagaatgtgtggagagattatatgcgtgttcgggttacgttggacatcactgctcctttgaaaagacgcaggaagctccgacggactgcaatggaggacggtttctgggaaaaattcaaatatgaatatatccccacgttttgttttatctgtggtatcataggccactctgagaaattttgtcataagctttttaatacaccagccgagatgatcataaagcctcatggtgcttggatgagggcttaaccacgacggaggaaaaaacctggtgggctctcactggttgcgtgatgggaatgagatagacgagatgtttgtcggccggttcaagggtggcgcggcgactgctccggtgatgttacaacagtagtcgagaagtgagcaggttgttggaggattttgtggtaattcggtcctgaata

SEQ ID NO: 253087 - DNA, 893 bp, Cannabis indica
ttgctgagagccagacaaacgaaagaggaggagagaggaaaaagagaaaaaatctttctaattgagctttcattcaaaactcaaaacccactgaaattatctttcttgcttcactaaaaaaaatcccaaaagcttcactcaatgaaaatttcaaaattcatcactcatttattcactcaaagactaaaacaagtgtctaaaatagtgcaaatcaatataataaagactactcatttttttacaattgaacacactaatatcaaagaattgattacatagtttaggataattatgtagtttaaggtttgaaaatttttggactttagtttaaggctactcatcactttttgtactttagctccaaaccaaatacgttatgtaactttgtcgagtatttatgagaagttggagggattataaaattttggaggtgagaagttaggattataaaattttaaattccctctataacagattgtaatggtgtttatcgggttggactgttattttggattgcaaaagtgtattttttagaacaaatagcactaatattatattaattttttaatttcaccattttttttttacatttatacatttattacaaaaggttgtttacatttttttttagaacaaatagcaccaatgtttttttttttacatttattaatttgtgattgcatgaagcaataaggttgtttcttcaacctcaaaaatattctgggatgatgttcaacatctttcaaacgtagacgtaatgctagcggcgtagtattcactacgagtgctagtggtcaaagtggtgaaatcactaaggatagactccgatcatcgaactgttaggaatattttttcaggatctagatttactaacaagtatgttgaattaatat

SEQ ID NO: 253088 - DNA, 1594 bp, Cannabis indica
gttcctcgcgatcatatttatgcgattgaagagaagaatggagtctttagaaagcctcccctaatcagagggaatcgtgacaaaagagatctgaagaagttttccaagtaccataaggacatcgaccataccactctggaatgctggttcctacaaaacgaaattgaagaattgatcagacgagaaaaattcggtaagtacaagaaaaacagagaaactcatccccaagcagatgagaatgacgaaacaaacaatacgagtggttcacgaactcctcgcaatatcttaactattattggaggaccccatattggtggagattccaaagagtcgcaagagtgatatgccaaagaagcaaaagaaaaccgctcaccaatgtaaacaatctaagtgagagacctcagaagtttttcaagaaggaatacgatgacataaccttcatggagagtgacgccaggtgggttcatcatccacaccctgacgcactcgtgataatcacaaatataggaggagataatgtccactgaattttagtggacaatgggagttcaattaatcttctcaatttctaagcttttaagcaaatggggttgcagcagaaggacttgtgacctgtaacctcgagtactcatggattcagtggagatacaatcgcactgaaaggaatgatcaaattgccaatcactctgggaactgcccctgtcactgccaagtcaatggccgattttgcaataatcgaccagtattccgcatacaatgcagtgaaaggttgccccattttgaaagatatgaagatagtaacctcaatctatcatcttacgatgaaattccctaccctgcgggtgtgggatccgtgtgaggagtccaatcagatttaagagagtgctataacacggcactaaagctcgcagaaaagaagaagtcgataaagaaaaacaaagaattgatcttaattaaggatgaccagttggagataggtatgctaagatcacatttgcatgtaattttcatgctacacatatatgattgatctatgtcatttggttatattgatatatgtgaccagtgatgggtttagccacactaaatgtggcgaaagccgctttgatgctatgttagtataaatcaatggataagattattttgaaatacctataattatgatatcaaaatttaagtgcttataaggttacgcactataagaaaacatatgtagcccaaagtaaaagattgttggattaaaatctttaatgtgggctcatatgtatttttatgtattgctatataaaatttgacccaaataaaatgatcattttagtaattgtgggccattgggtattaaagtatcatgtgctaaatgtgtagataccttaagagatatttctaatttatgaagggactaaattataaatactaaaattaatagcctattaagttatataatggtagtggtccccaagaaaaaagagcaactatattctcatcttccccaattaagagaaaaaactagagaagcgtaagtcttgtattcttgaaagatcattatccaaaattaccacaaagatcatctttatcaatggattaaggtacactt

SEQ ID NO: 253089 - DNA, 959 bp, Cannabis indica
aacattaaatgttatttctgatctttattaataagtaaatctgattatattgaaatgcattttatttagggcagaaaacgcaacaagatcaaccattgatattgacttagaaagatataacggtatgtttatgatatcttatgtaaaattaatatcgttcccttccaatgtatactccatacatccgatacttgtaacgttgccaatgccttggaaaggagataacccttatccaaggtgtaagtataccttatcgccgattatcatgtcagtttaaatccagtgaactgacaaatcatgagaattaaatttttaaatatataatcatgattatattccactatcatgacgacactataatcatgaacaaatatatatatttatatatgttctggacttaatagaatttatacattaaacataatgatgaaataaatcatgtgaaccatgaaagataaaatgatttctgatcttttattaattagtaaatctgattatattgaaacgagttttatttagaacacaaaacccaataagaatatgatagtacaattgagcgagagcgctaatcataaatatggaatctatagcttctatttggacatagaagtgaaatgataatttccttcaagcttggcttcatagagataaatggaagagctcttatttagtaattatattttataggaagctaagtgttataaggataatatacattgaggggtgaaatggtaaatttgtccatactcgatgtaaatcatctatagagaatctttgattattgggattagaacgatggaaaattttacagcgtatctatatcgtggaatatatagagcactctatataattaagagtgtaattccaaatctatatggtgcaaggaggaattaataagttaatggacttacttggtaaattctagatctacttattcgaagctcggttatataggccca

SEQ ID NO: 253090 - DNA, 730 bp, Cannabis indica
cactgccaaacctagtcgtggcgtccaataatcccaccgcggcgactgggttcagaatacccaaaaatcccattttaaagcctaaaaatacccaaacacaactataatttcacctaagacatacataagcaaaaaccatgccaaagcaagatatttttcaggcattagaaccacaaaatataaactcaattttaccaattcaaatacatcataacacaaaacacaaattacacaataacaccaaaatcaagcttgaacttcaaagcttcaaaccttccaaggaggacccaaacatttcaagcttaaaacccagaaatcaaatcacaatttaaactctaaagtcttacaaaaatagtctagatgcaatccttacaatctcaaaagctcaaaagcaccaaaatcaccatataacacctcacaatcatcaacatgcatccaaaactcatatgaacaccaagaacaagttcttcaagctttagatatcagaaattaaacacaacaaaggaaagattagacatttaccacaaatccaaaagcttcaagctcaaacttacaccaattccacaccaattcaagctttaattccaagaattaataaaaattcaagaaagtaagaaaggggcaaaaagaaggggtcgagctagggctgtgaaagaaccagaaaattgattatcaatttctcaaattttatttttaatttgtaataatgcctaagtggtcaaaatagacc

SEQ ID NO: 253091 - DNA, 768 bp, Cannabis indica
ttaattattgggtttatttgttaacgggagattaaacctaatcgttaaatttaacagaatattcttttatttataagtatattctgttaaaccaagaattgcggttaaataggcacttttaatatataaagatacaatatgatggtatttttaattaatggatacaaaaaatatatatatatattcttcaacttatctcaattttctttgagttgttctttccagcaatatccctttttctaggagtcgaaattaaattagaagaatttacagaacttttaattttttttacttaaatatagtagctttaagtgtggctatttttatgatattttttttaattttaaacttattttatgatatttatcatccaatgtatatatacatttagggtgtgtttgaaagtaactatgtaattactaggtagagtaattattagggtggtaattacacaatttagtaattacactcaaggtgtgtttagatatgaggtagtaattacatacaaatttctaatatcttgtttgacaaaatagttagtaattacatgggaaaaaaatattttttagtagctaatgtttaatatggaaagtttttaataattacacagtgtaattacattcaattcaaatgggggtcatgacaattggagagtagagtgtaattgaaactcctaaattacttccaattcagataaatatgccaaattgtataattacctctaattacacacaaatccatttatattgtggcttttcaaacgcaccc

SEQ ID NO: 253092 - DNA, 1468 bp, Cannabis indica
aacaagtataaagactacttacaagctttgactcaacttaattatcccctatacaccaattaattctatcacaaattaatctcttttctaatctttttaataacactttgaaaagtgcacactttgactcaaatattggtgggaagttttgtaaagtgaaagaaatgaaatctatgctgatagtctgtaatctgcatactgctgatttagtaggaaaaaataaataaaataacagtaatagtaatgtaaggaggtaagaatgataattagtagcaaacttatactgaaaatgaattttaaatattaattaagcaaacttttaaaacttcatatcatgcatccccatatattaattaataaataataaatgaggatacttgtgttgcaatatgcttgacatataggtcctttattacaataatataaatatatatatgagagagagagacacgacttgatgaacttattatatgatcatcaatgaagttaagtttgttcacataattaatgaagcttaattaattaagtaaaacttgacgacgatattctcctatagcccatattggaaagatattacgatacgatgcgaagtttaagacaccattcttcatgtatattccatttacttcctgcatgcatgcatgcatggttaatcactttacgtacgtaattgtcatgtatattccattagattaaatatggtgtaaatatatacctgttgagggaagtcaccatcttccatttgttcattgatcaataatcttattccacgatgtataggtgttggatctatttcagcctgttcatcatgaatcgaaccaattaattaagtaacactatatatatatggaaaagttttgatattttttatgtacatgtataataggcatgaccctgaaattaattgggttagatagcaataaaattattggatcattttcgaaagtaatgtgatatttttaaaaattactaaaaaaaataaactttttttacttttgggcccttgggctggatgggcctagctaggcctgtgcctagcctgctttagcccaagcctggcccctgttaatagggtgcatatattaattacattataatgatgagcattccattattgattgaaaagatctaaagcaatatattaattatgaagtagttaattgtaattaggtaattacctgtccagctccaataagagctaatactgctaatgcagtgttgaacacagtcgaacgatctccttcaatgttagtatacacctatttcacatcataaatataattacttatatattagctacattatttatttcaagatatataaacttaccataaatttgttaatttactgtatatttaataatttgtatactaattaaaattatgttttgccatattaattattaggaggggaaggtttttgtttctcaattacaattttttttttttttttttaagttctatactaa

SEQ ID NO: 253093 - DNA, 597 bp, Cannabis indica
tttatgttaatttacaaaaacaaacacatcaaacaaattaaaacaaacaatttatttagttgaatgatacaataaaaataaaaaatatatataattttaaaatctatgtaaatatttaaattaaaaatctttttagctaacaaaattaaataaataaataaataataaaaaaaccacaatttttggatttgatttattaagaatatgttgaacactacaaactacaaaatttaatatcatgtgaataaaaaagttacaatatatttaaggaaaaaactatatattttagctatgtaaattgagacataaaaatatattaaatcgttttcatcaccgtatcacacttgtaatcgctacaaaatactcaaatcattattatcaccatacctcacttataaatcgtttaattttgctattattgtattgtaatcgatgctacatttaaagttgttgtcatcactaatattaaagactaccaaatattatcaaaatcaatataagaaaaaaaatctatttgaactaactatatatgaaaatactagcaaaatactacgtgcgaggcacgtatactaaatttatgttagttttttttttttt

SEQ ID NO: 253094 - DNA, 579 bp, Cannabis indica
attattatttttttgaatggaaaaagttacttccattaattaaagatcttttaaaagtaaggacaataaattagcacgaacagactccttaccaatcatgtaatcagctttagaataaaagtccttagctaagaagtgggccactttattcacaaatcgctctacaaaatgaactaaaacattaaacaattctgataaaatgagttttgattacaatgtcgtatagagaatacatacgaactttactcttgatagcatgcaccacattgacacaatcaatttccaccaacacatttgaccatccgtgagattttatccaacttagggcctctttaaaaaaatgagaatatcaaaacataatgtaaatttggagggttttacccaaaatttaacttgtagggttaagtattgtattgtatattttaagtagtaatgccgcaaattaggggtgttcgcggtgtgggtggtgcgagttgtagctattttctcaaactaaaccgcatattagggatggtaattatactcgcgggtttaggtacaggccccattgcgggggcaagtatgggtttaaatgttcat

SEQ ID NO: 253095 - DNA, 939 bp, Cannabis indica
aacacactacaatcaccttcacaatctaaaccagttatcaatgcaaactccttaatgttaaacctaatcctaacaccacgaatcataacccacaatttagcatcattaggctgctgaacctcccgcaacaacaaccatgaaaaacttgcggttaaactttgaactcaagaagctgaatgaaatgcccaaaacaggttttgaaaacatttcaagctagttaggcgaaaggaaagtcttaatatttttttttatgaatcaggaattgtattagcacaagaacatttgattacactcaaatagcacccataaagggcctataataaagaacaactatacattgacaatgtatttacaatttttgaaaccattgtgtgtctatatttgagactttttttggccaaaacatctcaattcttagttttaagttagctttcaactcattgagtagggctgtagctgattgctcctctttggtccataggaccctgttcgtccgccaaatgctataaaccagtccggctccggcagctgtaaaaaccagcagtttaaattttatctcctttgatctccctagccatttgatgatgttagggaggcttgtgtgcatagtttcccatcctaaccacttcttgacttcctgcaaacaaactatagatttcgggcaagtcataatattatctataaccttgtatgaagcagtggagacggctttcacaagaaataaatttttctggtcatatatgtaatcccattcctgcaatagttccaacaaaaaacatgaggaaaacaacaaaagactaaaaaactaaaatacaaagaaaaaaaaaacaaaaatgtactataaaaaaaatagacaacttacgagaattttttttgggtatgtcaaagtcttcaagcttctctcaactcttaggatggacctgaaagtaggtataacaa

SEQ ID NO: 253096 - DNA, 1003 bp, Cannabis indica
tctttaaagttgttgaattggttaggaaaaagtggtttagttagaatatctgccacttgatctcttgtggaaacatgaactgtctttatcacaccttgttgcaccttttctcgaactagatgacagtcaatctctatatgctttgttctctcgtgaaaaactggatttgctgcaatgtgttgggctgacttgttatcacaatagagtaaagcaggtcctacatgttcaatctgaagctctttgaggatagaaagcaaccaaaccacttcacaagtggtattggccatggctctgtattcagcctctgcagaggaccttgaaaccgtgtgttgtttcttgcttttccaagagatgatggacgttccaacaaaaatgcaaaagccagttgttgacctccttgtatctggacaagctgcccaatctgaatcagtataagcatgtaacttcacttcagaattggtagcaaagaaaattccttgtccaggagtccctttaacatattgaagaactctttgtgctgcatgtagatgagtgactctaggtgtgcacaagaactggcttagcttgtttactgagtaggaaatatcaggccttgtgatggtcaaatattgtagctttcccactattcttctatataacgttggatcggccaacttctctttctcatcaagcccaagtttgagatttgcttccattggtgtactcactggtttggaacctagatagcctaggtcttccaacaattgaagtgcataaggtctttgtgaaacaaaaatccctttctcagatctagcaacctcaagtcctaggaaatatctcaaatttcctaagtcttttagctgaaatcttgtgtgtaatcttgctttgagtgcttcaagttccacgagattgttgctagcaagaattacatcatcaacataaaccaatagaaatatgaaatttccattgaaatgtttgatgaacaaggagtgatcagtagctgaatggtgaaatccttcatcat

SEQ ID NO: 253097 - DNA, 8393 bp, Cannabis indica
tacaccaacaaaacattattatcagtatccaaggtcaatttcgacctttccttagtctaagtgaatctagacaaaaacggcaccaataaactaacacgacaccaaaccttgtgtcgtttaacccccaaggcttaaagactttccaagaagagtctagaaaccctgaaacacaacacacaccactctgattcgaaatgaaaaccctagcagagcaagttcttctcaagaacttgctcgattctaggcacgaaccctagaatcctacccacacacacacatgtctgtttaaacaaatgaaaaacaagagataaagggagagaatacaccaggaaatatttcagagttcaccccaaattagggctacgtctctgtcaagctcatctgaaagatctagcttgatatccactatcaacaattgtgatttacaatgctttggagcttcctgtcacaagatcgaccaggtaagactcgattttatgtattttacagctctatttttccttctctcttcagtaatttgatatgactttgttttcttctttgtgcatgtacttctcctcccccaaaattcctcaccacgagagtattactctctgtttggacctgcactctttggagcttggaaatggagctttaatctagggtttacttctcttcgctttcactttttctgttttgtgttatgtgcttgctttaatttcctgcttttataatgtgttggagtcggttgatcaaagctggaagttagttacaaaatcagttgtaactaacttctgaatctttgtagaggcaaagccacctaggattgagtctattttctgttgtatatgcgttgttgtatgcttatgtggatattgtgtaaagggactgattataaatggaatttattcaataatttctacctgaattcctcttataatcagttctgatatagtaaatgttattatctctgagattcctagcttgataggtcctacttttagtctcctgattcgattcttaataagttcatacaatgtgtgaacttattaagagtcacaaatttatttactttctaattaaatgagacatatactttccaaaaatttaaattttcttatctaattcaaataacaagtacgagtacaatataattatacattcatttcttatattaaaaaatattataattgatgagaaaatatttatatatatatatgatttgaataagtgaacaagttatttatacaatttttttgaaggtgagagagagggggacatgttatagattgcatgcatgtactataaattaactgcatataaaaaaatgagttttgaagaattgaaggggggccatggctcctgtgagctaacccatacctccgtctctgaatgacggtgtagtactaggaatattgcctgtaataacttttagggcaaaaaataaagttattaccaatggatcttcccatcgttaataagttgatttgttgtagtgtgaagagaactttttatttagtgtgtattttttttacgtgagaatgtagtgggttccacaaaattttagtagataatataattaatacttttctacacctaaattttatattctgaaatccataaacgatttccttgctcacttacaaaccaaatcaaaaaacatataacaaaggcaattgcaggggcttgtttattagactatataggcggccatttttgacatttatgaccgaggtcattttaatttgaatggaaaaaacaagatagcaaaaaagagaaattgtactacgtacctacgacctctcatgactttctttttctcttaacatcaatattttaaacgtgaacaatattcttgatgttgatgcttattattaatataagttacttgatgttgataacaactttgaacattggactaaacccgttgataatacgatcaagatcaatgttgatggggctacctttgagactgaaaatgcatatgggtacggtattgttgcatgtgactcggaaggtaatgtcattgattttgtggctaaatacttctatgggtccttctctgcagaggttgttgaggctttggaggttaaggaagcactaagttggctcaaagacaagggttagaatatggtagaggtcgaaactgatagcttactcactgtccaagcaattttcagtcaacaacagatgacttctgttttttgtttgattacccatgattgtaaatcttttttatcctctctatctaatgttagtcttcatttagttaaacgaccaacaaacaaggttgcccactatgtggctagacgctcttgtttttattctgatcgtagcattcatgatgttaatgtcttggcagattataatgccaacttgtaatttgaatgctttatttcaatgaaattgatatttcatattcaaaatatatatatatatatatgtatatatataagttacttgatgaaattatagcataatacgtacttataacaataaatttcataatatatattattaaaaaactttatacatttaataaatggatgattctacaatgtatttccttaaaaagaatatactgatgcactctttacttgtttcgacatttagaagaatattttaatctgtttttttatatatatttatgtacgttatgactatttatttaagatatctttcaaaattttgaaaaattcggaataatttacaatatagaaaataatattcaaacagtctattttacacgcgcataaaataaaataatcacgcgtgcaacacactgtttaaatgtatttttcggcttattaaacttttttaaatttcttaaaattttacaggttgtcttaaataattataatttatatggccataagacaaaatttgactaaaaaattatttcagatattaaaacacatagaaatgtatcaatgtatcccttttaaataggtacattatagaattttccaataatttatattcatttcctttttctctttctctctcttttttattacattcaaccaaacatgttgatattatgatatatattattgtttcccaactttttatctcctccaccctttaaattaagaaacctagacactttgtcttgtgtatatacctaactatattgcatattaatatattaagaaaatgagcacatgtgcattgaccaacaagtaatccaaagggtcaatcacactttacaaattgatattaattattaaataaataaattaaagcttttttgtaaataaataatttgttgatgcatgaggaattgaggagtggttttaattataacaatttacctaaatgataattaattaatacttcccaagaagttgcttggaaaatgctataagtttccatgtgaatttgttttaacattcaaaaaaaaaaaagagttcgatgtattttcatgtgtgaaaatgcacttatattttcgtagccgccaatcactatatataggaattcgacaaaatttttgttgttggcagaaatttgaatagcattttaataatttggtagagcactactattgttatttttacactatttttcacgtgagattcatggttgcgtaataatattcagaaattgatgtaaatatataaatgagtaaatactattttaaattttgtgttttgtaaaagttattaattaaattctttatttcgttaaatgataaaatggacgttgtattttctaaaattgtataaatatgaccttgaactgattttttgtcaaaataaaacttaattataatatgatctaaagatgttataagaaaattgataacatattctgtatctgtttgtgttagaaattgtcttaaagttaattatattaaaaaataaaattgttaaaaattgagctcatggtcatagttttactattttggaaaatataaggtctattttgtcgtttgacaaaacagaaggtctagttggtaactttaacaaaatatatggtcaaatatagtatttaccctatataaatatatataatattaggtgtttctacaacgcactcatttaaaagagatacattgatgcatcatctacttatttcgatattttgaagaatgttttagttcaattttttttatattcgtgtatgttatagttatgtaagatattctacaaaattttaagaaattcagaatcatttacaatataaaaagtagtattcaaacaatctattttacacgcgtataaaataaaatagtcacacatgaaatacactatttaaatcctgattttggcgtgttaaatttttttctgaaattcttaaaattttaaagtatgtcttaaataattataacgtacatgaccacgagaaatttttttattaaaatattatgtcaaatactaaaacagataaaaatgtatgagtccatcccttttaaaatgtataataaaattttcctacaatattataagtaattaatattaggtaagtgtcatcatcagcataacccttttaagttttcaggaacaaataaaatcttgcaagcatatagtgagttataccaaatctgaagaaggatttttaagttgacaagtacaaagctcattattaatggacatacataaagttcaccaatgatttgcatgtttgtcgcttcactaataatatccccttaaaaaaaattaaacaccatatatatattttactattatttaatattttacttgaaaaaagtaaaaaaaattaacaaaattatttgtataataatctttgaaatctgtctagtaatgtaagtcttcactacactcctctcctttgtacttatacactcctactttattattttgacaatctagtaagatagtctattttaattttttatttacatatattatagttattatgaattatttgtaagttttataaaattttgagtaatttgcggtataaatacctaagtttaactcccagttacaaataaatacttaataagtttaatttttagcgataataatatctaagttataattttggaacttttgtaagtacctcgctgttcaattttaagtaaattgtcacatggcaattcataattggtccaagtcatataatttttttttttaaaaaaatgaatttaatttcaccaataagaaaatgacacgtggataatgacttaacatataatgataaggtacctacagagtttcaaaaatataacttagctattattacagccaaaaattaaacttaagtatttttttgcaactgagagttaaacttaggtaattatgtcgcagattactctaaaacttttaatagtttttaatgtcattaataaaatttaaataattatttatcacttgtataagaaaaaataatcacgagcacattaaaaaaaattacggcactataaattatttaaattttttcacaaaaattaggttctaaataactacaacacgattacgaagtgaacacgaatttgtaactgcaaaatagagaaccagcaaacacaatatttttagacgttgtgtcaacaatcctagcaaattgttactagtccacgggaccacgcccacatataaaattcattagtaagatttcaaagatatagagtttttaacttgtgcataaatagactcactcttcttataagtcgcaagcttgatgaattccaccttgatgaatgaaccctgctgaaacttcaagtgttcaaactcccttcaatttgcttgaagagtacttgcttcctcttgaggaaagacttgaaacactttctcccataagcttcaagaactttctcccgaagatttgcacttttgttcttcttatttgttgatttgattatagactcaaaataataacaaagacatatacatagaggtagagtcgaactcactctcctctataaaataaaggtactctttctcacaaaatatggaatgaaatacaaagagatgaaaacagataaaagacccagctactaatatgagtatttataaaagttgtactcatatcagacaacacatacacggactaaacacgtctagaactcatagaaaacttttttttaaaaaaaatctttaatcaacttagaatgtcctgttctgcacttacaaaatcgcgaacagtaaatacaggtttccttttatagaaaggagacttccaatttgatttctccaatcaaaaccttgtcaaatcttcaataaatggtcagataaatgccaatacatagctggacacaacaactcagaaatatttaattttatttcattaaaacatactatatttgactaatttttctaaaacaaaaaacctagttgtttacggagattttcaaaaatcaataaaatatatgtgaaataaagaaatatataaagataaagaaataatcatataattttaacatggttggggcatgaacgaaccttagtccaaaagtcaatattattacgctaagactagaaaatccttaggatttacacaagtgtttgaaccctagaatttgcctgagcaattgaggaatgagatttaaacactttgcatgcattggtgttctcatatttatagtgctaggattcttatttgtttccctttttccactgatggggtaaatataaataatatattgactttgtaaccatctagtggagcccaacccatgaggtgctgattgtaggatttatacaagtatttgaaccctagaatttgcatgagcaattttatgtggatgccacgtcatgttgatagttgttcaatttgcgtgttataatcatggataataaagacatgttgcttgataattactattttttcatatcgggaagatatatatgcgggtgagatcttgagagttaaatcttgatatcatgggatctggtaattaatgagtatgatatgaagctatttttttggacgtctactggatgagctatctatttgtgattcagaagatctaacttcgctaatggatctagtccattaactttgttgggcctctgctattgggcctcaagtgaataagttgtaactagctttggaaattacacgtgtcctcatctggaaacacggataacatttaccaccaagattctgaaactctaggtgttatggaatctagcacccttcccctcggatgatgtatggcaattgattagtgcgagtctcgagaagaatatcatcattttgtatcttattgtcaagcatcacattaaatgcgtatgtgactgttttcccaaactgttggatttttcttgtggttttttagacataatcttggccattgatctgaggtcacgcgcagaacaccatttttatgtataaatatggtgaaattttcccatttacaacttttacccaaagtctcaaactgagtttgaatttgcacagagaagacgatgacaaatgagggaaccttggagtattatatcaatcattacattcatcttcttcttcaaattcatgaatgagagaatctaggagaatcaccccagttttaactgccgattcttcaacgccatcaagaacactagatattcaagtggaagttgaacagctcatcagtaagactcgtttgattcaattcaggattatggatatctacttgttatacccaaaatttggctgccatctcagtggaggacatatgtcaagataaagggaatgtgaatcgatgcaattgcttatgcaatattgctttttatggaataactcattaattacgtaagtattagagtatatttgtaacccgctgactgtaaggtcttaggcgaggaatcaatgtacaaactggcacttagtatattagcgagaaaccatatgtcactaagtgtgaatcgcgagacatcaaggacagtacacattggaagacgaaagcggcatatatcaatcgtgaaagtctttagcatacaatgtacaaactaagtgtaaaagttggatcgacttgagaccaagtaagcgaggtgcctgtctcgctatggaagacttcttataacttcatctagttagcattagcgaggcttacaatcctgacgagctggaagataacatttgaatgagcctcgaagaactcttaagaagcatggttgacaccaaacatgcatcgtcgatctcggaaagaccaatggcctcagctcgctatcgagatcactggaaccaaacttctatcgagacaactccagaatcaataatcaaagacgtgatttaaaacacgatcattatgacccagaaaaagcgggaaaatcacagctatatgattttcaaatcataaaccgcatttacactacgtgatatataatcaaatctcatgattttagggataattgttgtaaacatattccagtcaactttgtaattaactgtccactatgtaattataaatagtgacaaagaagatcaaaaaatggacgaaaaaactcatacaggagaggccttgaaaa

SEQ ID NO: 253098 - DNA, 1310 bp, Cannabis indica
ttttttttatttatttttgagttacttccattgaattgtctttttcttctttccggcatctttagcttctagtaaagctatcacatttccatcatacgctctagtatagttcagaatttgtgtttattggtaatgtcatttacatttgtgttttcttatttttcttagttttatttttttagctgttgtttgtagtagctgtatgatttgaatattatgttttggtatttgatatttttttttccttttttaattgatttcacttcatttttctggaaaggacgagccagacaactcatgaccatgggaattaaatattcaacacttgtaaaaaaaaaatagttgggcagtactagctggtggtggttaaaatgttgttctactatatcaaacattcaaagttatgcagaattaatagatagagtccatcatgccaattagttgaataacataatgcattttcagagcaatttattaatgacatgttaataactgggtatgatactgctgccattcatcaactaatctcctcactcaactcacaatttgccttagaagctatgggtccagtcagttttttcttgggatttcaagccatcagacaacaatctgcactttatctcaatcaagctcagtatgccaaggaaattctgagaaaaaccaacatggaagatgccaagacatacactactcccatgacaccaggtcacaaattgtctacaatggacagtgaaccatttcatgatcctactctttgtagaagtacaatcggctcactgcagtacctcactttgacaaggcccgatctcagctatgccataaataaatggagtcagtttatgcaaaaatccaattaatgcacattggcttgcttgcaagcgtgttctgcggtatatcaaaggtacaatcaacctcggtttagtcttcaaaccagccaacattctcactttggagggatactctgatgcagattgggcctgcaaccttgatgatagaaagtccacaactggttactgtgtaatgcttggctcaaatctgatcacttggggttcaaagaaacaaacggtcgttgcccgttcaagcactgaatccgaatataggtcgttgtcttccactgctgctgaagtggtttggatttcctctgtgttacaagagcttggcatcattgttcctgtcactccagtcatctggtgtgacaatcaaggtgcccagcaacttgcatccaaccctgtttcactccaagactaagcacattgaagtggatgtccattatgtttgtgacctggtggctcaacgcaaagtaactgtct

SEQ ID NO: 253099 - DNA, 530 bp, Cannabis indica
aatgatcatgtgattgagtgtttttttagtcatccaaaattaaatgagagtgtagcctatgaaagtcaagcctcttttgctaatgtggttgagttgggtgatgtggctaaagatattgggcctactttggatgatgaaaatgtgaccccaacagaaaagttggacatagtttggagagatcccatctataaagtgggcttgaaaccgaaaagaattcgcaagtacagaggtttgtaattgactatattgtgatcttctcatatatatactaattacaatattacattcttaaattgataacgaattttcttatttttatatatatgtttaatcattccataatatttttgatattaaatgctaaaatattcaaatcctctagctcggctaggattgtaataaattaaaaatagattagactataaggttgagactttcttgcattcatacataagtgcttgcattctagaatgtagatcaggtaggacagccgatactggtaagagaatagaaaggtgttgggttttatg

SEQ ID NO: 253100 - DNA, 876 bp, Cannabis indica
acatgatatatactaggattttttgatgtcctcgcggcacaatttattacttgttggttttttgttttaatatataaaaaactatgaaacaatacgtaaaaaaatagtaaacaacctgcattttgtgacgaatgtttaaaaaatttaacgatattaatttttcttataattttctttgaataatatcagaaattaagtgtacaaaatctcttaaaataacatgtattgacaaaatatcttttttcataaaaacagcctgagatggttcttataacactctttcgtatatcccggtcatttaaaattattctcatcattctatatcacgtattgttattactgtatctcattagctcgtatgagtgttcataaaatagtcgatccaatccaattcgtaaagtgcggatattcgcacctacgcggattggattggattggaaaattctaaattcgcacttgtgcggatttgatgttgattgaaatgtaaaagtaatcgatccaataagaataggtcaaataaataatttgtaacatgtaaattttacaatcttctttcatttgtttataaacctagtaacatgataggatccatccaaattagtgtgtacctgtgtgagcctatatatttgctttgggtttagatgcatatagggagcccatttaatttttgtaatttaaatgtactaggttactaaaataaaatgatcattattgataaattttatttaggtccaattagtattgggcttattcaatgaattagagttgtttaattaaggttaaagtcctctactttgggtcttgtgtgagagttagggggccattagtagttggtacgacatactgaatccagccctccctcacatgaacaatccc

SEQ ID NO: 253101 - DNA, 794 bp, Cannabis indica
aaataaattaaaattaaaaaataccttcaggtggtgcgttgggcggtggtgtggtcggcagtggtgcggacggagttggtgatcggaggtttttttatttggggaaaaaagagataaacaaagagggattgagagggataaagagagattgagagaaattaagagagattgaaagagataaagagagattgagagggaaacagagagagaacgagagagggtgagaaatttttttagacaaaaataaaaatggggaagtggctttgtgctccctgatacatatatacttttacctgcgcatccaattgtactggtaaaagtctttaaaaaaaatattttggcctagttcaaaacacacgtttagtttaatacttttgctggggcaattgtgcaccggtaaaagtatccccacctaccacagaaaatccacgcgagaattttccctcccttttttttgagacttttgctggcgcatatatgcactggtaaaagtttacatgcaccggcaaaaatgaaatgaaaggcagtaaacttctcgcgccttttggtgcttcattttcttacgtttaccagcgcatattcattattacgccgacattaatatgttttgccagcacaataatgcgccgacaaaagtgaatcctaattgaaagtgggatttcaagttttgctttatgtcgacaacttttaccggcgtatttgacgaaatgcgccagtaaaaaggcattttcttgtagtgcaactctaagaacataaatgacataattaagattgaacctaaccatatcaggatt

SEQ ID NO: 253102 - DNA, 877 bp, Cannabis indica
taccgcaaccatacaagtgttggtagtggatgaatctacaacatataagcatgcatatactaataaacatatacatacatttgcatatccatatcacacattatatacagttcttaccttctttccagattcaagtgtgctggctgacttgaacggaaagtctcgtgctagatggatgccctaatcacataatgaaaccgagtaaattacatgatcaaaaccttaatcccgagaaatccaaaactacaactctaggttctgttataacctctatgggtcacactaacttaggaaatagggaagcacccaactacgacactggaatgcacgagaattaagaaaatggagcatccggggaaccctagaagaatcggctaatcgattttacaggtactggtaaaaccggttacctggtttgcacattttcacccaaaaaaatccatttcttgctcaaaaccccgccaaatgcatccataccttccagaacacctatacaatgcatatgcaacataatccaaccggtatttcccagaaaaactcaatatcaacaaacatgccattaaagaccaaagttaaggtttctatgctcaaacttgtagaaaacataatccaaacatcaaaaccagctgctagaaactaaattcaactcaaaataagcttagaatttgaattgcaacataacttaaccctaacagcccccatttcacaaaatcacatactcaactaaagaaaaaacttcaaaatacatattcatgggttccagcgtttacctccacttcaagagcacttaatccttagcttaatttcagaaaattgaggagaaaagctggcctttcctctggttttgtctcagccgaaagagagagagagagagaga

SEQ ID NO: 253103 - DNA, 783 bp, Cannabis indica
tatatatattattgttcttttttttttagttattgttcttctatgctacggaaagtcacgagtattaatgaccaactacaaagttttcaatgcaacattaaatgtatagggaacccccttgagattaccaaactatgaagctctttattatttaagcatatttaaatttttatatgttgttcaagttttttcttttattattattattattattttgaaagctattctgcccaagttttgaaaattaatattaattaaaaaatatatatgatttttttttttttgcttttgagcatctttatttttgatatttgaaaaattgtaactaaaacatgccttaaaataatttgtttggtaatcatttatgctaatttttatgtaattttaaatcattaacgctagcgaaaacatgctttaaaatttgttttaccaaacttttaaattgtaataagatgttttacattttaggtactgtaaattatttaaattattttaaaactttttgaaatgggcataaaattaattatttcaaaatttatttttaataccacaaacaaattattaataattttactaaatttataaaatattctaactaattacaatgtatacaccgtcatataaaaaaaattaaattacaattttttttatgtgacaaaaacatatatatgtatatatttgtataagtaaaatcaaaatgcatgcatgctagcttctacgaaatattattcaatatatatatataagtattaaatattgctaaagacaaggcaagaatatcta

SEQ ID NO: 253104 - DNA, 703 bp, Cannabis indica
gtttaaatacttgaaagtttacttatatatcctacttggaaagaaaaaattgaaaggaaaaatacttgtatattaattgtttttttttttttttgaaatagtacttgtatattaatttactatatcatttttcacataattataaataatggtagtaataaattaaatgataagtttatataaaaaaaaatgattataattatgtacacaaattgtgttgtctaaaatacaacctgaaattgtgattggtattatatttggacaaccattatgatcgattctggtagtttcacaagatgacttattatctatgaaataatatgtttagccaaatcaaggaagttcctaactgattgtttgacaaacttattccaataaatttaaactatacaattataggaatcaacaactaacacgtataataacatattaaaaaattcataaaacatccgatccataatacatatgaaattatatgtttatctttgcaattatttttagtaatatttcaaggagtataattgttatttaaaaaattaatatgaaggcaactataaacatgtttgacattgttttttactttttgttttaaaattgtgttttaaaaaataagaacaaaaactaatttttgaagttttcaaaacaccaatcacgtatggttaatgtttactaatgttatccaattttttgcacattgacatgg

SEQ ID NO: 253105 - DNA, 739 bp, Cannabis indica
agatccttaacatagcaaacagatgtgaaattcaaagaaaacattgttatcttgagcaaattttgaaacacttagtaaattcttggtatgtgcaacaaatttttaagaatcaaggttttatcagaactatgagatttaaagaaagcactaccagtatgttgaatttccaaaccagagccatttccaacataaagcctctcttgaccagtgtagtctgcattctgcaccaagttgctcatatctgaagtacaatgattggtagcacctgaatcagggtaccattttgtgtctgagttttgagctggcatagatgtttgagcagcatgagcttgcataggtttgttattatctggtgtgaggagaacaccagtgtagctcttgtcaaacctgtagaaacactcaagagccaagtgtcctgtcttgtgacagatttgacactgtggtttgtttgatgtgtttggaaaccttcctccaaattgagtgctattgtttctttccctggattgaccatgcttgatccacctcgagagagaaaattaggattagcacttctattgaactgatagccaggaggataaaaagtatggtactggggagaattatagggaaactgacctcgaggggcattagatcccctgaaattttgattgcaatgagcaagcaaggctttgtatgagcattgattgtccagatctgttccagcatttatagcagcaagattagcattcagatcaaattc

SEQ ID NO: 253106 - DNA, 726 bp, Cannabis indica
atggcataattaatactataaaaaaagcttaaaaactaaaatatgctataaaaaatggccaatcttaatgttgccatatttttgtaaaacattttaaaagaccagtaatattgatttcaaattcaatggagggttttgttgaaacaacactatttcaagcaaggttttaaatagtattttgaatcccaatttatgtcattaggaatgcaattaattattgggcaatttacaactttatgtactttacttaattacattatatgtcaaataaaaaattgtttataatttattatacattttgttatcccaatttttgcacttttacgtggcatcgcataatggtgacacgtggaatccacttggagtatctgctcggagggaacagtccgagaaggatgcctcgctgacatgccctgagcaaagcaatcagaaatccgtgcagggcaaccaacagttagcaaattcagcttttgcattgtgagtcatcaacgaaatccctataacttgggaatcagattgtagggatatgccatacacacgatcccacgatcagtgtattctgcctcaatctcacgatctttgtactcagcattaatcccacgatctttctgcttatatccattgtaacgagaggggaaagacttcctctccaagcttatagctctataaatagtgatgcatgttcactgggcaaaaggtcgccaacagtttagtcgagactatacc

SEQ ID NO: 253107 - DNA, 611 bp, Cannabis indica
aaaatatttttttattttctaatttttaataatattttatagacgttacaattattattataaaaaaaaatcctaactactaaatctacccacccttatatatagatttaacaattcaaatttcattaattaattaattgttattatttctatattttattatataaatgagatttaaatagtattacagtaacatctcattcttattcttctctatttcttctctatttcttctataaggtgtcaatttttgttatatatatatttatattatatacattatatatataaggtgtcaattttaaaacatatacaacctcaacccttatgtttttatctctcatgctctttccatttttttttcttttaattttttctgttggtttgtaatgcacattgtccatatttctctaatcctatatatatattaatatttttttgtttgtttgtttagactacctcaacagagcattaacaataacattaatgaacaatattaaaaatctcgattttttattggtatttttttttaatattttataatatattttttgatgcacacaactacactcgctaatgttgaccgaggttttcggcaactattaaaatat

SEQ ID NO: 253108 - DNA, 767 bp, Cannabis indica
ttgattacttatacatcaaagatcgtcaagtattcatcaaacaagtcattgtagaaaatattcttcttccaaatcttatcgatcatgaaggtatatgacaataggtgaactggtaggctactttgtagcatggccaaaggtctatcttttatccaataaagaaactttaatgtttatattagtttacttaacttatttgatttattaattaatgaaaattctaactttaaatattttttgatatacgcatgagcctaaaaaataacctagcagccgaagagacaaaaattagaagattcactttgtacaccaacacagcctctaaaatagggatagaaattgtgtggataacaaatgagtaataatgcacctctcaatcccgttcccatttctcatttatgtcccccatccctgcccccgccctgcttaatctctaatagattcagagtaggagaattctcattaaatatggggacccattgggtacccattaaaattaatacaataattaataataataaaaaaacgtaatgtaatttgaaatgaaaatataaaacaagatattgactttaaaataaacaaacattctacgtattataaagtctttattacacagtttattaggaaagattaatagtcaactttgtaagtatgcccaataactttcgtacgtaataattagaaaactatataaaatatttggaaactatatatctgggttgagtatggactggatagtatcaccccgaccccaccccaaaatctct

SEQ ID NO: 253109 - DNA, 873 bp, Cannabis indica
gcactttggctaaaggagggagataagaacactaagtttttccaccgtaaggcgagtaataggaaggcaaagaacaccattaaagggctggttgatgacaagttccaatgggtcacagggaaccggaaaatggggaaagttgcttgtgattactttaagactctctactcttctaactcggcttctatggaggatttacaagaatttcagcggcttattcctaaccgcatatcacgaaccaccaatgaacacctcttggaaccattcacatcggaggatgtcctccaagcaatgaaagccatacacccccaaaaagcgccaggaagcgatggtttgccaggtttattttatagaaattattggtctctcattggtcatgaagtcactaaagtttgtttaggaatcctaaatgaagggatgtcggtgaaagatataaatgacactctcctttgcctcatcccgaaagttcctaaaccaactcgaatgacagagtttagaccaataagcctatgcaatgtggtctataaaattgttgcaaagtgtctagctggccgaatgaaacaaagccttcaccaagccatctcggaggaacaaagtgcctttattgggggaagactaatacaagataatgccatcattgggtttgaaagtctccattgcatgaaaaccaagcgatttggaaacgggaagaaaatggctctaaaattggacatgtccaaggcatacgatcgagttgaatggagcttcttggttactatgatgagggggctcgggtatgaggaaaaatggattgaaaaaatcatgcgttgtgtagagagtgtctccttctcagtccttataaatggtgaaaagattgggaaattccaacctact

SEQ ID NO: 253110 - DNA, 538 bp, Cannabis indica
tctctttcgagttcgccgctaatattgtgcgtcagttttgttaatcgtaactgacacataatactaacgataaacacctgtcgctaatgtcctccgttaataggattttaaaaataaaaaataaattaaattaaattaataaaatatataaatatataaataataaattaaatataacttaaccgattctaaatattataatttaacactagtaatattcattaatactattccaaattcttaaattaaattaaataaataaaaattacataatatttataaagtctgaattattaacaaacttaaattactaattattccataaaattatcattaaggtcttggatgaaaaggtcttgattcgcattattattattgggagattcccgacggttgtggccgacaagaaacatatggttgatttgaagataaaccacgtataagctccccttactgagcttgtgtaacgtccccgcttcaagcctccattgggtccttacactcacggaaagaatggctcttatacacgagtacgtca

SEQ ID NO: 253111 - DNA, 598 bp, Cannabis indica
aaagaaatattgaggagagagagggaatcggcgggggttctactttggaaatttaggagttttacacagttttatacaattaaaaatttttggatttagagataaatgaagaagatgaattgatgaagaaaacaattatgtatatagctattaatccaaaaaaaaaaatatgagggaaaaaatttcatctaccgccaataactaaatttttttatttgtgtaacactatttgccgcgggatccactcctaataataaatacatccgctgataatagttttttaaaatagtttattattagtggcggattgcaccgccggtaataaatatttctccgctactaatactatattattattaatttaatattaaaactacttaatagtgttgatcatatatccgattgagattattagcggtggatttgtcccgcccctaataattccgcaggtaaaaattatttttcttgtagtggtactccgtgccccacaacagtacaaaaaaacgtgtagattaacaattagaatatgtctaatgttattcaacatatataaaaatcaagttcaataatcaagttgagtccctacctctcccaagtc

SEQ ID NO: 253112 - DNA, 679 bp, Cannabis indica
actagttttcataactgtttttttatcgttgttcataattgagttttaagtttcaattttttatttgattatttaaggaaactcgtttttatttgtttgttttaattttgattgttttactagctggtttctcacattccactattttttttgttattcttttatggtttttattgcatttttgtctcttttattttccttgtttttttttctctttgattttaaattctgattctgcttgttatatttgctgcatattgtatgcttaaatcaactctggtttttgagcaagcaaataaaaaaaataaatgcaaaataaagaatgaagttagaaattttgttattacgtattgatataaaatttatatgtttgaaactggtttttaaatttagtatcgtttgtaaaagtttagttgtctatttttcattatgttattgatgaaattatttttttgcctcctttaattataattagtttattttaatattggtgaaactggtttttaaaatagggaatttttaattatatacccaatattcaaactaattacaagaaagggttcaacaatttaaatagtgcacacactacatagcaaatgaagcggcatataccgaaaagagaaataattatctctctaatgtgataattatttttctttgaaatataccacactttttt

SEQ ID NO: 253113 - DNA, 504 bp, Cannabis indica
tcaaaagagaaaaataaaaattggaactcttagaacaatataaatttcacataagctctagttattaaatatgtacttgccaatacattttgtttaacatatcattttggatcctgtattttacaaaaattaccgattcgatcttgtatttttcagaatggaacataataatatcctaaacccaattttagttaaatgaaacataatgacctaagatgaaagtattatgcctaggttaattatatttttttgcatctgtttatgctagaaactggtttcgggttggttatattaaaagaaaaataactacaattaagtgtattattatgtatcattttgaaaaacacaggatttaaattgtaatttatttaaaaaaaaatcagtaagtaatttttatacaacacaaagtctaaatcatatttaacatttattatgtattaaacagtagtaacaagcaaatgatataagctaacattggttggcattagctaggactagaggtgt

SEQ ID NO: 253114 - DNA, 624 bp, Cannabis indica
ttaacggagcgtccatcgttgtgagtgaaggtggcggtcttgggctctagagaagggtaagaagaggtgagagacacaagatgctggcgaatcaaccattttgtatcttccgagtaagggagggcggaagggcccctctgggagagtacgttgctcaagaactgctgggttaactgagggttcggcggggagggaccgccgtgagtcgccggtggcaccatcgggaggagttgggtgtttggcagtggagaaaatcaagggtgagaaagtgataaagaagaaaaaaggaatgaggggtttgatgagatcgttgtattgatggaaaaagaagaaaagagaggtcagatcagagaagaggatgtgcgcgtggagacttggcgtgtgcgcgttcttctttatttctttaaattaaatcattaaattgaatattccatctcaatcggatttaagataatttatgtaactaaggaaactcctcattccgattaaagccaattttatggtgggtttaggggtgtacgtgggttgctcatcttatagcatatttttactaatttaatataaatattgagttgtaaatatttaattgtaatccgctttgattaaaattagaaaaagttaaac

SEQ ID NO: 253115 - DNA, 671 bp, Cannabis indica
tgtgtgagtgaggaaaaaacacgttgaaaatactcgtgttggtttgtagggttagtcgtcattccatgaagcagccagagtgacatactcgtgtataagagccatcattccgtgggtgtaagggtccaatggagactcaaggtggggatgttacaacaaatgagtacagttacctgaaagatgaaatttaaggattggttagaaatatgcatttagccaattgggtgcggatacccgtcatatatctcggttaggagtagcacatggacaacttttcattccttgacagtagagaacagtaaatcctcctcagggagtaggttatcctcaagctctaagaacacaagctccatgcatccaagctccaagcatacatgctcctcagaggggtacctaatgcccaggtgcctagacctgtcatggctcccagaccaagaaatctgtatccacccaaaattgctctacccattgtagatggccttgtggcaaccatatccggaggctcacataatttcaaaattactaagaatgctaaaaaaaaggatatctaaatgaactagattaagaagaaatatgcactctcgtacaaatacatgctcatcgtccacgaatgatcctttcacagaaaaagatgccaagcatgtgcattttttttcataatgatccactag

SEQ ID NO: 253116 - DNA, 599 bp, Cannabis indica
tctaaaaatgaccaggaaactgcaatttttgcaagaaaaagaaaatcccatttgagcattgacagattagaatgctttgttgtacatgaaacttccttgtaacaaaaaaattatgatcatttcattgtgtattcgtatatatataattattaaactcatcatctgtaatgtaggttatattacttcatatcacaaccttaatataacctaacaaacagtattgactctatcgatctattgacatgtattttgatgaacccatttagactttatttgccttctcttcttcctctgcagaactacttaagttatttattcaaaaagaagacctgaagggcagttgctctctgctgctatcccaaaattattagctgcacatgataggcttgagaatatcttcaacatattcaccttccacactgtttttaaaaacaggggaaaaaaaataataaagatgagaaaagtaccaaatgaaaatgttgaaaataacttacaataatattaattgaaaaggattcaagatcagaacttgggaagcctgtcacaatttgcaggtccccatccgatttgtttctcttcgttgtcgtaaatcaccattt

SEQ ID NO: 253117 - DNA, 505 bp, Cannabis indica
agaaaagtgatgcacaacggtcttggcttcgttcctttaaaatttcgcaatattttgagaagcgtagggtgagattttgagaaaatactaatgagtgtaagaaaaggaaaaaaacttgttaaaatttaccctaaacagaaaaacattttaatttttttatattaggggatcaaaatttaacgcggaaccaatcttcatattcacgtcttaatagtacgaattcattgtgacaagtagaaaaaatattttgagatgggtccgggccacatttcacaaaggggtaccactatcagaaatgtgatattttcactatttcgattaaaatgattataattgctttaaaactattttttctctcaatgtgtccaattgaaaagtgatacctaacggtcttggcttcatcgctatgaaatttctcgatttttcgagaattgtagggtgagattttgagagaatactaacgagtgtaaaagtaaggaaaaaacttgttcaaatttaccctgaa

SEQ ID NO: 253118 - DNA, 1288 bp, Cannabis indica
tatactaatcttacctcaattccgaattcaggtgtgccagtcaacctgagtggaacaactgctcggcgaattataggctcctaaatcacatcgataacaacataaataagtgactcgctaaatcacaaccgggacttaggttttaaaccaaaaacctatctacagcaactaaatatggaaatactctaaactagtagggaataaccaactaaaaacttgaaactagcacgaaacgacgagctgaatttttgggataccctgctacaaaattcgggtaaccggttttaccaagaaaacccaaaaacaatcaaagccaaaccaaatcgtttccaaacccaaccaaacttttcagacctgcatattataacccaacgaaccatttccaagcaacaaaacaactacccaagcttagaattgaaaaacaccattaatgagccaagcttgagttcaaaaagtcaaagcttgctcaatctacactacaggccctaaaaccgcttcaaatcaacacatacgaacatattttaacttcagaaacaaacttcaaacaacaaaaacaacaacaacaactaaaactttaattcatgcaaaaccattttcttaaaaaagtcaagaaaacaagagtagaggtttaaaggattatacctttgcttgatatcacaatcaactagatgagaattactagaattactgagagaaattcccaaccctagcagccctagaaatttcgagagagagagaggaaggaaagagagagagagaattgcttccttttccaattttcttattttttgtaaaaaatgaaataaaaacttgttttattaaatatctcagccaattaattaataaaaatctgattattacattaacataaagtccactaaaggacaaaaatacaaatgggcaaaaagatcattttgcccttgccacactaaaagtcataaaatggcattaaggggtactttgagaaattctaaaatcctgagtattcctgacattctcaatgtctaattttattgtcctgctatactaaaaatacttggatgtgattctaatagccaaacaccacgttccaatgttgccgggcacaaaacatgcaaaattatgaaatttctgtatataacttataaaatacattctgaattcaaataaatcatcataaacaagtaattcaatactaataaataattttcataattaaaccctaattatctgctaatttccaaattaaagctaagcggtctttacacgatctttacacgtgtctgtagggttttatgccctaaataaa

SEQ ID NO: 253119 - DNA, 968 bp, Cannabis indica
aaatataataatacagtaatgtgcggtgctaactggacagtcttaagttactaagtaggagaaattagattttgtacagcctatacaaatatttttctagtgattagttaaaataatttatcacatgaatttatgtgtatattgtttactatgaataagctaaatttcatgtagtttaaaattattaactaaaatctcgtgcttcaactatatttaagagaaaatatttaaaaaagtgagaagaatgtaattgaatggagaatatttatagtaatttaaataaaaattgtaaaaataaaataacggaaagtaaaggagtatttgcgataaaatccctttaacatttacaattgttatacatatgattctattcaaaaaagtgacggtaaaagtactttattttataattttattacagtcgtactcttttttggtccattaagtgtcaactacgaaacacgtggcgaaatattattagattatgtattaaataaactaaagaaataatgtcgctatatgtttctgagctgacactaaacggacttaattgacacctaacacccaaaaaaatgtatgattacaacaaaatcgtaaaataaggtatttttatcgttactttttttgattagggttatatatgtaacaattgcaaatattaaggaggtttcgccacaaatatctcaaaaataaagttctacaatgttcataatttttagaggattaaaagatgactcgatcaataccctgctgctaatgccttgacaacagtaacattatcacaataaaggatgactccatcaatacccttttccactattaattcagcagccatagtaatgccagtccatcctgttttgaatattcattagtaaatacgtatataatttgttttttcagtctattcatgcttacgtgttgtacttttgggtatatcgtgttgtgtttaagtctatttcttaatgttgtgc

SEQ ID NO: 253120 - DNA, 717 bp, Cannabis indica
tcaaactatagcctaagaaggtgcaaggtttaaacctgaattgcatcttatgtttgttatatggtctgatgttagggaagcacttacaatcaaaggttttaaaccaagaataatcagattgtttgtgaaacagaatctctaaaggggttttgtgatttagagcaggggtaggtaatctattgtgcatgaacacagctatcataaaggcctcatcccaaaatttcaaaggcatggaggattgagcaagcaaagtgagtccattctgaactatatgcctatgctttctctcagctaagccattctgttcatgagtggttggacatggatgcctatgtaataccccaagctgttgcagaaacttaggaaaggttctaaactccccaccccagtcagtttgcaccattttaatttgtgttcctagttgtaattcagcttcaactttgaacatttgaaacacctttagagttttagatttgtctttgagcatgtatatccatacaaacctaaagtatacatccatgaaatgaatgtaatacttgtacccactgtgagagatagtatgggaaagaccccataaatctgagaccacaagttgtaaaggagctgtgtactcagtgctagaaaccttaggaaatggtagtttatgaattttacccaaacaacaggcaggacaaatagttaattagcatgtttcgtggatttattgcttaggtaaaa

SEQ ID NO: 253121 - DNA, 946 bp, Cannabis indica
ttttttttgattagatagaaaaattaagcataaaaacttaaaattttctaattttacccattcatgggtaatacccattaatagtgcatccatatatgcatatataatatatatatttatatatatatatataatcattaatcaaaagaaaatagtttacttttcataaatattagtcacaaaaaaaatcgttgtttatttctttattttttgctctaggtactgtaatgtaatctcgaaagttaacttatcatttgaatttcaaactattttttgttagcctatctatgggtcaatattgtttacattgtcatcctaaaaatctttatccattcaagcatcaattaatatatctttcaaactccaagagtgacaacccttcttcttttcaaaatttcaatacatgtgaggatttggagttgagactttttactttaaagatttttcaatattatttgtattatgaattaaagcaatgaatatgatatgaaacacacacacacacacacaaaatctgaaattatatctattgtaaatttttatatagtattttctagagtttacactaatattttattttgtttcgatttggtagaatttgttttgatttgttcatcttggtaatattttgttatccgcttgaattgctagggactagcaataagctagttgtggattgtgttaaatgccaaaaatattacatatttcatattaaaaaaagacaaagttaattaaattttaaataatattttcatgaaattaagttatatattttttatattgaaaatattttatttaagattaatttatctttgtgtatataaaataattattatttatagcataattaagaaaaaaagaaagaaaaagataaaaaaaaatatattatttttatcaaaagaattataaattaattagattttaaataaatatttttattaaatta

SEQ ID NO: 253122 - DNA, 689 bp, Cannabis indica
gtaaaataaattccaacagtttgatacgtcgtattgtattgtattgtattggattgtattgtattgtattagtattatttaatataatattatatttggtattggcttgtattaataaattgtgtaaagttataatatattttcaataaattcgactcgaaaaccgacaataggtcggatctgagtcccaagtcccaggtccaagtcctgcgtccttggtagcagatcagatccaagtctgattttcgggtgcagatcagagattgaggttgaccacatattctttataaatattataatacaaattgatacagaccatttgttatgtattaatataatacattactttatccaaatataatgtaatttattatttaatacaacacagctcaacgacaaaaataaaccttatagctttatgtatatagtcgagttagtatacacttcaacttttacatatcaagtagtgttgtgaaacaaccacttaatcaagaacaacaactaatagagaataaatcaactatacaagaaatcaacaacaagctaataattgaaacataaaagaaagaataataggttgttattccaatttaatctgcacaattttacttatagtatccacattaaatgtcgatttcatattttagattcactcataatagatcacaatatatatagggacacgattt

SEQ ID NO: 253123 - DNA, 860 bp, Cannabis indica
ctctttaacaagcaaacgaagtcttcggaatgcattcgggttccccaaaccccgagcattccaactgacgattttcatggtgaaccgcgggattgctgtgcaatctccgcgtagttgtcaaacacatcagtggaatccacagttgcagaaacggactgacttaaaccagcaacttctgacaaggaaggagcagtttcagaattgttagctcgacatctcttcaaagtttgtctcatggagtttgtgtcaaattgtcttttgaaaactctattcggatgatcattttcttggccaccaacattaagcttggaaacaattgtagcagtaggagcagtagtgaaaatagccttcgaaacagcaggcaatggtacgggcctcaacggatgaataggaattcgaaatgaaggaggactgggaggatacgaggcaaaggtattgagattagtggcactggaggcattcattaaatccgatcctatgtcaggtgtgaagacatctaataaaatagatgtagactcagtaccagaagaaacaatatttttccccttatcagtaattgttttatcagtcccaggggtaataatgctcttccctttattcttaattgtcaactcagaagcagaattgttgtggcaggggataggcgattggtctgtgtgagaggtaaaagataaattatgcagagatgatggagtaaaagaaggttgtatggggcgatttgaagtggatctgttaacaagtgagggggctaaggcattgtgtgtgtgatgagcatggttatgatctgtcacagggacagagtttgaggattctccaacaagtaaaggagacggctggggatggggtaatgtttgtagttt

SEQ ID NO: 253124 - DNA, 789 bp, Cannabis indica
aaaactgtatgggaaatgctgctccagccataacagatcaagaaattgacaagaccagactttggcaccttaagcttggtgatgtaagtgaaaggggactgcaagaactcgaaaaacagggactgctgaaagacaagttggatggaaaactaggattctgtgaagattgtgtttatgggaagtgttgtaagacaaaattctcatcagatctacacatcagcaaggaaccattgaactacatacactctgacttatgggggccatctaaaattaagacactgggaggagctagctactttctcaacatcatagatgatttttctaggaaggtatgggtgtatctactcaattctaaggatcatgctttcagtacatttgtcacttggaagagactagttgagaatcaaactggaaagaaattaaagaaactcagaactgacaatggtcttgagttttgctcaaaccaatttactgagttatgcaagagagaaggcattgacagacacaagactgtacccaagaatccccagcaaaatggattagctgaaaggatgaacaggacactaactgagagggtcagatgcatgttacattgtgctggacttgagagacctttctggggtgaagctgtgaagacagccagctatctcatcaatagatgcccttctgcagccatggagttcaaaaccccacaagagagatggacagggcatccacctagttatgaacaccttagggtgtttggatgcactgcctatgtccacataaggcaagacaaactccaaccaa

SEQ ID NO: 253125 - DNA, 886 bp, Cannabis indica
  modified_base (863)..(863): a, c, t, g, unknown or other
atatgttccttctccgccacagctagctagcgggacctcccaataataataataatgcgtattaggacttttttcttcaagaccttaatgatgattttatggaataattagtttatatttgttaataatttagacactacaaatataaagtatattttatttatttagtttaatttgagacattataatagtaatgaatattgtatttattatttagtggtaaattataatatttaaaattagttaaattaaattaaatttttatataatttattactaatataattataatgtttataatttattatcaatttttatatttatatttaatagattttcatttttaaattttttttgaaatatttaattactagcggcggatgctcgctgctaataatatgtgtcagttttgattaacgaaactaacatacatcattagcggtgggcatctgttgctattacccactgctattggtggttattagcggcaaactcaaaatctgctgccaataaccattaatagcgtccaattattattgttcgtccatcatcggcagattgccctcgctaatggccaatagctgtagaattttcctttattagcggcaaactcattcgccgctattaacaataaatgttgtagtgttatgtatccttcatcatcacctcagcaaatgtcccctttttcttggttgtcattgtcgatgtcgtagatgcaggtgatgaatatgcagtaaacacaatagacaaagtagatgcaacaacaaccaccggaggtgcagcaacaaccttcgatgcactaaatgccatcgatgtagtagcaaccagaaattcagttgtagccttccatgcagtacacaccncaaatgcagcagcaaccttccat

SEQ ID NO: 253126 - DNA, 763 bp, Cannabis indica
ggtttttatgttattttctttttacaaagtttcatctttagtttacacttatatatgtatatataaaagcattatatatcaaaggataatttggagaaccatatatatttgtgtggaatggaatatataatgtatgggaaaaaaggacacgtaagtaaacaatatttgatgatgagtagatcctatcctttatataatatggccataaactgatgattcatttgacctgaaattatgtccaggttcaatcttttgtccccttcttctgaggctgtaaattctttcggaattggctactataaatatttgtggtaattggcctatgttgtttcaaacaagaaaaagaaaaactaactatagaaatgtgtcagttctcaactagagttccctcgaacacttcactgccaaatcctagattgtaataatgttgatatataagcactgaagtgtttgggggaactctggttgccacctggctttgaatatatatattatatgtatatatatatattacatgcacttctaatttccacaatcatatcaaagcaatatttaattgatgttcaagttcaacatatatagttataatatctctctacatatatcttctcataatatatattgtttgattaaatttagtcatgctatatattagttggtgtgtgttgcatgcaataattatctaagcttattattattattattattattattattatattattattactatatattagtcctaaaacttaactcctctcta

SEQ ID NO: 253127 - DNA, 923 bp, Cannabis indica
tctacgacttatcaacggtttctccccaagctcattatccaaggtcttttgttgttggtgcggtttttggttcaaactcattacatgccaagcttaagggcatcttcaaaaacaactttcaagttgtcctggatgacacttattatgggcgtcaaccgtttgttgatgtgacatggacctaaggtaagctttcttttctttaaatttttgtttcacattgggaacaatgtaaaaaattagtttggggaggggtttaattttaaattttgttatttgtttgattgtttagttatttagtttagttttttttagttgtcgtggtttagtgtgttgttaattaagccgagatcaattttcttgatgttgttatttgtggaatagattgaaattttaaactgtgtgctcgattcgttaactctttgaattaatttagatgcctgtaaagactatttattgataaaaatcggcaatgtgtgaaatatgttataactattttactttggtttgtggtaagattgaatgaattgcttagaacttgcatgtcttattctatggaggcgaaatccttgacaatatttattaggaatatgatttaggcaatttttggatagtttgagcctttcaagcctaccatacaatgaatatccgtagtgaacccttttgagctaaacctattttatttcttcacttgttgaaccaaaaatgttttcacactgttttctatcctcatttgattttgaatgataccataagtttgggagaatgaagaatggtgtggtgtaagtgttaaagaaaagaagaaaaaaactgcgtgattgagaaaggtttgaaacaaaaagtttaacctggcaccacttgtaaattttagaatagtaattcctctcgaaaaaaaaagaaaacaaataagcgagagatcaaaagct

SEQ ID NO: 253128 - DNA, 979 bp, Cannabis indica
tactggcaagaaatttagggatgtcaattatacccacgagttcgggtacctgcccctaatgaggaggggacatgggttgacttttgggagtaggagcagatatgggtttaaatattcatactcgagtcggaaacggggcaggggcgggggaatagatacccgccccgaacccgccccaataaaatatatgtataaatttaagttttaaaatcataactactacaattaaaataacttcatgctttagattttttattgattatactccttatttttttactatacacactattccacttaattttattgttttactgagtttttatgattattttttttaattctctttgagacatattttttttcaaaaatacatatgtaatgggtatccgatgggaatacttcccccgtcgggtaatccctgtctcgccccctctttaatttaaatgggtattggagcggatatggggtgaatttagaaagcgtgtatgggggtgggggagcaatccccgcacccgccccgccccgtttacatccctagcaagaattctaaaatcatgaccaaaccagagaactataaatgaatcagattgaccaaactatttcatcaaatcatttagtctaatctataatgatttagtctggattggttggagtttgaaactacaaattgtataaacaaccctgctgacacaagtacaatcactactagtaataacccaataatgagtgaagtcagggccggccctgggcataggcgggctaggcccgcacttagggcccactcattttaggggcctaaataaaaaaattgcctttttaaaaatactatttatctttatagtaagagccaaaaaaaatttagcctatagcccattttaactcagagccaaccctgagtgaagtcctcagggtctgttttggaactaagataataactaaatgaaagttcccaattgttatttttcaacatgacttc

SEQ ID NO: 253129 - DNA, 740 bp, Cannabis indica
cttcagataatgcatgacttcaaaggctaccatgacattgtcagagatgaggcgtccaggaataaatgcactttgagtctccgagataacaacatcaatcagatccctcattcgattcgccaagactttcgagatgactttatagaggacattacacaaagctatcggcctaagatcacccataacagcaacatttttcttctttggaatcaacacaagattggtggcattaagactctctggcataaggtcagtatcaaagtattctttcacagttttgataacatcagggccaacaatgtcccaatggtgttgaaagaaaccaggtcccataccgtctggcccgggagctttattggggtgcatagagaacactgcctgcttgatttcttcatcttgtatgggctgtaggagagcttcattatgtgtggcgctgacagatactttaatattatcaatgacttgggcagaaaagttatctgtagagtgataaagttcttcaaaatactgctttataactgaatgtagcccagtgttccagctttgccaaacgccattgttgtcttggagttgctgaatactgtttgatctcttacgagcactagccgtagcatgaaaatatttattattcttgtcacccgagtgtaaccaatactgcttggacctttgtttccaatagagttcctgctgtgcaaggatttcaaaataattgttcttttccacagtaaagttttcagcat

SEQ ID NO: 253130 - DNA, 571 bp, Cannabis indica
gactatgtcaccgaggagcttaccgaggcagttccccacaggagacaaagtgctctaggggccagatgggtgtgccctcaatccaagataagcgaggcacatatgagggccttggatatggctgggtacttgggcggacttgagtgttacgttccctctttgaatcactgggcaaccaacccaaagaaagggttttgtgcttgctcaggtgctcagactaagcaatgagcgatgttgcctttgcactcgtacttcaagagggttgcggattattttcgcctttgtccgacccaattcactcccaagggcattaagtacttgtctacctgttcgtcctctacgccattcaaggatggggtgtgccgtccccacatgaggtcaattggttttttgacttgaagtctacccctaagcagagcaggttggggtacttctacttctctcagccagacttcaaaaggctgacgggcacaatggacaaggatgttagcaagatggggggttttgttgacgagtactacttcgtggaaggtatggataccacctaaactcggtttcaacagatcccaat

SEQ ID NO: 253131 - DNA, 705 bp, Cannabis indica
tttgtactattacattgtttttttttatgaaatttgttgttacaactttattttttctctttacctttttgagtttgtgatagttaaaaaataactataaactgaaaaataacttaattaaaaataacaaaacaaatacacatatatctaataaaaatattttttggaatatgctgaacatatacacgataaaaatgcacataaactaaacaatagctacacaaaaaaatacataaaaataacaaaataaatgcacacttattatatatacaaagataaaaaaaaaatagtttgagagagagaggagaaaaaaaaatcagcaatggacttaaaaaaatatatatgaagaaaggaaaaaaaaactttttggaagctttaataaataaaaaacagtaaaaaaaaataagtaaagaaagtataaatgtacaaatttctttgtcaaagtataaatgcaaaatttttagaatatgtaaactgtacggaaagaaaataagaatcatattattttgtttacgtaataaagataatcagaatgctttaatttgataaaattgcaattgttaaaacatgtaattattttttgtttatagatctttacatggcatgtttatctttttcatttttaatcaataaaattaaaattaaaataaataagttggaaaagagaaaggtattccctgtaaacactacaaaaaatcttatttt

SEQ ID NO: 253132 - DNA, 1428 bp, Cannabis indica
accctaggtcataacctaggcttaacaaatatttaataaaagtcttgataataatcaaagccataaccattcaaccactaatatttagccacatacggtacttagcacttttcttaccttagttcagaactcaagcgtacgggccgacctgagtggaaaacaagctaggcaatcccggtcctatgtcacgacaaccaaaactcaataaaaaccttaatcaaatttctgataatagactctaattctcataatcggacacaccctaatttcccccggatcaaactagcttaaacatctctaaaataccctgaatttcactccggaagttaccccgaattagatcagacttgaggagaaaaactgaaaatccccctgctagccaaaccggtcgaccgattttccctgggcagccatggggatttctggtttttcacccaaaaaaccgatccaacctccatcaaacctgctcaaaccttctagaatagtttaatatagcaaatataacataaccaaacaactaattcatcacaatttatcaatttgctcaaaatcacactttaaagtgaagaaaacttaactttggcttcaacaaaccaaatccaatccaaacagccatagagaccacttaaaaccattcctaacatgctcaaaaacctaccataaatacaccccaaacctggtttaactcacacagccacagaattataaaaccctacatgaaaactaactcaaaaactaatattttcaatccaaaaaggttaagaacctatcttcaagctcttctaggttgacttgggacaagaacgagccctgtaatgaggggagaagcttaagaaaaaatcctcaaggtgggctggttttgtcttgcacgaaggagaagaagagaagaggaagtttggtttcttgccttggaagttattcttttaaatagggttttctttttcttatttttcttattgcttttattttttattttttttttaaaattcagcccataataatataaaatactatcctaaataatgaccaacttaccctccaagaaacttaattctaaaaaataacctaggggcattttggtaattttactaatccattaagccgacattctaaaaattctaaccttgttcggaataccctcaacctaattcttccatcaatgttgtgacatttttgaccataatgctaaatttccacagttgcggggcctgataaaatatttttatttcaaaaatggtatctttgatacacacatatcccaatataatttccgtaattaataaattacgcttcttgatccttcaaagaacccttattaattaccctaagtaagatcatagtcttacttcattaccaaaataattacatatttaataaaatatgcctttttaaattatcatttattttttcgggtatattactagccta

SEQ ID NO: 253133 - DNA, 482 bp, Cannabis indica
tgttcattcttcaggcattggatatagttccgtcttcttcttgttaccgtgcttgccatgaaaaattttgttgaacggtctccatcctttagccaagcaactcgcgatttttggcgccaaaaaatttcttctcttcttagcctttcctcaagatcagctctcgcatttgagtgagccttttcatcgaagtttttagcctcttcgattgacttaagggttactcgagcctcatttatctgaacagaatgcttcttgaattgctccttgttccatttggttaggtgatccttggtgtgcttgatcttgcgataaagattaaccattggatgctgatgacctttctctatccaagctctttttaccacccaaaacactctaggatctctttcccacatcatttcgtacttgaattggggcttggtgcagaactttccacctagggtgtccaaaagaataggattgtgatcggaagaagtagcaat

SEQ ID NO: 253134 - DNA, 884 bp, Cannabis indica
gaccttttttatacttcgagcaagaaggggaagaagaggataaccatctcggaagcctcttcaaatgtcaacgtggagccccccaaaaggtccatgaagactactaccaataagaagcgtgcctcgcagaccataaatcttgaggtccttgggagccaagttcaaactcatcctcctgtcgttgcttggtagcctgaacgagatgctcgagcggagtgtcgcttttagcctctcggttagtttctttcacttcctctttatgccttctttttcataactctcaaaaatacttatgcattttacttatttatttttcaacaatccttcatctcctttgtcgcccaacgtcggggccttgagaggatgaagcaactggagggcgagcttcagaaaacgattaggcaacacaaggctattactcgggaatggaacatggcccagtcagagaactctcgcctaaataaggaggttgaggaggcgaagaagtcccataaagctgaacttaaggcaactcaaaaggaggccaaggacaagtctgaaatatgccaaaaactccaggaagaactcagtgcagctactgcaaagctcgaaggggccaaggctgacaccaaatagcgatgcaatgccattgccaagcctttccatctactgagcctgaatagcgaatctagaaatggagttgagtttcctgggtaagggtatggaggaggtccttgcctactacgagcaagccaagaagacaaaagaggaggccaaggtggaggaagaagaagaagaagaattatccaagttccctactatgtaggcttggttatatagatttttttgtttagaaaaatggccatatggctgagacaatggtttgccccgttgtggtaattttt

SEQ ID NO: 253135 - DNA, 541 bp, Cannabis indica
gcacacgataccacattccccatctgatcatcaagacgcagagtcttcgggtgatgctactggacaagagtcgactatagaagcccctaatttgatagccgttggaacccaggtggcaaaagatgacaacgacaaactaaaaggggctaaagatgacatagcccaagtggaacaaaacaacactctgaaaagcccaaggaagttgggctcggatccaaaaagcccatttggtacacaagcccatattatggaatatccatcaaaggaatgctgggatttggcttttaatcaattactgggagcccaaactgttgataaattccaccgtgagcctactctctttaacccaatcctggatattgaagaaattcgttgctatgaagctaatcaaggaccaagaaaaagaaaggcaacaaatggttttatatgctgcccaaaaaagatgatgagtcaagattccaacaagaagatgaacagcgtgtgtcaccaagaaatgaagaaaccatggactctccattaccgtgtccacacagtgggtttt

SEQ ID NO: 253136 - DNA, 829 bp, Cannabis indica
aaaaatctcaaatatgattgggtgggcgatgacaacagtaatttttgggggaaaatgtggacattaaagattcccccaaaggttagtaactttatttagagagcagtttcgggtatcctcccaacctgtttgcaacttctcaagcgtcatgtggttattagtcccatttgtcaggtatgtcagtaggctgaggaatctacttttcatgctctagtgggttgctcttttgctcgagccagttggaattgatctttggttagtatttgtagttggtcagctgatagtttatttggctcttggtttcaagctcttcggcaaggatcaattctcaagcattggaggaagcgacgatggttgcatggagtatctggaaggcccgtaatgatgttgtttggcaacaaaaatctcctactgctgcatcagtggttttgtcggcaagatcattccttgatcaatttcgttttgcacagtcacggacgacaagttcgttgtctaacagttcgataggactgtcttcgtgtgtgcattggactacaccagtttctgatcagatcaaggttaatgttgatggtgctttatttaatgatgttagccgttttagggggttgcttagcctgtaaccatgctggtcaagttctcgaggccttcactactgcagggagggaattgttaggccagagattgcagaaatcatcgggatcaaggaggccttaagctggatccaacatgataattggcaaaatgttctgctggaaactgatagtctggtctgtgttcaggctatccagagtgagttgcatatgccgtctgagttcggtttactggttaa

SEQ ID NO: 253137 - DNA, 1304 bp, Cannabis indica
aaaaaatgaaaatccacacttagtgcggattggatgttatttgaccaaaaaagtgcggattggatcggatgaacagccccagctgctgctaaaaaccttgccattttccaacacaacgcaaacggaagtggacttggccaaaaaggatgccaaggatgcacgggttcaacttggggatgtgcagatagagctgggagaggtcaataagaaacttctagcgactaagaccaaagttgccgagctgaccaaggaactgtaagagacgccatcaaccgagtagctcgaagctgatattgcttctttgactagggacattaccagtcttcaagatgaaagagagggtctccaaactcttcttcgcagattggaggatgagaagaaggccatggaggaggaactcaaggccaaggtcaagaaccagaagtctgaggtggcgaggctcggagagaaggtgaatgccttagagacagctggtctcaaaatattttatgacttttggaaggccaatcccaaggcaaactttgattatctgggcgcttccaaagacatgtttctcgactattgcgctactcaggcagcctacggggaacccaaggcaaccacttccaactctcctgccgatcagagtgtcgaggctccttctgcccaaaatgatgatcctccagccccttcaaacagttgacccgtacaaagagcctgagactcttgttgtttaagtgctttccttttactatttttttatgtctgttcggccaataggccttcttttgagacaaggtgaccggccaagcggtctttaaacttagaatattatttttcatattttgaacaactggctgactgggtagcctttaatcccgagtttgaatgcttttgttattctcaatgaatttcatcccttgtttataatcattgtgcaattgtgttcgttttgtttttttaccaaatgctttgtacaggtataggtgcccccaagtgaccgagcagacttttgactcttggtcacttgttttttcacaagtatgtttttttgtgtgttcgaggttttaggtacgaccaaaccttttgtacgcattggatggtaaatttgcaacatgctaataaacttgactcaattggaatttaaataaatatctttattcatttattggtcgaaaatatgtctgttaccgtagtaacttacatcaaagctattatgttgatccgatctgctctttagcttcgcataaacaaaaaaaattccataaaataaaaatcgtagtttcaaaggtggtcatctgacctgagtacttgataattttatc

SEQ ID NO: 253138 - DNA, 755 bp, Cannabis indica
ctacgtaacttatttcacgataaggttgaataaacaaaataatgaaaaaaattatattattgtaaaaattatattttgttaaatattatgggaaatttataaaaatactggaatttaagcaccagtaaaacacagaacaaaacaactcaaaacaacagtagaaaaactatgaaacaccagtagaacactagtgaaaacttaacacagtatactgcaatatgaaacttataaaaaatacagtaaaaaagtaaaaaataacgtttagcaatatttttataaaataataacaaaaattagtatagtatataaatttcgcaatattattaagactcttatactataagatataactttggtacctcgcgtaaaaagttaagattaccaaaatactaattattaaaaaaaaaaaaactaaatagatatagtgatcatgtcacatgttggtgactcatgctgtactatagactcatagaggtcatcagaacagtgagacggagacagctcaataattgtagatgaatctgaatcattgattttcaggatttttttttaatatttatattttccagtcattgttgattgcatttttccaaacaaaccgataatagatggtctccatgctataattcggcccatgatcgatattacggcccaatggtaaaaatgagctccgagcctcctacccaaatcttgatatatcttcttcttttcttctttttttttttttttatttttttttttttgttcaatttagg

SEQ ID NO: 253139 - DNA, 788 bp, Cannabis indica
atgtggagcatagctttagtgaaatcagttccaagagtggaccagttacgtttataaaagtgagagttgagtccatctggtcccggagctttgtcagcagagaggctaaataaagcattcttaacttccgcttcagtatagggttcagcaagaaaatcgacttgagtggtggagagcctattgggaatcccttggagaagagtatggacagcctctacacaaactccatgggaggtgaaaagagagttgtaaaattggagaaattgagacgtgatagttgttggatcatgagttatggaaccatcagaaagggtaataagtcggatagagttattcttctttctggttgaggcacggtggtgaaaaaactttgtgtttttgtccccagcacgcaaccaatcaatcctggaacgctgcctccagtatatttcatctttcaggaggagaccatcaagcctggattgcagggaagcaatgagggaacaagagttgggggagtgggaagtggcattcaaatgggagtccaaatcagcttgagtttgagagatttggagtttaatagggtgctgatttctactccagttcctaatagtagcaacacagttagattgtttatcgagaaagagctgcaagggggatgaaccaggaggcccagaataagcccaagaagaggaaagaagatcggagaaagagggatctttcagccaatgattttcaaaatgaaaacgagttggtcttgaaatggcagaaagaggatcttgaagtctaatttttaaagctctatggtc

SEQ ID NO: 253140 - DNA, 555 bp, Cannabis indica
aatattacacattatatattccaaatattaattattgaataaacagacattggtgattaacagtggcaaatacatcctccaaatcttgatatgactattctcccacttaaattcatttatagtcactcggccaatctgtattcatagtaatgccaatacagaaaatacataaccaaataagtttcaattttaattacacaatcataaataagagaaaaataattaaataaataaataaaattaattgtgtgacaatatattcaattttttttatacaaactataaacttgttagctaaaaaagtaataacataattagacattacacatgtcaaattatggttactttgacaccacttaggatatgtaatctaattagtcctaaaaaaatagatatatttgacatattgtataaatattattttaactaatggataagtctatataattaagtgtggactaataatataataaaaaattactcatcaaattttgatcgcttaactatttatagggtatacaatttaattagtcttattattattattatatatat

SEQ ID NO: 253141 - DNA, 727 bp, Cannabis indica
ttgtccagatttaatgaatataaaatattcatttatcagaaaatcaattatttatttatttccttaaatagaaaatcatttccttaattagaaaataatttccataaataaaaatattctaatatgaggatcttcagaaggcaaaccactaaattgaagagtggactgtaccatttgcgaaattgctagcttgatctcaaaattgttggcttccaataatggtggtctgatatagttttgtaaccccgtgagagtaaggagtacataatctctcaggctcctttcaccattattctgagcttggcctccttgcagaagtctagaattctgtcatttctgtctcattcccataatttaacgatcatttctcattcccatcaatctgcgccatctccacagatttcttggcttccctcttgttatttcagttttgcttacaatatttttcaatctcaagattcaaagaatcacgacaatctgctcctcttatgttgcgcatatagcaagttcacttgagatagcaaaaataataactaaacaggttagaaaccagagaaaataaaatcaaattagaaaaaaaattaattagactgatattgatgatttttcagtccctagaaacgatgccaaaaacttgttcgttaaaattgatacgcaagtatacacatttgaatcaagtaatataatgataaagtagagtatccttctcacgaggactgattatcaa

SEQ ID NO: 253142 - DNA, 660 bp, Cannabis indica
agtttttttttagaaaaaaaccatatttttagtttgattggtttgataatgccatatttagtgacatttactttgtatgccatatttatcataaccttaataatttttcttatatttttgaaatagccccttctctaatccactgaggcaacctaaataatgtccgacggcgtaggcgttgtacacgtcatccttgtcaacggttcgattacgtactcgttcatacaaaccgctaattaataaaatccaccacataaggtggttgctttgctcctaacctcctctgtactttatattctggtacaactcgaagtccttggtggcaatcccaaagctacagtaacctcgccatatatgcttccagttacaccgttgacttgctcttcggctctttgtgtaaataccaactttcctaccttcgaaaaccacataaaacttgtgttgttgacacatccctaaaatggttacatacagtaggataaaatacgagttgtcaacgaaatttccaaaagataaatacgtaattgaaatcgtgatgcctaaaaagatgcttaaattaagcatacatgaaaattgattgatataaaatttaaaaagaaatattaatatattattatataaaaaaaaaaaaaaaatcataaaattaaaaatttctcaaaa

SEQ ID NO: 253143 - DNA, 1102 bp, Cannabis indica
aaagttcctaaatcctagacccctttgaccttttggataacataatttataccaagccgaccaatgcattttcttatctttttctgagccactccaatagtttcgtgtcatcatggattctaattcatcacatgtattctttggaattcaaagcaagacattaggtatgtaggcattgcttgaataactgctttcaataacacttcacgcccccaaatgaaaaaagttttgaattccacgagtgaagttttgaccacatcttctccttaatttctgaaaataatctttgtttgttctgcccacttgacataggaagccccaagtatttctctattgcagaagtgactgtgatattaaacgtggatacatcgagatctttgacattgtctggggtatttgtagagaaatagattgttgacttagtaaaattaatcacctacaattacaaatatatagtttgtctaataaatattaattgtaaaaaatgagccactcaatcatgagaaccataatgtagttactcaaaagtttttgggtaaatctgaacagaacccctatttattatagtgttttttcctccatatttttatttattctcaaagtcatagccacaaaataagaacaatctttaattggtatatacattgttaattcatccaaaacttaattaacatccacaactatataaaataattagaaataccaatgatatatttttatagcaatctttcattaaaccatcatataattaattttcaaaataagtttaaaaaatatatgaatattttaatataaattcagttttcaagagtcaggtatctttaaattaaaatgctataacatttttttaatccaatttacttttatttaaataattctgaaaaaaaaatatatatatatatatatacataatattagattcaacattgttttgtggtcttcttttagtttatctagactaaaaaagttaagggtcgttgggtgttgtcttcagcctgtgtctcatcaactacccatctacaaacgacggtacctctgtatgtgagtcgggtcggggcatacgcctcttcacgtccgggcgaggatgtacgccctttcatga

SEQ ID NO: 253144 - DNA, 639 bp, Cannabis indica
gtatcaactgcaatcgaagcatatagaaaaaccttctcctctcggatacccttgtttttaaggctccaaagaaattttatccagtcccaaacacgaatcccattgccacaaatcggatatatgccccaaaggagaggagtgccaaatgtgtaacgccacatcacacgaaagaaaaaggtgttcaacagattcctccccctaccacatagaggacatctggtatcctcaatttgaaatcttctgccaatgactgctctgacagggagtgccgtagagaggatgcaccaccaaaggatcttatgccgttctagaactttactattccatagtttattccacagcaaatgggccacctcacaatggctggctctttctagagcttgagcaaggtaagaagatttactcgtgaacctcccattagactctaggatccaaccccatctatccacatcctggctcaaaggattacctcctttcaaaatagcagagaccgtgtctttatcaaacaacctttttagcttagaagtgtcccatgagctagaatctgtgaggagatcggccacacaattcaagttaggcgagatttctcctattggtttcagaatgaaaccttttaaatgaggaatccaaggatccctc

SEQ ID NO: 253145 - DNA, 574 bp, Cannabis indica
tcctgagaaggctttgtcaaaacaataaaagcaatcttgaacaatatgtccaaatcgtaaacataattgacattgtggcctgttattaggattcataccagatctgcctcctctattcaaagaaaaattacctctacctcctccaaaattctgaatcggagctgtgtcattcgcacgcatgtagcttcggctactaaattgattttgtccattgttggaaagtggctgacctcctcttccagcatactgctgctgtctaaatcgtatgaatgcaagattggcctcagaaactggatcgaactcagaagttgtaaagtttgcactgtaatcgacttctttgcttgatttttcgattctcaattcagaagctaagagcagagcttctatttccccaacagtatagttttcgatccttgtgttagaggagataacaaatgtgtcgtactcactaggaagacctttaaaaatggcagctacatgatcccgatcactcagcacttctcccacaaatgctaagagatcaacagtttgcttaactttcaacaaataaccattcagacttagagagcctttt

SEQ ID NO: 253146 - DNA, 881 bp, Cannabis indica
gactgcagcgtgtaggtgttgcccccaggtgtgacaagggtgattcctgcaccggatagttgatctgtagctgacccgtccacatgtagtctccaggtcagcttgtcttcattgttacttggctgaggtatttgtactagctcgggcttgcctttcgatatgctttcttccttgcatgtgcattctaccacaaagtctgctaagggctggactttgattgttgttcggtgtgggaaagtaattttatactgacccagttctaccgcccacttgagtaaccgtctggaggcatccaacttttgcaatatttggcgtaacggtttgtcagtgtacacccgaacaagatgagcttgaaaatagggccttaactttcttgttgctagaaccaggaagtaagtgagtttctctatcaatggatatcaaccttcgacctcaatgagtcttttactaatgtaatagatcgggcgttgtatgctgttttcctctctgattagcacgacacttaaaacctgctccgtgaccgctaagtatatcccaagttcttctccgtccagaggtttcaagagtacgggaagttctacgagttgcattttagctcctgaaaagctttttcaaattcctctgtccactcaaattgcttgtttcctcgcaggatgttgaagaatggaacacacttctctgttgatttttaaacaaatctgctgagtgtggcgatctaacaagtcaacctttgtacttccttagttcttgttggcgatttcatatccagaagggcttaaatcttctctagattgacttcaattcctcgggcgttcttaataaatcccagaaacttaccaagctgactccaaatgagcgttttaagggattgagtttcatgt

SEQ ID NO: 253147 - DNA, 807 bp, Cannabis indica
atctctaaattgttgataattgaagataatatctgtctaaaaattgtagataacaaaaaataatgatactcatgggtggactttaatcttcctttgcatcgacagagacaatagtataatttttatattttgtattttttattctagcagggttcgcatataattggattgtccattttttcgttgataaatttaatttggtagtgtcgacaaagcagcagtgttcctgcaaatagttatttattttcatttaagatgattagacatggtgtgcataattaatttaattaaaaaaaatctacttatgaaaggcaagtaaaattattttttttatttaaaactccacatctgcagtataatccattagttgggcagcaatataatccattaattgggcagcactaaaatatatgtatatacacacatatgtatttaaatacacacatatgtgtatatatacgacggataaaatacataatatgtaatatatatatacatatgcttttctaatctttctacaacgaacgaattaaccaaacaggaataataaaaaaacacttaccttagatgatagaaactttaaagcaaataaaatatgcggggacaaattaattgtagcaacgattccaacaagtgtaattaattaacaaaagaagtgaaaccaatcctacaataacagatgaaagaaaattcaataaattaataaaaccaataaacataaaataaagagaagaaatagaagaattatgagtggaattaatttttacctacttagtttagatcgaattcttagttggtataaaacaa

SEQ ID NO: 253148 - DNA, 601 bp, Cannabis indica
tcaatacactcgaccccaacaacaactatgggtcccggtcccgatttcgggttcgagtcccgagttcaggtccaggtcggagattggtgttgacttaaattatttgtaaatattataatacaagctaatacaaactgtttgttatgtattaaataatacaacaaatactgtattaaaaattatggttgtaataattaatacaatatttactttatccaaacataatgttatttattatttaatacaatacgacccttatacggcgtaccaaacgagcccataaagtgtaattctatatttatactgaaaaaataataaaattaataaatatgattatttgatgataagactcaataaataatataatttattagagattagtattatgagttcatagtcaataaataatataatttattagagcttagtattatgagttcatagtcatgggtataaataatacaaattaaagctcaaagaaatttattttccttttacaaaatagtaattatgtatttttaaaattaatactaatttaaatttattatctagataaattgggaagatagaaaattgtgagagcaagagaagatcaagatga

SEQ ID NO: 253149 - DNA, 531 bp, Cannabis indica
cgtttagataagacttgttttctcactctagttgagaaatgttcaccaaattatcaatcagaatactttgttgtcttccaattgcaaagctaatgtaacttgaaaaacagctcaagacaaaatgaaattctgtacactgatccctttcttttcttttcggtttacctcattatatctattctgtaatgtgttgggaatattatgtatcccatcaacccaatatattttttttttgctaagaaagatgaaatattgaagttatatggttggatattaatttattaactaataattttttttttaaaaaaaagaaaaatattaaagagagaataaaatcacgtattttaagtaattttaataattacattaagttgaatttaataaaataaaatttagaaaaaagaaaattaattaaggagagaaggtattgaatgtctcatacttcaagtttattaaatatatatattacggtcacggttagtataaccaaatcagagtggcgcagcggaagcgtggtgggcccataaccca

SEQ ID NO: 253150 - DNA, 611 bp, Cannabis indica
atctattgagttttaaagatatatgtcgtaatggatatcatgttgagacaatatgaaaataattttgagtatttttgcattacgtctattgtttcaagaaaaaaagtacatattagaaaaattacctgacttgtcttcaggtttctacgttacacatagaagtacaatagaaactcatgttattgtgaatgagaagttcacaaattagaaaaattcatttgttatttagcatgatcggttaggccattccaattcaatcatgatgcgtagaataatagagaactcacatggccaaccattgaagaaccaaaagattatattatccagtgtgttatcatgtgttgcttgttctcaaggaaagttaatcactaagtcatcaccagtaaaagttggaattgaatcccctagatttttgaacgaattcacggcgacaatgtgatcctatttctccaccatgtggaccattcagatattttatggtatagatagatgcatcaactagatgctcacatgtttgcttattatctactcgtaatgtagcatttgcaagactgcttgctcaaataattcgattacgagcacaatgcccagactatgcaatcaagacaatc

SEQ ID NO: 253151 - DNA, 1365 bp, Cannabis indica
ttaacattgatcaaagaacactaaacatatatacaagctcaatagagttgaccaactaaccaccaatctaactcctaactgaatcttaacagctaacataactgtcatagactaattgttttgacacttccccttcaaatttagaattgatgctgttaataatttcaagattggttcttaattggttgaaccttgagcttgaaatagcctttgtaaggccattatgtagttgcgagaacatgttgcatctgaaccatctctgagacaatttctctcgaacaaaatacgaatcaagttcaatgtgcttggtatgggcatgtaaaataagattggcagtgagtagaattgtgctcatattgtcacaccaaatagtaggaggtcgaggtggttgtatatggagtttcggagacaaggaatgcagtcaagttactttagaaaccacttgagataggcttctatattctacttcagtacttgatcgagaaacactatgctgtttcttgcattgccaagcgattagattgggaccaaaaaagattgtgaaccctgaagtagatcttctttcatcaggatcactactaactcaattagcatcacaaaagtcactaatatcatactcttttgagcatttaaagtttagaccatgtataataatatcactgagatatctaaagattctctttaccaatgagtatgcaaaggattggccatgaattgacagattttgtttacactacaggagatttttggtctgttttgttaagtataagagcgcaccaattataaacctatacagttgaggattgttcactggatccccatcaaatgcagactactttaggccacttatcatgggagttggtgcaggtttggcatcttgcatttgagctctgcacaacaagtctctaacatgcttcccttgagacagatacaatcttttctttagtgtgttgaacctcaattctaaggaaatagtgaagattcccagattttttagagaaaatttggaattcaaggctttgatcaaagttgaaacctgttcagtgtcacttctagtgatgattatatcgtcaacataaacaagtatgagaaccacatatttagaggtatgctgaatgaataaactatgatcagacttaaaagatacaaaactaaaagtcttctaccaggctatgttgaaatttctcaaactataggcccttagtgcgtgtttgagcccataaaaagctttgtttagtttgcaaactaagtgaggaacatttggtaactcaaacccattaggtttactcatgtaaacttcttcttttgagtccccatttagaaatgcttattcacatcaagttgttgaatatactacccttgtac

SEQ ID NO: 253152 - DNA, 542 bp, Cannabis indica
gcaacgcaccatgtatgttgtgacattcgatgtttttcattctttgttaacaaaccacatgctgcagctgtcactttacctaatggacattctgtgaaaatcgaaaatgttggtactgttattatcaattctaagctaatattaaccaatgtcttgtttgttcctcagtttcactttaatcttttttctgttagttcatttcttaatgcaaacaatcacattatacaattcacatctaacaaatgcattgtccaggaactctctcagacattgaagattgggattgctagccgattcggtaatctctattacattcagcaagaaattactcccaatccacattacaatgctgcaacttccactactcagatgaaccacaataaatggcactttcgtttaggccatccatctgtcatcatcaccaataaactccataaaatgctcaattgtaattctactttacctactcattttcattgtaaaatctgtcattttgcaaaacataaaaagctgtcattcacttctcataccagctttgcaaa

SEQ ID NO: 253153 - DNA, 634 bp, Cannabis indica
ggacgaccttgtaggtcatcccaaaactcacttctagccgtagaaaggtcggttgtgatccctacttgaagagtagtaagctgaatacttttatttagatttctaacctttccagcggctgcgctaaagcgactcaagtaagccttaagcgaataacctggttggtactttatgttagttaaggatgacgcttcaagtcgcctgtctctagtagcttgaaattgtttcttaaagtccttggatagttgttcccaagacattattgaatgatgagtaaatttgtcgaaccagctactcgttgctccagtaaaagaagttgggaaaaagatgcaacacaaattattcgagacattgctggctcgcattatggtattaaagttattcaagtgagcaactgggtctgtagtcctatcatactgcgagacatgtgggtttttgaatcgttgagggaattcagaattcaaaatattaggatgaaacggctcggtttcctcatccgagtcataactgggtaatttcccatgttccccatcgtgatactttctgaacttatcctccaattcaatgatttgcagttggatgggatccacctattgttgatttgcattaacttgatggcgtaagtcaggtgcat

SEQ ID NO: 253154 - DNA, 805 bp, Cannabis indica
agccacggctttcatgaacatggtcatggactgcaaagccaactccacagaacacggaataagatcttcagaaggagtcctctccgccttggacatgaactcctcgcccacaaacttttcctgcagaatcaggaagtcgcgagttcgaacagctggatcaatcataactttcttccccttgtcttgtggaaccttagccaacttcttggaggaatccgcggcaggagtagccataacaccgcttttcctcttctaaggaacgataggcgatgtcatcgctgttcctgcttttggcttgcgattaaggacaggtgcagacttcaggaaagtcatctctgcgaggataaaaatagataagtgccaattacaataagattttaatgcactagcttatgcatgcgatatgttacctgatgttggtcgagaagtttgcttggagaggcgtttgtctatcttctcttgttgcttctcagacggctccttgtacactggctctctttgaaggcttgcgttctctggaatcaacttgtgttctcgcagctttgaggtcgtgcacagtaatcgccagtcacgatcttgcacagggaggcttccaagaacttcaacagtttctctgcgagtcgcatcaagtgtaggtcgagccggtctatctgcaacaataaaaagggcgagttagcttaaagtcacaatataactcaaaaaattgactaagtaaagaaacacgcgacgtactaggccgacgattaaagtcagtcctaatccctggaaccttaaacacataaaaccatttggatttccaatctcc

SEQ ID NO: 253155 - DNA, 834 bp, Cannabis indica
ttgggccaaattgggaaggaccatacgaaatcgaggacgaaattggctccatgacctataagctgaaaataattgatatatccacagtgcctagggcctggatttccgactacctccagaaatacaatcagtagttaaaaacaaaagtttatgttctgtaaaataacatgtgctggacaaatttatgcaatctcctatgtaattttcaaagctaagtgacctaaaaatttcctttcatgtcacttagggcgtattaaggcataacatatgggcaaaaaacatgatcaatataggaaagtaaaatgctaaataaaatcaaaagtcgtacaaattgttcaaaagaaaaaactgtaaaggcctggggccgggccataaaaaagtctccccttaaaagaaaatagaattgtcttataagtaaagggaaggacaaaataaaaaataaaaataaaaacaccatcatcaaagcacttcgagcagtgttcacaggtgacgggggtaaggagagcatcccttttggccttggctgcctccttacgggccagttccttgaactcatggagctccttcaccttgacagttaaactagttgtcgtatttaagtcattttggtgcagctcctccaaagatcgtaacttagcagtgagttcttggacttcttctttagaatctcgaagatccctcctggccacgacaatgatctcgtctgtggccgccaacaactctcaatgatttttctccatgagggcctccttcctttgggcttcacccgaatcgcttgcttctactcctcctactcgcagagactcttcatcacttcctccatgccaccaaact

SEQ ID NO: 253156 - DNA, 740 bp, Cannabis indica
gatgttaatgaaacatacttgttaataaatatagatcctggtaaagtatttccaacactcctccccagttctcttaatcgcgcactatcctcggcttactcagtcgccctctctctcctttctcattttcttttcgcgcacgagcttcttccaggacagatggccattgtcttccttctgcctcgccttggactccattagccaaagttttgagatctccatcatgatcgcccaaggtagacaggtttttttctaatttttatttttttgtttgtctctctctcgctctctcttgtggtgacatcatttatttttctgtgcagcgatctcagctcgtggtgacagcatttgaagctcgccatggatctcagctcagggttcgtttgaatcacgctgtggatctcggctcgtggttcgtttgaagctcgccatggatctaatttgttttaggtttttttgttctaatggtctatttctgttcggcttggatactagtacgggattagcaacccaagctgggtagaaagcttcaattatgaaattgttgttgcacaacttttttttatctcttcttttagtgctagggtttgtccttatccaacaatattcttttttgttgaacatgccagaaattaggatcaatatttacggcgtgtgaaatgatagaagaatggattctgaccatgtcctcatgtgaccatgcaaaaatgtctaagttcgctcttaaaaatcttatcaat

SEQ ID NO: 253157 - DNA, 501 bp, Cannabis indica
gtgacgtctcgggaaatcggggcgttacagatctgatgaatcgagtattcaaagatctcctcgatgtttgtgttatagtctttatagatgatatccttgtcagaagcaaagcatgagcaacattagatgattttgcaaagactacgggaacataaaactaattttaagaagtgcaagttcgagttatcgcaagtatccttcttaggtcatattatcaataaagatgaggttatggtagatccaagaaagatcgagttagtgacggactggccaagaccgaagacattaactaaaatcagaagttttctgggtttagctaggtattatagtcgttttgtggaaggattttctaagattttcacgcctttgacaaagttaactaaaaagatcagtgatttgtgtggattgacaagtgtgaagctagttttcatacttgaaacaacgatttattacaactccagtgttagctttgccatcagaccaaaaaaagtttgttgttta

SEQ ID NO: 253158 - DNA, 752 bp, Cannabis indica
agagagagagagaagggaagtgtttttctctaattttgaatttttttcttctttaattcattaattccaaaaaaatgcttaacattaagcattattcagccaccaaaaaaggcaactatcaagcttggaataagccacctaaccctccaattaaaatatgactaaaatgcccctttaagttaaaacttaggtatttctcaaaactaggggtaaaatggtcaaattctataaccctgctccacctcagtattttattttctccaatatatatcccactaagaaataaggttctaaacttacccatgtgatcaaactagtcatccatcgcattttccgttgtcaccaagcgaaaattgtaaaaataatatatttcacatataattcaaataatacacctagaatttaataaaatctccaaaattgagaaattataactctaatgcctatttctaataatagggcccacaattaattaaattcataaataattataaaaatgtcagaaattagtgttaattgcatttactaatctaaattactaaagcggtcattacatgctaaaagggttaaaaataaccgacgctgtagggaccctataacgttagttattatgaaaaaaccgacgctgtagggaccctacgacgtcagttattatgaaataaccgactctgtagggacccctacagcgtttgttattatgaaaaaaccgcctccatagggtccctacggcgttggttattatgaaataaccg

SEQ ID NO: 253159 - DNA, 438 bp, Cannabis indica
tcatccatcttggattttgaataagcaccatataagctttccaaggctcgccacaactctccggatgaggctaagcccataacctaagtggcaatgctctctgtcatggagctgtaatgccatcctaagagcaactggtcatttattatctagtgctcaaactcaggattaacaacgacttcaacgcgaccagtttcatctggttcaccaagaggcagaaactttggtgggcactcttttgcgcctgtgagatacccatgtagtctatgtccacggacgatagcagacaccatggtcttccatagggtgtaattgttttgatcaagcttaagggagaatggctggttgagggttgtgagttgatttgggtatgggttagtgttttgggaagagcaggctccatttctagtaggctgagttccttggattgcagaagca

SEQ ID NO: 253160 - DNA, 739 bp, Cannabis indica
tttccatttttcaaactatttacatattataaattaattacttagtaaaattttgttatatattaagtgacgaacaaaccattattatgttagcattgcatgtatataatttaaaattaaaaatatatatttttaaatgattgttaaactaaaaatcagttaatatttaaaataattaggtaaaattaaatttttaattttttttcacattaattataagtgtcattaacgtgacaattgtttaaataaccatattaccattatgtttgtcacatacaacaaaacaaacttggtaaaatgattatttataatactataaatagtttggagatcaattttaatggattaaaaaaactttatagaataaaataatgtataaatcatagttggcaaaaatactaaacaggcatagagtgctacctatgctaacagtcccatttgcaacttagtacatagaaaataattaagttgaggaaacataaacaaaaaagacacctcattcaaaataaatgtttataaaatgataaaaatgacaaaaagaaaagaaaagaaaaaacacaaaacaaaacgctacgaaatcctatgctaaaactgtcaacaaaagattcccaagctacccaactacatggctttagcctttaggtctcaatcaaagtcttaacctcccaataaaaaaaaagagtatgtatatttatagagtaaatataatcaaaggaatcctttcatattgttgacattt

SEQ ID NO: 253161 - DNA, 577 bp, Cannabis indica
cggacgcttagtcgaatgagggacccaagggtcaaaccatattgaatctttaccattaccaatctttctgcataaaccttctgacagaagagagcgagctttgacaatagctttccacattccagagtcaccacttgcactctcgacatccagaaattgacagtgtttgagatactttgcttgcacaatgcatccccaaatgctttagattatccgttagtagctttccaaccccatttcaacaaaaacggtcttcgttaatggtttctacctttctaaaaccaagacctcctcttagttttggatggcatagagagttccaagagatcgtatggaccgttcttttttgagcttgtatctccccaccaaagtccctcaattccttatctactttccgagcaatagactttggaataacatctgaagccgccacataagtagcgattgatgaacctactgattggattagacacgcccttcccgctttagaaagtaaccttgatttccaactgttgacccgttgcattaccttatcaactaagaattggagatctttggtccttttccttgatctaaa

SEQ ID NO: 253162 - DNA, 957 bp, Cannabis indica
agaaattgcttttctacttttgcttgattgggtaatgttctatttataggtgagatcccgggtatgggaaaacccatacccattagggtttaaaggtgtcaactacgtccactatgaggtaaaatataatatattgattttgggtcaattaagtgaagcccaatccatgaggcacgattttttgcacgagagaggaccatttgaggtgtcatgcgtagccatgcccataatgagaatatcaaataatatatcttggagaaaaaggtgatctcttcttttagtggtgcgcacactccccaggtcagacgtagggaaaaaaaaactctaacactgtggggccctgtgactatagggctccacgtaaggtgatgttcgaaagctttctgagtgcttcttcgattgcccatctccggatagccccatgagggtatcgactggtcctaatggagtctttgtcttctaggttgaacgacatctcttggaccgaagcggttcgaccttgttaggttggtgcgactttgctagtgggttgaatttctatcctgattgggcccagatttgggtctgccttgactgatgttcgacttttgaattgtacacatcatcactccgaaaatacagataacactaacaaaattatataccactattatacataacaaaatagcaaataaaatatcatctaagaataaaaatatatcttaaatagtaaacatatattttgcaacaaaatatatataagaaaaattcataaaaaataaaaataaaacggtataactttcaaatatttttattttaacaaaactaataaagacataacatgatattttagggatatatttgtaaatcttaaaaaatataggaaatatgaaaattttatgtggcaaaaaataatttaaacaataaatagtgtaaacaaatcatttctttttattaatttataaataaagacattta

SEQ ID NO: 253163 - DNA, 832 bp, Cannabis indica
tatttgggttgtatatttgtttatttggctagtcgaaagtatttttttttaatatcgttactttttttagttaaaattaaagaaaaaaacccctaaattattttgtatttagtgtttaagtcaaaatttaaattttatagttaataatttttatcatatttagatattgaatttcaaattttaaatttatactatataattatacttttttctatttttgaatgaacgtttattaaattaatatttatcttatgttaaggttctttaaattaatttagactatagaatttttaaacgtgaattatgaataatatacttttatatttttaaaatttaattatttgaatactaaaaactaataatagttaaaattcggtgttttaccaaaaataatttatttctagaataaaaattattaaaacattactataataacagtaaaaagttaattacttgctcacacaaaaacactactttgcaaccacaaacaattgcataaataaataatgtagaaagtaaaaaattcacataagagaattataggtggtattagttttctctcgaatactattagacaacatggcacacccagagaaaaatcaattagtaaagtataaaagattacaaatgcaattgacttatacaaagtttaaaaaatactctctacgtatgctcactttctctcaaaatgagacttttacaagtcttctctcaaagacaacctctgttcgaagctgctcgtgaacctattctatgaacagtacatgagcattataaatgttgcctcagatttttcccaaaatacgtgcagtggccgagggtgatacgtgga

SEQ ID NO: 253164 - DNA, 580 bp, Cannabis indica
ttgtggtccaaatgggcctttgaattcattgccctctaggttaaggcccacttttttgataccatatttatgcttaggtcgtgctagtctttgggatgcccgatagttaggggtccatagaccctttaaagattgaggccaaatgcaagaccttagactctgacttctcttttactgctaggcccacctcttttcccggcccatcaccaaaggacccgctagttatacttgacatcgtaccatcatgctgtgccacaatcgaaatgtcagtggaattttcatgtcctccctctacgtgatctatactatcacgagggacaattgtacctttatttgacacatcaaagaggtgcacattatcatgctggacctcagtcactaaatcggcctctgcatcttcctccatcaggacaactgtaagcccttcctcaagaactccattaccctccctcccgctcaaggttggttcctccgcatcgacgttcaccaccgattgatgttgaacttcttcttgagctctcacatcagccagctccctatccaaccataactgttcatacaaaacataataaaaaaaata

SEQ ID NO: 253165 - DNA, 1174 bp, Cannabis indica
tatatgttacaaactaatgatcagttcaattaggccacctatagcacattcttataatataaaaaactacttgtgttaattatttaaaatttcaatttagcttaattttgattaaataatacactactggtccatatatatatgttatattaaataataattcagatactcccgcttaattttgattaaatagttttttaacaaaccgatgtctccctaactcaatttaagctgaaaaatcactttagatttaatcttgttaaaaaacttatttgatcaaaattaatcgcattgtatcaatttaatcattttttcttttcaacaatatgcaacaaatgtatttatgctagacccatagtttatgttagcatcttctaatataaatataaaaaaaaatgcttaaggctaccttaagttacacaacactataaaaatagcaggatcgacattaaaatttagtgaatcaagaaaaaaaaattaagatcttattcaaaataattataatattttttaaaattaatacaaaaaatatatatttttaaaggaaaaacattttttgagctgaactagctagactctagctataagtttaatttgtctatactcacacctgagtttggagattttccgctccatcaccaataaagaatatactgagataagaattgaaatttttaacgggaataaaaataaatgagaaagtactccctactaatttatctattttctgtcctgtgtgcatctctagttgtatagctatttgttcaaatcaaattttacacaatttttttaacaaataatataaaaacagctaacaaatatgtatctaatctgttagcaatgctcaaaaccaagaaattacgtacttatcttaaaacaaagtggttagtagttttttggggaaatatagttgcactgtaccatatccggaagcttcattatatccaaaaccgccaattggagaaaaatgacaaaatgtcataatatgattcattcatcactttcctcactccaattcctccaaacgttgttgattttttgaattattattataactaaagttttttagatatttatttatatcaccaaaccaaacaatccaatgtgctctaacaattcctcacccctttaaaaaaaaaaaaaaaacaaaaaaaaaaaaacaaaaaaaccatgt

SEQ ID NO: 253166 - DNA, 1359 bp, Cannabis indica
tggctgacattccatcactaccaggacttttatccgaactcattattttcaaagcttaatatatctcatatggtgtaaatggctgtgtaagttgcaacttcgtgggagcagtaactgttgttggaatggtgtcaatggtgtggttgagagagcttgtgtcaattgtggaagtagtaaagagttcttgaaaataggaagtgataatagttgtcatttcctccttagaattgtgagtaatacatgctgaatttgtgagtgatttaatggtgttattttgcttccttgaagtagcatgagcatgaaagaactttgtattttaatctccactttgcatccaatctatccttgatctttgttgccaatagatctcttcttgtgcaagtaaatcatccaaaattgactttgattttcttaaacctgtcattgtttgttgtgtcctggtggcagaattattgagtgcagcaatatcttcaggaactttggaaatctgttgcttcatgttcccaaacttgtgagcatgccaatgttgtaaggaagttgtacaatcttgcatgttatcaagaaaaagatcaatacttgttgttgcacattgtgcgctccaattctgttgaatgatagcagcagcttcatcatcattaagccacatcttttcaaatctgaattgtgttttccttagtacatgatcaggttgttggtttatttgttgaaccataactgatatagcacgatggtcagacctgtagaaatccaaatgggaagttgtaatttgctcgaaacttgttagccaattatcattgacaaaacaccaatctaatctctccttaattgtgtctgccttatgtctgttcttaacccaagtgaaaggatctccaatgtaaggcaactctgtcaaagagcaaaaatctaatgtgttacgaaagtcatccatttgagattcacatcgtaatgcaccaccttgcttattattgttggaaagtatctcattaaaatcaccaatcacaagccaaggtaaaagaggggcaacatctcgcagcctctttaaagtcaaccaagagtgacaacgattgcctcgtttcgaagagccatagaaagcagtttagtggaaagtaggaccattgccaaaagcaagatagcagtcaaacaaattaaaattaaaattcaacagagttatagtcacatcatctttccataataaaagtaaaccatcacctaaacctactctagcgacttcaagtccattattaaaatttaaagcttgtctaaaatgagaaattacaataggacattgtttagtataataaataatacatgaggagatcgcttcttgacaagcacgaagatgatggaatgcgctcggat

SEQ ID NO: 253167 - DNA, 789 bp, Cannabis indica
ctagggatataccctagtgataggaaaatttcagaatgatgaaatagttgtgtacttagtgaccattactaaattcaaggatgacgtaatcgtgatcttaagaaaagctaaaactgttaaccaaggtttgcatgtttgatagctattttaagttattaggggtggaccatcccatggtcattagataagaaagtatttgtttcaacaaatactacttttctaagaaaatgactaagtctgaaaacaaagtagcaaaatagaggagatattttatttttcttgattccaaaagtgttctgtcatcttattctaaataagatggtcccactgcctctgctgttttgacacaacaaaagaggttaataccatttagtgttcttagaaaaaaattcatggtaccttgtcgtagtgggaggatttcaaggaactcactctgttatgacttggaagacaccggtcattaaaatcaattgttagtttaaacaagtaattgatcgtccgaatgaggaagtaagaagtaaagccaaaagaactacagttaaaaccattcatatggaacaaccaaaagttttatattacaaagacaagaaaggaaatttcgttagtaagtctattcaatggacttaacaaaaattcttgttcctagtattataggtttgagattatctaaacatatgggttatggtatgcctgattaattaattactctgctagcaacttactttagtaagatgctagagcatttttctgatggcaatctactgaagcttctcgacttctagacataga

SEQ ID NO: 253168 - DNA, 766 bp, Cannabis indica
cgtgcgttgcttttatctttagaaaatattgatttgtattttgtcaaacaagctgactcactgcttagccagagactcttgtttctctccaggtcgtgcgtttcagtttgaggattgttcctctgaagcacgttctattgttattaacgatttgattagttgataaagataccaattttatttaaaaaaaaatgcccaattttatatattaagtgggttaaaattatttcaatccaccaaattaatatattggccgagttaaaattgtaaaattatttataatttttaacccaaataaattaatttataattttaaaaatgatatattacataaattatgttcaataactaaattattttttatttaaaatttagactttgtgatattttatttgatatttagattttataatttttgatattaataaaatttaaaattaaaacttacaatttatgtctagtatgagagatggagaatggagagttaatgaacgatgtagaaaaggagagagggagagtgaagtagcattccttttaagttgtttggtggaaaggatagagtggtggaaggatagagaatatttatttttgaaattattttattgtccttatagataatattttaataatatatttagatggtataattataatttctaacaattaaagagggagagtggatccttccattaatggaaggattataaattggaatttagaagaatttgctctccatccaactatcccttccctcctccaatctctc

SEQ ID NO: 253169 - DNA, 895 bp, Cannabis indica
caaaccttgatgtccacatcattcgggaaagtttttaggttaacaacatgcgattactgttggagtttattttaccaagatcttatctactaatcatgtatgttgattataacaatataatctccaatcatcgaacaaggggagtctctttgctattgcggttcaatattgcatcaccggaaccaactctatcatgattcaaaattgcaccatcaggacccaaaccttctgcaaaaaatgcctgtacagataaatcgagcccgttaaagcccttgtacaacatcgcgattaagaatcgttgttcctccagatgatacgagcctattaccaccttctgcaactaacttcgatgtaccatgaatcgaagggagctcattgtgcactgccagcttcacagatgctgtcgactgcccacccatcccacgactgactatctgactatcgtgacttttaaatactcaaattattatcattactatcatcaatttacaaaattttttacatgaaatgttttcgaaccaaacaatttgtacttacgtgtcgtgcttgtacctatcgggctcgtgtcataaagctcaacccgaatttaccacttttcttttttgaaagagatttagagcactagttacaaattagttatgtgattatagtgagagttgtttccaattccattatttcccgattcgcattttcttgtctcttctcttctcgtcttctccttttcctttttcgggcgagtcttgtctttgcagcaccaaaccaaagcaaccaaccacaacccttccttcttctttctattgctactactgttactactactactctctctctctctctctctctgttattcattctcaattccaaacccttcacccctaaattcccacttcatcta

SEQ ID NO: 253170 - DNA, 770 bp, Cannabis indica
aataaatcatcataaattaataacttagaattaatagctaattctcataattaaaccctaattatctgctaatttccaaatttaggctaagcggtctttacaagagccaaagaacaacttgagctaatacacattgatgtgggcggacctattaatgttcaagctcaaggaggttatgaatacttttgtcacttttatcgagataataaaatatttgtgtcaacaaatactacttttcttgaacatgactatatgaaaagtcataagccacatagtcaagtggttatcaaggaaatcataaacaagatttttgaactaatgatttcagcaccattagtttaacgaccaacagaagttaccacagttcctgtaaaggaaactcaagtacatcgacgtagtgggaggattgtgagacaacctatctgctatgaacatgaagcacatgttcttgtctctaacatagacaaggaaaatccattgacttacaaagaagcaatggatgaccctgactcagacaagtggaataatgccatggattcagaattggattctatgtgcaccaacaaaagtctgggtatatgaaaactccaactgaggatattacacccatagggtgtaagtatattttcaagaagaagaaaaatgctaaagggaaggtagaaacctttaaagttaggcttgtggccaaagactacacacaacgagaaggcgttgactatgacgaaactttctaacctgtggttatgcttaaatacatttgcattcttctt

SEQ ID NO: 253171 - DNA, 1464 bp, Cannabis indica
tagtgtgtaagactgtgaagaatccaaacaactgaaggagtgtcggactcagatcttggtgatactctgctacagaaaggatataagggttagaaatctgagcggaaggagtcatttaattctgctgcaaccaatataaggtttttcataccttttatgtgtttaattttatatcgttttagaagttcatatttaggaggttaaaatatacttgttagttattctagaaaattagttattcaaatattctttaaaaatatttttaagttgaaaatttgttaattttagataaacttaaatagggatattttcaaattaaggtgattagttcaagttacttaatttattatttaattaaattttgaaaaaattatttaagttgaaaattatgttattttagaacaacttaaattagatatttttttagatatttattttactatattttaatatataatttcaaattttatattcatttataaatggatttttgaaaataaaattaaagttgaaaattaattttttaattgattttggatcaacttaaattaagtaattttcattactaaaatatgttgactaaaataagtgattagaaaaaaatacattttttaaataatgaactttaatgaaagagatattcaatctccattgttggttctacttagttcttgttttcgtgagtaatcatccctaatggataaacgatcattagcaatttaacgccgtagaatttcgaaagataagtattatttgtaagtgttttattcttagtaacgtacaccccagtagtggctgctaagagtaaaacttacaaggtatgaaacaatggtaggagctcataaaataagaatgacttgactctcgcctaaacgggacaacgtcagattcccttttcgattgaataaaaggttgctagaatgttattcattttagatgagctgactcctctattcaatagatgatatttttaagtcttacctaaacgggacactgtatcagcttactggaaaccttagaaattaattgaatatgttttattttggtatttttgtaaacatatttacttgttattttctgaacttgtgtatgaatttaagttaaccaaatgatttatttctgtatattgatatttatagtgtcaaaatgaactaccctcctcccaactctcaccttttacatgcctttttaaatgaactctataatgtgaaaatgtctcctagtaagagcattaagtcacatttaataatgatgatctgaagttccagaaagcaaactctctaggaatttctttatcaaaacaacaatgggttcaattcattctcaatagtcttccacctgagtataatggatttgttgtatcttacatgatcaacaattttacctcatccgacgtagacaagctggacgcagaattgcgtgcttacgagcgaactttgcctgcaaggaggcctccctccagtt

SEQ ID NO: 253172 - DNA, 521 bp, Cannabis indica
tgctttaaaaaattacattctatttttcatatgacattgtatattgtagctgtaatagccatcttgaccattttacgaaaatttagaataattacggtgacaaaagtaaagtaaaaatatgttgttgcatgtgtttaaaataaaataggtacgcatacaactgatggtttgaagtatattttttaaaattaacaccgttaattccttatgttaaaataatacaaatataaattacggataattgtgacaaatataacaaatatttaaagaaattattggtaaatatatatataaaaaaatgatggacaaaaattcccaaattttgttaaaccctaaactattgtagcagtgaattcttaaaatttttaagttttgcacattcactacccaattattttaaaatgttaatgaaaatatattttcaatttataaaaaccttaaaattgtagaaaaatgcatttttatcaaaaaaaaaaataattgaagaaaatgaataactaacaaattattcaaagaggaaa

SEQ ID NO: 253173 - DNA, 720 bp, Cannabis indica
catacttgtgagtagatcttagatcctggtaaaataagttccaacaatgggctctatctcgaggccgctaaaattgtattgtgataattccgcagcagtagctttctctaaaaatgctagaagtacttcccattctaaatacattgacataaagtactattttgttaaagagaaagttacaaagtctcttatttccattgaatacacgcctagcactggcatgttagcagacccactaacagaaggcttacccatatgtgtatttttggagcatgttactcgaatgagattgttaggaccctagcttgttgagctcagtggagttttactattatgtattgaacatgcatgctagtatcttgtatggaatgcttatgacttgtgttttgaacatgcataataatgttgtagtcatttctagttattattgatatgtgtatgcatgtgttgtttactgaagtaacagatgcaaaaggagatgaatgcgcatagtctcaattttattgtacctcagaatatttgattttattgttaatatattaaatgtcttcaaggtcaattcatacataatatatgtatcatgttgatatgattttaattatgtacgttttaattagttaccttatgtgttgttgacaatgtttatggtggttgattatattgtccaagtggaagaatgttggaattaatattgtggactaatataatcataagtttaat

SEQ ID NO: 253174 - DNA, 748 bp, Cannabis indica
ccttcaattatagtgttagctttctgtctgttgtaggttaatccaaccttagttgtcccaagtaaatacctgaacacccatttcatggctagccagtgaacttttcctggattagccatatattttctaagtacactcatagcaaatcccaaatcaggtcttgtacttaccattaagtacattacagaccctacatcattagaatagggtacatccttcatagattcagtttccttctctgtcttagggcattgttccttactagttatttttatatgatgatatacactatagttatagtaagtattatgttcgtactctaaaaatttagagcaatttaaggtactgattaaaatatgattcaaatagtcaattgcatacacttattttatcttatacgtgtgtcgttttaattgatgtatatgcagctactgtgatgcaattacttggttctttgtgctcaatgctactcatacaatatggttggttagggttttaaaagctatttttggatttttgaacccccaacaattctttaagttctaaaaattcttctttgctcgttcaataacaagtacgattcaattttaactttaaaaatttattttaacacactctagtaacttccttaggacgagtttcttgaaaatttaaaagttaaagtaaaaatctagccaaacagaatcatactataatataaatgtatagtacaactaaagggtttcaatttttgtttgcagtcttttat

SEQ ID NO: 253175 - DNA, 504 bp, Cannabis indica
gataatcaataacaattattctgttgtatatctattttagtactgtaaaaccaacgaaacataacttggtttctaattttctgcgaggtctagatttggaatgtctgcctataacatgtattcttgaagccagggaatcaatgagctggtaggagcttgaggaagttcttctcaactttgatagcaaacttggaagattccaagtggtcacaacaaatggaaacagtaaaggtattaatccttctagttaattttcatctctacttggaccatttgctcattttgttaacaaatagaaccccaacaatagcaacaactcaggtcgaggctatgaaagagaaaatcatggccctggttcaaattccagaggtggatcaggtcgtggatatgataaaggagggagaaactcaaaactcacttgtcaagtatgtgggaggtatgtacattcagttgcctattgttacaataggtatgataaaatttttatgggaattacacatggtg

SEQ ID NO: 253176 - DNA, 606 bp, Cannabis indica
tgagcttcaagcacactcctccagatataacttggattacttcctgtttacaccaaaattagccctgataacatggacatcaatgtttaatacgtggcaagaaatattacatttcggagccgagtagtcccgagtcatagcaagtcaacattagtcttgcccccaagttaacttcgagaactctaaaatagaagtttggattttaaaacattgtttccaactcactattattcagtatttcgtatcatgaatacatagagcaatcaaatccaagccccagaagctgaaattacatgaacctgcacccttccaacctaggcacatcgtcttagtgtaaatgggtccaacttttcattgggacatgaactagacataccacaaagatatttgagacgtacatcataatcaaattcagagaaagtttatttttgagcaaccggtgcctaggcacccagcgcacaggttgaaaatttttcaatctgggtgccttctaagtaccagcactttcgaggaagaaacaacacttcatgggtgccaaaacaaaggcctagcacccaggtgacacctggggctggcccagtgccatgttgacattttcgtcaacct

SEQ ID NO: 253177 - DNA, 894 bp, Cannabis indica
ctacttatgaaccgacacaagcagggctaataacgaagattgattatatcaatgagcactgcaataaaattcagtaaatataattctataattactaagagttcaattccatatttatagttaagtaatcatggaattaataaacaagattatttaattgatgagattcaataaataatctagtttattgaagcttaaaattatagatccatggtgtccaaatcgccaccttaaaacaccatcaagggtagggataaaggttataaatggaagtttgaaaaaatctattttaatatgtcaaaatagtaattatttatttttaaatttatttaattaaacaaattgggtaaaagataaaagttgtctagacaaaagacaccacaatatcttgttaagacataggcggaaccacctgcactgttttaggacacagtgacaggcgtctctattgtagggatgtccccactagatttgtttttgggttaatttattaattcaaaagataactatttatttgaatttgaatttgaatttgaaaagtaattatagatatttagttggttgagatatttcctcaaattagctgagagattctctctaagtggttgagatattctctcaagtagttgagagatttcttcaatcagttataataaataaatatctataacagaatcgattataaatctttattcaaataattaaatatgatttaataattgatttgaatttaaatgtttaattaaataaaatatttattggttttgattgaaataatactgtataaacaaaaaacaaatacgtatcattttcgggtaagccaaaaaataattaatcagattaatctcttttccaccatcacttcaaaaagagttcttctcgtgtgttgagaat

SEQ ID NO: 253178 - DNA, 719 bp, Cannabis indica
ccagagaaacccatccgtgctttaactcccggagaagagatgggcctttttttctcatgtctgggagctagcctttgaatcgtacttattgtttcttaaggtggttttgttaaatctgcaactcatctccaggtgacgtgcccatgtcagccacatgtcatactaaacacctgccatgtatattgggagaaaggcggagtaacatttaccctccaaagtctcatttagtcgtacgtgaatgagagttgtaactcgtctccggtgtcaatacaatgacacgtgccttgggcacgtgggcagtatttatgatcgccatcattggcctttgtttcttttgcaggcaacgattcatttcctgcctattgacaatcctttctattaatgtcggtgtcaaaaaggtattcaagcatctcaaccaccctttctcttcatcatacccgttcatctcatccgttgaatcaaggaatctgaatcgttgtgaacccccaccgttcgatggtgttcgattgacactgtcttgcaccccaaatgggctataaaagccaacacttcccccaactgggtcatttatactgcatttcaatttacagattttcaaacacacttgacaaaatcccaaacgcccttgatttccttccgctcttcctccgccgttgtcaggcaaagtattaccaccaccagacgtctttggcccccgccttgctgtctttgtgtaagtt

SEQ ID NO: 253179 - DNA, 560 bp, Cannabis indica
aatcaaagaaaagccaaaattcatgaacaacttctctttcccttcctctctctctctctttgaaccagccaaaaccagggggttttgttgttgaactttggtgatttcagcaagggattcaaggaggatcaagctaaggtaaccctaaaaccatagtcttatgttttgaagctttaaagtttagtttgagtatgtgactttgtgatataggagctgttaaggtttgattcttgttcagttcgaattctaaggttaatttgagttgattttaagttatgtatgctagtttggttgtgttgggatgaatttactcaagtttgagctttgaactcatagtttaggtctttaatggaatgtttgatttcagtgtgtttttctgggaattactggtttgaatatgctgtgtataccctaattaggtactctggaaggtctggttgcatttggtggagttttgagaaaaatatggaatttttggtccgagtgttgctgagcagtttttgggtatcaaacggacctccccagaaggtaattttaatgtggccgatttcccctctttt

SEQ ID NO: 253180 - DNA, 693 bp, Cannabis indica
aacatgttaatgaataactcagatagtaactcatccacaactctaattgtagttacataatctacacaacacaatacaaagatacaatctttacataaagttggatcaaggtattaaattcttatatataatatagaaaaaagagaagaaaaataccagttccttgactctttctaggaagagaaaactcaatgacaaaaccaaccaaattaaacttctgtgaagatttttttctgctgttgtagagtgtaacagcctctcttattctcttaaaatcactcctatgtctcatcttcttcaactgagttcactctcaaactatctctttcctattaaagattgaattttttcctttaacttcttctgcaattttgcctttttcgttgattggattaatgttgttgaacttgggctagaagatactaagtaattattttttttttttttataaaattttagtatttatatataatctaaaaattatttttttaattaaaattttacagtgaactacaaaaacaacatgaaagtaaaataaataataataataaaaaaaacatacaaataataaacacacgaaaagaaaaacatgaaaacacaataatataaaaggataaataccgttctggaccatatattttgcaaaagttattaattggactctctgttttattaaatgataaaatggactct

SEQ ID NO: 253181 - DNA, 908 bp, Cannabis indica
acttgcaaatagatctaagatcctggataaatataataccaacacaaactgggaatacgtacttcacccttcagtttgagggggagtgtaaaggaatagcaaagtgtcagcacaggtcatcaattgtattccacctcatcattggcacagaatatcacaatgaatatttcctctgccataccattacaccagctgccaatacagaactagaatatctttctattttgatttatgcaattgtattgtgacactagttgtattacctatggctagtgttgttataccatgtatccaatattgctataaattgaatactctgcctcagtctcatttgagctgagttttacatatcctatacactctaaatttcttcttctccaaagctgccttaggaagaaacgccttcaactacgccacctttgggcgtggactacacggtgtattgttcagcctatttctctgccgtggagacgtggctagcctcgtatgccagcagtgcatcgccagtgcttccacacgtttaccaagtctatgacccgccaataaggaggccttaatctggtacgacaagtgcatgttgcgctactttgaccaactaatctttgacattttgagcttagctccgatcaggtttgatgttagatcaagaaatcatagtaacgatgataagctcaaactgtttctggaaaccttcatctccacgttggcaatccaagcggccggttctcacgagcagagcaagaagttcgccacggggaaacagaacctgagcagtttgggttcaaagatgatgtacggattcgtgcagtgcacgccagacttgtcaggggtagattgcagcaagtgtttccgacaataccatgaggagatggaaatatgctgtgatggagatagaagagcacggattc

SEQ ID NO: 253182 - DNA, 519 bp, Cannabis indica
atacttctccaatggaacatttctctcggcctctttagggaacaacccaagctttgtgtggcgaagtgtttgggaagctcaagctcttgttcgtgcgggagttcgttggagtgtgggaaatggagcttctattgatgtgctaaacgaaccatggctgcctgatcaacaaaatccttttgtaagatcctctcatccagccctccaacaagcaaaagtgaataatttattgaccatggacatgagttcatgggacattgagttactgaaagatttatttgaggagagagaccaagatttgatcttgcaaattcctttaggcatccatcaggattcggataggcttttttggacagtggaagctaatgggatgtattcggtcaagagtgcatatgatcttcaacagaaactgagaggtggaggctctgagattgcaacctcggatttttggaaagcgttatggtccttgaaaatgcctcccaaaataaaaaacctgatgtggagggccggttctaattgtct

SEQ ID NO: 253183 - DNA, 1063 bp, Cannabis indica
  modified_base (970)..(970): a, c, t, g, unknown or other
ttattttttcatttaaatgtgttattttcacttttcggttattttttatttatttgattattttttggtgttttaggattttttagtttattttttatttttctttgttgatttgatgttggaggtttcaatttttattttaaaaatatatttgtatattctctattttatttttttttccttatttgcatattttttgcttatttagggttttttttattaagtttatactttgtttatttttgttcttgctatgggttgtttgtttaaattttggtttataacaacttaatctcagcttctgttttatgttttgctattttttttttttgttttttttgttgattttttgtttatataatattatgggtttggtctttttttttaacaaacaatttttatataatctgttttttcatgtttttcttaatttttttttctatttagggtttttgtcaacttgtgtaacaatgtgttttttttttttacatataactgtattttcattgttaattttttgtttatttgcttattttttgatgtttaggatttttagtttattttttgtttattctttgttgatttggtgttgtgggttttatttttaattttacaactatattcgtatatacttttttgggttatttatataattttttgctatttagggtttttttacgtttatattttgttcttataattgtttatttatgtattgttttttttatatatatatatatattttataattgttgttgttttactgttttattgattatattattttattttttcaattatggaataacaaatttagtaaggaagattttcatacttctcgggtttacttctacatgttgttatacaattattgagactctcaattttatttttatccactaaacaaaaggaatattgaacaaactatatttggattctttttaagacttcgttcttatgttttgcaacnccagttggttcactcttacacagtttgtcgttgagggagggttgtccaaccaaataactaatgagatgtggtttaatgttgctagtcggatgc

SEQ ID NO: 253184 - DNA, 612 bp, Cannabis indica
agagattgtccgcagctcaagaaggaagaacaaattacaacattaaaacccactccagcaagggtgtttgctttaactcgggctgatgcaaaagctagcccttcagttgttacaggtcacctctcgatcaataactcttactcctttgtattgtttaactctcggacctctcattcctatgtggcagccaaatttttaataaattgggtagaccgtatgatagttatgagaaagggtttacaaccttactgcctggcaaagaattagttatctccaaaatgtggattacgtctatcccaatcagaattgaggatagggagttgagtgctgatttggtagaattgggtttagcggattttgatattatacttggaaatgatttcttgtccaagtactcagctagtattgattgtaaacgaaagatggtaattttccaacccaagggtgaggaacagtttgtttttgtgggatcagttcagggatcccaaattccaataatctcgatactgaaagttagagaattattacaagacggatgccttggatttctggtagtggtattggataccacacgacctgagtcaattcggctagaggacatcagggtggttc

SEQ ID NO: 253185 - DNA, 930 bp, Cannabis indica
tgcatgctatttgtgattcgtatactaccaacactagtatgatagcagtactgagtgtactggtacaatgtatgatgttcaatgagtatagtacggtattgccaacactagtacggataggtacagagtgtatgtggtacaacacttagtggtactcgaggtacggtgcaaaccctaccaacactcgtacagtagtggtacatagtgcatgtggtacagtggtcatccttagtaaagaatgttcttaattatctgataagccttgtggatatgtgtatgggcacctagatgcaagtcggtattatgttatatgttatatgcttttctcactgagtcagttgactcacagaaattacttttgtgtgtaggtaaagcaaaggacaaagctaaatagcagtgagtttcgagctcaagggatgattgtacatgtcaagacggtacgacctggagtgttcggtctcgagacgactttggctgtattttgtagtcgttgtgcgacatatttgtaataagttattttaaatatgtttgtaaagtttaaatatgtaaatgtttgcaaagtttaaaagtttaaatcaaaattttaatttagtacaattttcaagaaaacctttttgattatcaaaggcgagtattataattagaaaatcacgatagcatgcctaagttttagggcgttatacaacgatttggccaaaatgtcacagtagtttggattagtattctagtattttgggatagtgggtcatgaccattttatcctaaaattagtggctatttagtagctaagtaagagttactagcgatttgtcatttaagctttatgtatttgagcttagtgattttatgaatttttggggattataagttgagtgtatagaaaatgctaaaagaaagtttactcataaatcaaacaactttatctctctt

SEQ ID NO: 253186 - DNA, 1007 bp, Cannabis indica
taaaatacatgttaacataaatcacttcaaaattctaaattgataactaatcaaattgtaatggattttatttagggcacaaaacccaacacaaagtccctctccaaagtagctggtattggaggaagttaattgaactcaagaatgaactcaaaaaccgaattgatcctgctatctttatcaataataaatatatgattgctgcaggttacaaaatgtacaatcaggctgaaaatcattaccattggagcaaacatgcttggaatagactcaatattccaagcattgttttgtggtgtggattgctttgctgaatagacttaaaataaacaataggttgctcaaatatcatattgtatcagatgatagatgtttgttctgtcatggaattctgaaactgttgagcacttgttctttgaatgctctttttcacaggaatgcatacatcttttagagcagtggtttggttggaagatggccctcactccattacaagggctgcttcagaaattggacagagttaagggatgcaaatttcgaaagagagtgattatggctggtatagcagcattggtgtacaatatttggctgaccagaaatgatgtattgtggaatgagggggctgctagtgtccaaaacatttttcagcaaacaaagtggcaagttaagaatagaatttcttttgttatgccaaagaatgtaaagaaagaagaagttgaatagtttgagaagttgtaagtaatagtggaaattgtatagaatcatatgacatctcttgatggtcattaggtgtaaaattgtttgtgtggaatgaaagtctgattcatcaaaaaaaaaaatgattgttgttccaatatacgaaaaatagactaataggcttattggtgtataccattatctttgattatagtttactttactttatattgaaaaaataaaataatgttccaacaaacaaaattagtaggtttattgacatatatataatggtagattatatgaaatga

SEQ ID NO: 253187 - DNA, 1388 bp, Cannabis indica
aaccatgcaacattaaatgttatttctgatctatattaataagtaaatctgattatattgaaatgagtatcctggctagccatagttctgcaaggacctagcaggataaggcctgtagggtttggcaagtcactatagcttcaccaagaggagaccaacctttgagtttggaggccatccttttttaagttgaggacatctttgtacattgtttccttgaagaggtcaggttctcttggtcgaacggagtctccttgggtccggaagtcacttcttggctggccagcttatgcacagaccttggccgccctataggctcaccctggccggcctataggctcctcttggccggccaaggatgttggtacaactccttgtgggcttgcttcaattccttcagtcgctacttgacggttttgttatatcttgcacggaggctctgttctgctattggcgtggttgtactccacatgtactctatctttggcttacatggacatgtcatgtcaggtggacaaaatggataacaataagtactttgtaaattttattagactcatccctatggtgactaagtagaattaaatttacaaatatgaaacaatggtagaagctcataaaataagaataatcttgactctcggctaccgggacaacattatatttttattttgatcgagtaaaagaatgctaaaatagtatccattttagatgagctgacaactctattaaactaatgatatctttgactctcgcctaccgagacactatatatcatctagttgaaaaccttcgaaattttgtagatgtgtttgttttatatttttacatgttcttgttatttactaaaagtttactaattttcaaatatgtgtatgaatttgtattaaacctatgttgatttctatttattgatatttgtagttttcaatatgactatgaacaacccaattgtgtcactgttgactgacaacaagctctctagagctaactttgtcaaatggaaagagaacattaatattgctctcatagatgagaattcactgtttgtgttaactgaggaagctcttgagcaattgggtgagaatgcaaccaagacaatgagaaaaaagtttgagcattggcagaatgctaacaacaaagtttgtttctttatgctgtctagcatggttgataccttaaaaataaggtttgccaacactctcacaactgttgagatcatgaactagttaactgaactatttgggaaggcatcggatcaagcttgttttgattcgaccaagaagttcatcaatgcacggataaaacctcattagaatgtgcgtgaacacctactcctgatggctagttatttatagaaagctgagatccatggagctatcactgat

SEQ ID NO: 253188 - DNA, 492 bp, Cannabis indica
gctggccgtagttcttgcgcctccagcagaggcctgattatgtggggtttggtcaccagtagacataggtaaaccctattttggtggctctgataccaagtggaaattgctagtatttaggagtaaaatgctctgctcaattaatgcagaggctaaactttcattatatagcagcagcaatacaaaaggaataacctagaatattacagccaatcattgacacctttgccctgatatcctaacaacctggaggatattctaacagaattgagagagtaatcattacacaatgatgagctggacagtactggaaaaactacaaaaatagacacaccaaaaagactatagtgaccctgcttgagaatactcatttcttaacaattaggggttctcagattctcgcaatactggtggcattatccaaagctaaaactttatcgttttgtgaagagttgtcggcgacaatttttgattgaaccagatccgattaaa

SEQ ID NO: 253189 - DNA, 879 bp, Cannabis indica
caattttgagccaagaaccataattcggcctttctaccccatcttcttgaatcccagttgctcgagggtcagtgcattggcgcatctcgtggccaattcttctacaattgaagcacatgtatggaagtctgtcatattggaactgaagccaaattcgccgtccttcatgaggaaagaggtagcctaggaatattttggattgaatggagttctggattttaaatttgaagaatctattgatagcaattttattgacatccgcttcttgaacttcaagaatctcccctgccattccaaccaatctggccatatttgatttagttattgctttaattgggaggttaagcacacgacctgtaatggtatatgagtagagaaccgtttcccaatcctctggtatacccttcatccgttccaaaatcaggaatcccgcatttaatacccatggatttttccgcagtatcctttccaatgaagagttcgtcttgtaggaaagaaccaagaagatggtcgtagcagtggttttcttgatttttaggtcccgaactgtttcccccaaatttcatagtcgacacagtatgttctttagcaaagaacgtctgaaaggtttcattgtgcaaagccttccaataaggcaagacttgcctatgtcttcttccccttcctcattaatttcccatccttcttcatctgtaaccttcaatttgcttgtgcgagagagaagttcctccatttgatctatgcttgctgagcacatcttttgattaggcccttccgaagagagcatgggagaacaccagacgcaggagaatcgccttcgagagagagaatcaaccacatggtatttctttcttatctatgatgatttatctcatattt

SEQ ID NO: 253190 - DNA, 1117 bp, Cannabis indica
caaatgtaggtgcatgaatatccctagtggtgatatgatgtgataatacatatataatagaaagttgttgatcttccaaatccaaacaaatttgaagtagtaaatattttaatttgttatctattaagttgaaactatcaaatcaaacttgaagaatttggtcaagcaaaaacacataaacttaagttcatttcttgatttagctttagctttgtgtttggaatattaaagtgaggcaaaaaatccagtgtggggatgggaggtcggcacatcggtttctgttctatgatgcaaaccattcacttttgaaagagaccccaagattaatacaatcatttcagacagatttcatgcattttttcaacttagtaaaaaggaaagtgtgaatcaaaataattaaagaaagaaacgttaaagcaaaactaggtaaggggatggctcatcttcccacaaaaaactataatataattttgtaaaataaatagataagtgtaccaccacaccacacccagaaattaataatcgaccataccgtttgacccttgtctttttttaccaatatgttgatgcaaaaactataccaaagggacaaaacaaagatttcacagtttataaagacaaagcatatacgactgaacccaagttactcaaggaaagtttaccatatatataaatatatatatataaatatatataaatatattgagttgtagaaatttcaagtcacgcacaaaagcaataataaaattacgatttaaataaataacactcagtggaagaaatactagttttgtacatcatggaatggaatgtctctacctcagaggccagagctggccttgatatggactcacttctatataatggttggtcattctttattccaatgatcattaattataactttgtagcctgaaatttcttagataagaaggcttgatcgtaccattgaaggtaaacagcggcataagtatctaaaattttaagtttgtaagcggtataagcttaatgtttatttttagcggcataagtactcaatgtttgtaaaactgaccacatataaagtcaagattctcgatcattgggtctagacggaaacatgtagtatcatttactt

SEQ ID NO: 253191 - DNA, 875 bp, Cannabis indica
cttcactagtggaactaaattattattgatgagttcttacatcattctagaataattcctccaccctagagtaaccaccatcattaactctaactactgagttggtgtagatataaggattctaatttacactcctatcatataacatataggccactttcagagattcctttttgattgtcttcttatgttccttatttgattacatctttgatagctcccattcaacattaggagtctggttaaattcatacacaagcgtgcatggaacctcttactattgatacttagggacctcttgttgtgatattttatcttaatctagaacatcaagttccttctagactaagtcatcaacataacattctagtattaataaaaatataaaatacttgcttaagattgagtaatcaatataaataccataaaacttctcataaggattaggaattttgcctaagtcttttgaatcgacattgcaaaaatttcttatcttatccttataattcttatgtgtaccatttctatccatatgaatggttagatttacttttttagttttattctaaagttcctatcttgatcataacatactaggctatcactagtgtcatccaaataataatgggctagagttttaaaattctccactaagataaggtactgtgatactatgtccaagaacattattggtatcaatttctacagtgggaaacactggaacatctacaggatcaagaataacttctactggtttgccacttcatttattatattatatccatgtctaatcaaaatatgtgtgtcatagagattctgtggtatattgagtatagtctagagttcaaagagttgaactacatatatcaataact

SEQ ID NO: 253192 - DNA, 673 bp, Cannabis indica
aaaaagactgtaaataaaaaagaaagatataattgtaatgatgaaattggttggactccgtgtcctaatcaatgcgaggaggaagacgagggccccgacgctcttcaagtaaagtatcaagccttttcttcttctcctgaaacttagcaagagcctcttcaggcttgggatagaagtccagcttcatactctggccattcgactgccaggccatgtagaccccgtcatcaaagcgctttacgcaatgcttgcaggagacaagggtcaggagctcgtccctttttgcctttttcaaggcctgatctttgaaatccctcagctccttcacctccacggtcaggttggctatatactgcaagtgttcctggtgcaactcctctaaggacttcaccttggcagccatctcgtccatagcttccttggcctcccgaagctcgcatctggccctggctgcgacctcgccctccaccttcagcgcctcctggtgcctcgcctccacctcaacctccctctgcttggcctcctctcggaacttcgcctttgcaagggcctcccttcgttgagcctcctcctggaacgcccacctttcggcagacaagtcccgcaggatcctcacagcctcgtctatgtccccgaattcggacatgacaaagccatggtcgatcaaggtctt

SEQ ID NO: 253193 - DNA, 641 bp, Cannabis indica
attgacaatgaatgcaatccttgtgtaactaactggacacttgctttgtatataaaggagtgatccaccatgaaatgaaaactacgaaactcttgcaacagtggactaagcagaccgtgatctgactgaaccactatattcctttgtcttcttgatatttccagtttttaccaagcatttacgttcccagttcgagtactcgctgttctgggttgaatactcgcaattgttcatcatactgtttctccttagtattattattattcatttttggtgttgcgaaattcgctcgacaacatttggcgccgtctgtgggaaacgaagaagtacactcttgctaataccaaaagaaaatcatcatggctggaaaccaagcaaacagaggttttaacaacgaatccatcaacatcgaaatgatgaacgttccgttgtcgaggggtagagcaccacctgtggatgtcatcaatggcagagtaggtcgaggtaatgtcagacctctcaacttattccctgaaactactggccctcaagccggggaaacgtctacacccgcagctacaacgagacactttccacccttcaccccagtggcagtgtccgagggtatcatccagctagccaccgatcagtataccgcaatc

SEQ ID NO: 253194 - DNA, 2052 bp, Cannabis indica
ttccctttatttatttatttttatgaaaaggaaactggaaaatgacgagtgtttttcatgtttttcgttttacaagtagataaaagaagggaaatattcgcacgttattggtacaattaagtatcggattttatataattaaggattcgtttggtacgtcttataaggatcatattgtattaaataataaatacactatgtttggattaagcaatgtattgttttaattattacgaccaaattttttaatacaatgtatgttgtattattaaatacataataaatggtccgtattagtttgtattataatatttacaaaaaatttggggtcaacaccaatttccgacccggatccagaccccggacccagacgcagtatccggatctatagttggtgttaggatcgagtgtattaaaaatatattataactttacaaaatcaattaatacaagtcaataccaaacattttattgtattaaataatattaatacaacacaatctaatacaatacattacaatacgacgtactaaatgagcccttaatgtattatttttgtagaatattattaatcaattataaggcgtcacttttaggtgataggtagtactagtgtcttagtatcaaaaatgacaattcatttgtcttgcattcttaattttttaagtgaaaaattggtgataccaaaaaaacatatattagtattatatttgtcaaaaagtagttttaattcaatagttactataaaattaatgaaaatatattttatatttcaagtcgtttaggttttttttttttttttgatttttttttagatgaagtgtttagttttaaaaataactaaaaaagataaaattcaaccaaaaatttatatatactaggtaatatataatacatttaatttattattttaattttataatatataagtgttctttttaaggaaaaatatctacgagaagagcaaatacaccaaatatatttaagaatgaataatatattgtcttgatttttatttttcattttttttaaaaaaattatcagtttaaagtattaatgtaaattcgaatttgatacttataattaatttttaataattatatacatataaacatacatattcaaaacaaatattatattttactaattttttaataattatataaattagtataatggcaaaactaaatacctaatataattgaatatatatatatatatatatataaataagtaataattatttttttttattgtttttgtaaatgcttcctttgatttattaacaaaaataatcttatttgtatgggttaaattaataccattttagaacatatgttttgtaaaagttaccaattcgactctctattttgtaaaataataaattagaccttgtactttttaaaataatataaaatagtactctgagctcaatctttgataaatgtttttctaatataattaacttgaagtcaatttctaaaatagtataatccaaaatggtctaaattgtcatttaacaaaatagaaagtcgagtccaaaataatatttaccctatttatattctgaatttttttattggtaggagttgaaaaaggcatacaaagacaaagaaacactttagagggtcctgagctactacacaatcaaaaataattttcaattcaaggtatgtaagacatgctctcaagaatatagcctgaagtgtgtttatcaaaactgtaattggtcactaagagtatcaaaaaatgggccaacaaatacattcataatcaggagattctcaaacatccacacctgcccaagcaactacaaaattcataggagaatgcatcaaaccaaagtttttgaacataaagacaaaagtaacaccacaagaaataaaaggagaatttaaatacaggtacggtatcaagatgaactacatgaaagtttggaggactaaagagcatgatgtaaatgacttaagagaaaatgctatggaatcatatgttgggttttatgtcctaaataaaactctttacaatctgattaggctcaactcaggagtg

SEQ ID NO: 253195 - DNA, 757 bp, Cannabis indica
aaagaaatcagaggagaataaaggaaatcgcacagaagaatgcaagccacgatagagaatagatggagtttaaatatattgggtgtggattttataaatggaaatattcttttatatgtattttattttttccattttttaagtttttttattttttttttccaaattttaagttttttcattaaatgtccatatttttcaaaatgcatttaaagaattctatatttataaaaaaaaaactccttttttttgttttttgggctgatcttataagcccaaagtagaatcgtggccacaacctctctaaaacacagagttcttttaaaactctactaaaaaaaaaggaaaggtgataaattaagagagtaatcacatgacatgattcaccttatttgattcttttgcttatttatttatttttttaaaaaagacataaacatatatgaattaattctcattatcaaaccatgtcacttacacatattctttagcttgacgacgatagtgtggtaccacaatattactagtacaatcaagttttatatgttataaatcttaatttaagaataccaccgatgaaaaatttaaataaatatttagagttataaaaaaaatatataattacgttaaaacacatatgaatatttctttgtcatgtatattattttttaagttaattttgaagtacttaaaacaaaagcttaataaaaacgagttagagctcatatgtttcttatcaacaacagttacaaaaaaa

SEQ ID NO: 253196 - DNA, 951 bp, Cannabis indica
ttttttcaataattatagtattgccatgttattcatcaatagggaaactttaagtttcaagtttatgtccccaaaaatttatttagcgtgtcactcactaattttatgaataatgtgatttaggggcctgtaaattgttgagcagctgttccactcaggttggccagcaaacttgaatttggcaacgaggtaagattagtattatgatattcatatctatttaaatgtttagtgtacatgttatttatgcatgttagattatatcgatagcggtatcagtatacgtagagttatattggataatgatagatgtatgttggctagatattgattgacgctatcacatcagcatggctagagtatgactagcatactgattatagactgatattatggtcaatagtagtttcgtacaaactttctagactcattaccgtgttggacacggggacagggttatcgttgggtgtatgagcacctgattataatccgggtaattactatgatattatttatgcttttcttactgagtctgtcgactcatagatattgtttgcaagtgtatgtaagatcaaagctaaggttgagtagccatgagaggaagcaaatgaagatcgtacatgtcagagcggttaggcctagagcgtattgtcattgggacagctgggcttattttgtgcagttgctagtcgacaaacatttgtattatgcactgtaaaactattgtaaatattttgttgtgggatctcagaataatatacatatggtattttggtatttatgatgagttaaataaagtattaattaaacacgattttcaataaactcgttaattagcaatgagctgcacgattaagttaaaaatcacgttaacacgccttaactagtagggtattacaatttggtatcagagctgccaagttgtcttccgaagatcgtcacgacatgtac

SEQ ID NO: 253197 - DNA, 724 bp, Cannabis indica
ttgtgttgttggttgtccaattggcatggttgttttttatttgtttttggtttctctttttggcatggtcgatttgatcttcttcctttttttctagtcgggttttgctttggttgtgagctagttggttttgttgagttttggaaggtctctccgatgttattagggcttaatatttaaatttttaaagggcttgttgcacgttctcttcaagttttagagggcttgttggttttgttgagttttgtgcatggttggatctcgttagaggttcgtcgacatgactgtgttgctgatgttggtgctttcctagttgtaccatggggcctctctcttacttgtgctatgcttggtatctcttgagtactagaaaattgaactttagaggcagttttttagggcatacaacgtcagttttggtaaaattcgccacagacgctgttttagggtcgctaatattagtgtgtatgcccttaaaataagtatttaatggataatatattatagaatatatgaaatacaaatgttgcccttaattttgtctaaaatacgtggaccaacacgactatgacacgtggattgaaggagtaaggctttgagataattcgactaagtcttctaaatcaaaaggatcagcaaggagtatgcctccccgagaaggtatgagagattcacatactcccggagagcaaagctataataaagcacctccgggaggtatcaa

SEQ ID NO: 253198 - DNA, 898 bp, Cannabis indica
tgttacaatggtgtgtcacaagttttaatctagtgggggaacgttatattatattgttataatataagatagattaaaatattacaatgagacatattatatattaatatgagattaatgtatataatgtgattaagagttacatacatctaatattcacataaattgtaacataagaggtggagttactcatattttgtaacttccacatgatcactaattaagtgtgtaaagagtggttaacaacttaattttttgaaatttaaaactataattaaaatatagttgttggggattgaattttatcatttataaagtgtctaagtgatataaaataaagtgtgaatggtttggagagttgtttgcaaaagctgaaaaatttagtaactagtaactagttactatttttttcagctttaattgttgaacgttttttactataaggatgacttttaacaactctcataatctccaaataacccatttaatcccatttacaccccattaagaaatgataaaaacccttgggtgtaggttatttaaatttcaaaatacgtgatcttataaatttctttcttccttaagtgtttgtggtagggaaaaataagtttttgaacaaaagtgtaaaaccttgttcaaattttatgattcccctacttgacacttagtattggtggtgttgagattcttctcatatatatatatatatatatatagtctatttatattgtgtttttataatcttctcttcatcttcttttctatattaatgtgtatattttgtctagagttgtaatattattttatcaatattattgtttttgtatttttttattttgagttgtattttgatatattggttttctatgcacctataaatttccaacaatttcaacca

SEQ ID NO: 253199 - DNA, 846 bp, Cannabis indica
agaataaagaaaagaaaaagaaaagggagagaaattcctattttattgcttgtgagtgagtttttcaatgtgactacacttgtgttacattacatatgcattcatgaatcttaaattgtaatttatatgctttaaacttttgttcaacgtatgaaaattatttcttttaaaaaaggaggtacataattttattcttgttaacacgattaaattttattaaaaatactttttatatacaaacctataatattagtgctttcatattcgatatattattcaacttcacttttatatttacatgtgttctaaataagaacgcataaaattcaattaagaaagaaaaagaaacaaaacaaaaacaaaatggaacaaaaaggtaagttgttgtacagagttattttcttctaacaaacgaaagagaatatattaaccaagagaaaaataatggaaaaataattatcttaaaaggaatgctaaaacatattattggtatttacgattcttttatatgtcaatatcggtccaattaactattgagtctcatataatttaatataataacttttagaaaatattactagccaatcacaacacaacatatctagaaggtgctaaatactaggggtgttcatcaaaccgcttaaatgttcgcactacaccgcatcacaaaaaaaatgcggtttgaaattctttgcggtgcgctcgcggtttgaatttttttttaaatcgtcgcagtgcgattttgaattgttaatatgtggttcaaaccgtaccgcatcgcacattataaaaaataccaaaatttttatatttagttaggtcctatatgtgaatgtccaacctaaa

SEQ ID NO: 253200 - DNA, 977 bp, Cannabis indica
atagagacgataacaatagacacaacagcaagaccctcggttcaaaatccattggaggagagagagagagagagacggacagagaagagggctttggcttaggtaaaggttggatttttatttttggaagaaagcttaggttggattttcggttctggggttttcaatatatatatgaggggtgtgaggtgttgactttgaccttcaacaaaccaccattttaggcaaaattttctcatcttcttcttttcaccttaatatagtattacgaagcttccttccattcttctcttcttcaaatatacagaacaactatttttcttttaaagggaactaattaaaattattttcaatagcatttttttttaatagaatgaaattttcattaggcatttgccaatcatagtattacaaagcttcctatcattttttactttcgagttttagtaattggataaatattataaagtatttttacaatgtatttccttaaaaataaatgtatccatgtactcatatttattttggcatttaaaaattttgtttgctcttatttttgttatatgttatagttgtttaagacatcttgtaaaattttaagaaagtcagaataatttataatataaaaagtaatgtttaaacattctatttcatacacgtataaaataaaaaagtcacgcgtgtaactaatagtttaaatcttattttagtgtgttaaaattttctaaacttctcaaaattttacagggagacttaaataattataatgtacacgactgtctattagatgttgaaacaaaataaaagtacatcgatgcatcacttttagaaagcgaattgtaaaagggaaatttgattttctatacttacatatacctaatattttatttttaaactaatacatatcatcattgaaaatatataaccactttatctaaaacccaaaaatacccctctcaaattttgcatactttttt

SEQ ID NO: 253201 - DNA, 808 bp, Cannabis indica
agtcttccattcatcatcaggttgtaggaagtaccctttaggcagactaacacccaattgatgaatctagacggaaaacataacccatttagcaaatccgaaacaaaggtccagtcaacagtagcataggattttcttaagtttatcttcattatgcatctggtcgagatgttctttctagtgtatcccttgagaaggtcttaaaaaatcatgatgttgtgagccaaatgtcttttcttaacaaaagctccttgattatgatgaattatatccggaaatatctcagaaagtttggagcaaatcagcttggttatacatttatatagagtattgcagcacacaataggtctatagtcatttgcatctttgggactatctgttttgggaacaagagatattatcgtttcattgagcatattaggcatcacaccgtcttgaaagaactccaacactccttgggtaacatcttccccaatctcattccaaagccctttaaagaatctcgaaccatacccatctggaccagggctcttggaagaatggatatcaaacatagcctttttaagttcagccttcgtgaaaggtcttatgagccttacatgctgctggatgtcaaagatcttaccctgagcaagaatagtctgatctaatcttttggttgctaaactccctttccccataaagtttttaaaatggtttacgaagtgctcaacgagcttcggatagtcttcaataacttcttcattcctgcagtaggataggatcctgttttcttgtcttctttttttcaaagaggcatgaaagaagc

SEQ ID NO: 253202 - DNA, 726 bp, Cannabis indica
acagatgtctcgcacaacgactcgcacgaacatctcccacaatgacttgcatgtaccacgactcgtacagaaatctcgcatgcaccacaactcgcacaaattctccaccactcgcacaaaggctccttggctcacacaaatgctccatggctcgcaaaatgctccacgactcgcaaaaatactctatggctcgcacaaatgcttggcggctcgcactaatgctctacaactcgcacaaaggcaccatgactcacacacttcagtggtcttagtgttttggccataactttatcgatatatgtcgaaattgaacaattcaaaatgcgttagaaagataagaaagagatctatgaattttatgtttatgataggatctaattctagacgcatccttacagaaatcctccaaaagttgacacttactaagttggacttactaactctactcgtgcctgctgacctccatcaaaaataccttaaacaatcacaaatgcacaatggaccttttaaaatcgtcatacagtgatgttttattctttgtgctttcctaacttatctaacacttcgcttgcaggagaccatgagatctgtgtctaaaatgattggacaagtctctgaagaccgtatgtaatacccgggattaagaaaaggattagcaaaaccctaactagataattatgagttaattgaggaattatattattatatagttcaacatatgtgaaa

SEQ ID NO: 253203 - DNA, 471 bp, Cannabis indica
tgcttttttggaatgggaataatgagggtggagtttatggtagaaaagtttgtaccattattaagacaatcaagggctacattaacaagatctatgcctaggactgaccaatttttttgatagaaataagcatttaggccatcaatactagtagctttgtcaccagacaattggaaaagggctctcttaacttcattaacactaaaaggttgtcgtagcattatagaatcatgatcattaagaggagatcctaaatgctctaaaatttaaacaatcgagttagcatcacagccttgagattgaaaaagattgataaaataggtagagacaacacaacaaattccttcaaaattattgacaatattttcattatcttccttgaggaattttatggtattaatctttttcctatgagaggcaaaatgatgaaagaacttagtgttctggtcaccaactttgagccatgttacc

SEQ ID NO: 253204 - DNA, 734 bp, Cannabis indica
aaaaaacaacatccacattttccctccgagagaacccccgtaaggtcctctctgccgccggtcgtcgaagaccgcggcaattccaagctagacacctcatggcgcaggtgggggcatgcttccggccgcctcctcgccacttccaaaattttgcacataagtaattgggacttcgacacactggttgagtatctgttcaatgttttcacgcacttcattctcttcattgagtctcgcccttctagtgcgcacccctgattttcggttggaggataaaattccccgtgcctgccttcttctgcttttcccttttgaggtctcaccaggttcaacggagccagcattgaatttaggggattccaaaggctgaattttccctcccgagagagagatcgacccatgagtctcaccatttgaatcgatgaagggggagtcaaggaacgggtcaggggttggatgataccatgtgtggactttgcgttttcttgttccaagcagatgggtaattagttgagatatatcagggggatttgaaatgagggaaggttgggccttatataaatctatagactcaggcctcaaaagctgttggtatattttctgaagttcaggatcatttgagggccaacgaaggtttatgggctcagggaagttatggggctgctgagacctacatgaccaaatatgtggtatatccagcccttgaatcaaggaaggcccaatatcaggtattt

SEQ ID NO: 253205 - DNA, 1090 bp, Cannabis indica
tcgctctttctcttctgaggaacaatgggagattgcgtcgctgttccaatttttggcttgcggttgaggaccagtgcggacttcaaaaaagtcatctctgcgaggacaaataaagataagtataaataaatttcaaggcactagtttataacatgcgatatgttacctgacgttggccgagaagtttgcttggaaaggcgtttgtctatccgctcttgttgcttctcagacggctccttgtacactggctccctttgaagtcttgcgttctctggaatcaacttgtgttctcgcagctttgacgtcgtgcacagtaatcgcagtcacgatcttgtacaggaaggcttccaagaacttcagcagtttctctgcgagtcgcgtcaagtataggtcaagctggtctatctgcgacaataaaaagagcgagttagcttaaattcataagataactcaaaaattgactaagtagaattacgcgacgtactaggacgacggttaaagtcagtcctaatccctggaaccttaaacacataaaaccacttcgatttccaatctcccatgttggaaaccatgccttccaccccattgatctcagaagtagcccacttgctgaagcaatagaagccgttgtggagacctacattctttatatcgtagaaatagctaaactcttctgtcgagggtgccctgtgcacgtactccatatacatcgcgtaaaagcctaaggctatgcgataactgttaggggttagttggaaaggggacacatcatactgtttgagaatagcagagatgaatggatggaaggggattgacactccgcatcggagaatggggatagacactacgacatcttctgagggtatgatcgcagggttagtaaaagggaggtgtcgcctttgagtaggatgaggacacatggtgctaagacgcaataggtttaacctcaaaaaggtggtcaggtcaatttggtaacccgcgagactaagtcttcgcaggagaatggctcattcaactgcgtgttgtccaccgagtcggattcgctcccagcggcatctccatcctcatcagactcacgatcaggtacttc

SEQ ID NO: 253206 - DNA, 949 bp, Cannabis indica
atatttagccatatatttagactaaatcatatacaaatagtgacttaaccacttgaggctagctcaagtggcataagagggtgtgtgtgttggaggtcatgaattcgagtcacaagtaaaacttgtaatatataaatacttaaataaaaaaaaaattatacaaatagtgacataaacaatccaaaaaaaaaaaaatccattattatttatttaatgagatccaatactccaaatgtaaagagagaaaaccgaaaaccaaaatcacatcacaacaactttatttattaaaggaaagcataaaaaaaaaccatataaaataaaaataatacactcaactctttttttttcgtttttgtcctttaattggcattagaaattattataaaaacacccaggcaaaagcgaatattagtatatactcttttttttttttttcagagagtcgattaaatttggtaagaatttatttaggtgggttcaaggcttggtttctcaactcgatgaccttcgtccaagccggcctggaagtaatatcagccaaccaagcagtgacacgtggcctagcatcaaacagctctttaatgctcgtgagcagcaaatactccgccgtaggcaaatggtgaagatcggccaagctaaaccgatcgccgcctaagtaattagactcggaaagccttttctcgtacacatcgagaaccttagccagcttaaccttgttttcctcgatcacggcttggtctccttcggcgccaaacattttcggcttcacggctaactcccagttcagcttcgatccagccgtgtcaaaatggtgagcctcaacctcagtccaaagagactcgatcgcctgttcctttgggtctctgaatacaagatctgttccttggtcgctgtattgattcgcaatgtatttcgtaatcgctcttgattctgcaaatataaacaattt

SEQ ID NO: 253207 - DNA, 671 bp, Cannabis indica
actttgtgaacacccctacttcaagttgcttgtagaatttcaaggttagtcaaaaacaactcatggtatatgttagaatggattgtactacagctttaaggagaacctctttacccctgctgagaaaattttctcattccaagtatgcattaatctccaaattttctccttaacattactaaacaattttgacttatcccttcctaagtaagctttcatgacattccctaatcggcatagcaagctgtcgatagaataaaacttgagtcgctagagttgtattgggtgagaaagataacactaacttatctagattgagcaattgtctagaagtacggtgatatgtatccagagcacgtttaaaggcaagacatgaggactcattggcctgacaaaacaagagagtatcatttgcgaagaacaagtgtgaaattgaaggtccgcgcctcgtgagagagtacccattcaacataccagcatgttcttcatattcaaaaagtcttgagggaccctttgaacaaattagaaacaggtacggcgaaagtgaacaaccttgacttgacgtaatcctctaatgggtagcaacgagcctgtaagctcaccattcaggaaactccattttgctcataacttcctataattatccgctattctacacgatcaaatgcttt

SEQ ID NO: 253208 - DNA, 514 bp, Cannabis indica
gacgacgaagagtcagaaagcttgggcggaatttaccgatacaaatgagaacatggtaatgtttaagttctagttgcaccattaaaaagttgtagattcttttactttttctagaaattccgtttaatcttttagattctttgaatatttatcgaccccttcactaacaaacagaaaacttttataagaacacaccaaatcaaatttttgttcttgtttctgttattctttagaaggaatgaattaagctaaaattgttagtgccttttagatatgttttcattgttgtgatttctgacagaagagtaacttttccttttttctttttaggggttaagaagatctcagaggcgaaaaggataaaatattttcttaattattattgccctagtggaatttgaatgttggggccttcaaaattggtagaatttgtatagctagatactatataatgaaatgatgaagaaatttctaagaaatcaagtgttgcccacattgcgtttatgtaattacc

SEQ ID NO: 253209 - DNA, 561 bp, Cannabis indica
gtgaccttggggactattactgccaattatccctaatgaaaaaataaaataagataaataaaagactaagattattacaattttaagtaaaatattacaagaataatatattatataaagagttacaatctcgaaacacaaaatataaataaagaaaaagagttacaactcaaaactcaaaaatacaaataaatgtaaactatataataacacatatatataaaatattgtatatatctataatatagaatatatataaaatagataaaatataatggagatataaagtatatataaaaagtctttatagtatgtatatataatatatatataatactatatagtacagatatattatatatatgatagtatatatataagagtatttaaaagagaagaagagaataatataaaactagataatagaacaaagtaagaatacaagaataaacacccaaagtggagatggggatcactaaaagcttaaagaaggtttctacacctttgtccaagaagattatttctccctctattaaatacttaaggctttgtggaaatact

SEQ ID NO: 253210 - DNA, 604 bp, Cannabis indica
tcttcatcaagagatacatattcgtacaacaacaaaattaccaagttattatataatattcaattaattaattttattttacttgattaatattttcattaccttacttaggcatgaaatataaattttaccccaaccaccatcctctcttcgtgttccaagtaaaaaattaacagctctacaaatagtttcactagtattgaatgtcttcccagcaactgccaagcttttaagtgcaaaccatgtcccatatgtaaaacaaattccccaatttcaaagcctgtcaaattaaaaaaaaaaaattagatactctatatattattattattttaattattatatatttattcttatatattattattataattttaggcatgctgtttattttatatcctctatatacatgtttcttttaccttattttaaggtactttatttacctaatattggatgactgagcatggtgttgttattgtcaaaatatggacttaaggagggttttatgtggtatatgcttcacatcccatgacatggacaaagtgctcttcctgttaattaatgaaaatcttgcaatgaaaaatttaattatttttattattca

SEQ ID NO: 253211 - DNA, 1510 bp, Cannabis indica
gaggtttgtattgttacaaggtaatgcctttttgtttgataaacgcaggtgcaacgtatcagaggctggtgaatatgatgttcgtagatttgattggggacaccatggaagtgtatgttgacgatatgctcgtaaaatctcaacatgcgaaagatcatgtcaactatttacaagcaatgttcgaaatactgcgacgatacaaaatgcggctaaatcctcttaagtgtgtctatggggtcggcttagggaaattcctcgggtttattgtgaatcagcgaggaattgaggaaaaccctgcaaagattaaagcattattagaaatgggatctccgactaagccaaaagaagtccaaagtctgacaggtaaagtcgccgctctaaatcatttcatatcacgatcctctgacaaaggcaaagaattttttcaaatcttaaaaggcaacaagaagttccaagcactaaaaacgcatttgggacagcccccaatcctgtcgaaaccaatgcgtggagaagttttatccatttacttggcggtatccgaatatgcgattagctcagtactaatccgcgaagaccaaggtcggcaatacccggtgtactatgtcagtaaacatttgctagacgctgagactcgttaccctcaaatagaaaaactggtgtttgccctggtaatagcgtaaagaaaattgcgaccttattttcaggcccatagcgttgaagttaacaaactaccctttgagacaagttttagcaaagccagaagcatcgggaaggttgttgaaatggtcagtagaactaagccaattcgacatcaagtacaaaccaagatatgcgattaaggggcaggccttggcagatttcattctcgagtttccaagtactgaagttgcactcgtagaagaaaaaattgatactaatgtaccaaatggcgaaggatggactttatacgtcgatggagcctctaatagcgaaggctccggcggtggcataatactcatcagtcctagcaattttaaggtacacgctgctttacgatttgaattttctgcatctaacaatgaagctgagtatgaggctttgatcgcaggattaaagcttgcccttgaaattaagattgaatacgtacaggcttttagcgactcccaaattgtcatatgccaggtaaacggagaatatctggccagaggcaggtgtttgtctaagtacctcgccataacatgcgagttgttacaaaaattcaagaaagtgattgtctcccaagtaccgcgtgctcataattcacacgcagacgctttgtcccgcttcgcctcaacaagagaagctgaattgctcgatgtgattcctgtcgatgtgctaactcacccaacggtgagtcgagatgaagtgatgggagatagacgttttccataggagttacttggatgactccgatagtgaattactggaaaaggagtctgcccgaagataaaatgaagcaagaaaactgtgacatcgagctgcccgatatgtc

SEQ ID NO: 253212 - DNA, 1596 bp, Cannabis indica
attacgcccctcactttaaattctgggtccgccactggatgaggaaattgaatgatgtgaaatactttggcaacttctagtgttgctagtattagtgatgctcttagcgtttacgatatacttagagctagatacatggataaacacaccagctcccatatccaatccagatttgtacaggcacgtctttctcctctttcccccttattatgttttttgtttgagaaatagaaactacacagtttggtcccattttgctgagaaaatgttcaccaatcacaaagctcataatcaaagccttggaaggcgcctattatttcatgtctacattcaggtaattaaatcattgatttctattattaaatcatgaataatatagaagctttatttacatgtaacttgtacaatattgtacactgtcagaacaaagattgaattggtcttccaaatccaatgattgatcctgtcattctcaatactcaatactaaaacttgagacctttgtgaacatggctagctaatagcctaataatttgttactaatggacaagcatgttacagggaaatctagtgttgaaggatttctttcattattggtatagaaattataaaaagatttctactgcaaatatttcaagtaacacccttgaaattccattctattgggctagcctacaataatagggacattgttgctatttctttggtagtgaagcttatagttcgccaaaacttagaagaagttgaggtgtaatgattggattcatagctgatagtagagagtagtgttagaccattgatctccaattgaaaaatgtgctaaattaattaacacatacaagtaaaaaaaataaaacttgtacggacatataagtaaatattatatctatagcacaaattttaaattgttaattcgaaaactttctttagtgatgtggacatcaatatttgacatgtggcaagaaagataacatctcagagttgagtagtcccgaatcatagcggtcgacctgggagaggtccctagccctgcgcccaggttgactctgggaactccgaaatggatgttcaaattctaataagtcgtttctaactcactatctttcagtattctataccatgaagacttggagcaaccaagactaggaccgggagctgaaaatacacaaatcaacacctcaaaaatcaacctgggcacctaaggtttcacccagcacccagattgacaaccctaactaggatttcaattatgggaccatcttagggcaaatgggtcaaatttttcattgggacatgagctaaacataccacaaacatatttgaggcaacaaaatcagattcaaagaacttttaattttgagcacctggaacacccaatgcctgacacctagcattcgtcaaccagcgccacttccaagtatcagataaaaaatttgactcgtgcatctttttcgtcttcataaaagctgagaaattaagtacttttggagaaaaacaacccatcctgggtgctaacttaagggaccaacgccactttgacacctgaccctggcctagtgcccaggttgacattttgtcaacctgggccaatttcga

SEQ ID NO: 253213 - DNA, 1089 bp, Cannabis indica
cgttagctatttattacgaaccagaatcgaatcattaaacaatgaacgaacagtctaaattaatcagaccacccaaaacggtcttgccagttacagtctacaactgttcggattgtcagattgttgacttctatgaacaaccttataatctacaagcaacattaaggtatttagggttgtttatataatttgtaacctatggtattaattcggactatattatttgagatcggactaaataaagtttatgtgtaacggtttggtcaatttagattgtttataattttttggtttggtcacagttttaaaattctcgataacgattcaaaccaaactagccgcataactcttttagatatacttaatatattttatttagtgtaatattaatatttgaaaacaatttttgtacacggtaattatctacttattagggtgctagatacaataatattttgattaaatttaatttaatttggaaactttttttttattgatgtattataaattttgaaaactaaaatttttagtaaaaaaaggtaatttttttttttttaaaaaaaaaaataatcatgaagttgagagttatgatcatttattttttcttctgtcttttctctattgaattgttgcgaatggtttacgggtgtgtgggctttataacttggctcattgcttatttagattgacaagtttggaatagaaagttggggtttcactcgtgttgattgctctaatagattttctgtggcatatttcatttgagttagtagaaatttttgtatatttgaaaattattcttatactgttaaacatattagggagttgattaaacatgacatataaactagttttaattgtaacgaaaatgtattattgctaatattgtaaatagttggtacttggcagcgtttcattttctcctatcataaaataataatattaataattatgaaatacaatatacattcctttgttcttaaatggattgtcatcagattgagttttaaaaaaaattaaaaaatccaaagaaaaagtgaaataaaatgggaaatttgattttctatacttagaaaatcaaaaaatttg

SEQ ID NO: 253214 - DNA, 879 bp, Cannabis indica
acattttttcccacagtggacacgatctgcttctaatgagacaataattttatatatatttaaatggagaacagaacaggaacagagataatttttcgtccctattgttaaaccgagtttggccaggatgctcctcgccccagcagagtccatttaatgtagtttacatctttttctagtatttttttagaagtaaatatctttcttagtgtttttgtggcacaatagtattctttttttaataaaaaaattgaatttaattttaatatattttaaattataagtagtgtaatgtattaattttcatttgcaaattaattttattgaacaaactttaaaattcatttttgaatagataagttcttgtggtattttcaactctcccgcaacaaagaataaataagtgttgcaaaagtttctatcgattcagcaccataaacactccaaaataaaatctgagattcacacacactatactaaaagtgaatcttagctctattattattgtagtaattgtgtctattacaacgtaaaaatattataggaagtcttaggcctttatatagaaatcatgcaagagacaaacaacaagcaaatcactcagagtgagctgacgaaggctaactgctactaacacaactaaactaactattaactacctctaattgttatgggcattattagaaacgcaaaatttaaaaattctccgcattgactactaatgtacataggaaagatagtttataaaactgagatagagagtaggttcaagcaatgcttgaacttgtcgctaggaagagcctttgtaagcatatctgaaggattgtatgtagtggaaactttgacgagcttgacattgctttcattaattatatccct

SEQ ID NO: 253215 - DNA, 918 bp, Cannabis indica
tgtttatttccttttttggggtcataaatgtaaatttcatctatttttagtctataatagaaaaaatctctattattaaagcactcctaatagatgagctaaaatagctcaatctttaaattataaagaaaaaattacaaaactgagctttcaacaagtgaggtaaatcttaactattttacatattttttagcttaatgaatagtgcttagctaaatgtaaagataactattcattgagctaaacatattttaatattattatttttttaacttttctatatatgtgtgtaatattatttgaattattaatataaaatgaataaaatatattaaaaatataatatttaaatgatatagagaaaaaaatagagaaattgatgtatgaaataatataaaagtttaaggtaaaataaataaagtggagttttagagatatattttaaagaatagaatagaaaaattgttgggagtgatgttaaagaaactttaaactaaagaagggataatatcataattgatgatagtattgataataatttgatatgaatgtgaattattgaaagtggcaggtagtgagtgagtgggcagaatggtggaacttattaataatcttaatttggtcatattgagctttgtagtttgtttgtactcttcaccaaaaacagtgaaagataaagtaaagaaatggaatgggattctcactcttttggggattgatgatataattgcaaggatcactcttatcccaattaaagtttaattttatatcacaattattattgacaatgttcaatttttaattaatatttaaaaaacacacaccctttagaagtattcactcttatctattacatagctcaacaataagatgccacactaaaaacactacattattttaataatattatcaagaaaa

SEQ ID NO: 253216 - DNA, 1118 bp, Cannabis indica
tattattactatgtaaattaagcacttatattaactcgaaatctaaaatgttttgtttatattatgattttcttattactaggtagcgtgcttatctaaattcatagccatattaattaatttaataagctacatagtgattcctataacaataaagtattgttattgaatattaatggtgcctagtaccttttaaaggtgtcattttacgattcgctagcgatactctctaaaagttattatcttattttaaattatataagatccaataaattacaccaataaaaatattaaaacgtaaaaaaatgttagagattactggtatcttttaacatttttaaaaaacaatgttatatttataaatatatttattaataaaaagaaaagttatagaaagagaatagagccttacaaaatgtaattatatagacgatatataattaacaagttgcactatactccgtttaccttgtgaagtgtctcagctgaaacactaaaaatatatatattttctttttctcatttatttcattgtttcttatacgactcatttaattgctttttggctgcacacatgtatttcatgcaccctcaaaaatcattaaacaaaataatatcaaattcacattaattttgcccacatatcctatattaccatatatattgtatgtatatactcacaagtcacacccaataataactattttacttcattatcaaaaatatcgtttctcactcttttactcacaccaaataagtaatcattatcgtataccatatagtattatattatgggcatggtaatatgttttaacttggtaaggatagacttgtacataagtgaatatgtataatgaaatatctaatacataggatgaactttgacgtgtcaaatacatgaaaatatcttcatttcaagataaggaaaaagaaaaaataaaaatatcttacagtgatatatgtatatactatatattacaggtaatgaatacactaattatggaaatttattctttcaagaatcttaatataataatgaaaggaggattttagctgctataagagttgcatataattattattatgataaaattactattgctggagattcttcttgg

SEQ ID NO: 253217 - DNA, 1035 bp, Cannabis indica
gctgattattcactatttgccatagcataaaacgatgtttaagaagaattaaagagttctagataactctgtgataagttacttgaatttgagcaagttcatagttgtagagctgcctaattttgaacttgtcggtgcctcctgttgctataatttcagcaagcaaaaatcttttcctcaagttgcaaattttacgccaataccaactagtgtcttgtttgagcttataggaccaaaaggggacgctcttcaagtagattgcattgatccatttgacccaaagcaagtccctcttgatgttgatagcccatatttactttgctatattagcatggttccatttataacactatccttaaacccgagccccccataagcctttaggagacaaactttctcccaagaagcgacatgaattttgctcttgttaccattcaatccccgaagaaagcccctctatagtctttcaatctctttagtcacacttttggggagaatgaatatcatccaataattcttaggaccaagtaataccgagtgtattaatttaactctcccaacaaatgataggtgtctactagtccaagtttgaatctgttgcttgattttattgagcacaattccacaattcccagccttccacttcgttggactcaaagggatccccaggtaggttagaggatagttgccttcggttagctggatagtgttgcacaaatcaatttttttcagcatgatcaatactgcccaaataaatatgagatttggcagtatttatgtttagacccgaaacactgttgaattcttcaagaaccttttccagaacatgaatagattgttttgatcctttgctaaacaatatcaagtcgtcggtaaagcagaggttgtaagctttaagcttttgcacataggatggaacctataattagtgttcctagctgctgccacttgtaaacattgagtgagatattccatcactagcacaaacaacaatggtgagagagggtctcctttgtctaagccccttctcaccct

SEQ ID NO: 253218 - DNA, 1341 bp, Cannabis indica
ctctcttgtctcaatacggaactaataaagtgggaaattcctatttgggcaagcaaatttcttggagatttatctaatttaaggataataaacattataaataaaaaaaatatagattatataaaaataattgttataaatattaataattatgtggatgtccaaatcttttatttattaccattaattgtaatcaatattcctctttttcttagtttccctttttcttaatttcttaatatctcactcttgtatttgtataaataggggttcaccccattggaataaacaactcagaaattctcattcactttctctttctctcttcatcttcttcttctttcttctcatctactatattattttatattattatataaaaataataatattatataatgttaataatttacagtacaagaggttttgtaaattcataaagaaaatttataataactaaaaaatactattacaaaatagagtaatttttttttgcgtaaatatataagtaattctcggttgcagataaatatttaagtttaattttaaacagtaataatacttaagttatatttctgaaattttcgtaagcatttgaccgtgtgattttcttattattatatttaaataaaaaattaaaatttaataaactgtaccaatcatagattgccacgataataaggtacctacgtaaaataaaattataacttaaatattattaccgttaaaattaaattaatgtatttatttgtaactcagagttaaacttaattacttatcctacaaaataatcttacaatatattaaaaatcaaacggcacccatcgggcagcagcagcattcggatggtaaattaaccccattcacacccccattccttgtttagacgacaaattcccttcccaatagagttgggtatccacctagcctattccgatacccttatgaagtgtaatattattattggtacaatttaatatcaaatcctacttatagtaatttaataaaaattattaattaattataaaacaccatatcataaaagtgtgttagacaccttaatatcccctaacaatgctcatattcttatggtacacatgtgaaaggtaaggtaattagataatatgattttgagaattgttaaaagatatccaagtactaccaataaaaagtgcttgacaccataatttatcatttccaactaacttgtgcataaacagataataattaaagaaattacaatagaaaaacgcgtaagttgcaattcaagtcaaattcttataaatgtctcctcttgacttaattatcgttctcacctcataccatatattccactccaaa

SEQ ID NO: 253219 - DNA, 1060 bp, Cannabis indica
ggactagtatttggggagaagagaaaagaggatctagtgaggttaatagtttggctcgtggccttattgtagagaaggaggatttccttgatggtggcacaatctgagctttaacctgggtgaaaagcaagctctcttccgcaaaaaggagatggaagatagaaggagcagagcaacaaatggaaagaccctggaacaagctatggtgggttctgtggttgatgattgccgaaaggacttctgccaccaagaggaataagtagggtgaaagtggatcgccttgtctaatccttctggaaggttggatataagctatggagatgcatctaagaatcaaagatataagctgaggaggaaaagctaaatggtgcatgatttgacaaatgaaatcccattcaactttgtcaaaggctttctccatatataacttaagagcagcccatcccaccttaccagactttctagtagtgatagcatgaataaattcattagcaataataatgttataaaaaataatacgattatgataactcttgaataaagagttatttgtcatgttcttttagcttaatttatgtgtgtatttaacttatatttagttcttttcctcccattttgtgagaatatatgttattttgtgtttttatgttcttttgggtaatttggagttgttagtgggaattattaagttttatttgggttttggtaaagaaaatggcttaatagagaaagtgcaaggttttgctgaagttttgcaggaactttgttgcagcaaaagtagcagggctgattgctgaaactaatgtagaaaaagaaaaaagatgtggcgattcattaattgaggtggcaaatatgaggctgaggtggcgaaagacaagtggtttaaagctgacctagttggaaaagtctctaagtgggaattaagggaccatgtggagggcatttttggaaaagtgaaaaaggggattttaccctagcttaaacgagaagagggacacaattcttggcagccaccattattgaaaatacctagagtgatgaagaaaaagaagaaaaagaa

SEQ ID NO: 253220 - DNA, 1458 bp, Cannabis indica
gttaaagaacaaatgaagagttttggttccataaacacggcgcaagacaaatatttggtagctggtggttatcgagaactacatgtgcaatcgactagagtgttttaggacaagtttgtttggaatcggttcaacatcaaaaagcatagtttcattgcgtggttggcgatgcttgggaagttgaagacgaaagaaagactgatgagatttggagtaattgaggaggatatctgcctactgtgtaatgacagtagtgaaaccatagagcacatctttttctactgccagtattcgaaggaatgtttgatacaaatcaaaggttggctgcaatgggaagccaaggctatttccttgaaagctataagcaggttgttgtcaaaggcaatatgcaatagcttcaaaaagaaagtgtttgctgctgccataagagtcttgatctacatgatttggtgtacccgaaacaacattttttggaatggagagataggaaattgtgatagagttgtttgcaaagttaaagatgtcattaagaatagaataacttgtatatggcctaaaaatataactagtagtgaagagagttggttcaactcattgtaaagattttagtttttcttgaggccttctattgagggtgctcttaggttgtataaattgtttgtttggtttactacacttgctgatttaccaaaaataaataaataaatgaaataacgaattgaaatttaataccataattatctcaacatttaataccaaactttggtcttctctcgtgtaaccccgtcaatggtgttttcaccactgcactcaaactacgctcagccactgtcttcacttcaacaattacagttgtcaccgtatttgctatcatcgtcaaacaacgcaatcaaatcgttcgtaaaacttcctccaatcggtaaggatgttcaacatagagcaaataataaataatgattagaaatagactaacctaaaaaatactaaaaaagaaagaaaatcctaaacggcttatttattattccttcattccaatcttaagtaatataagttaataaaatattaaaactaaaaaatatgtgatgagaagtaaaagagataaaataatgaagtgtgaaatatatatttaaatgaatctagaattgtgatattagggagagagaccaccagaaaagatgaaatcctgatcccaaagagatcactaagccttcttacattcttcaccaatttatatgttattaataatattaattaaaagatttattaggatttttgccgcctaaattttgacatgtaccaaattatgtctcttgaacttttaaggtcgttaaaaatgcctcctgaactattgagattgttggatttaaggacttttgtctaatttcattcaattttactatttcagtaattgtttatgtactaaactatgctccccaatcatgcctcctaaactttcat

SEQ ID NO: 253221 - DNA, 822 bp, Cannabis indica
aagacttgcagacaaaacaaaagaatgaaaagattggaaaaagctacactagagattgaacacgaagtagatatggctgacaacgcaaacgtcagcaacaatggtaacaatggaggtgctgtagaagactaggctaatggtcgcaaccacaatgaccgtagcatgagggactatttgctaccaaatttgacaggggccagatcctgtataaggccaccagtcgttgatgctaataactttgagatcaagccggccatactgcaaatggtctaatcttcagtctagtttggggggctgccaactgaagacccaaagatgcatcttgctaactttgaagaactttgtcagacatttaaggtgaatggagttagtgacaacgccatcaggctaaggctgttccctctcttattaagggagcgagccaatagttggttggtatctttaccacccaattctatcaacacttaggaggaatttgccctgaaattcctttccaagttctttcctcctgcaaagatttccaagttgagaggtgaaattaacaacttcatccaataggacaacgaatctctttacgaagcctgtgagaggttcaaggacttattgtggaagtgccataactatgggattgaaaagtggttgtgatacgaacgacaccaacagttgtgatgaaacctgacaccaaatgtggcagactctaagaattctcgaaatttggatgtggaaccgcgacccaatgcttagttaagcatgaaccttggtatgaaggaagacgccacgaatggcggtggaaatccttcataccaaggttcatgcttaact

SEQ ID NO: 253222 - DNA, 515 bp, Cannabis indica
ttaaatcgcaatcaaaatccacacgacaacccaaaccactggagaaaccactagaaatatcataaccgtaaatttgaaaaaaaaaaattaaaatttagaatatgagacaatttttctaaatttatattatgggaaaaaaataataaaaaattgtatataacataatttttaatatatttataattttaataaattagattataacattctcataataaattataatagaatcttaatattatttagaaatttataatttacgaaacacttagtttagcattttttttctagaattgtgctataactgtttttttctcatagcgtagctacagttgttttttcccgtaatacaactgtaccaaactgaccctaactcaatttgtcataaaggttagagagtattggttaggtgcatgtaagagcatgaatcgaatcttagtgtataactcaaagtagggggtgttcatccgatccaatccgtacttttttggtcaaacaacatatccaatccgcac

SEQ ID NO: 253223 - DNA, 504 bp, Cannabis indica
agcatgggcaccaaacccagtcataaccccaatccaaaccgtggtcgtggaggtaacagaggtggttcctctcattacaacagcaggggtagttccagaggtggaggtcgtggtcgatccaacaacaatcccaagccaacttgccaagtttgcggcaagtatggccattcaacagcttattgctataaccggtatgatgaatcatacatgggacaagatcctcgagctcaaaccactcaaaatccaagtggtaacagtggtggacattcagcttatgttgccactccagaggttgttgatagtgatgtttggtatgctgatagtggtgccagcaaccacatcacttcaactgtgtcaaatctgaaccaaaaattcgactataatggtaaggaaaaattgactgtgggagatggaaatcagattaccatctctcatgttggttcaagtaatttaccaacaaatactgaaaagaccttggtgctaaatgagatgttgcatgttcct

SEQ ID NO: 253224 - DNA, 734 bp, Cannabis indica
aagaagaaccacctccttcatggctgagaatccagaaaatgttcataccccacatgaggaaactaatcatcgttctgggaaagagcccatgagctccaaaaggtctacgaacccgcgatctagatggaccacccattccaggaggactcaacctaagggtggccccagcacacggaccacacgttgccagaggaccaaacccgacgttggtccgagtgcgcagacaacacgcttgaggagaaattagcgtggaagtggcctgaaccctagggcgagggctgaagaactcaatcgtggaggtgcccagtcaatgggaaagggtacttatgaaatagaaaactgctgcctgagatgctgtctagaataggcgtagcatcggaacactgaattagagtgtcatgcagcctcgaccagggtgtcataggggacaaatgctcaaaatcaacttgaaccatgagtgagaagaccacgaggcaggcctcatggctcacgaaccaggagataggaaaatgcccgggaagaacagcccaggaaaaatgagatactccctgaaaattagaacaaacagcctgatgggaggcaaccggaaactaatgaacgagaaattcctcatgacaatgaggaggatcttaggattcaattgggataacacaggtcacatgcgagaaatcaccagcgttcttcgcaaatccatagagcgaggacttgtacagaccttaatgggggaaatacga

SEQ ID NO: 253225 - DNA, 501 bp, Cannabis indica
tctctgactatatttatacaactctttccaagattctggactttgacttctcaatccttggggcagaagcggctgagatggctgaggcatttttagccatgtcgcccatgcagactcaagggagtggaggaaatctttcgccggaggatgctgatgcttaggacaccgaggaagttgtggacgagtctgccagcaaagtcgtacatggatctactaccccaactgcccctgccgctcctgatgcttaatttttactttaatatttacttttgctagacttttttatgcggtataagggtactcgcaacttgtacttagacaaatttatgcttattttccttttgaacaaatttacatcccttcgggggtatttatttatattataacatttttgcagtacacgggtacttgcattttttctatttataatatttcaattgcggcttaattacaacttggtgtaataagtgttaactcaaaaaatttcaaaatctcgaaaaa

SEQ ID NO: 253226 - DNA, 820 bp, Cannabis indica
tttatttagggcacaaaacccatcaattatttgtttatatcattgtcgtctcatttggttttagtagctttacggtcaaactatatttgggtcaatattagggtttaggcaatacgtaggtttttcaaaaccttcaactcaccacctcaggtttgataacattctttctagggattgggatagctttcttcttgtagcattgtcccaatctggttaagaaatttatcgtccagaggatttagagcttgaatttccgacacaatcaaccatccctaataaacccaacccttcaaaacctacatccaaattagaattaaacgatggtagggttagggaacacttagtgaaagttcatcatgaagataattctagtcaccataggcgcttcttgcaagatggagcttggccagaacctcccattgtgtcctctattcctttggctaagcctttattttacccaaagtcacgattgcttttgaaccaggtgacttcgactttgaaataatgtctcccaagccatgtacatcaaagactccctaggatcctaacgtcaccttagacgccaagttaatagagtcgaaggtgcaaactatctcaggttacacaggtgatatactgaggacctgcggaatcgagtatgtgcgagtatgccaagttaggtcagtgcaagctggtgagtttagctgttaacctcttgcgcgtcccataggtgaggcttctgaaggagccagtggcgagactagtaccagcagctgttaggttttatgccctaaataaaactccatttcaatgtaatctattttattcaacatcaataaag

SEQ ID NO: 253227 - DNA, 679 bp, Cannabis indica
gttaggcctggagcgtacgatctttgggacagcaggctgtattttgtatagttgttagacgaaaacttttatattgaatattttttaactcagctgtaaatattttaaactcgggatcctggttatataaatgttatttattttcaagttaatagtaataaagtaaaaattttaattattcacgattttcaataaacgcgttgattagcaacggactacacaaataatataaaatcacgataacctcctaaactagtagggtgttacaatttacaaaattcaaagatatagttataggtggttataatagcctattttcaaactttattaaatattatttaattacaactaacctaattgcactaatttttgtctagttaattaggatatttaaaaagctgttttaatgaaaattttaactatattttaatttcagaaattaatgatttataatttattgtcttgtggaatatttttaaatatttctattattaaataattaattaaatttgaattatttaattacaattaattaaaagacaaaaaaaaagtttaaaattaaagttatttaaaattaatttaatttttaattagaaaattgtgcttctaattattcggtggtggattacggagtatggtatgaaatttctaaagctacatgaatggacaacaagaaaga

SEQ ID NO: 253228 - DNA, 1013 bp, Cannabis indica
aattagctatgtactggttaggaatgaggaatgaagaatgatgaacactagatattattttggtattttatgacattaaatttatatatctagtaactacataactgtggggacattattgttcttttattatgatgagtggtcctgattttagttactaacatttgttgtataattatagaagttattcctttaattttaaatatgtaattttgttaaataaatcaaaaaaaatcacttataagagttatttttcaacaagagtcaaagtgtgacttttgaccacccaaattatggatattacatatctatcacgacttaagcccatgtcgtgacatcaagaatagaaatgctaagaggagaagtgaaaatggtttcacacaaccaatttttaattcatttatgcatgaatccaattcaccatgagaagagtatacatattgacattcgataattttggataagagaaaaaaactaaatgtgacataatcaaaatagagaaagttaacattgaggaaaatcaagttctccatgtgaacaagttaagtaatgcatgaacttgctcaaaaatggtcactgcttgactatggaacacaatcatcatcccttcaagtagagcaaatgtcaaattgtgaaaagaagaaactatggtggaactggcgttagtttatcctatccattattatagttacccttatctgattaaccaactgatccatctaactacctattttttttttaaaaatgatctaactacctaaattagttggtcttagtgcctatgaaactatgttcgactccactataaggattaacactttcatcagaaagtgatttcagcaagcaagattgagaatttctaccaaaaaaaaacaaaaaagcaagattgagagagagagagagagtgggcggccaggcatagagagagaaggctcaggtttttctgaatgaaaagtgagaaagttaagtgttaaatttcctaaagccttcactatctatttatagcattccac

SEQ ID NO: 253229 - DNA, 714 bp, Cannabis indica
tgatgatgtatgattaaggaattattataatttttgttagatcttaaaaatgtgttaataaaaatatttgaacttcaagatggaatctaagattaagattgagaattaggaaggaaaatagtgacaactacaagtgagatataatgattacaataagtgagatacggtgataaaacgtgaaatacagtaataacaacgtacgagagatacaatgatgacaacaaatttgaatgaatgagatataaaaatagtgtattatgagaaagattgcttatcaattcttattatttctcaataatttatttgatatatgtaatttaaaatatgttaaacatcctctggaaagtgcggtttgtttactagttttataaatagaggccatattatgtacttgtgagagatatagttgaaatcaattattgttgttagaaccttgtgaggatatgctcatccttagacactaagctgagtatataaggcttgataaattcttaagagcatttttagagtttctctaagtgttcatatgaaggaggaaataacttttaggacaaattaagattcttgggctttttcttttaaataaaagcgtttatagataaataaagtaagagttagacctctcagtcattacataaaatgctatctgacatagaagaaagcataaccatagggataattacaccacatactgaaatttttaacttttttact

SEQ ID NO: 253230 - DNA, 1181 bp, Cannabis indica
gaatgggaggtggatcacagtctatccaccatgattgcaaaatacaaccttcgggggagattgtgttcgaaggtggaccatagcaggggcttcttgaagaacctgctgcggcgaatatggagattgaaggaatcggaatggaacatcaagattcaagaaaaagtcagcactggtatgttccttaccttttcttttaattcagaacaaactcaatctcgaatcttagcaagaatgccgtggtatttatcgaatggggtgctgattttgggtaagatggggaactctagtgaatcttggaagaatgatctgaatgtctttccgatttggggtagagctttgggggttccaattgattatccgacagagaaaaatacttcaagactggcatctatggctggttcggttattacagtctagaattctgatgtgtctcgaatggtggtggatggattctttcggtttcagatgtggatgtcaacaaccaaaccgatatgcccaggatatttattaccgtgtagtggctccaagaagtgggtgacattcaagtatgatgaactaccatttatgtgttttcgatgtggatggattaattggtcatagtcaaaaagattgttctcttgacattaaggaaatcataggggagaatggcatgacggcaatggcgcatggaacatggctgtaagttgacaacggagttagagatggattccaagggggaaaaggtggcaatactgaaaaatgaattttacaagaacagaacctacaaggtggaattaggcaaagtctcaatctctgtatgggtaactcttttgatccattattgaatgaaggggaagaatatgtacagttgagaagtgaagtaacaaaagggacagaacaacaccacggtaacaaggacataagcaagctgcaaaatacaacaactgagaagcctcagcaggagcaaaccgggttggagacacatgatatgttacaagatgggcgtgggaaacgaagattggtggaggatcgagaagtagtgggggctggtaaacttcaaaggacagcaaacaatccaatggtgatgaatgaaagccaaactctaattgatgttccgattgggttctcaatggacatacctgggttaaaggaaagtctcccctttgcctttggctcgggtaaaaattcaatccccaaagagc

SEQ ID NO: 253231 - DNA, 874 bp, Cannabis indica
gggttatgctcaaacctatggagtagactttgtgatattttttctcctgctcctaaattgacttctattcgattgttcattttcatagcagctattcatcattggcctttgcatcaactagatattaaaaataaccgttttttttcaatggagaccttcaggacgaggtatacatggagcaacctcttgggtttgttgctcagggagacccagggcgagtctgtcatcttcgcaaaacaaaatcctcgttcttggtttggtaaatttagtcaggctgttgagaaatttggtttgttgaaaagtaagtcagatcattctgtgttctataaaagatcaactgctggtatcattttattagtaatgtatgttgataacatcgttattactggaaatgatactgaaggcatctcatctcttaagtctttcgttcatacccagtttctcacgaaggatttaggggttctcaaatatttcttgggtgttgaagttactcagagtaaacaaggtattttcctgtctcgaaggaagtatgtaccttattttttaattgagataggaaatttgggaacaaaaccttgtaatgctctaatgtatccagtcgtgcatcttacacgtgatggggaaccatttgaagatcctaagaaatatcgcagattggttgaaaagttgaattatctaactgtgactcgtccagatattgcattcccagttagtgtcgttagtcagtttatgtattggacaatattagagcaaattttatgttacttgaaagaatcaccaggacgaggtattgtttacaaggatcatggacatacccagattgagtgttttctgatgcagattgggcaggttctaaggtagacagacgatccac

SEQ ID NO: 253232 - DNA, 1246 bp, Cannabis indica
taaacaactgctaatttccaaattaactaagcgggctttacatgtgcctattcaactatcaggctactaacatgcttcttagcagacttttcttaaaacatactatgaattaaactactgaagcaataaaggcttactaaaccgtgagatgagctgaacgctaatgatgattgtacatgtcgtgacgatctttggaagaaaacttggtggctctgataccaaattgtaacaccctactagtttaggcgtgttaacgtgatttttaagttaactgtgcagctctttgctaatcaaagagtttgttgaaaatcgtgattaattaaaactttacttaattaattataaacgctaaagtaatatacttatattaaattgggatccaattttacaaaatatttacaaccgtttcaaaatgcaagttacaaaagtttgtcgcctagcgactacacaaaataagccctactgtcccaaagatcgtacactccatttgctcgttctcacgactgctcaaccttagccttacccttacctacacatacaaacaatatctatgagtcgactaaatcggtaagaaaagcataaataataacatagcaataactcgagtcataattaggagcccatacacccgaccataaccctaactgagtcaagaacgttcttgacaaagtatgactaactgcgaatccagcctatactcagtaccctagccgtactgatgtggtagcagataactcatactatctgatagcctagcatatatctgttggcatctcggtgcaactctttgtacacctcaccgatgccttgatatgctaatctgatggctatagatttgcctattctgacgacaactaacatgtacgctaaacatgtataaacatatgcaaccactatactaatcttacctcgtttccgaattcaggtgtgctggccaacttgtgtggaacagctgcgcaacaaattacaggcccttaaatcacaatatacgtaaaactggtgagtgacacgctaaatcactttctagggacttaaacttgaaactaaaagtttccatatcgataaataacatggaaatcccctaaatatcgtaaaatgggaaaaactagggtttccaaaactgccccaatcggtagaccgattctctaaccagaattccaattcctatagggcccctgaaccggtcgaccggttcagtgcaaaaaaacttcaaaattttactactctttcaattcaaccccaaact

SEQ ID NO: 253233 - DNA, 1156 bp, Cannabis indica
tggactgaacaagatattggactaaacaagatactgattttgcctgataaggtgatctagtctatcgtaagtgccctgagtccaggagtttagtgacggttcagtctggagaataggcgacattgtctcattggcacatgcttctgcttgctcctcttcctcatcatcatcatcacccttctggtattttcttgcttcttcagggggtgtcaatgatgccggaggaaaatcatagtaatgccttagtaggatgggttgcatgggtggtttaagaatgtctcatatttatattgagttaataaaaatatactataatccaaccaaactcacggacgttcaccccttattacaaccacgaattcagacattgatcatcattcacatatacatgagcttgagatgagaattgttcaatcgatccaggtgtagtacagaaaatcgcacctcacacctaatattaattagcaaattaaagagttcttttcttttgtatcacactcttacatgatttgaattcgaaaaatatgattcctttgaatttttcttaagtttttttcttatttatcttatttgatacatatttatcctttttaaaagggcatatgatattttagtatatataaaaatttcaaattcaaattaagtgagattttttagtaattagataacattatttgccataaatatataatattattagtacttctcatatcaaaccaacaagtgtaatcatatcatatgttcatggctgctcgttcaaattttttcccattgtttgttctcctaataattacaataataattccctctcaaagtaagatttcttattatccaccaatatgtggaaatctgattaggaaggtgattttcattacacatgtctaacatgttgtttggactccaatggatcacccaaacataattccaccattacagttgtacaagtcgaaaagatcacaaaagctcttagagaattcggaggctatgatttcatggcaacgattctcgaaagaaatcttcaatctgttcaaacctattgcgacaaatttctattctttgttgatcgtcaaaatagattcaccaaatatggtaataatgctatcactctctttgttccgcccgacaaagcgattggattcaaagagtggaacaattt

SEQ ID NO: 253234 - DNA, 1072 bp, Cannabis indica
atcggcaattcacgagttggagataagcggactcggaccgctgacatccgctacagggtaaaccactgcctctcaggcccccgactaattataccatagaggccagcgatagacaataactcctcctgaacacagcttacaactttcatcatactgctcttcaaagagcaactcttctatatcaatttttttgtagtaatatatcgagaagtgcctataaattcctcattcacgcaattccgaacacaaaactacccatctatactataataaagactaaaatgggtattcaacttggtaatcaacttaaagagtattcatattatggtctgcaagccttccaacatctgacttatatacaagtcaacatcgacttaagaagcacgaatacatatagctacatcgggagagggatgagagtagtgttttttagttccatgagggcagttgcctattgcacgatcaaagaggaacaaacgccacaaagaagttctgagcgttactaaagaaacttcaagctcatatgaatcatgtgttgagaacgagaatttaaagcaaatcattattattattcttattattattttttttttaaaaaaaaatatttgttaattttgggtgcgtttgataatacttttttaattatttttatattttttttaattagaaaagtgaaattattttccaaaaacatattctataaaacttgtttctactttttaatttttaattgtaaaatcaaaattttcaatatttttttttaaaaaatcacttttaaatttttttaatctaatattttagactctgatcccaacttggaccttgggacctgaactccaacccaaaccgacttaaataaaaaaaaaaaacaaaataaaaattataaaacacacttttattttctatttttaaaattaaaaaacaagtagttataatacatattttgtcttttaaaagcaaaactttaaaaacacaaattttactttcattttcgtgattaaaaaattaaaaaacaaaagtgttaccaaacaccaatttttttatttttatctgcgtgatttttcaattttaa

SEQ ID NO: 253235 - DNA, 1707 bp, Cannabis indica
ggggtcaaccttttgtctctattcacatgacacctcagcccttcatccgtattctcctcatcacccccctctaaattcaaaatgggttctttaaatggaaaatatgcagacggcttttcatcgtacagtttaggtgaaaaggagtgaacacccaaatgaagaccagtcgccatctcgacgccagccaccttcggacgccacgccgatcgtaccagacttcctctctgtcccctcgaagaccggcgccgcatagatctcgaggcttctgcacgggttaacggacccgctcccatggtcggaggaatcgcgcctttctccagaagcggagtcggacctttcacctggcacactaccaccgtgccgccatcaagttcgcggtcagcaggaactccgcccacaaccaaggccccggatgtcttctcctttatcttcccagcagcaacatccgtacgtttaacagagaaacaacattcgtacttcgagagggtgttcagccatggtccgaataatggaaaaggaactccgttctcattgagaaccgtaacaggagaaagtagcgagcactcactacgctggtgacccagtaatccacatttgaagcaaaaaactcccagcttctcatattttaattgaatccacctattgactccacttatggtcttgaagtagcaaccgcaacagagcggtctgttgacgtccacctctactaaaactcgaatccactttttccaggtaactggtttggattcctcaagctcaatcgttagcactttgcccgccaatgtccccagcatgttggcattagttttcgaatagtagtcctgaggtagcaggtgaatttggatccaaaatcggatcgagttgaaagaaggtgtactggcaccgaatccaaaggaccacgagagaagagccaacatgtctccttttacacaccacggaccctgctcaaggatccttttgcacaccacaccagactcaaaaatgaaacgaaagcagtttgcaccagcaagagcaccatcagtaggctccacacgaacccgagtattccataggctagagcaagcaaattccacatccttagcaataaaggtccttgctgaaataattttgccaaaaaggcagagcttggaaagaatcttggttgttactacactaggttccaaagaaatagacacctcattaagagaaaggcatctcccattaataccactggaagattcaccaacctcatccattgacttaaatgactccacgaaccaggacaaaaaaccaaaccaaagaccaccgaagacccactacagggaccacacaccaacttacccacccccaaagcaaaagcactgaactccacaaggccaaaaaaacaaagaaaacgcctccagaacagacacacaccccacaaatgactcaacacaaccccacaagaaaaccgaagacacaaagaagtaacaagacacaaaggtcaaaaacaaacacaaaaaacagtagagtaagtcaatcaatggggacaactaaagcaagaaaagaaaaagaagggaaagaccagagagaatagtagaagacacattctctccagaacagacgaaaatattttcctataatatagaatcacttttgtgttcataccacgaagttaagacatcttattactctctctttcctcacttaaatcaaacaaaaataaaaattattaggcatttttaattt

SEQ ID NO: 253236 - DNA, 620 bp, Cannabis indica
ctcatatctcgtccattaaaggtggtgctacgtgcgttcttattcacttgcatttgttagaaaagttaaatacattagaacttttgtctaaaaataagtcccaatttaagcaaattgttaataaaaataacatctaaattgtagttagttatacattttttaggtcccgcattaagaaagtatacctaagaataattttatcttaataaaatatatatagtttataaatttatttacgtagaaataataattttattttaaattgtaatacatatataaatattatatttactcaaaaataattttattatgatatagtattatgaattgtttattgttattgttgttacgtttgataccttttagtgttttgatttttttttcgtttacttttatttagttataatctctcaaatagaatatatttgtttggtctcaagtgtattcttagagattgtattgtattatcacatacatatgatctcactgtaactcaaaaccccgaagcaaatgcagccttttgtttcaatgtatcacatacatatgatctcacagcagaattgatagatcattggttttttatttgtcactcagtgtatggtggttcatttgctgaacat

SEQ ID NO: 253237 - DNA, 1440 bp, Cannabis indica
gtagagcttagtagaagctttcgggttcgtcgaagaagaagaagtagaggccgaaacagaggagagaccatgtctgaagtttaaagacaaggaagggaatgaggtcctactgagactgcattctggttgcgaagaagaagaagaaaaagaaaacggcgacctgcccagatagaattttcgtgcggttatggttatggtagaatttattggagttggaaagcctgtgaactgaagggtggcaaccatttctgctgccatagaaccacagaccgactgtccttaccaattagtcaattacgatttcgaagaaagaatgaaccaactccaactccaaggatagtaactcaaataaattgcatttggagcccttctatatttggttgttatatatgtcttatttgtaaggctgttccctaaattatctaagatttagtaagttggtttttaaatgttatattttggtgaattaatcacaagactgtgggcgtcgctatgcctgtaaatgccatgctgccaagctttctaaccgcttgtgctcgaaaattgatggcctggtttgtgacttctagtgggtttcgaaaaaggtaattatggaattcacttgaaggcttgggacaaaatgtgcttgcctaaatcccagggaggtctaggttttttaggaaaacaaaagagatgaatcaggcctttttggctaaatggggctggaaactccttacaggttgtcaatctttatgttgtaaaattcttgaagccaagtattatagaggccaaaatatcctcaagtgcagagctaaagtttctgattcttggttttggaaaagtttggtgaaagcaactgagatccttaggagtggagcctgtaaagtggttactgatggtaaagatacgaggatctgggaggacccttggatcacgcatagtcaagggttctacccaactacaactagtaaccaatcccagaattttactatgatgtccgaacttctgacggaaactggtgattgggacatgattaaactgaacgacctctttaatcaagaaactgttaccgccatttttaaaggaggccaaccctcgggccaggggaatgatcactgggtgtggaccaaagaaggaagtagtcaatttaccaataaatcgacatacttaattcaagcaatgaaacgagccccacactatgatgtggctccttctctttggaacaaaatatggaacaacaaaattctagagcgccacaaagttatgtggtggagtgtcctttcaaacgctctcccaactcggggggccctactcaaacgtttccacattaccgacaactcatgccctatttgtggaatggaggaggaaaccatggagcacctattccttcattgcgacctggctttccacctttgtgttggaattattttaccaagatcttagatctactcacaagtatgt

SEQ ID NO: 253238 - DNA, 693 bp, Cannabis indica
ttgactttgagaactctggaatgaaagttcagatttcaataacttgaatccaacttactatctttcagtattatgtaccatgaagacatggagcaacctaatccgatccttgggaactaaaattacacaacctggaaccagaaagccaacctgggcacctagggtttcaccccacgcccagattgacaccctcaactagggtttcaattttcgggactgtcttagtacaaaagcaccaaaactagcattggtacatcaacatgacatactgaggacatatttggggcatcaaaatcagaatcagagcaagttcattttttagcacccagggccccgagcacccagcgcctaggttgacaatctgtcatctgggcaccttccaagtatccaatcagagatctgacttttgtatcttctttgtttttttttatcaaaaataaggaaatcgatccttttagagaagaaacaataatttctaggtgaaaaaaatagtgctcaatgtccagattgacacttggggctggccctgtgaccaggttgacatttcgtcaacctgggccattttaattagagtttttttagaacactcccaagaatcttctttgtttttaaaaagtattaagattcaactatttttggggagcaaatgaaattttccaagggccaaaagggggacccagcgcccaggttgac

SEQ ID NO: 253239 - DNA, 1327 bp, Cannabis indica
  modified_base (1315)..(1315): a, c, t, g, unknown or other
gtacttaagttgttttagcacggctgctgcaagagtaagaaatttggatgatagtacacaacttactgcccttcaggcagggatcacaactggtctctccaccactgagggggaattgtgggacgacttacaaggtcgtctagtgaagaacatcaccgagttcaacgagagggcttaggtctttattctaaaagaagaagctcgaaaagatatgaacttgttaaaaacttgctcgggaggcaaacccagcactgtttcaacaagtaccgtctcgacgaaagctgataactcagaggcctctggctcaaagaggaaagacgactctaaggggttgtccaaaaaaaagaaacaaaagaagcacgataattacatgccagtttatactatttatatcgagcttaatgaaactcaggaaaatatttacctcacgcatgagcacaaggttgccttcagtaaacctgagccaatgaggcacgcgagggataaaagagattcgaccaagtactgcaagtaccataaagacattgggcacacaatagacaagtgatgtcagttgaaagatgagatagaaagtctcatcgcgtaaggccactacaagcaatatgtgaagagacagggaaatggacataaccagcccaattcacccaaaaacccaagcaaccagggattacaacctcctcctactgaaggagaggatatcctagttatctctgaggggccgcatattacaggagagagcaacaatgcccaaaagtggtacgtaaaggaaataaaaaatgagcagttagtatttactccagaaccttccaagaaggtaaaaactgtagaacctccaattatattttcgaaggaagatgagaagaacgagagataccctcacgtcgatccattggtgattactatccaactcaccaataaaaggataaagagggtgctgatagataacgagagttcagtgaacatcctttacagggaaacactgatgaagatggggctcgaaaaggcaaaattgaggccttgtatggttaatctataagaattcacttgcgatagtatcgccagtcaaggtataatcgagctcgaattgaccttgggtgaggcacctttatccgccacaattatgcaagactacctggttgtcgatctgccatcggcttacaatatattactgggtcgtccagcattgatgagactatgggtagttagttcgattaagcacttatgcctgaaagtttcaaacaccggagggtgtgggtgtaagtgtacggcaatcagatgttggctcacgattgctatcacatagagctgcaacacngaaaagtcggtc

SEQ ID NO: 253240 - DNA, 701 bp, Cannabis indica
aataataaatttagtgacattaaagattttttactaaaaggctttaagttttcaaaaagaggatcttgcaatatttcttagaatcatttgggccatttggaattatcgtaacaagtttcttttcacagaaaataagaatttttatatggaaatagaggattctatggtctcttatttacaggaatacaaagatgctcagtccaaggtttgtcaatcgtcttctcaaccattacacactgtcgcccctcatcacagggacccagctgattccgtccccagaaatgtataaattaagcactaatgcggccataaaatactaggaaaacaaacatggctatagtgcagcgattcaagactcaggtttatcacctgtttatgcagaggctgaagccctttttagagctttgcagtggtgtcaagcagtccacttccccattgaaattgtggctaccaactgtgaagacttggttcttaaaattcagaggaaacaaagggatctctcagccctctcaagcctcatttggaagattatcaactctttatcatccttcccaaagattttggttatgtatactccaagagataacaacatacttacacacaatctagccagagatgcttgaggaactgatgaagagcttctgtggaacaatatttgttctccctctcatttttttttaaccagttctcattgtcttttt

SEQ ID NO: 253241 - DNA, 613 bp, Cannabis indica
ggtaaaggccctctttcctctaacccacctcttgtctcgtttcatccccttagcgtccttcccaatcaaaattcaagaggatccactaaataaacaaaagaaatctctcacaaactatgccatcaaagcactcatattctctaccatcataccagttcaacaaaacaaatcctatacaattcacccaaaagttttcatgtctctctacttcatttacatctacatctttttagagatcatccaagccgcggtggcggctttggttcgagccgcgctcggtgcagagctggagccacattttgatgagccttacttgtccacgtcgctacaagacttctgggggaggagatggaatctcatggccagtgacagcctacgttccacggtgtatattccagttaggaacatcatgagccgttggatcgggaggaagtgggccccagtccccgcagtgatcccgacttttatgatgtctgggatcatacacgagtttattttctacagtatgagaagaatcaaagcctaacgtggaaagtgacgttgcttttggtttgttgctatggtaatgtgtttggtctgctgagattgccgttaagaaggccgttaacaggaa

SEQ ID NO: 253242 - DNA, 917 bp, Cannabis indica
atagtcaaagagtgtcgttttggctgacacattctcaaacaagtcaagatactctttattgaaaaggaaaaaaaaaaggttcatatcaagattagataacaataaattggaaaaatcaggcaataagtaaaagaaaaggaaatcatacgttaaaatatactactctacctcaatagcattacgagagaaattgattagggtaggcaaagctcttgaaccagtttgaaccttcgacacaacgttcaaattctcgaattgaacttcgacgtttggcaccttattccgactctgttttgttatgatgggcaaccaaattaacgtatgcttatttatattaaaataaaaagaattgaatgaacagagtataattttgtatacaataatgaagtcttcaaatttcttattattatacctatcaaggcgttctttaatggcggaaagaagcttattattatcttgatcgtttgtagccaagactttcttgacgagattttcacgtccttgacgatcgagtttagttacatcgattgtctctgcgcctgctttaccggaaggcgactttctgagcaaagcaaagttagaacatttctgagaaggtaacgtggcgatggctgcccatagcaaagcaaagtcagtgggtgagatttcgattttaacgattgaaaatcaaatcgatttgcgcttcttcttcttctacaaacacattcagtcggtagtgagatttcgaatataacgaaaatcaaatcgttcatctgatatcgagatttgggggagatttcgattttaacgattgaaaatcaaatcgatttggcttcttattctccgaactcattcaatcggtagtcggtagtgagatgagaggaatgctccatttaaaaagttaccaatgctatgattgggatttattttattatata

SEQ ID NO: 253243 - DNA, 3004 bp, Cannabis indica
tttaaaaaaaattaataaattaacaagttgactgagtgaacctgttgactcgaccaactcgaacccgtagacccgcaaacctgaaccatttcacgggtcaggtccgggtacaattttttgaacccgcaaacccgaaggccacgaagccaaaccaatcaacccgcctgatgttcacccgtaggacctttgtattaagtttgcttagttggataaagaaatatggtttttatttggtcaatttttgttgtcgtgtttcattcattcatggttgccaaataaatgaatgaaattaatagtcaaaagtgttgtaataaggaacgtgttgcaggagtacattgaatctacaattttaacgaaaatctatagattctcaaacatatttagacttaagagggaaatttcctataattactatgtctttgatttttgattttttttttctttccatttcattcattcaagtcgaatcattactatatgaacacttcaaaaagaaaaatgtaaatcttttctcttctatgtacaacaatgggccgcatctaaatgacaatttggagacagtatagatttaccacgtcttgccttctctgtttttgaaagatttaatccctggataaaacttccagtgaaaatatgattcaacaactagtatcaagaacgagtaaatatcccagactcaattagatttcctcttaatgcaagtagagttcttgtccaggtgtccagtgagctctattcaacaagcttcccttcttgattctacttttcttcttcagccaaacaaagttctcaatttggaacaagaaatttcctggactccggtttcatgttccaacgaatgggaatttgacaaattttttcctgcctaaacttttcgaagagatacctgaagaccatattaatggaatttttcactgacaccaagagagttgaaaaccttccagcaaattagctgaatcatcacacgagtccccggatttgataaactccagttgcgagtagtgcagcatgttatcaatttacacttaagacattagaatattttcaaaattttccaagcctttcagaatgtccatttgatgcgaagatgctgtctcacatgatgctgagcctcttctcctgttaaaaaatttcagaaggattctgccatgccaaggaaaaaaaaggtaagtcaaagttaacctgatgttatgcaaacattataaaagggtcaccaagttaattcaatacaggaaagcaatccaaggttaaccaaagttgctttgatattatgcattttaacagttttgcgaataagaagtgagagcagagtaaaacattgtagatgtcaacctggtgttccagatttagcttttactctttgtcatttcagatgtaaacccaaatttcaaattacttgtgtagcatatcatgaatttaccaatccaattccctaagaaagtccattataaacatctgaagtgagttcctagctaatgagaagcttaacagaacgccaaattgtttatgtttttgctaataaaaaactttggttttcttcaataatgtacccttgaagaattgtgtaataaaagataattctaagacacaccaataccggccatcgttagagtgacaaggaactgaccttgatggtattaagaaacaaaattcgataatacaaaaccagtcactaacacaatctagagaataaataacaatgatcatatagttcttcaattccttctagatgaatcaaatgccttctgatctattaccaacaaaattcaacgcatattcaaagactgtcctatagaatagtattagttagtatatttatcttaaattcattctcaaacaaatgtaaaaacgaatttaaatacctaaatcagcagcatgaagagaagcaataaaggaaatgtttaaaatattgatatcacttgcctcatgattttcggacagatatcaatgtgttctgtagtgctaaactgctgctgccaaaccaagtgtcggagtgaaaatgtgtgtatcttcataaacagccactacctcacgggcacttacaaaagtgtctccgtttaccaaatttaccctttattcacccagatgtgctccaaaaatggtgctcatctgcatgctattatcgcctattctcaaaaggccagactgcagtgaatccggtgaatctagtttcaaaaacttatgttccatcaattccttcaatcaacattgaatatgtctgggaatgaagctgacaccccattttttccataagacttagaagttctgagcatttatcagctaaaccccttttgagtaagccatcaatcagaattttccaagctacttcatcataattatacccacaacgtagcagactacagaaaaaagattttgctttctcgtcattctcttcttcatataatccgcaaacaagcaacttggagtactccagagatggtaagtgaccactctcaatcataatatctactagcttcattgcttctgcatacacttgcaactcacagcaactactgaaaagtgcactataaatatcctcactgggagaaattccttggtttatcatgtgatcaaataccatttgtgcaacctccaagcacctccgtttgcagagacctatgatgagcttgctataagtcccaacgttaggtgcacaaccatgttcattcatcttatcaaaaagcttttgaactacattgaattccagtgtgctccacacatcattaagatcttcaaagggtgcatttgaagctaaatctagtcctgcagtatcactagttgtcttcatcccatcttcattttttatatgcttgattaggaaaccataggtatgatgagaaggctcacaaccagcattagtcatgcgcttaagaacatcaaatgaacgctgtataaaccccatgcgtccatatccagcaattaataatgtgtaggtcaatgaatctggggaaactccctctttattcatcttgaccatcaaatcctctgctttttccaaatttcc

SEQ ID NO: 253244 - DNA, 1481 bp, Cannabis indica
acgccctaggcattgtagaagaggccaagtctctttcatcacatttacttgagattttcctactgattctcatattttaatctaaagagagccactttagaatccacaactcttgtgatctgaatggtattatctctaatattaatacaaccaaataatgagtaagtcattacccgctaactaagggggttgaacttctataaatatattgtgtctctttattttcctgttttattgtgtacacgtagtaatattagtcataaatacgactccactgtcaattggccaaattcgaggtcaataatatatattgatagattatgaattgatgaatttattattttttacatgaatgtgaatcgttaattatatggtaaaatttgattagaaatttcacagttttactagaaaaataaaattatacaccatgatttgtggaataggtttcgatgtaattatatgttaaaaattattcgtaattttttattaattaatgtaatatgaaaatccacaatatcttcattgatgagtgagctcaggtttaaggagtaaaccacggcttcatcgagatgacaaagttctaaaccatgaatgatgagccacgaacctcgaattgttagctacaagccaaggggtcgaacatgtgatttctcatgtacgcatgcaagcatgcatgttgcattcccatcgaagtcgacatgaagaagaggagtcgaaggcttgtgagttcggattgcaccaacagccactgtggggacacttcttggttacgtggccagagatgatgacgttgattggccttcctgactcgtggttgacacagacggcggtggagctggaccacggtggtccactagccttaatggttccaattgggtcacacgatccatgatgctccaaactagagttttgctctgtttagcctctacacatactagtccaaaactagccaactcctcccttaacggccttcacggtcgactccgacctcggaccaccaccatagcaactaaatggccgaccccattcatgtgtatatatatattagaataaattttttaagatactattcattatattaataaataattattttttattataatactaaaaaaattaaactcgtctcgcgagagcaattatattatttagtttttgttatatagacacatttaatataagatagacacaagttgaaatctaacaacggtctccgtttgatattgctactttaactttctcttctagtttgttctcgagaaagttaaaacatatcaatatatttaaaaatatatatttgtaatttgtttttgtagtttggattttaaggagaaggcaaaatctgaatctcagctcattttgtgtatgagccagagcagtttatttatagcacaattcagaatacaatacagccgttaggcatgacacctggcagtgattacatgagcaaatgactaaaatattcagcctaaatattcccc

SEQ ID NO: 253245 - DNA, 607 bp, Cannabis indica
taaacgtgcatactaatactcattcagcacccttgttgcttgataatatattgctggttcctgacattgcaaaaaatttattaagtgtgtcaagtttaacctctgataatgatgtgtttgttgagtttcaccctgattattgttttgtgaaggacaacatcacaaagaaggtgctgctggaaggagtgcttagagatggtctttaccaatttcccaacaaatctgctacaaattcgtgtcagttacagtcgttttctggtttgtcgagtctgtccaaatcaagtgttgttaatacagccaatgttcatgtttccaagaaggatttatggcatagacgtctaggccatccatccactagagtccttaaacttgtctgtgagtcaaacaatgtaaaaatttcaaagaatgaaatggaaaatttctgtgaagcttgtcaatttggcaagtcacatgcattaccatttaagttgtcttcatttagagcatctaaggttcttgaattgatacatactgacttgtggggaccagccccaattgcatcaaacacaaatttcaagttttacatacatttcatggatgactttagcagatacacttggttatatcc

SEQ ID NO: 253246 - DNA, 712 bp, Cannabis indica
ttttgtgtgactacggtaacctacaatgttactcatggtggacatttaatggggcctataataccgggtagaggtctgcgacaaggagatccattatctccttatttgttcttgatttgtgcggaggggttttcatcactgttaaagcattatgagagacgtcattggctaactggttgccgtgtagctagaggtgctcctatggtttcccatatgctatttgcagatgatagctatgttttctgcaaagcaaatgagtatgagtctcaaaatgtgattcgtcttctcaagagttatgaacttgcttcgggacaacaagtaaattttctaaatcttcagtcttttttagtaaaaatactactgtggctgtccgtgatcgggtttgtggtgttatgagactgagtgaggcgtctaatgatagtttttatttgggtcttccatgtataatggggcggaataagaacgcaattcttggtttcttgaaagagaagatgaaaaagaagatctttagttgggaaactaagttcttatccaaggcggggaaagagattttgataaagtcagtcgctcaagctttgcccagctatgctatgagtgtctttcttttgactcatgagatttgctcaagccttgaaggtatgatggcgcggttttggtggaaatctcagtctaactcaagtaaaggagtgagttgggtgagttggaagcgtct

SEQ ID NO: 253247 - DNA, 1281 bp, Cannabis indica
gttttgagaaaatacacacattatatacccaagagacacacgacaagaggaaattacattatatacccattttattttatttattttaatttttacctttatttttatattctttaagatatacccacttttatacatgatgttcttattatacctcatagattaatataaaatatgtattaaacttaagtagagagtgagggtatattgggcaatctactcaaaaacgtgagtatattctaatgaaatataatatgaggatatttttgattaatagatacaaaaaaaaaagtattcctcaacttatctcttaaaacaaaatggagagctatctcatctaggagcaatatttgataccattatattatttttagatttttttactaaaaaaatcaatattctacacaataccatgacatgaatccatccaatctcgagctggaccacgaatacagactcgaacccagaccctagaccctgatccgaaccaagacctaaactcggactcaaaccttaacttgaacccggatccgaaccctaaaccccaaaacacgaacccaaatctggatccgactcaaaccctggaccccgagctcgaaccccaaactcaagttaggtcttaggtcgggatccaagtcgaggtttgaggttcgcatcctggttcgagtcgagctagggtccgagttgagattcaggattcaggtcggggtctagggtttaagtccagcgtccacggtccgagtcaaggtccaacgcgggcccattgttcgagtccaggtttcatggtttaggtatgtgagcaaaattataagatataatatgttagaaaaaaaaatatttttaaaaaattaaaaactacattttgatgtttttcgttttttaattttataaaactaagtctatttttaaaaatttaattaagcagtccctattagtttttaaaaattattttttttctttaaaaatttaagttatgaagctaaattgctcgtaagtttctttcatttatttaattttttttttaaaaaaaaatcatgcaattcaatcaactaaaataatagcattcaatccaatcgaaacatctcccccattaatgacacgaccatgattaaaattaaaaaaacaagtcaaataatcaattgcttaatccctaattgtttgacaaaaacataaaaaatacaatcaaatgaagaaaaaaaaatccaacatcacaattaaccttaagaccatctaatattaagtttcatctgttgctcaaaaggcacaacagtagaaactgtt

SEQ ID NO: 253248 - DNA, 522 bp, Cannabis indica
atatactaaaaaaaaatacaaatgtatttataaaatataaaatattaataaaaaaataattaataaattaaacgggtccccgtcggggctggaagtgtcatccccgtctccgaatttgatccccgtccccgccccattccccatttagacggggaatccccgccccattaggggcaggtccccgcggggcaccatccccatggagaaaatgtgcagccctaattagagtgcttttagaagtaagagtatcaaaaataatgtggaagagagataaaataaaatattatatttttgaatgatgtggatatttctagcacctttaaaaaatactaccattggaaaagcactaacattttgtcatttctatgcattttttatagttaataatcaaattagttgtccatgtgtgcaaagagtattatccacatggattggatacaatgtacacatagcataatattattaacccacgtaaataaatatttaaaaattaaaaataataaaaataaattattaaaaaaa

SEQ ID NO: 253249 - DNA, 787 bp, Cannabis indica
caacataaaaagaccgtagtttcggtagataaaatcaaaaaaatcgtaaaaatatttaaaattctgtgaagccgtatttttgtaatttttttgttgtttttatgtttttgtgaaataatcccttttatgttactactttttccatggttttctcttacttatatattgactcactcaatcattctacacttcttccaccttaataatttacccaatagccagatttatataatattataattattatataaatattaattaaataatcaataatgtatatttaaaaaataaattataatatcatataacattaacaagagtcaagaatggagaagcatatcttgacagtcaagtgagcaatgagcaggcggacactagcgggggcacgagcggacacgggagatcaaatttcaaaaaaacggaagagggcagaagaggctttagatgttagggatgaggctcaccggattgagccgactgctgggatgagaccccgctgaagaagaagcagccaccattgctaggagtattttaaattcttctaaggttatttggtcaaatgaatagtgagtagttatagtgtacaatacatatttttaattttaagttttaaattttaataattaatagtattattttttaatgtaataaaaaattttgttcaggttacgggttagaaaccgactaaaaaatatacatttttaaaacccgaacccgaaatatgtgtggggaattttggggttggacccgacccgaccatacaagtttttaatttttttagtttttt

SEQ ID NO: 253250 - DNA, 713 bp, Cannabis indica
accgtcaaagggaacacctcaggctgagcttcgtacgattcaacttgcccaactcgctccccttctttaccaaatctttcttcctctttttagtttgctctcttatcgttagctttgtacccctatttatacataaatttaattaggtatatgtggtagatgggaatttttccgttaaatattactaaaacgtgtcaatgtttgctcaaaatggcatcgttgtatatggtatatattttggtgtattttagtatcattttccatatattttaatttaaagtgttaatatttcagttcttttaaaggtatttaaaagttaacaccacataaagtgacactttataagtgagtggttagcaatttttatattacatattaaattacaatatgtaaaattgaaattaaattacactaatattatgatatattatgatatgacacttcatgtggtattggaaaaccatttaaaaaatattaaataccaataatgtccaggattaaaatttttaatatgggctcacatgtatattagtgtattgctatttaaaatttgacctaaaataaagtgttcattttagtaattatgggtcattgagtattaaagtgttatgggctaaatgtgtagataccttaagagatatttttaatttattgagggctaaattagaaatacttaaaatgatagcctagctatgaggttatatattggtagt

SEQ ID NO: 253251 - DNA, 841 bp, Cannabis indica
tcgtctatctaccttggagcctggccaatctgcattagagaaacactcaatatgggtgtctccatggtctttgtaaagaatacatggccctggtgctcatttcaagtaacacaaaatttgctctaatgctgctcaattatgatttgttggagaagacataaactgactaacaacactaactgagaatgtgatatctggacgagtgagttagataattcaattttctagccaatctgcgatatttgtcaggatcttcaaatggttctccatcacgtgtaagatacacaattttcctgtctcagttaacaaaacaagtacatacttcctttgagacaaattaataccttatttactctgagtaacttcaactcccaagaaatacttgagcactcctaaatcctgggtatgaatgaaagacttaagggatgagatacctccagtatcatttccagtcataacgatttcatccacatacacaactagcaaaatggtatcaacaggtgatcttttgtataatatagaataatctgacttacttttatacaaaccaagcgcgagattttgtttcaatccatataaagatttgcaaagacaacaaatttgccctaactccccagagcaacaaacccaagaggttgctccatatacacttcttcctcaagatctccatgaagaaaattatttttaatatcaagttgatgcgaaggctaatgatgagtagccgccatggaaatgaacaatcgaacagatgtgagtttagcaataggagaaaaaagtatcagaatagttgtaacgtcctcgcttcaagccttcattgggcccttacacccacggaatgaat

SEQ ID NO: 253252 - DNA, 704 bp, Cannabis indica
attcagttttggatcgtattggttcttaccccaaactattacaaaattaaaaaatttatattagtttatatatatgtatattatatatttgttattataataaatactataattaaaacttacagctttttgatcgtgtatgtaacggctggggttcgcacgtgcgacgatgtcagtgatatatttcaaaacataaaaaccacattcttggcttttaggttgtcttggacagtttgcttgtgaaattcctagccacgggccaagatactcatgtgcgtcccctatatatctgaatgcactgttttgaaaaattatattagcatttcaattcgttagttaatttaaacttgttacatacgaagtcattaaattattaccttccaatcatttgcgtaatttcttcgggaattgcgcggccacgtacagggtttaaattgataatttttcttggcgtaatcaccactagcgtccaatgcgcactagaaaattatattggaatataagtaagatagtataaaaataatttgaagtcatactatagaaatgaacaattagcactaaagaattaaatagagtttacccaatattccaaggaataaagaacatttggtggttgttattcattaatgataaccaattagccaatcgtcttgccgcatcgtcaaaagactgactcttttcttcatcggtgttcccatgcacta

SEQ ID NO: 253253 - DNA, 1067 bp, Cannabis indica
aggtactccttgaacaccctattcatcatatccatgaaggctgctggggcattagttagtgcaaaagacattactaaaaactcatagtgtccatagcgcgttctgaatgctgtcttaggtatgtcttccttccgaaccttcaattggtgatacctagatcttaaatctatctttttttttttagaatacactgaagccttgcaattgatcgaagagatcgtccatccttggtaaaggatacttattcttgatggtcaccttgttgagcttgaggtcatctctgcacaatctcatgcttccatctttcttcttgatgaagagtactggagcaccccaaggtgagtaacttggtctaatgatccctttatctaggagctcttgtagctatactttgagtttctacagctcataaattgccatttttatatggaaccttcaaaatttaagcactcttggagctaacttgattatgaactccacatcactgtctgagggtatccacggtagatcttttagaaagaccttttggaattaacagactatgtggatgtttttcatggttagttgtgtttccactacttggttcactacattggccaacaatgcttgacaccataccttccttagcttgttagtctttaaggatgagattaaagaagttcataaggctatcttaactcttgtgaatgtacacttgtctttggcctttgttgccaaaagcgaccaaataattttagtaattgatgaaccaatagccaatccatatcgagtgcagcgtcattatcctttatttccagctctatcaagtcatttgttagttgtctattattgagttccatatatccaatatggatgctataatctttggttgttccttcccctctaatgggttagagcctctttcaaatatcggtggttgctatttttttattctttcatatggtggctcgaagcgatgtgttggttgttgagttgaattttctcgtgctttactgcttattacaacacaacttttcatcttgagcttggagtcgttccctaagttggcgttctctttcaccaactac

SEQ ID NO: 253254 - DNA, 1322 bp, Cannabis indica
cttagaatttttccaattgacaatgttggcttcaaaaacaagttttgacccatcagtcaccatgtgtagtccattcacatcgaggagacgtgaatctcttcagtggtgagacgggtgagagttcttaaatttggttgagttatgaaccgaagagcgtcttctttgaccatgttcggatctccatctacgtagagcttcttcaactgctagttcccctgtgtttgctgcttccactctgctcagagcttcttctagtgtcttttgactggttctggcttgggggttttgggttttggggttttgggtctccagtggtgagacggtactttgactccggtggtgagaagagacagagaaagaagacagtccaccgtgtcacttaactgcgatttttagacggaggggtgcagagcaaaacggaactagggtttaaatagtttagctgctaaaatttcagttttttgtgattaactgttacaaatcgtaaagttcaggtggtttagccgctaatatcccttaattgattaattataattgattgttaattgtagattgacgacacatattgtgaagggctaagagaaaataaagtaaaagggagtaggaatttggagctaatggaagcattcaattttgatcacaactccattgattgggaagattatattatcaatactcacattcctggcctcataaaatatgttattatttaacttggataaatttatgccaagttataaatttcttatatataggtatactataatgtaaaattgtgcatttgcatctatttttagtatgtacaattattaaatttgatgcaaaatttagtatttttaataaaatgtaaaaaaaaaaataataactttatcattaattttattattgtatttttatgtaaagtaataaattatttccctctaaaaatcaataaatatgcatgaattttgttcaagatatcaaaaggtcactaagagaaatagatgacgtgaagacacccaaaggactcatgaccaaagtcgcgaggactcatggccaaagtcgtgaagacttatatatgaccaaaatccccagttaccaagacaagtcataatgcaccgaccctcagtgctcctcattgggctgagccctcagtgctcatcacaaaggccgacccttagtgctcctcattgggctgacccttagtgcttctcatcaggccgacccttagtgtgttggaaatttataggtgcttcaatagaaagaccaaagtcaaaatacaactcaaaatgaaaagtataagaacaataatattgataaaataatgttacaactctagacaa

SEQ ID NO: 253255 - DNA, 1141 bp, Cannabis indica
gcaaacatataggctcacaggtcgaattgattttgatgggccatatcatgtttctaggtttacacagatgaaagaagtataaaatttacctgtttctaggtgctcaaattattttaaagttgctaattgtttagctagttgggttcgtttgttccattctttttgggtttggacaaaggagttgcctgtgtgggctgctgcttgtttaaaagcagttgtgccgtgtggtgttggtttgtaactgtgtttttgtttcaaaaaaaaaataaaatcaaatcattggacatgtcaacaagttaatcatagcaatttagatcaaacaaaaaaataggtttgttaaaaaagttttgaataaataattaaatataacaaacaatatccaagtatcaaatgtgaaataagatatttagttctatataattaaattattattttaactaaccaaccatttggaaaattttgggttgttgaaaacagtcttaaatatcttttcaaaatttaaaaatcaaaattgaaactaattttaaaatatctaggtttatttgagttatttttatcaaattaaattaaatatctaataagataaatgattggaaaataaaataaaaatattttcaatatcgttttgtaatcttataatttaataaaattaaaataacaaaataaattaattttaaaatagatatggttaggcaattattattttagaaataaaataataaaaaaataataattatcctaattatatgttaaaatatctcaaattaagtctttttttaaatttctacaaaaatatctaggctatttaaatatttaaaattttatttttaaatttctaataagtaaaatgatataaaatatcatttttctaacttttaatttataaacaattaaatatttaacataataaccaattttgaatttgaaagtattatggttagaatatctataaaaatatatacgtcaatttcaaattgattaattatttaatttatcatataagataattttaatataatatttcaaataaaaaaggataaagtgatctcttaatttaatatatggcttgttgaattcgcttttagccaacgacaatgagtctattttataagcgataaacgatatgtagtaacagatatat

SEQ ID NO: 253256 - DNA, 1112 bp, Cannabis indica
atatttaagttatatttctaaaaaaattgtaggtactgaccgttaagttttaagttattatccatgcatgtatcattttttttctttgatatatttcagtgaaaaaacttgtgttaaattatcatcatttttatgttattactaatgtatatatgattaaaaatataattcacaaaaattacaataaatattttttcttgcaaaaagaaattacaactaaaagttctttttgttatcgtagctgatcgaatttatcatgatcgtagaagttcattttcttcaaattatttgatattagttttttttttttaaaaatatatgtattgcatatatatatatatacttagctgtatttttaattttaattttcgttatgtgtattttaaaatttataaattaaaaaaaaacttttattaattttttttaatttaaaaaacagtatttaaagttttgaaaatttaagaaggaataatttctcaaaaaaaaaaaaattgaaaaaaataaatgtaaagtttaagaatattaaaatttaaatactcctaatattaaaaataacaataaaaaaataatgttacaaataatttattaatatttataaatatataaattaatttaaaatttatataagttaaattaatctaaaacaaataatattaatatttatatatttaaattaatttctaataaataacattatatttatatatatttataaaacttactcttctaacacagttaaatttaacagaacattcttatatttttgaaatattttgttaaaccaataaaaatcgttaaatagatacatcaatatataaagataaagatatattgattaaattttatttgaatcttggatttaaggagaaagaaattaattaaaaagattcttgctttcaaaaaataaaaattaaaaagattttattttcttatgtttagattgaatatatatataaattaaaaaatttattcttgaaaaatcaaaacatgatgtagtataatttatgaaattttgatcaataacaaatatatagaaaaactaaacaaaaggtctcaattatcaaatttattgaaaatattttgcttatttttttctcataaaaattttccta

SEQ ID NO: 253257 - DNA, 1497 bp, Cannabis indica
gatgcctcgctggcatgtccataatggaatactcaacgagccgtgcagaatgagcaacacttagcgaattcaaccaagcgcatcgtgagtcaccagctcaatccctataactcagggatcaacttgcgtggatgtggcatacacacgatcccactatcagtgtattcagcctcaatcccacgatcctagcattcagcattgatcacacgatctttctgtttatgcgcattgtaacgagagaggaaactcttcctcctcaagtttcctgccctataaatagtgaggaatgttcactgggcaaaggacggagaaattgtacgccgaaacgctataagctaaggctatctaagaattatatattcagagatattattgtaagagctataagaaaaggaatcttcttccttattcttaagtcaatacaactaacgaggattaggctattaccgaactgctcggggctgaacctctataaaatttctgtgtcttattattgctttactacatattcttattacgacatatcgtttatcgcttatcaaaaagactcattgtcgttggctaaaagcgaagtcaacaaatgataaagtttttattaatattattattatttattaattagaccctctgttttgttaaattgacaaaatggatcctgtatttttcaaaatagtataaaaatgaccatgaactgatttttggtcaaaataaaatttaataataatccggtctaaatgtgttaataaaaaaatgtttacattttctgaatctgttcgtgttaggaactgtcttcaagttggttatgttaaaaaaaattatcgaaaattaagttcagggtcctatttttaccattttggaaaatatagggtctattttgtcatttgatataggatccaaaatagtatttaccctaaatactataatcataaattgataatttgactaaaaatttcttttagataccaaaataaatagagatgtattgtaccttttttaaagatgcagtgtagaattttcttacaattagcagtaagaatattgtgtagttaattttttgcccctatgaaaatttcactccaaattttgaatggtcaacaacatttaaagattaactattttgaaaattgaattacgagttaaaagtgtaataactgaaaagggataattttacggaaaataaaattgcctttaatgcaaaagttggaatcccaaacaatagaattagaaaacaaaacgtcttacatacatcattttatttgtttcaatggcaacatattagctttattgtcatatatacttcgattattattgtaaggctaccttttgaaaggaagcagtgatgtagctggacttaagttcacatctatattattatttgttttttatatttattttctatttttttaatattattaattaataataagtttttttaaaaaaattctaataatctacatagaactattgacttccaagtttttatttttctattttttt

SEQ ID NO: 253258 - DNA, 1401 bp, Cannabis indica
aaaataatttccaacactttcctcctctatctgtgaacatggcgaatgttggaggcaacagtaatgctacacagaacaagagcagatccaccaatcagatgaatggagcacctaatctcaatcgatcgagaaacaacactgatgatcacaatcctatctatttcaatcataacatgtctattagactaaatgatcacaattttcttttgtggaaacaacaggtactagcagcaattcgaggaaaccagttacaaaaattcattcaagatcgagctcctccacctcgattcttgagtgatgtagatcaagcttcgaataccttcaatccagattttcttgattgggaggttcaagatcaactcttagtttcctggttattatcctcaatgacagaaagcctcctcactcgcatggtgggatgcaacacaacaagacaaatctggcatgctcttgaaaagcatttcactctgcaagtgtcttcaaagatcctggagttcagaacgaaattgcagaaaattcgaaaaggatccatgtccttgaatgaatatttgttaaagatcaaacaacatgttgatctacttgctttagtaggggaggttctgagtgcaagagatcatatccctgccattttcaagggcttacctccagaatatgacaccttcgttatttcaactaatactcgaatcgaagagaattcagttgctgaaatcaaagctctattgttagcttctgagtctctaatcgagaagacagatcaagatttagaaactaaattgagtgtgaatcttgctacaactgagttggatcagttctctgaagtcaatattgcctaccagaattatccaaatcacaccagtaggttttacaatcaaagtcgaactcctcctctctcatccttcacttcatcatctcgaggaactggtcgaggattcaccactcaaagagcctataatggaggtaatcatctgtccacctcttctttccctaattctaacagtcgtggtggctttagtttcaacagcagaggtggaaaatatccaacaaactccaatcgagttcagtgccagctgtgtcataagcttggacacactgtgcttgattgcttctatcgattcaataaaagcttcacaggagtgtttcccaactccaatcctcaacaagatcaagctaatgtcgctcagacaacacaacttgaagatagctgctggtatcctgattctggtgcttcaaaccattgcactccaaatgtgtaaaatctgaacacaggtgtcgaatatgaaggggatgaacaactctttattggtgatggcttggggatctctgttcaacatataggccagtcttttagtcttttgttcacaccaattcttctcactcccttgttttgaataacctgctgca

SEQ ID NO: 253259 - DNA, 555 bp, Cannabis indica
tttaattggtttgacagaaaattagacagcaaattttgaccggggatccaagtccgtgataaaataagaaaattaccttgtgattttgtcttctcaatttactacttttatatttttttaaattatatattaggtggactaataaaattatactacgtatacacatggataatctaacatgatagttaatggttacaattaaataagagtggtaagattttaccttaaaaaaaaaacaatatttaaaagttagttgcaagtatagtgacactttaaaaataattttgccacaatttagtcaatataataatatatcttggtgcaccaactgtgatcctatatgagaaggtagtccccattaatatcaatgattactattttttaaataaataatatgcttgagttgcttttagctacaaatactatagttttaatcgagtgtcatgtttccctaaaagactgtccccaaattattgacctaattatctttattacaattgctatatacatggcataattaatggaacatactttttattttataattttagtgga

SEQ ID NO: 253260 - DNA, 600 bp, Cannabis indica
gaagaagccgtcaagaaggtcaagggagttgctcaaccaaaagaaactgagtacactgcttatttattttctaagtctcgaacagacattgactaggaaattgaaaaagaatcaacaactaatgcctccactgaaatagactcctcttttgtttccatagatgaactcgagcatggagatagtgatggcgattcccctgctatttctcaataagatctcaagcaagaaagtagcgatgaagaatctccctctgcttcccaagacaactcaggagagggagcagtgacgaagattctctctctgtttccaacaattatcaagaataggggagcagcaatgaatatgtgtcttatgagtttttcaaagatagtgaccaagaaagcgacactaaagactcccaatgagagaggtagggaaatttatatcatcacataagtgtttgaacctgggacaaatgggttagagtttgttatgactgccacttgaatttagtaccggtaccaaggtgctagaatggggagcatctgagacgaatggggagcatctgggacgataacaaagcaactgttctctaaacatttcgcttcacagtgagattca

SEQ ID NO: 253261 - DNA, 602 bp, Cannabis indica
atttttgtaaataacaacttttagttttttatttttgtttattttctctatataggtcataaatgtaattttttttttcatttttagtttttcattttttcataaggctgacaattcgcggtacaatactattatgcccataattcgagccataaatatagacataacacgtgaataattggacacaaaaataaaggaaaatcattaataaatgaattgcttcaaggagatagtaaatgagagtcatatctaccttgcgttatacattggcaataagacaacgagataaacaacatatggcgatatgataaagatagaaatcatctcacgtatatcagactgacgttttatcattggaaaggataaataatgagtttttttttaagagattgcaactcattaacccacatacttgtgagtatgttgaaaggttaagagaaataaacaaagtgtaattaatctcaaaaatctcaaataattattccaagagttaccttgaaaagttaaagcaagaacaaacatcttaactagcatctcgcagaatacgatcagctatcccaatacaccatcaaataatgtcagccatagctggagtgtgtcat

SEQ ID NO: 253262 - DNA, 831 bp, Cannabis indica
atagatcctcacttttgggatccggcagacagctttggacttatggaagaactggaagaagtggagattaatctcactcttccaaccagaaaattaaagattgggaaaggtttagctccaaaaataaaatcagttttcttaaaatttctaaaggtgaaccttgacctctttgcatggtcacattgagacatggtggggatacacccttctgtgatgacccatgcactaaacatagatccaaacttccaacttgtacaacaaaataggaggttgttggataaagaacgtgcccgagctctaaaagatgaagtcgaaaggctgagcaccaatgacttcatcaccgaagcattgtatccgcttcgggtatctagccctgtgttggtacctaaactgaaaaataagtggagggtgtgtatagatttcaccgacttgaataaagcatgtctaaaggactgcttcccacttcctaggatcgaccaggtagtagatggtatagttggtcatgagatcctaagcttcatggatgcttattcaggttacaaccaaatcaagatgcacccaccagaccaagaacacacaagtttcatgatagacctaggtttgtactactataaggtcatgccttttatgctaaaaaatgcaagggccacctatcagagactagtgaataaaatgttctaagatctcatgggctgcaacatggaggtttatgtggatgacatgttagtcaagtctaaaaaggttagaaggcatgtggtgttggaattaatttttaccaggatcttagatctactcacaagtatgttgattaacaacttaaatatgaacttc

SEQ ID NO: 253263 - DNA, 781 bp, Cannabis indica
aatccgtgaaagtacaataacgggagaaaatcgtatccctaaatatatgtatttggggtgtgaagctataatatagattactagactttttatctgtaaaagataaagaatatgataaaatatgacatttatttatgctagctaaaagacatggaatgagtaactagggttggctaaaagagttgaataggggcactaactatatatatttatatatctttatatattaaaagtacctatctaacggcattttttggtttcttggtttaacagaatataccttaaaaattaaagaatattctgttaaatttaacgatattaataggtttgatctccgttaataaataaacccaataattaaaccaaaaaatcatcttgagatttctgttagtttaaataattaatattatttaattactcatttcaattaatccgtaaacgaatctctcatcactcagccctctctcactcactttccaattctaaaaaccctaatcgcagcagcaaaacattaaacaaactaactctgttatgaagagacgctgctacagatacaatggcttcccatcgtcgtcattcttcaacctcaactctgttaaattttaatgtcacatattcactaacaattagttattgattgattcattgtattctctcctctgatccctaatttactctctttctcactgctaacttccatattttttttccttttctcgatttcatcgtttgtttgattgcaattttttttattattatttttgtgtttaatttttatctt

SEQ ID NO: 253264 - DNA, 661 bp, Cannabis indica
aactttgccagtcgatcgaacttagtgacatactcagtcactgtcatgttgccctgagtcaatcgtataaactcttctacctttgctgcccgaatagactcattatactacttcccataaaacgaggtctggaaggcatcccaagtcatgtaatacaggtcatgaccatgagacacaatctcccaccaaatactggcatcatctcgcaacatataagtagcacacctaaccgggtcattatcctcgatccgcatgaaatcaaaatagatgttatcatactcatccagtgctctgccttgagtggatcagcaccaccctcaaacactggtgggttgtgcttcttgaatcgctcatacaacggttccaaacgattccctgcatccagtggcactaccagacgtgtcggagcatcgggattagggtttagagaaggctgagctcactgctcccttaattctctaatttgttcacctgactgcctgatagtctcttgcatcgcaagatataaatcttccgagtttggtggtggtggagggttctcgccctcaccagcaaccccgagcccagctagctcgcggttacatctaccagtccgcctcgagtggataatctatacacctgcggtcacattccaggtaataacaatactgataagtatttc

SEQ ID NO: 253265 - DNA, 724 bp, Cannabis indica
ttacaatagagttgtaatacatctttaattttcttccattataatcaaatctctaaacaaaatttacataaataaactatatataaatacttgtatacacttgaaaaaaaaattggcccctcctaataagttcaccaagttctgccactgtctatagacagcctgatatatactccatttatctatatctaccctttttcaaaaactgtcaaaagaaaaataaaagaaaatggtgataaaaagaaacttcaatatcacaaaaatataggttatatgcatcgaaaaatgatatgatattttaaattttatttttttaaaacaatatttctaagattgatatcattattcataattttttttttttactattttataactaaatcttcaaaatggtttatcacaccaattttataagtattcatgttcacaataatttcttagtacaatttataattattttttttagtttttattttactattttttatgtatatttgggtttaactgttatttaaagaaagagaacaaattgtgcaaagtaatattaattgggaaatttgaatttttatacttacatatacctaatattttttccctaaactaatacttttctacattgaaaatatatgaccacttttctaaaatcccaaaaatacccctctcaaaaactcaaaccctttctctctgatttttttttatttatttttctgggcttttaaggggt

SEQ ID NO: 253266 - DNA, 780 bp, Cannabis indica
atgttattatgtaacttaagctattaagcctttgggaatacaatgagcgtaagttctcacgtttgcttgagcaaatattgcaagagaatttaacccttaattcgaaggattcattgggtatttatagtgttaagagaattactcttagtttccatttttcctctattggggagtttacattgaattacttgggctatcttgtgaagtccaaaccacgaagaagatgaactactgactaggcagattagatacggttgaattagtcaaaatcgtgtcctataatcatgaattaattgcttgatctttgtttaggaagtttttccttttagcttgatatgatcttttgtcgagatttggggagcatttatttccttatttgtgcacaagaataagaaggaaaaccggactggtctaggaacatattgtctgactcttccggcaccatggtactggagctgcttccgaatacgagctatcactggcgaaagatcatctaatcacgaagctaaggtacgttcctataaggtcctatatatcttgggcttggcccaaattatcttttttgggacccactggtgggcctttgatgctgacctaaattctacgtgcctctttctagaaacacggataacaaagggaatcctgccaaccaccttgtcacacactagtatccttaactttctaaatattactccaatgatcctagaaggtagtatcaatctttttcgccatcactttcatcaaaattaagaccttctcgtggaaagattcattccgaaa

SEQ ID NO: 253267 - DNA, 504 bp, Cannabis indica
tatttttagttacaatacttgttgtgactaaaagttacatttagtcacaaaaaaattatgttgtgactaaaaagttgtcattaaaagtagcagttttttgtagtgttaattataaatatactatatttatagtttttgtaatattatgtgcacacatgtacaatatttaaaaatttatgtagaccgtttggaatgagttaatgctaacaaatggatggtagtatgaaatattactttgtttgtttggaggatttaactatacaatattattctcttagtaatttaactactctttaagagagtaatattgataacttaaaaaatggtgcgattgaaatattcccttttattatattaatttaaatgctatttttaactaataaataaatttaaatactattaatattttgattattattaaaaaatatttaatctgtgagattgattatttttatttttaactgagttatttctatgttattagcaataacatatatatatgca

SEQ ID NO: 253268 - DNA, 575 bp, Cannabis indica
taaattcaaataattattttttttttactttaaatccacttaaccctacgcttatgtactatagtaataggtctttaacaataaaatctttagacaatattatttttggattaaaaaaaatcaaaatacaaaaaatgtaaagcaaggtaaaagacatcaaattatagtaacttatacctcaatacaagctaaaagacaacatcaaaatctttaaaatcgatgccattaattgaccgtcgttgtccaaaaaacctaaaaaatctatcagcctaaacgtccttttttgccctcaaatcctaaaataaattaaattttattgtgcataagtatttttgggtgaggaaactagaggatgtaaaagaaaaataaggaaaaacaatagtgtatggagaaaatagatatttagaagcactggcagcgattttttcattaagagataactggtaaagaaagaagaaatgaggattttagatatgagattatggtttcatagacctatgttatcaattattatgaaataactgaagaaataggcctttatgtgtatttatcggcaatttccacaaagcaagatt

SEQ ID NO: 253269 - DNA, 689 bp, Cannabis indica
ggacctcgaggcctccgaccagcttgaagctacaattggcaccccatcggcagaagtgaatagccttcaagaggaaaggggagttcttcaaactatcttttgtcggctggaagaagagaaaaagactaaggaggaggcgcttacagttgaggtggcaaggctggaagggaaagttcatgccttagagatagccggtctcgagatctcttatgatttttggaaagctaaccctgaggaaaatttcgattactttggcgaagccaaagacatgtgtctcgagtactgcacttcccaagtggcttatggtgaaccccaggcaactgcttctacctctggccaaaatgttgatgttccttccgctcagacaacagatcctccagctcctaccggccctgaagactcgaaccgagagcctgggcaccagctgtttaaatacttctctttttatctttcttttttatatatatcttattcggccataaggcctttttctaagacatcatgacccgccaagcggtgtttaaacttggaattatttttcattttacagacaataggctgactgggcagcttttaatcccagtattacgtgcttttgttatctttaatgaatttcattctctgtttataatcatcgtgcaattgtgtttattttatctttaccaaatgctttgtacaggtataggtgc

SEQ ID NO: 253270 - DNA, 966 bp, Cannabis indica
gaagcaatcaagacaacaaatcgccgtgtcaacgccttggagaatgttgtgaaaccgagaatagagaataccataacctacatcaagggagagttggatgagctggaaagggaagatttcttcaggctaaagaagattcagggctacaagaaaagggaaatcgagagacagatggcagctgccaagaactttgccgaggagcaggctgcggagcacttgtcgcttaagagaggaatttctcttcattcagctcaagacatattgtcttcggagaaggatgaagatataattttctgatatgggtacaagtttatattgttatattctttcttagggtgtgtggatctttctctggttccagttcagaggtggaaagtttcgactatggacaatcttctgagatctgaataaaaaagctccctgtatgctgcttctatttattgtgtattatttatgaccaattttcataatcatttcagggttttgaattatgcaaggttttatttatttattggttcttgcgttatgccccataaaccaaattcgaagatagtgtccattgtaatagttcccatttttatagtttcaaacataatgtcctagtttccatgttttagcattgtgcttggaaagtttgacaaacacaagttcatttaataaattatttacttatgttgggttagaaagaagcaaatgagcaatgaatgaacgaatacttctgagaaagtgggaagttgtaaacgagtttcacacacatcaaaatctaaactaggactttcatttctgtagtagattgtttggaattaggattattctttttatccaacaaaaactagacaataaaattttgaaaggaaagtaccaatgacttggtcccacattcatggatgagcagtgctctaaaccggtacgagcctgagaggaacaagcacgatctaacacgaaaaaatataaacttaaacacga

SEQ ID NO: 253271 - DNA, 1102 bp, Cannabis indica
tttttaaggcagtaatcgcatataagggtgttcatccaatccaatccgtaataatttactcatagtgcatccgatctgcactaaatgcagatttcatattttggatccaatccaatctgtacaatagctcaaatgcaattcgccaaagtacgaattagattgattattttggattggttacttttcaatattaaattatttaatatttatacaaaaaaatattttattttctcttaactaacaacaaaataaaataaattattgttgttttatgtctccaacaataaattaaaataaataaaataacaaataacaaatttaaaaagaaaaaataattgtatgtaaaaagtttaattttgtttaaattgtatgtaaatctttatatataaaatgtggctatctaacggttcttgttggtttaacataatattttaagaatataagaatattccgttaaacttaacggtatttgtagggttagtttcatagatatatataaatattaatattatactattatttgttttaagtgaatttaacttatacaaattttaaaataatttaaatatatataaatattaatatattatttctaacattataatttttgattgttattttaatattaggagtatgttcaattttaatattcttaaactttttatttatttcctcaaatttttatctttaaatatttttttaaaaaatcaaaaaattaataagtgatttcttttaatttataaaactttaaaaatacacgtaacaataatctagtatatatatactcttaatgggtattacccatgaatgggtaaaactataaatttttgagttttaatgcttaattttttttatctaattaaaaatatatctcatttttatatcatatgggctaacattgttctatcgttaaaacaaaaatttttttaacaagaaaaataagaaaagaaaaagtagagtttgagttaaatatttttgtatgaacatatttttgatatagtgtaaaaagaaatattttttattttttttttaatttaagtagtttttttttttttgtaatggaaaatgcatctttactaaccattaaaatccgctaccaaag

SEQ ID NO: 253272 - DNA, 919 bp, Cannabis indica
attatattgtaacaaaaacaaataaatatattatatcattaaatatatacaacaatatttgatatatctgttgggttttgtgccccaactaaaattctatttcaatgtaattttgaatattcatttatcaataaagaaacagattttttcattacttgtttaatgtatttgttcacatgtttatttcatgatcatttgtttgatttataaattcatgtaaatccttgtcacattgatattcttgattactgtgttgtcaacataatagaaagtaataaaaaatttgttattaaataaagttctacgatttatcaatacacaagatttcctctaatatgataatcaacaatgtaatttacttgcaccttggataagtgttatgtcttttccaaggcattggtaaagtaagcttggattggatgtattgttatatattggatgagaccgatattgaacttggataagatatcataaacttattgtaatatctatgccaatatcacctagttgatcttagatcaatgatctcaatcctgagatgcttaggttctaattcaattgtgttatttgtgctatttgatttgttcgttaaagttgaccaattggatctttccgatacttacagattaagaacatgttagttcaattgagcgagagcgttatcataaatacgaaatctatagcttctataaatgcatatgttatcttgttttttgcacattgacgtggcaagaggaccgagcgacacgtgtctcatattttgatacctgggcagaggtaagtgtcccgaatagcctggacattatacatcggcatttataactatcactttcccgaccatgatggaagattggacatccgaccagatagaggtctgcgacagcgagctacttactgggagttaattacttcagaatga

SEQ ID NO: 253273 - DNA, 839 bp, Cannabis indica
caatcttctgctcagcaacactgagtgaagcttagggaagggcagaaattgaatgttgcaacaaaacttcattatgctgaactagttgttcaagctgggttcaaagttgcaaaactagatctaacaaaggttgctgaacaggctttagagtggaactccgcggttgtgggtatggtaatgggggccaatcctccatttgctgtgtttgaaggatttgtgaaacagatttggggatacttgggcattgaacgagtggtcagaatgaaccagggacttacaattgtgaaattcaaagatgaggccactagagacgtggtgctcgaattggggttgtgcaatttaacaagaaactgatgatagtcagaccttggacacaagatctcgatactccgaggttagttcgatctgttcccctctggattagattacctaatttaggattgcaatattggggcataaactgtttgagtgctctggttagcacgattgggaaaccgattatggttgataaagtaataaggaagaaatctatgattaaatttgctagggtgctggttgaaatggatataacagatgacccctcatttgttatacattttgaaaatgaaaaaggtcaaattcaagaggaatttgttgagtacgaatggctctctattaagtgtaataactgtaaaggatatgtccataacatggcgaaatgtaggaagactggtccgaaggtttgggccaagaaaaaccaacaacatgagaagaatttgaaagacaaagatcagcctactggtgtggaaaatttaggggggataaattggtttctgctgaagctaatgacccgattagaa

SEQ ID NO: 253274 - DNA, 632 bp, Cannabis indica
aattaataatttcaataaaaaaatcttaaaaaaaattagtctcattactgaacagatctggttgcgttatctccaagccagaaatgaagatcttagatgacgtcgtctcattgctcctgagcggtgatctttccgcggtgatcgtcaggcagcgaccggggctcaaggtctcgatcttggttccgaacgccagattctggaggtaatccatgctgaagaggccaggaacgatgtgctcgcggaggaggttcgggactgagcaagagatgcatgatcggagtgctgtgtcggacggagtgaaaagagtgaaaggtccgatccaggccgatggagatgaatctgcaaagagagacggagctgccgtcgccaagtcattgtatccgagtagagacaggatatgaggcagtaacgctatgtttgtgaagaacgcttcctgagctgcgattggaatttttgttgattatggctagctttacggccatttgaaaaaaatcgtgtgaagaaggggatggttaaccaacctctaaaaaaaatggtggatggttttttggggcgttaactttaacagaatattgttttatttgtaaagtatattctgttaaaccaagaaatgccgttagataggcactttt

SEQ ID NO: 253275 - DNA, 1703 bp, Cannabis indica
ctttccaaattagcaagattctcccagaagtggctcactagagtgataattccaattaggaaagctctctgccatcatgctttgaaccttagcatgtttatttggtctcaaccaaagctccaaaactaattttattcaacctacaaacatcaagaatatccttttgcttttcttttttattcatacctctaacattccaccctaatatattatttacttccatcaggatttagagtggatttaggggccattacatcatcatcagtcgctgcctgtaacgcagcatagccattgctggaataagagtcattcgcctactcctttgccactttgaattctgtcaactttattgctttcctcttaggagtgatccactaattacaatcatcaacatcatcttttcctctcatctttatcttttttgccacttcaggagccgcctcttgagaaatagtcacattttcaggtttgtctgctgtcacaacagccgcttcccctgcatctctaactatcatctcttgcaccttcttggccccctttgtcagctgctggttttttcttccaaactactttcgtttccttgttacaatttgccacaatatgccccaatttatcgcacgctgaacacttcgatggcaaccattcatactccaccccttgttccaccaattgtttcttttcattgatataagagattgttttggagggtcattcgaaatctctatatcaacaagaacacgggaaaatttgattattgttctttcttgagttaccttatctatcatgataggtttgccaatggtgctaactaaagcactcaaattcttttttccccaatattgcaaccccaagccattcaatcggacccaaactggaactgaattgaccatccttatcgaatcaaggtctgtagtccaaggtcgtagcaccaccggtttcttgtcgaaatgaataactccagcctctaagatgagatctcgagtagcttcaccccgaaagttcacaagagtgaacccagagtgcattcgcacaaccttatcaatgcccaagttaccccatattctcttgatgaatccttcaaacaccttaaatgggggattagcacctaaaacaatacaaactatggcatttttccaaaatgaagcctctacctcagcctcctctagatcaattttggccacacgttgatcacaaacaataatcggttctgtgtaagtaagtttagacgaaggggaaggtacctggttcgtcttgaatttactccaaatatccctagcactggtttggaagtctgcctgttcaacttcctcagcccagctagcctatctcactgtcttgagctcatcgtattctgcttcgactccttcaggttcagttccaggttcggtctcgatgataaaattctcgcaagaatcatgaaattcttctgtagcttcaggatcgacattcttttcttggatcgaaggaaggtccgcttcaacttctttgttcacagggttagagatggctggcttttggccaacccgtttcttcttcaccatgggagatgaaagggaaagctcgcacttcttttaagtttcttgagttttaagaaaagggatgttttgcatgaattgagtttttgctgctgtggttactgtgatttgttcttgtcattttcagaagcttaaatatgtttaattatgtggattcaagcaggtttt

SEQ ID NO: 253276 - DNA, 1114 bp, Cannabis indica
cgttttttcatgctttttcatggatttaacttccgaattttttgtgtagttttgtatttagacatttactattcctatttcaattctaattatcataattaaattttttaatatttttttaatttaattcatgatattagtgtaatttgaatttgaaaatagtaaatatcggataaaaatcacctgtccccaaatttactgtcccattcctgtccatccaataaatagttgccatgtattttatcttttccacttcatttactaattttttgatgcatttcactgtgttatatttagtaccgtttctttttcataccttcacatcattaattatttctctctctttcttttgtttttcttgggaaaaccatattattaattatttggctctctctttatttataaaataataatatatacatgtgcactatatcaaagtttctttttctcctaaaaattaaaaatcttttaaacaacctgaatatttttttttttaaaaaaaaaaaaaccaaactgaatactttatactcaaaaaattcagctaatgtattataacgtcaaattttatgccaaattaaaatatatgcaatatataaaattactatattatttctatagctacaaatatatattatattatattagtatatgttttcctaaaaataaataattagtgcaatgttggaataatataacttattattttattttatttttcgtttttttaattatttgtttcgttattgattcttttttgttattcgatagctcgctatcaattcactattagtagttgggaataataagttatctgcgactgaagggttgttcgtagtgcaattacttactttgtataatagttgaatactcaaactatggggttaaataaacttgttgcaacaatttctaatgttgtgttttttgagtggtagatgaaactgaatatagcttttcttgaggtcagtggcggagggagaatatgtaaattgaggggggggggacaaatataaaacaattaatttttgagggggcaaattgataaacttgtatataattttttactataattaatatatatatatatatatatatatatatatatatatgaaaatcc

SEQ ID NO: 253277 - DNA, 1052 bp, Cannabis indica
aactagatctatgtttatatttagttggaaaataattttgaaagagaacaatataaattgacaaaaaattaaagaaagcgataaaagttatttaactatggatgtgaattaaggatatgaatctagttgcttcaatttcccaatcattaatgctatctaactagtctttttcctttttaatgatgacagattataactctcttcagatctaaaagtcctaaattatatgctaattattgaatctttgagatataataacatataatttgcattgagtaatagtctaaatgccacacaaagctatgtgaatactctcgtttcacatcaaaacctgtgcttgttcaattagagcattcctaatattcacttttaagattttatattaggatcatgaatcatgaataaggtgatcaagcttaaacatgtattaaaacaaatatgaacaaaccacaagtacaagaaataagaaatagtcaaatcacattaactcgtagaataaaatcagttaacattcatcatatctctaaattgagaaattagttcataatttcaacaatcaaatccatgattaaactaaagacagaataaaacataaagaaattaaagggaagagaaagaaactaggtggagaactcgatcagatcgccacactcattttaaaagtcttattcttatgtttctagggttcttttctgcctccaataaaattcaaaacctccttataaaaatcaattttataactcaaaatagcgaaaagacaaaaatatccttgtcccatatagaggtgtcgctgtgaccacagatagtctcaccgcggcaactataatgagtcgaaaacatcgattctgccaaagctccttgccgcgaccatgctataccctcactgcattaacaattagtcgcgaccaacaatgagcttttagtggcgagcttcaaaaattcaacatgatcttttcatcgattttcaacttatcttgtccctttaatagttaattaattttacacttttaaatcccggaaacttgaaacaaaggaaaataagcgtaaaattg

SEQ ID NO: 253278 - DNA, 1120 bp, Cannabis indica
tttggtcctttagccaaacaatatagaccttctgcctaatttgacaaataaattgtaataaatatgtgtttgtgaacccattaagttaataaaaaaattgtgaattgaaaataagcttaccttttgtgcaaaccaagaaaaaaatgtccgactgtgaatctcatctaaggtcattactctttgacaaggattttgttgtgcaatgatatacattgcgatgatccttacaaaattaataagcattagacattcttacttaatgtttcaatattttttttattattagatacataataaataatacttactcaataaacgagtctatgacattacattaaacaatacatatcgatgtgccttagttttggtatcctcatctaaagtctcagtatctatttttcccaaatttcaacccgtcgtttggaaaataggcagcctttctctatttaaatctagattactataatatctaggcctaggattagtttttttctctacacctttcatatatcttgaacaaaatatcaaacattcattagctaaatatcctttagaaatacaaccttcttgcttacttttgtttcgaacgcatgacttcaacttagataagtacctgcaattattcataggaacattaaaagcaatattgaaactttgtacaattaataaaataaaaatcaatatatatattaaaatattgcaaagagtaattgatggggatacatgctaagtgtacatgtaacgataaactgatagtccagtaattctcacctcatatgctaagtgtatcactaaataaaccattatatcaaaaaatgatgggagaaacaatttttcaagattgtaaacaataattgatatttgttgttcaagttacataaaatcttgtagtcgagcaacttttgaatacatcattcgaaaatagttgcttaaagtagttatatgttgacgaacatgcagacttgacattcccctcaatgctagtggtaataattgagtcataataatatgaaaattatgacttttgagcccatgaatttttagttgctttacattaacacatcttaaaatattggcagcatatttatttggaaccttaattttctttagaaatcgacaa

SEQ ID NO: 253279 - DNA, 1191 bp, Cannabis indica
ctttgtgaaactttgtgtcgtaaggaagttgtggaaagaattcgagttgctattggttttgatggtttatttgcggttgatgctattgggcgtagtggtggtgttgttcttctttggcgtaataatggggatatcaaccttctccgctttgctcataattatattgatgttgaggttacttctttcgatcaaggtgtgtggcggttaactggtttttatggggagcctaaccgaagtgcaagggtgactacttgggatcaattgaaaactttggctaccgtttcttctttgtcgtggtgtgtcattgggaatcttaataacatcttgtctcatgaagataagcgtggaggtattccttatcctaactggcttattgagggttttcagcaaacaattcaagagtgtgagctgagtgatatggagcttgttggtcaccaatttacttgggaaaagagccgtggttcggatgcttggatagagtctcgcctagatcgggcacttgtttctaagcaatggttggtttatttttcttcagcacaattgttgaatctggagttgagctcctctgaccatagtcctttgttgcttaatcttgttggtcagtcttacatttctcgtcataagcagtttcggtttaagaacttttggctccgggaacctatgtgcttccaagttgtcaatgattgttgggtggagtctgctttgggtggtattcaagagaagattaagctctgcggtaataagcttacagagtggaacagtgattacttggggaaattccactctcggttgaagcattggaagagtgaagctaagaagtttaaagctgggcatgatgatatttctttgaggcggtttaaagaagctgagaataatctttttgaggtcctcaatcaaaaagaaattttctggcgacaaagatctaaaccgttgtggcttcaagagggtgatcagaacacgaaatattttcatgctacagctacctcgcgccgtcgctctaacctcattcataagcttcagaaagatgatggtacttgggccgattgggacaatggtcttccagatgtcatagttaattatttcaagaccctcttttctagtgggacgtgccaatcactgaatgttactaatggtattagtcctacaatttctgaagctcataatgtggctctgctcgcgccaattactgat

SEQ ID NO: 253280 - DNA, 551 bp, Cannabis indica
catcaatcgtccaagtcttcgtgaattactaccaataattgttctatccatttgtcgctgtaatggtaacaattcagtttttacatcgtatatcttttttccctaaactgtaaaaagaagtaaacatttatattagtatatatatatattactgtttgttaatataataaataagataattaataattaaaatttatagatttttgattgtttaaacaacagttaaggtttggatgtatgacgatattattcatgtatttcaatacataaaaactaaattcttagtttttaggttctcttggataattttgtagtgaaattcctaaccatgccccaataaacacatttgatccccctaaaatatcatatgctctattttaaaaattatattaacatatatatatatacctaacttagttaattaaaagatttgttacataaaaaataattcaataattaccttttaacattgcacgaatttattgaggaactttgtggccatctagaggatctaaatagataatatttcttagtgcaacaacttctagcat

SEQ ID NO: 253281 - DNA, 723 bp, Cannabis indica
agagtgtcttggctcaaagatggtgataagtgcactaaatttttcttcctctcggctgctatcaaaggtagaagaaatgatatagagagtatcttgaataaagataatatctggatttctggacgaggggcaattggacatgaatttactgagttttttaagggcatctttgctggatctgatcttggtatggaatacaactgtgctcacttgtttcaagagaaaatctctcaggaagactcggatgcccttgttaactgccctagtactgatgaaattaaaagagtactttttgccatgtctaaccataaagccccgggtcctaatggaatgtctgtgctattctttaaacattactgggaatctgttggagctgacttatgcgatgcggtctctgattttttttatttcgggaaatatgcatagagggataaatgccacgaatgttgttcttatccctaaggtgaaaaatccgactcgaaccaaccactttagacccatctctctgtgtaatgtggtgtacaaagtaatctccaaaattattgcgaacaggataaaacctttactcccttctctcatttgtccaactcaagctgcctttgtccctggaaggaatatccatgataataatgtcattgtccaagaaatcatccattccttcaacagaaaaagaggcaaggagggttttttcgcaataaaaattgacttggtcaaagcttatga

SEQ ID NO: 253282 - DNA, 956 bp, Cannabis indica
ttttcaccaaatactcctgatgccattaagagatctttcagccaaatcttgggtatgccagagagtgaatgtcatgaaaggtatttaggtcttcctgcctattctgaacaagataagaaacatctgtttgctgatattaaggagaggatttggaaactcttacatgcttggaatgacaaattattctcaattggaggcaaggagattcttttgaaagctgtggttcaatcaatcccaacttatgccatgagttgttttaaactttcaaagagtttctgtactcagttagacacaatgatggcacaattttggtggggttcaacagatgataagaaaaagactcattggaagaaatggaaattcctttgtaagacaaagatggaaggaggattgggatttcgttcctatatccattttaatcaagcgttgcttgctaaacaagcttggaggatctttaataatccaacttctttgctgtcacagattctaaaagcaagatactttccaaccagtgattttatgactgccaataagcctaactattcttcacttacttggcaaggcatttgttgggggcgtgagttgctggctaaagggatgaggatgaaagtgggtactggtaggcacattttatgttgttctgatccttggatcccaggaaaatctaagttcacaccagttttttattgtggattgcctcataataaagtctcagattatattacttcagattatgaatggcatttacaatcacttcaaagggatttttcagtagtagatattgacaacattctcacaattcctttgtcaagttctgctactgaggactactgggtgtggaattacaataatactagagattacacagtccaatcgggctatcactttgcttgctctttggaggaccaagatatatctacaacatctggttcaaaatcttcctggtggagtgagtt

SEQ ID NO: 253283 - DNA, 1275 bp, Cannabis indica
attttagcattggttttgcatcgatgcaaaaaactagtaacctgacactaaatggtgcgtctgagtaaaattgacgcaaaaatcaactcctcatttgtgtaattttttttataatttcatctttagtgtcaatttttgttttagtatcgaagtaacaacttatgcaaattgataattatttgcatcggttaacaaccgaagaaataaagtgagggttgacttttgcgttggttaacgagtttgaccagacacgttgatcgacgcaaaaatccctttttgtagtagtgaaaccttaaatgaaatgggacatcttagtttagagagagggtccaagtaatatcgcctggtattgggcgacatatcactttgaaggtgcatgaaacatgcaaaaacacgtaaaacgggacactaatcaagtgatttagatgacatgttggataaggcattctaggacaatcttcaacattaggtgatttgtgtatttcagctccaaacttcaaaccaaatatttaagaaaccttttcctatttttcttttcatttacgaacaatcaattgtacattaatagctatatgtagagaaacaactctaaaatatttgtaatatcaaccaatttaatacattcatataactaaccatgttatagaagttcatttaaagagatttgtctttcactgataatattaaacacctgcaaatttgataaacaccattattatggtattagtttgtaattattaatatgtcaagtttcagagcattagcaaaatctttatgcaactgtgaagcaatcttattgaaacataaaaaaccagaatagtattacatgactcttcctacatatgaatttactattctattcgtaatttaatatgaataaatttaccattaaaaatctgtaaaacaacgtgaatgcaacaggataaacattatctctagtattgttgcatctttcccggtttttgtactatacctgatttggattgattgggagctccaaatctatttgttagagatctacattttatgaatttaaaaatttatattagcaggatcagttatttgcaaattaaattggaattttgaattttaattccgaaccagtttttctactctttctttcattaatacgaaactatatttgtttacattgattccgatcttcttcttaagtgagtttgccaaaattaatcgtggtatttcgcctggtttagtttcgtttagattgttttgttgggtcgatcgattgaagcttgtgttggtgagatttttagt

SEQ ID NO: 253284 - DNA, 545 bp, Cannabis indica
caggaaagacaatcttagatgtccggtcttgtggtcgctccctaaactctaattgatgacagttggtatgtagatagtggagctacaaaccacctaactccagatccagaacagctgaaaaatatgaaagaatatggtggtaaggagcatatgacaattggtgatggtactaaactctccattaaacattttggaaatattgttctaaatattccaaatttaagtgcttagtattgaaagattttctacatgtaccatctattactaaaaacctgataagtgtttcaaatttaacttatgacaatgatgtatattttgaatttttctctgatttctactatttgaaggatcaaacaacagggaaggcggtgctgcgaggaacacttaaagatggactatatcaatttttctctcatgttacagataaattgttgtgaaaattgtatatgcaagtgtacgcaatcgtaacaagtaataaagtgataaatcgagtatcgtctccacagggattcaaaattgaaaattaatttataaaactaattact

SEQ ID NO: 253285 - DNA, 521 bp, Cannabis indica
  modified_base (458)..(458): a, c, t, g, unknown or other
cttaaggaggatggtagttgcatgttgatgatcttgtgttggttcaagcatgctattatttgaatttatgattataagttggattcgattttgtgtgagatatagatggaattcttggagtgttttctagcttgaatccatgtgtttattatgttttggttgctggaaaataagtttgattcatgcctagggatttaaggttgcaagtatgaagttttgttgatttatgttcttgaatgaagcatgatgttcatggatttgtaatctgaatttcagggtgttttatggttggatttgatgcatgaattttgtgtttttaccctatgtttggttggggttcgaatctaggaaaagttggcatgcttaggccttaaaaatggagtttttgggtgttctaaacccagtcgtcgtgacgacatttttggccgtcgcgacttggtttcacaatgagaaaatangtttttcccaatttgtttttggcgataacttttgactcaggactccgtttgggacgttcttta

SEQ ID NO: 253286 - DNA, 541 bp, Cannabis indica
cttaccactatactacaacgacaacgttgagggcatttgaatttagtccattattaataaaaagtaaactctttccttgcattctttcaaaaaaaaaaactctttccttgcaaagccaaataaatgaataaacccacccacactacacattttaactattattttttaaatgaatattatttatttaagaaaatgttaaatatcaaatatttaaagggctaaataacatacatttaggatttttaacggttcaatagacgtagttgcaatcttgtagtataaaagttttttagattcaacctttgtcacgtgaattggccactaaattattgacatgaactaattgtaaaaaaaaaactaacaccatactatcaaagacaaacaagaaacacttcacacaaagaggtgtgctaactaaactcataacaatgtgactcttaggctatgtttggtggaagggagggagagtaggatggatggagaggttagagaggatggggagtaagagggatggagatgattgttaatctcttttgtattg

SEQ ID NO: 253287 - DNA, 606 bp, Cannabis indica
gtcaagcacgtttaactgtggagttcttcatggagggctatcgaaaaactaaggtgtcatcttattttgtttatctaatggctaattttaaagggaaccttttggctccttaacatagattttaattatctaaggaacaattttaactattatagaaaagataaaatccaaagaaagaatttcttaggatcaacagtgagaggtcttatgtatgctcttaaatgcattaaaccagacacctgttgttgagtgagagtaatgagtaggtatcatattaataggttaggaaaataagagtcgtctctttctatttataggatttcatctagcgttaggattagaattatatggaattaaaaaaaatggcttaattgaacccttaagtggccgaacctattgtgggccctataggttttaattttgctattttatttaataacttatctttttaaccacttattctaaatctgcttattggaagctcggttatataggccatggtcccctcactatttgagataatacgacttgcagactcagttaattgattttagttaatcaattataattataaaattagactatgtcttatttaagaattttcac

SEQ ID NO: 253288 - DNA, 1990 bp, Cannabis indica
tttctatgatggtattttagaggatgcctgcaactggctaatatcggtctcatatattttaatttaataattattataaaaaatctttttggtgttatgcaccactttggcctaataatagtattgtattattagaagaatattaggaagaacaaaaacaatgtagaaagcataccaatgcaaaagcattgattgttggcatggagattctttattttcttcaacgtttatgttgtagcatatgtacatatgtgaactctccctacattgcctagagtgagtcatcttagcaatttttgtggtgttaaacatacactactgcgaattgccttgaggttttcgtgtgaaattgcagcttggtctaccggaaattcacatggagattaggaagatgaagcttgttgggttcatctatgagtgataaagcagtagctgcaatgtgcttagaagtgagtcctgcagcttccatttggtttgattgtgatccatggtcaatgtatctatcaggaagcatcatagacctccactgcaatccaatcaaatcattcaaataatgtaatcatttcataattatgataagaaaaaatcatagtttgtgaattaccttaagcttgccatctagtaatccattgaggctcaagtagtgggaaacatgagcgctaaaccctccaatggagccttcttctacagtgatcaatatctcatgttcttgagctagttgcttaatcaaatttccatcaagaggcttacaaaatcttgcatcagcaacggtgatcgagatattaagcgtttgaagaagaagctcggctgctgctacacaactttgaactattgttccgtagcctaaaatggctaccctgcttccttctcttaacacccttcctttgccaatctctaatggaattcctttgttgtttggtggaagcactgatccaatgccatttcctctcgggtacctaaagcagctaggtcggtcatcgatggctgcagctgtggccaccatgttcataagctcagtctcacaagaaggagccatgaccaccatgtttggtaaacaagccatgaaagttatgtcaaaggcaccacaatgagttggaccatctgcacccactaaaccacctctgtccattgcaaatctcactgggagtttttgaaggtctacatcatgaaccacctaatcacccaccaaagtaagaaatttcattacaaaatctaaagtgggcaccacttgtttttgaatgtatctatgtatatatctatatctgtgcttacctgatcataacctctttgtagaaaagaagagtaaatagtacaaaagggcttcatgccttcagcagccaagccagcagcaaaggtaacagcatgttgctcggctatcccaacatcgaaacatctatccggaaaacgatcttggaataagttgagtccagtaccacctcccatagcagcatgaatagccacaactctgtcatctctctcagcttctgcaatcaaagactcagcaaaatactgagtgtaagaacgagtactcgatttcaacttcaactgcttccccgaattcggttcgaatttcacaacacctaaagtacaaaaaaccaaaaacaaaacttgatattcaattacacaaaacaaaaaaaaaaaaaaaacaaaactgtgtgctatgaattgtaccatgcatttaatcatgtgcaagttcagcaggagcatagccttttcctttctcagtaataacatggatgagaacaggtcctgatgtttgcatagctttgacattattcaaaatgttgactagatcttccacattatgaccatctactggtccaatgtaatacagtccaagctcttcaaatagtgaagtccctgctgcaccagccaccatgcctctaacacaagtgtcaacttttgatgcaatttcatgagcttgcctccctatttgcttggaaatgtcctatacatcaaaatgttgaagatgttacattttccacatgtg

SEQ ID NO: 253289 - DNA, 564 bp, Cannabis indica
cgttgtagattgtgaatcacgcgcttgattcttgctttttaggattagcagttgatttagtttgaaggttcccgtgaagaagatgatgacgtgtcacgtcattctgtgtttgatatatatttaacgttatttttgtaaaaagtttttctaatatagtatattcctaaaaaaatcccttcatacaatctaattataaaaaaccaatcaaatctaattacattgttttacttattttaaatttttagttacattgcactcgtaacaatgatatttttatagattattaaatttaaataaatattgataattagctttgacgtgaattttgaagcataattgaatcagatataattttttaaatttaattactaattagaattgaatgtgaaaaaaaaaattgaatgggatccccatcctaaaatataacataccataataaacatttttttttcccactaaggtataactttatatttttatttatatatttattatttaatataacctttatatgctaacatagttctgttcacctttttacattttttttattaaaataaaatt

SEQ ID NO: 253290 - DNA, 697 bp, Cannabis indica
aattacaaaaatacccctggctcaccaacggggtcttaacatgtcatttctctaatattaattcacatataataaattatataataatataattccacaatcatacacagctaactagttagggtttgctaatctattctcttaatcttagggtattacataaggaggagtttaatctagctcaagataagctggccaatgacccttcaaatacttagttacagcaagctaaacaggaaaagcatgctgagcttgtgatagcccaacaaaactactcaagctttattcaacagctgagtcaaataacttggcttcagtttggggatgacaattcacaatattttttttgctttcttaaaaaaaggaagactgaaaatagaatgacgtcctttataaaggatggtgagattattgatgattatgattgtgttattaaccattttgtcaatcatttttgcaattttttgggcaacaaaagtgtagctaacaggaagatagatttggattccctaaattagggtcacaagttgagcattcagtggcaagtaaacatgatcagacccttcacaaagaaagatgtcaaggctgcattatttgatatacactcttttaaaagcccaggaccggatggatttgggtcgaggttctttaaaggttaatggaatcaaataggggatgagataacagaggcaattct

SEQ ID NO: 253291 - DNA, 609 bp, Cannabis indica
gtttattacatgaaaattgaaaataacgttgataaagcaaaatcatcaaaaataagtcaatcaagccgtttacaataataatataaaaaaaattctagcatcaactccaactaaaaattaaataagccaccagctaagaagcatcgtgtaaagcgatttacaataaatgatagcacttttaatagtatccatttgataaatcaaaatcagtcgcttaattcccaaatcgtttgaataaaaaaaataaaataaaatcaatgaaaagattacaacatcacaaaactttaagaacatctatattttgtttctccatcgctcaaaagacacattagtagaaactgttgcaacaagttcaacctcataatttgagcactcaaccaatgtataagatacatagctggagagccatcgaagaacaaaggagaaacaacaactaaacaaaacaaaataacaatttaatggagagccattgaagaaaaaaggagaaacaacaacgaaacaaaacaaaataaaaccatgccacatagacaatattaaaacccttaaaggcaagtcacacaaacaagactaaaatactcaaaagcatgtcacacaaacaagactaaaaca

SEQ ID NO: 253292 - DNA, 1054 bp, Cannabis indica
aaatcagtcttttaattattgttttctagagtttgtctcgacagaagcttggttctagtgatctcaatagcgagcaggggccattttttccttctgaggtcgacgatgcatgtctgatgtcgatcgcggttcttatgtataatgaattcttcggaactcatttgaatgttagcttctgacttgccagggttatgagcctcgctgatgctaacgggatgaagttatatgaggtcttcccataacgaggcaggaacctcgcttacttagtcttgagccgatccgtctgtaacacttagtttgtacactaaggactttcgcaattgatatatgtcacttttgttttccaatgtgtactgtccttgatgcctcgtaatttgcattcagcgtcataaggtttctttgccaatatgcttagtaccagtttgtatattagttcctcgcctaagaccttatagtctacgggttataaatatactctattactcacgtaattaatgagctattccatataaagaaattgtatcgatccatattccccttatcgtgacacgtgtcttccactgagatggcagctgaattttcggtataacactaggtatgagagaagagagaggacttgttgctatagtgcttctgggcttagttgcacgtgcctttttcacgtaggctatgaccatttatatagtattaggatttacaagctgtacagagagataaccctgtaaaataggaaagttacaacgtatatttgaaatacaaagcaaataataattaatctataaggattagggttgttatttgttgacggagaatccctatctttgtggacagtttgcactgttccgaagtcgtaggcatgctgaaggcgagttggaaggcttgtgagaaaaacacaattgttggtgtgcttcttcacctttggccagccagcccttcccagttcttaggagctgtcactcttggccgatgaactacaggtccggccaggatcttgctggcaggttcatatatcccttttttcttgtgtgtactgtgcatcatagaatctcaaagg

SEQ ID NO: 253293 - DNA, 802 bp, Cannabis indica
tatagaggatcattgattatttaaaattgaaaacaatggataactcatagcgcatctatatttattatatagagcgttctatgtaattaaaaatgcaattccaaatctatagtggaatcaagagaaattaataaactaagaaatttacttggtaaatttcatataatagtactatcttgtagactcagctaactgattcaataaatcaattagaattttaaaatgagactatgtcttatttaagaatttttactaagtttggataattttaaaaagaaagagagattaagggtttatatttttaatactttgtgtgtctaacataattctaacaactagggagtagctagggaccacactagaattgataccaatgaggattaggacaaattaacaatatgattagcattataacagtttcataaagaacttagattgacacttctccttatcaattttttataagactttttttattaatgttgtgagtagataatttaacacaactgctaatatttataaataactaagggcaaattgttttctaattgatattatatatatttagtcagcatattgtacaaatagattatatatccaccgttattagtgctaatattctgttgaatataatatatatagagctacatacatgtatcttaattaattaatttatctatgtatataaacattagcccaattatactatcatacaaatatattatatatatgtgtgtactgcacttgtaatatttaaaaagtatattagtctatgatcaaaaagactaattaaggtttcttt

SEQ ID NO: 253294 - DNA, 536 bp, Cannabis indica
ctccgtacaagaaacttgctcctatgaaaaaggacataagtaagaggggcatgtccaagttttgtagttttcatggagattatggccatgacaccaacgaatgcaacaatttgaagtgggaaagtgaattcttaataaaaaagaacaacccacacgtggaaaaatatgtcaagaccgatcaaaatcagaggtccacccacacagacaataatcaagacttactgccaccaccggtagatgcgcatttacaagtcattaaaggaggcccacacatagctagagattcaggcaaagcccaggagaggtatgcgcgaacattaaaacacgagcaagaagaagtggtcttggccgttgaagaaaggaagccaaaaataccacgggcaggcgaacccaccataacattaatgatgaagatgttgtcgagattaatttcccggacaacgatccgttggtcatggaagtccagatagccaacaaaatggtggcccaaactatgatagagaatggatcatttgcaaatatcttgttcaaaacac

SEQ ID NO: 253295 - DNA, 802 bp, Cannabis indica
tataaattacattattttgatgtgattatttttagttttaatcacttccgattaatatttatatattaactaataatcaatacaacaaatcaatcaataactacaataaaattgctaataattttagttttttcatattaatttacaaaaatatcctttgacaaatattaattattaacttgttaatcttaaattttgcatatatatataaatttaattttacttaacaaccttgtgtaataattattttatgaaattaatgttgtattttatgcataaattatttttatgcttctatattttaaataaaattttattttattttttgaaaaaaataacaaattcaggattttaataataatactataataatttagggtttatattttacttcttttcctatttttaaattaatttgttgtgcttataccagtttgttagtattttatattgattgagagtatttttgtctactcatattcactcttttaagtagaacatgctaatgtgtaatgtttaattaagggcaacgtttcttttatttagaataaataaaaaaaagagctcttcttgaagaaaacttactgaataatggtccattgttgaatccaaaatagattctttacttgtattcaattactttgaaaaataaaaataattgctattaggcaccattgctgtctagcactactataataaggtgacgtcttgagaatgagtagcagtattctataacaatcatatattaaattaatgtgagactcaatactaattttattaatagtaataagacactttgagt

SEQ ID NO: 253296 - DNA, 449 bp, Cannabis indica
ccagtcaaggatccccaatgttagtgagtacatatagggctaaccatccatctgccactagggaggatcagagtaacccggagctacaagtattccagaaaaagaagtaggtcaaagtgatctgtgaaggacttggctcaatgatcctggaggatatttgacagtatcctattcaaagctcgaagcgatggttacttatcttctaacaccaaattagatcttgtcccttgcgtcagaccgtggtagtgcacgtacgtgcctctgaaaactccttttgcctaacagcttgtctaggcaacaacttttcaatgtgaaacctttgaatgacgcatgtcctcgtttacatgaaatccttcattgcagtcgtacaccacacgatggagaaggtgttggaaatattttactaggatctaaatttactaacaaatttgtttcattaacatcctaat

SEQ ID NO: 253297 - DNA, 1175 bp, Cannabis indica
aatgcaagactttttggttgtcgaccttccatcagcttataacatactacttgctcaaccaaccttaattgtactagggacagttagctcaattaagcacttatccctgaagtttcagacaccaatgggtgtgggagtagtgtgaggtgatcaaatcctagctcgtaaatgttatcgcatggagctgcagcacagaaaggctggtcaccagctaatggaagtcttaactaaagaaggtgagaagaacaatgaagatcttgatcctcagatttaagatgaaagaaatttatttaaacaaattgaggagctggaagaggttgttctagatcaaggaaatcccacaaagtgtctatacattgggaagaacctggatgaataattgaaatagcagctaattaactttttgaaggtgaaacaagacctggcgctcctggagccatggagatatgatagggatcgaccctaagattatctaccaccacataaatgtcgatatgaattaccacaccaagagacagaagaggcgacccttggattctgagacaaggggcactcaagcaggaagtggaaaagttgttggttaataactttatacgcgaggtattttatccctcgtggatatccaatcctgttctcgtcccaaagacaaatggaacttggagaatttttattgacttttctgatttaaataaggcgtgtccaaaggattgctttctactgcgaagtattgaccagttggtagatgcaattacttgagacgagcttatgtcattcatggatgcatactctggatataaccacataaaaatgcatgtccctgatcaagaacatacaagcttcgtaacaaacatggggctttattactataaagtcatgccatttgggttgaaaaacactggggaaacatatgaacgacttgtgaatgaaatgtttgcgagtcaaattggaagaaacatggaagtctacgtcgatgatatgttgttgaagttggtaaagagtagaaattgtactgcaaacctagcagagtgccttgaaatattaaaaaagtacaatatgaaacttaacccgaaaaaatgctcctttggagtttctttcggaaagtttttgggaatcatagtcaatgcgagggacattgaagcaaatcctgagaaaattaaggctttgatagatatgcc

SEQ ID NO: 253298 - DNA, 711 bp, Cannabis indica
gttctaataaataattaacggttaaaccgaccggacggtttataataaataattaatttatatatatatttttatatatgactatatgtataatttaaaatttttttgtgggtcaagttttttattgcatgaattttttatttttatgttatgtttgacttttgagaatgtttttataatcattatttatatgttatagatctattacttatcttgttaaatatatattttgaaaaataaaattaaaaacttagtaaaaatagtacaattatttaaaaaatatgaataattataaattccacttaaatcgtggtttgagaaattttttggtgtggtttagtttccaatattcaaaaaattgttatacttgtttggttcaaaaattatgaaaattcggaccaaatcaatccgcgaacacccctactctctttgattgtccttttgcttcctcttgctggctgaattttggcactattggcccaagctcttttctcacgattggtacttggttggagaatctatttcaaaggtagatactgaaactgactatggtgtgttgggccttgtggaaagccataaataaaaaagtttagaaactgaaatcattttctgttgacaaggtacttgtatcggctagcacaactcttgatcattggagaaaaattcaagataaatctatttaatcatctttatttcttggagacattgatg

SEQ ID NO: 253299 - DNA, 823 bp, Cannabis indica
gtttcttgatgaatctactagggccaaaaataggaaagagataggaagaaaattatttttcttattttgtcactttcttctcttaattatctacataagaccaaaacaaaattaatttacttaacccaacattggatagctgtcatcacaagaaaaggccacttaatcccaatgtcaaaatgataaaaatgcccctctcaaaactcttaactagtaaagtggcctaggggtaaaatggtccattaccaatacccagcctaatttcgacattcccaatgtctatctatatcgccctgctattactaagatacgaaaccatattaaaatgcgactctattggccaaacgtcgcgttctactattaccggcataaaatataaaaaccatgaaatttcatatatagcataataaatacacctagaattcaaaaatatctccataaattcataaatcatatctagaaatctaatttcataattaagccctaattatctactaatttatcatattaaattaagtgttctttacaattattcccttgttaaaaggattttgtcctcaaaagctaacatgaacaattctggatattgagccctcatgttagactccaactcccaggtggcttcctccaccttagtgtttctccagagcaccttgaccaaagctatggtccagtttcgaaggactttatctttcctgtctaaaatctgaactgattgttcctcgtatgataaatccggctgaagttccaggttctcatagctcaacacatgagtgggatctaaaatgtatattcctaaaatagagacatgaaacacgttgtg

SEQ ID NO: 253300 - DNA, 1114 bp, Cannabis indica
gttattcttatataatatacaatattagtgactacttttatttatatgttattattatttggaaaagctcgagaataataaagaaaaatgtacaggatatatacataacatttataattaatcaactgtaattaatataattaatttaatgttgacagtatgattaaacgatccaatctaatatttttttcctaatacattttaatctaattagtaattgaacttaaataattattattattattatcaatttgctatctttccttattgagaaatgttagaaaacacttattttgtgaattttataaaatgtgatattgttattagtgtttattgagttacacttattttattttaataataattttattatttcttttgagaagaaaactccaataaccacatttcaagcaataagcttaaagaaaaagtggaaagaaaaaatggagaagagattgattatattaattcatctcatctcatgtaagatcagatataaatacaaaaaagataatcaggtcaccaaatctagctaataactttcgacaatatgtatttaaccaaagaatgagcacaaccttaatagatttagaataaaaaaaaaagactagcaaaatgaaattcaaaaaacctatgtctaaaatttgttaatattaaacacaacgaagtagctaaagaaacctagttattaagcctcaaaactacattcaaacaacatattcaaaaaacacattctaaaaacccaatagacaatattagatggcaatattttttaaagctaaagcttccgctatttcaagagtggaagtacctaaaatgtgccaaacagcagaaaccatagcctcactagtggagtgacgaaccaccataccctaaccacatctatcattagaagcttcaagagtagcatcaacattaatcttcactgttcccctaccaggcgacacctaagcaaaattgggagaaccatttggagaggaaggcaagttcctaagtgagtgagacacactaagacccttgtctattatacgctagtaatcaacaaggaattcatgaccccaagaaataacaatattatgagcaattaccttatcattatgaacctttttattcc

SEQ ID NO: 253301 - DNA, 1006 bp, Cannabis indica
tattaaaccattgtagactattgtaaaatatcagttttgctgaaaagggttgattgttgatgattgaaagaagttttgcagtgtcaaaagatatacacagtaagttcccaatcttcattcgttgttgagtaatggagataaaaaataagtaccatggttctatgctaaggtgtgatgattaatacacctttctacttgaatcagggcactcatgcacttatgatgagaacttcgtgttgaacattgcttctggctcgtacatgtggcccaaatgtggaattttttttttcaagaatcaatcctccactcttttcatgattagtatatatttcaactctccgtccatatatgaaatctaaaatttgttaccatagaaaatattattcattttaataatttactgtattataatcaatgctagtttttgagcttctcttagtcagatatctatactcagaggtggcagaccaggattttaatcgaaggaaaaaaaaatgacaatttcatagataaaccggacatagttcattacatataaatactgctcactaagcaatcaacataggctaaccaagccatattaaaaaagataaaaatcttaacactttcaattaaatgacctataagttgccagcaataaagtatcaaaacactgtgaaggaaactagacttccaccccgaatgagtgtgcgtcaaattacatctaattaatgataatcaaccaaaaatatttcaataaaaattgggtgaaaacacatctatttatgaccagtagcctttgtctcttagcctatggcagtgaacccatgaatgattctcaacttatcaatcaattgtaggggcccattacacctgagctttctttcagtattaataaggtctattggttcatgcataattccctgctcactcactggttagttgtgaaatgaatttttgagatacctcagtggcacaatctctcatgatatacatctgaaaaggcctactaatctcgaaattgttg

SEQ ID NO: 253302 - DNA, 858 bp, Cannabis indica
ctgcccccccaaaaaaataataccatctataaaaactcacccattgttacccctgtttcaaccaacaaacaacaaaggaaaacattttttttttttattatttattatttaaaaaaaatcctaaacttcacaagcgatagcataccgtcatccggaggattgtcatcttctcctctgatttttcaccatggtcttcacctctgatcatcgacggtagtggaagctgaagaaacgaccacccacaacaataaccagcccctggttcaatcaacgatgagccctagacgattgcgaaggcagcaaaaaaaaaaaaaaatcctttgacgacggcacacgccacacagctacattgtcgccggcaatggaagctggagaaccgaccacccacaacagcgtctgctcttgatttttgaggataccagtgggtttgggagtttgggattatgggtttcgacagaagaagaaaaggcagatttttttttttttatgtaaagaagaaacagaatttgaattttgagaggttttattagattctgatataattttgtaaatatttttggtttttattttattttgttttaattaggaaaaaaagttctaaatttaaattttaattattagatttattttattatgtattattttcaaaacacaaaaatagttttaattaccacctgtgtattaaagtagccaccttggtagataagctaagttggatttaggagttaacgggtcaatgcacagaatagtaaattgcaatcggaacggaacttaaaggggttttcccaccaaaaataaaaaaaagggggttaagtgttaaacaaatgaaacataaggaggtttggccgcaaatttctc

SEQ ID NO: 253303 - DNA, 2988 bp, Cannabis indica
tcaaaataatatttttaataaaaagctatgtttttgcagttatacctaaaaattcataaaatattgacaaaatatctcaaccgatctaacatatatattttgaaattcatacatcctacatctttaaatatcagcatatctatgtagatttagatattttgttggtgagatagaataatttaatcaattatatcttaatgaattgatataatgacagatcttgatgaatttatttaattaggttatataagaattgcacacaacataattattctttcaaaaaaaaacatatacataattatatatttttttaattaaacattattgtgtgtgaatgtcacaatcattatttgctcatatatattgatactactaattaattacaattataataataattcattgatgataatatttaataacaaggggatcaagtcccatttattaatattattattattcatgtaagacatagcaacaagttattacatattaaattattttctaaattattaaactatgcatgcatgcatatacaatttataaatattaattaattaatcagttaacgaatatttgggacactagtgacgataccatagtcattaacccaaaccctaactctctgacaattaatatcctgagtcacaatacttcctttcagaatcaccaccgccttcacattctggttttcctcttctataatcttcaccgcttcttctccattctttcctactagctctggccacgaactcttacctgtgtatttataataaatattatatattaataactaataacaagatatttatatttataataatgaattttatcatgataataaaatatgtactttaattataagaagtctaacattataaatatgattatgtaacttatttttaatgtattaaatcttagaatagtcaagactcctcaatgtcaaggttggaatattctttaacactccaatttttatatatatataaaaaatccaagcaaataagtgaaaaataaataataatagaaattttgtcatcttaaatatatatatataaagttagccttaagatttgttaagttttctcttggggggactctaagcatagagttaatccttattaagttaagtcactttataataattagcgcaaagttaatcctaaatttatagtatagtatgtgttgtagaacacgcccttaaatcaagacaatttggacattttaatcatcatacatttcctagtaatgcatatatatagtaataacatagttgatgaagttaattaataattagtaataattacatataactatacaagttatatatataggattaattattacctgcgccaggacaaagttcatcacccattctaattcctcttttttcacttggatatatataatatgaatatgtgtatatatattggtgtatatatttttgattgggttttgagggtatttatagataattgaagagatataaaatatgtaataggaaagaagaaaaacccacattctttgactttttagcttattttatttttcttttttctaatttcaatttgaattgtgttatgctattattatatatatcaataaatatgattggcgtccttatccaattaatttcatgacacgcaatttgagattaattaaacattaagaataactaattgcgtgtcctttaattattaattttatgttaaaattttagatagggttcattaatttttttatttcatagttgacctaattgtaattaaataataattaagtatccttggattgtgatttttatttttattgagaatgttgattaatagtcttaatttcagagttattctacattaattattatttatttattgtataatagctaagctataaagcaccttatggaagggcggctaatataagttaatttttagctaaaattttcaacttttagctattatgcagacgctatgggagtgctcttagccacgtatatcattcaagattaattacatatacaaaattaattaatgtattttatattaaattaataccttgtacaaaatttataatataattaaaattaaggttaaatagactttacttataatatgttaacattagtaaatagattaacaaccttaattaaattgattaaatataaatgagagattatattattattataattaattatgtgaaattatttgagatttatcacatttaagatcccatttatgtgttaggggtatttttgtaatttttactcgagaagagtaaaatcgtaattttgttatttattgtacttatagactatattattatatagtatgtttatattttgtcttattgcaggcaattttcgacaaattagcgcgatatggtcacaattgagtattttggactcgaactgtaatttttgacaaattagcgcggtatgttcacaatcaagtattttgaactcaaactgagttccgggtccaaaataatttttatttgtataattatggcataacatgatatttatgaggatatttgaaatattgtgtgtaatgaaaagaccaaactgcccttgtatgccatttatatgctttatgtgctcttagagcaaaatggtcatttggccatctttccaaaattgagtatatatcatgttttatgcgattaagtgatttatgaaatctcattttctgtattctcaacctccagcactgacccctctccctttctctcaaactctctcaaattgtcattccaactttgaagaagaacttgctagaattggagagattttatttagttttgattgaggatcacttgaggtaacctataattgtgatcttttttgagtttgatttcagattaagagttgaattcaagtttgaattacatgtttgtttttgattgaatgcatgttgagtgcaaattggttttgagtatgatgaatcttggtttgatttttgtggtctacatttagtcacaaaaaat

SEQ ID NO: 253304 - DNA, 651 bp, Cannabis indica
gtctgtgtttgggatcgggtcccagatttaggtccaggtccgtgtctaagttctggtctgggtacacgatcgtgtccgggtacgatttcctatctcagtttgggtctgaggataggtctgtgttcagttctaagtctgtttccgcatcgtggtcacggtcctagtcttgttctagggtcctagttcaacgatttttgttcaggttctaattttgggccccaggtctaagtctgggtttgggtttggttcttcgtctcggttttggtcctagtctgagtcccggatctgtacaccgacttctggtctgttccagaccccgtttccagaatcccgagtctagatctggatcactatcacaggtctcggtctggttcttgttcaggttccaggtcccatttctgggtttgggttcgggatcgagactcgggtgcggttctaggtcctgaccctggttccgtgtccctagtgtggttccatgtatgcgtctaagttcgggttcgcgttcagttcccaagtccaggtttgggttgggatggtccggctcccaattcgggtctaggtctgatttggagtccgggtcctggtctcgttacagttcttcatctacgtccaatttcaggtatgattccaagtccaagtcctagttccagt

SEQ ID NO: 253305 - DNA, 978 bp, Cannabis indica
aattagaaaaaagtctttaaaatttaacagtctcaatagttcaaggggaatttttaacgaccaaaaaagttcagggggcacaatttaatacatgtcaaagttcgggggaaaaattactaattagcctattctatatatgtatatatataaattgatgatttttgtttgaaacaataaaaaaaatgaacaaaacttttatgatagatataataatgaaaaaactttgaaaaaagttggccgcaataaagagcttcttctaaaaatatggcatataagagcatcaccaataagaagaatttacaacattgtctattaaaatggataagcttatataaattctcacctagcttttatggtaaagaaggcaaggtttgttgtcattggcaatattgttggtcaggttttttttccttaagtcatatttgaatattagcgataggatctgacaagcaaccttacttgttttatgtgttggtgaagctctaaaaatggaaattgttggtaattttttttattatggcaattggtctttaaccatataagttttgacaaatttatgcccaaaatttattttttaataagttgattcccaagtacttaattcgttatcgttcataatattaagtttccacagttaaataattttttttatatatttatttttcagttcattaattaattatacttttgtgttatgttttgatttttttattgttatataaaaagaatatatattaattttatttcttttaaaattataaaaaaaaaggtatatagtagtgtataatttattttattttacgagtattaataaatattataaaaatatatatgtactattacaagtatctatctatccatctatatatataaacgtagaagtatgagacggtgatgtgacattctaatatcacttcaaatagctttatctcatctctccttaattctctctttttattaattttttattaggtttat

SEQ ID NO: 253306 - DNA, 595 bp, Cannabis indica
aaataaataaataaatacaacaatgattattatggatctctgaaaaatatttttgaaatgttgatccatataatgctgttaaattcacaacattataattcttttgctactaaaagagtgcctctttagaaagtgagaacatttttaataaaaaaaattacatctctcaaacaagcaatgcagttaataacataatctataaaattattaatcttgatattatatcttcttcagagaattatatatacatctttcgacatggaagggaatagcaaacaccaatactgtcaatctgtttacgatttaacagccaaatatatggctttatttctatatattatgcataaactattgttcccctaaagtcttcgcaaaagtaactatctagcacaaattatcctattaatgtaagattatagcttcgaatttgtagagaaaagctacaaaacacatgtttaacaaactaaatcacatatcagataagaagatatgtcttctgtgtatggatatatcttctacagtcatgactttcatatttaatattaataataaacaattattattatatatattaatgaaaaagaagaataagtgt

SEQ ID NO: 253307 - DNA, 1795 bp, Cannabis indica
cagaagacacctagatgatttcaacaaaaattattcttaatctgaacaatataggtgtgaaagtgggagaggaagattaggctagcatcctactaatttctttacctaaagtgtatgaacactttgttgatacaattccttatggcaaggacacccttaacatgtcaaaagttaagtcagccttgaactcaaaaaggagatgcaaaaagaaatttgatgaaaaactagaaattggaggagaaggattgtttgttaaaggcaagcctgaaaagaagagtttcaagggatcaaaacactccaatgagaagggaaactagaagacaaagtccaattctaagtgtttccattgcaaaaaagaaggccatttcagagatgaatgcattgctttaaagaacaagttaaaaagggaaaaagagaatgaaataggtcaagctgatgtggctacagatgggtatgattttgcagatgtcttggttgtatctaatgcagactctggccaagaatggattcttgactcgggatgttcattccacatgtgccctactgaagaagtgttcagaaatcttgagaagaaacaggtggaactgtttactaagagacacaaggcttgcactatacaagggattggctgtgtgatgctaagatggatgatggatcacaaagaccatcagagagtaaggtatgttcctgaccttaaaagaaatcttttctcaattggcacattagcttcaaaaggatattcaattaaaattgatgaaagcatgcttagaattactaagggcactaaaactgtaatggaaggaagatataaaaatggcctatattttctaaatgggaaaacagttactggtttagtgtcaaatgtttcaaatgcacatgatggtgcttaaccaagctatggcatttgaggcttggccatgtgagtgaaagggggattgctgaactcaagaatgaaggaatcttgaaaggaaaagttacaggaaaacttggattttgtgaagaatgtgtctatggaaagagctgcaggaaaaaattcaccactgggaggcacaacaccaaggaacaacttgcctatgttcactcagatttatggggaccatcaaggatcccaacccttggtggtgctcactattttctgagtatcattgatgactttttcaaggaaagtttgggtgtactgcctatgcacatgtgaatcaagacaaattgaaacctagagccttgaagtgtatgttacttggataccctgattgtgtcaaaggctacaaactatggtgccttgaactaggtttcaatagattcataatcagcagagatgtgatattcagagaagaaaaaatggcaatgaagcccttaacagtccctacactcaacatagagagcaactcttccaagctgaacattgaggtggatccacctagcaactcagatgaaataccaactcaagatgacagcactgacacccacgaagctcaagaatagcttgatgactatcctggccagagatagaagcagaagaagcatcagaccccctgccagatatggtgttgcagattagtctacatttgctcttgctgctgcaaatgagttggaaaactcagaacccacctgatataaagaatccattgaaagcaacaacaaggagaaatggctgaaatccattgatgaagaaaaatcatccatcataaagaataagaccttgtctattgtcatcaaacctcagggacatagattaattgacatcaaatggttgtttagacaaaaagaagggctaccaggtactgaagaagtgaga

SEQ ID NO: 253308 - DNA, 940 bp, Cannabis indica
gctactccctctgctccggcagctccttcctggattccgttctcttattccctcacttcctccctcaccattaaactcgatcgcacgaacttccttgcttggaagtcctaagttcttcccacggttattggtcacgagcttgatgagattcttctcatcgatcaatctccaccacgttctctgctcaatggtaatccaaatcaagcttatcaacaatggcgcaagaaagatcagctcctactttcttggctccgatcttcgatgacagaagacaatcttggtactgtggccagttacaatagctttaatggtgtttggaaagctcttgaacaaaagttctctagtcagtctaaggctcggttacttcaactcaagagtcaattgtccaatttacacaaaggtaacctatcgattttggactatgttgataagataaaaattctgtgtgattctcttgctgttgctggccatccgatttctgactttgatctggttcttcatctactcaatggtcttcgacctgagtttgattctgtggtctctggaatcacatcccgaagtgacaacttgtctcttgaagaagttcaagccttgttaatgtcccatgaaacaagacttgaacgccatacgactatgatggatctctcaactaagatggtagcaaatctcaccttcggttcaagaaatggtggctacagacaatacacacaaacattaatggtagaggaacaaccaactgattctttttcaagaatgtccaccaagaaccacaatccatctcaatattccaggtcacaaaatcccaatagacctctgtgtcaagtgtgcatgcgctatggccatactgcccccacctgtcattacaggtttgataaaaactaggtaactccaaaaattctagtcattggtaacccttcccacaggctcaccttactgaaaa

SEQ ID NO: 253309 - DNA, 730 bp, Cannabis indica
atcccccattatcacccatttttcatttgttttatacccctgcaaagatttccataaggccttcctaccatatctatcattaaaagcatagatcatggtaataaaacaagtgaagtgattccccacagtttggacatataaaggcattgtttgacttgtacaattaaggatgttcacctgaaacacattaggattccatgccaatatgattctacctcctccatgccaaggaagatttgatgaaaagcaccagcctgcaaaattgtttgagtacaaagcccccaaattgcgagctttgacccttgtctcgagaagccctactagccctacactattagacaaaataaaatgctttatttgtccctgcttgtgtataccattggctcctcgaacattccaacaaaggatcctatccatttgcaaaggagggtcctcccctctcctttgtgctaccattctgttgcaatacatcctgtgtctccaatatgtcacctattgcatcatgttcactgtcttccaaggtctgaaaagtgttatcagtttgtgttacctgactcttctcggcttgtgcaacttttttccctttcaccacttgctgaaatccttcatgatcaacttttggagcctgctgcctcttgtcctccttaactacccattgtttctttgtttcccccttctttctacattcctctgctacatgccccaaaccgaagcaatgactgcattttgt

SEQ ID NO: 253310 - DNA, 696 bp, Cannabis indica
tttgaaggcccttatattttctcgaaattcccaactgtaagaaacttcatcatgatgagtgcaaaagaaaagtatgtttctgatgtggcctaatgggacatacaagagggattatccacgatcagatatagaaagatcatgtttttagtgtggacttattagtcacttaaagaagacttgtcctcaactgaaaaaataaagaatataagaaagaagttgatcacttcagtccgtgaggttgtcgttactcagaccaatgcagcagctagttcgactcaggtgaaaggtcaacttcttagtactaatttctcttgttcaagtattggttgatcactagaactacacatttgcatgtggtagctagcgtgaataataaactgggtaggctttgtgataattataatttagggtttttgagactccattacttagtagagaattagttatctccaaaaggtagattaatcaggtctatctggttaaaggttagaataggaaagaaagtgttgatctggttaagattgtttaacaaactttggtattatttcgagaatagatttctcgcataagtatgcagttactatggattagaagagaatgagttgacttttcacttagatgatgaagaacctttgggttttgaggaataaatttgggattagggtactaatcattttggtattaaagattaaccta

SEQ ID NO: 253311 - DNA, 530 bp, Cannabis indica
tctctttatgcgcttttatttaagtagcattttgagatttttccaccttttttttttatcaagaaagaaactttcattaatcactagaacaaatacaacaaagcaacaagacaacaaggcaaaccgcccctacctcatgttctcaacaagctaaaaattttaagtaaacacacttgatcattggtactcattttcctcttaacatagctatgaagtctaaacaatagcatattttttattccaacactaatctagcagctgaaagagagaaagtgactcaaatatacactttgtttctgttcctccaaatctcataaactgcagcagccaaaatgaagttagaaactgcaacacaagtcctttccctttgttgttcaaccattctgtccaaccattgtacctactaggccaagggacagctccaagccaacaaactagctggtcataaacctgagaagacaacttacaatcaaaaaataaatgccagtggttttcatgatcaagctaacaaactgggcatttcaagtttt

SEQ ID NO: 253312 - DNA, 625 bp, Cannabis indica
gagctgtacctggttaagaatgggggcgttggaggaagaaaccagttgagaaagtaaagtgacacgcctccacatttgtgtcgagttgtttatgttgtgattgaggtgttgtttttacaagtttttgttcagtcaggcaaatggtcgagcaggttgcgcgctaagttgattaagtaatgttaggcataggaggaggaaggccgagtcaaatcgggggtggcaggcacatattgattagagattcgtagcttgtggaattcaaacgccgactcaccacatctccacctacacgtttactccttcaatccaagttagtttcttgggcccactcactgaatttcatgtgattttttggtagaaagatgttttttttagtaattacaagtgtttggttagaggtaatgaaatggaatgaaaatgaaagaaaataatttctatttcattcttttgttagaatgttattctaatggaatgacgtttctactattttagtggaatgacaattctattttgaaatggaaggaaaaaccaattttatgctgattataaaaaaattaataattttttttatcaatttttttatatattttaaattttatttaattcctatttttattttcattct

SEQ ID NO: 253313 - DNA, 617 bp, Cannabis indica
caccttaaaggcaatactaattgaatcaatattcttcactcacttaaaaatcttaagttttgtactgcctgtcagttaggtaagagtcataggcttccctttcccttgtcaaataatagagcctctcaacccttagaaataatacatactgatatttggggtccctcacatgctgtgtccatagacaagttcaagtactacattatattcattgatgactataacagattctcatggatatttcctatgacacttagatctcaagcatttgacatttttattcaatttaaaagtcttgtggaaaaataattcagcttaccaataaaaaatgtacaagctgatggaagaggtgtgtacaagccttttgagagattcttaagagaccaaggaatcaaatttcaatttccttgtccatacacacatgagaaaaatggaagagttgagagaaaacacattcatgttattaagattggtttgacacttcttgcacaatctggattagatatgccttattggtggcattgttgggaatattttactaggatctagatttactaacaagtatgttgattaactgtaaagcccgcttagttaatttggaaattagcagttgttta

SEQ ID NO: 253314 - DNA, 902 bp, Cannabis indica
atagagacaacctaattcttaacctaacccattattaatttggaaaaaagaagaatagactatattgatattaatttgccaacaatttgtgccttttcatatatctatttgtttcacctaactattcatttgaacatttgttgtggttattagagtggtaactattcagtttagttattatattgtattttaaaatacaaaataataaaaaataattatgtataattcttatgttcatatttgacaaattagaattacctagaaaaatgatattgaatatctaaattagtaatattttgtaattacatagtttctttttttaaaaaaaaaaaagaaaaaacttaattaattccatcctagagtgggagagtgtaattacttcttaattacctctaattatatagttattatgtaattatctagttgaattcatggacagacccatatagaaatgaaagagggcaatcgctttctaaaaaaattgaaatatatatatatatattggctatttataatatatatttataattaatggtgataaatataaacataataataactttggcatgttggttaaattatctcacacatgttatagaggtcaaagattcaaatcctagtaaaaacatctttatttttaatgtatactttacttttgtccccccaccacaaaaaaaaaggtgcccctcaattttagttctaggtccatcactggttgaactaacacgccaaatattataattactaccaaataacacttaatttcaattacacgaggtgttatagattttcgttaatcaataaatgaacctcaatataataaataaattataggatgataatgaataataataatgaatataaacaacaataatatttttaacgtagttttgaagttaatt

SEQ ID NO: 253315 - DNA, 621 bp, Cannabis indica
agaaaggacattctattataatactattccaatagttaaaaatacaactaaacaaaggaataaaataaaaattatttttttttcattctattttattttattacctccaacaaaatgctattttagtgttattagtttacaattttaattgaaaattttgtttggaagttaaaaatgtgaaaaaagtagcattttagaagctagtagttaagttacggcttgactatattgggtttggtcacagcttgccttggaggatgaaactttctttggtttggtaacgaagcaaaagtaaaaattttcaatgaagcaatatattgcaaaaatcatcaatgtatatatatggactgacagtgtaacaaacatgtacatgttatacataattatataacgtatatatatatatttatattatttatatatatgtggtatatatagacatgcatgtactatatatattcttcgttaatatttaataaaataatttattaaacatgtacgtgattacatatataagagatagtcaccacacgtttaaagcaaaacatttttaaaatattatacctttagcccagcaatttactattagttaagatgtttaagtttatttaattatatttt

SEQ ID NO: 253316 - DNA, 1009 bp, Cannabis indica
tttttccacataacgatagagatcgtaccagcttcacatgtcttcacatctttaggaagagcaacaccgcaaatgtagtaggtcaattacatcgaactgtgttcaatattgagaggaacttgttgaggagcaagatttgtactatttttagacacctttttaatgcatcatgtcctaatcattctatgggttgtagaaaaataaaaccttatatcatatgtatacactaattattaaaagtttctgtgcatgtttactttcacttgatcccttctcatgtgcattccttaaaccttttcttttcttttatatatataaaatgtaaagtatatatgatcatgttggcttggcagtaagttcatagtatttcaacttgaaatataaagttgctggttgatatacatatagatacgtactacttctactactactatttgtattgcttttattaaaaccttttccatataagcgatccacttgaattgcgtaagctagtcagctcagcaagattcactcttagcttgaactgtagccccggacttcaagcagtcgaccggaggtacagtggcagtttcaagctgtccatatgccttccaacagaaagggccagataagtgctgacttgcttggactgatttcaactgtatggtgttcaaagatactccagtgcagggcaaactatcactgcaagctaaatgcactggttcctttgtgtaagttcctttaatatttatgtaatgtatgtctctaacagccacagctgaggtctgattcgaacacttgctcttgtcacaatagaattggtctatcttgataggtgtttccacttcagatacttgaatgttagagaacataacattttgtactgagcctgatcctccctgtgttgggaaaaaagataggaaacgcagtcaagactcttaagaatcattcatatatgaaacttcataatttgttaatgatgttctgaaaagatgtttgtaacactgtaccggccatgttttaattc

SEQ ID NO: 253317 - DNA, 1033 bp, Cannabis indica
cttggctcagacagaaaggcttacgttcactattgtatgtggatttttgtgttcaaaatgttcgaagtaacatcgagatacatggttgagatttaggtacgtccctaatggttagccagtgattgtataccctcaaagtcctagctacttaattattataaaatatatcataaatgtctttgaccaaattaattggatatcgtaattaaccgtcgtatttaattataaatattaattcttattcaagaaacgtgatctgctcatataaagcatatcttaaacggcctagcaactcttgtaatgtatagatataaaatattaatttatatatatatatatagtcgagaatatatattgaagaaagaaaagaaaaaggaaaagaaataagctttacgaactttctcttgcaccaatgcccaacaagaatccgtctcatcctcaagacgatgacagtccatccctcactactataacaaagtgataataatagaccggccagatatatatgatatatattgattgatatctatacaaaaggaacattctcaacctaaaaattctatctaaatcttgcctttatttttcttccaatattataatctatatatataaataaaatgtgcatttattggctaatgcatctatgcatgatgatataaataatagtaagtattacctatttcctataatatatatgaataggagtactgataaacatatacatatgttacacgtttgatgattactgatgcattcaattaaaaagccaggataaactgtattcctttatgcctaagggttgtgatacatattgttcaatttctctggaccccatttgaatattcaatacatgcagattatcattaattagagtgcaaaagtaaagatttggggattgataaacggacaaagtgatgacaagaaaggatattgcataataatttatattgatggtggaagtttctcaattgtccttttctttcccttcatatgtattatatatatagatacgatcactcatgatgtcgggtcc

SEQ ID NO: 253318 - DNA, 644 bp, Cannabis indica
tgtaagaaaccttctgccatccataacaagaccatatcttttttactaaatgcaaaatcttttggaaatagagagcagtgagcaaagcattgcttcaatttagaaggtagataaagataactcaaccacaaagatggaagaatattaacttgttttctttcatacaactcccatatatcattgtttaggatgctctcccattcctccttgcagcgcgttcctcgtaagagatcaccaattgactttatggccaaaggaagtcccttacacttagcaacaattttttctccaacttctttgagatgcaagtaatcattggtgtcaacatcaattgaggcatgatttacaaataaagcccaactatcctcgtccgaaagtggctttagcttataaattgactcggttttcacaattgaagcaacttttgtgctacgtgttgtgacaataatcttgcttccttgcaatccagatttgaaacaacttctcaagacattccatttagtgcaatcttcatcccaaagatcatcaagaacaaacacaaacttcttgttactcagagtcatctttacttcattttgaaggtcatgcaattccttaatttcacatttcctagaagtgaccttctccacaattgacctcatcac

SEQ ID NO: 253319 - DNA, 1159 bp, Cannabis indica
gttgaatttgcatcagacttgccacagttttcctcaaccagggtgagtagaactgacataaggttgctgcagatcaggtatccaagggtctgacaaaatgctgtgtcaaccagagccaatgcgaactctagcaccagcttgatgacatctttcgattcaactatacttttccaaataaggcttggattattgccaacattggcattgagaaaagtatactttgggaaaatagcgagccttataaatcttggtaaccagcgaggattgatctgttaagaacctccaagcttgcttccctagtaaagcaagattataatttctgatgtctctgaaacctattcccccaaagctcttgtgtttacacaacttcttccaacttacccaacttactccttgcttgtcttttgaagattgccaccaaaatttgctcataatactttcaaggccatgacaagtttctagaggcaaaagaaagacagacatagcatagctaggaaaagcttgtgctacagtctttaaaaggatttcttttccagcctttgaaagaaaccgactctcccactggtttattctcttatgcactttggtttttaagaagcccaaaattgcatttttgtttctaccaattaagcaaggcaagccaaggtatgtactagactcattagctgccttaattcccattatctggcagaccaaagtacgaatagcaggcagcgtgttactactgaagaacaaagaggatttatcgaaattgacagtttgtccagatgcaagctcaaaaattctcaaaagttggatgacattggaggcttctctctcattagctctgcagtatacataactgtcatcagcgaacaacatgtgggaaataactggtgctccatttgccactttacaacctctaattcttttgctagcttcaaattgtttaatcaacgatgaaaaaccttcagcacaaatcaagaataaataggaggacaatggatcgccttgtcgaatgccccttttgggaataataggacccatctctctaccactattgagaatggtataacgaaccgaattcacacaattcagaaccaaccgaacccattgagcatcgaatcccatcttaagcatcaattccttaagaaaaatccactcaactctgtcatatgct

SEQ ID NO: 253320 - DNA, 664 bp, Cannabis indica
aaagtgtgtttgtttgattaactttgattagttttatcttcaatttctatttagtaagctagcttctaagtcttgtagaaattactatttttagttgtgttcatttaattgaatgttgtttgtttgctgttaggaaagaagaataaaactactagggaaaaggaaaggatgcaaagactgttgggaatattttaccaggatctagatttactaacaagtatgctccattaacatcctaaatatgaattctctaaaacaatgaaataaacacataagggtttaagaaaaccttacattgattgcaacagaatatgagaactccttccgttcaagatctctagcctttgattcctttctgtagcagagcattatcaagatctaaacttggatctctttctctccttcgggtttggttaccaccgtcttactcactatgattgagtacttgacttgttatgtatgggcatgtcacttattcactaagggttcgaataggtgaagaacaatgaaggaggttttgaaatcactaaggagggaactccctcatctagttttgttgaaggcattaatttgacaaagtgtcaaaattagatgacatgagagcatcatgttccttttatagtgtttaaactagggcttagggttgaattatatggattaaaaa

SEQ ID NO: 253321 - DNA, 530 bp, Cannabis indica
tgttggtaaaagggttggcaaatcaacgttggtattaaaatttttatcggacgcgaaaaatgaaaaagtgttagggtcaaaataatttttttcagcatgtaatgtactggtaaaagtttgaattttaccactgtaaatgtgcgttagtaaaactttaatattttgttagcgtagtttacaagatgcgctggtaaaagttacttttacgagcgtagtaacgaactgcgctagtaaaagtgacatttcttatagtgttgtgtcgctttacatgcatcgatcgatcatatgatactcatctcattagatactttctattcaattataattgacaacaataaaatacatcgccatgaaccaatgacaacattcaagattgatgcacctctcaaccatttgaggtgcatcaatcttaccctcttgagcatgtatcttgagtcccagatgcctactgaaattaaaaagtgtgataaaaaaaaagtcattgcatactctgaggtggagataggttaattatttcaaagtacatttga

SEQ ID NO: 253322 - DNA, 836 bp, Cannabis indica
ttcatggctttcttctgatggcccataaatttttttgatatatttggattgagattacctaattgctttgattttgatagattctttgttgttgatttatgaatgatgcaggcatacatgtacggattctttaagaacaagtgaattgttctctatcatcttatccatttgcttaatctttgcacaactcactctttctctcaccaccacaacacttttgaataagactcaacttttgtccacatggttacatacaagattctcctgatatctacaagcaagagataataataatgatatgagatagtaaccaatctcaataagttaatgaaatcttaaaaatggttaccagatttcgccactgttcattgcagtactgatccaatatcaggaaggtcaggggccacagaatcttaaccatctcttcttctcagtgtacttgagacaaggatgcataacaagccgaattatcacaaccaagaggcttaacaccattaccttcaaagaagcaagggctaagaccacaaaaatcagcagggttggggggatacacaacataattgcacctgctttacccacggggatcttataaacacaacatattacagataaattatcaaactttcttaaacactaatatatcgcatctagaatttacttttaattgtcaaacttataaattatattacttagatatacataataataatttcatctaataactagtaataatttttctttaatctttaattgtatcacttttatataaagtaaaaaatatctagcataaaatttaatatacttgtctcgtaggtaactttttactagtatatata

SEQ ID NO: 253323 - DNA, 546 bp, Cannabis indica
gattaaatataaaaggtatcaaatcaataagtgaaaatattagtaacataagagggtggagttagttactttttataacttctacattatcactaagaaagtttgtaaagagatgttgcacaacttaattttttaaaattcaaagctataatataatcgttggagatatttttatcatttataatatgtgtataagtgataaaatcaagtgagaatactttaaaatgctttagaaagttatttacaaaaattgaaaaatttagtaacagttactagttactgtttagttttttaatttgaacattttttgacaatgagaatgctttctaacagttccaataactttcaaatcacccatttaatctcatttacactcaattaagagatgataaccgtcataaagtatagggtattgaatttcaaaatgtgtaattataaatacaataaataagtgcctaatgtattcatataaagaagatgatagtttctatatccaaaaaacactttgttagaaattttaaaggtttgataattctcaaaactatt

SEQ ID NO: 253324 - DNA, 371 bp, Cannabis indica
agttagaccttggtctatccattgttgtggaaattcaggagggatttggagagtaactaactgttcttgctctgttgctgggaggttgcattggtcaaatttggtcgattggacatattctttgactgttttagggttttgtttaatgagggtttttatcgatcgtgtaaaaaggctttggggtttggagaaagcttgatatgggtttattaaaggaaggtcggataggatgactttcccatcatcagaaagatatgagacttcatatagagcatcaagtttgctcgcagaagatcgtcgtaaagatgggctagctgtaagaggcatggaaactggggtggtatgagtggagagttggctggaagactcaa

SEQ ID NO: 253325 - DNA, 1525 bp, Cannabis indica
aatcttctaacacagcagaggcagccattggaggaacatctccatcccaaaagctagaagttttacaacataaaacatccttaactataaaatgtgccacttcattccaagtatctgatcgaaaagacacatctatgataccaaattccataatcaagtgactaagatttacaacaagcaaatcccattcactagccaactcaagcgaccttcctaacatagctacaaccaagctacagtcagaagaaattatacatcggtccaaaaataaaagaccagtcaattcaatcccatgtttaatagctaataattcagcaatactagaataaaagggtctactcaagaatataccttgcgctgcgataacctcccccaaataatttcgaaccaccccaccagtactacagtaaccatcagtcttactaactgcagcatcgacattaataatcacctccccaacccccagaggttgccatctacactttggcctctcaacaaccagtcgcccaccatgattcctagcccggaactcgtgtaaataatcagcaacccaatataaaagcccgctccacttttggaacaaaagcatgatataaagcacaattacgcatataccaagcctgctacgttaaggtaacaaagatatcaaacctctccttaggtagcacccttgcaatagggctaagaaagtcaataggatcttcattcccacaacttctaacaatcttcccaaaatcagcaactttctaaagattaaaagcgcaaccccaaatagcatgaaatcaatcttcatcctctaaatgtaaagcacatctacaacaccccgccacatctctcatcccgcctcttcttaagcaccgtagaagtgggtagccacccatgacaaaatcgccaaataaaatgtttgatcttggtcggcacctataaaccctaaactcgccgccaccattgctccacaccttccattcgacccctccactctttccttcttcttgactgccacttgatacatgctttataccgaatactccctattcttattatagtgccaaataatacgatctttagaatccaatgtaccaggcaccaagctaagaataagagaattatcgttaacatgaaaattaacttttaagaactctaaatcccactcctctgaggccaacctcaaatccaccactcgaatatctggaggtaaaataggcccaaccattaaggagaaattggatggcctaggcagccatctatcctccacaatttgaacctggtcgcccgacccaattcgccacctataaccctcccgaataatctcccttccccataacaagcttctccaaacaaccgaaggacaagaacccatcttagcactcaagatatctctatttcccaaaaggatattattgagtacactccaaaatttttcttttaaattattacaaaaaattcctcaaaaaacaagaacacttaattgatttacgaagagaatgatctcaaatggaaaataactaatgggtacatctttcaa

SEQ ID NO: 253326 - DNA, 535 bp, Cannabis indica
caattaaagttcaaccaataaagtcatcgcttatttcgccacaagaggagacaacaatcccactgccgggtacgctgctgaagctacacatctaccatcatgatctctaatgaccactccatatcccatacaaccttcaaatacttcgtagaccagcattcgtattgagtttgaaccatcccactaatggaaaacgccaaggcatttacgtttggccttacataggacaacccagttggaccaccgtagcaccttttaaagtcgattgtgcctcttgatcattactagcaaaggtggaagcccaacccacgataccttccacatctaataatttatgactatgtacccaatcatttcgacgataccttatacgcaataggagctccaatacccgagccatctcatctttatgaagaataaactcatgagctcataagaaagacaagatattcacccttggtaaggaagaagcaagcaacacaaaatctaccattttcaccactagacagactagcaatccccacaaagcatgaaa

SEQ ID NO: 253327 - DNA, 851 bp, Cannabis indica
ctcgcccccagcggttaatggatcagtagagatccctacatgaagggctgtaagttgtgtactatcatccaaatttctaaccctagcagcagttgtgctaaaatgacttaagtatgccttaagcgtctcgtcgggctgttgctttactttggctatcgaggccgcttcgggtcgtctatttattgcagcatggaactgtttcttgaaatccttggacagctgttcctatgaagttattgaatggtgagtaaacttgttaaaccagctgatcgccgctccaacaagcgaggtgggaaacaagatacatcgtaaattatttgtcacattactagctcacattattgtgttgaagttgtttaaatgcgagaccaagtcggtggttccattatacgatgagacatgtgggttttaaaatcttgagaaaaaaggggtattcatgatatctgggtggtacggctcaagctcctcgtatgagtcgtatccagattgtctccctaattctcccacttgatatctcttgaacttgtcctccaactcgtctattcgtaattggataggatcctcttgctttggaccgagttgttggcgaagatcaggtttcttccgattcaagtgctctcacaaattcagttgggagtaattgctggtagacctcattttactcatagattgcgtcccactcacggacctcgttttgctcatgtacttcatcctcgagtgactctcggatttactggtcccatgctttctcaatcattagctcgtcgagtactttttcctctttgagttgattgactatggtccttgagcgccctgaggtcacacttgcttcctcacgctctattctttcc

SEQ ID NO: 253328 - DNA, 618 bp, Cannabis indica
aggtatatttttgaaaaacactaaaaaaatatgtattttttaagacttcttttccttttggcccctagataggccctaaacacggcctaaccttccttatataaacaatattgctagttatttacaaagtgtcacctaatggtattatgcactagtaacagggctggccctaggcatagatgggctatgcttgtgcctagggcccacactttttggagacccaaataaaaaataaaaaattttattaggctttcatttaagtaaaattaaagtgtactgtaagtagtaaatattcataatttaattggttgaggtggatgagatattattcaaggtcatgagtaatttgcagtaatatatatttattctttaatttaataaaaatatataattttttgaaagcaataacaatatatattttaatttaggatagtatggagtaatatctaaatttactcccagctgcaaataaaaagttaagtttaatttttgacggtaataatatttaagttataattctgaaacttttgtaagtacttgacctttaagtgtcaaaaaaattaccacgtgacaatctctgatttgttcaaatcattaaattttattttatatttaaaa

SEQ ID NO: 253329 - DNA, 949 bp, Cannabis indica
taaaataatttccaacacttagtaagtttttttttattatttataaaaatcccacatccaactagacttacattattagcatacttctatattataaacaaagtattcttacattcattttgatttgtccaaaaatatagatgtgattgataacttcatcttgctcaattgatttataattttaatttttttatctattattttaggtcatcaaatcaaatttatatatttatataatgtatctatatatttataagcaaaaaaaatatgacttagcaatctattattttttattccatattttttatttatttctgatatttgatatacttactcaaaaaaattatataaaataataaattataaataatgatagaatagaatttaattatataattaaattaataaatctataatcaattcttttataataattaataataatataaacataaaaatattatgttttagattatatcactcattataagtacaatatatacttatatacaaagattataaaaatttgggaagaccgtgcaaagcgcggcttagttctctagttatgtaatagaagggtaatggagatgtttccattatactatctaattctcatacccttatgataattgagtgtaattatatggtgttatttctaaaactttttattttaaattgtatattagaaattcataaataattattacctcatatcgacacacatcttgtaattgtatattaagagttcaatttatacttctaatttttttaaaaaaaattaagaatatagtgtaatttttttttaatttcactaatatatagtaaaataatatattattttatatatggtatttaatataattctatatagagattttacataaattttcaaaaattgtgggggccacagccctattgaggtacatgtggcttcgtccctttgtgtgat

SEQ ID NO: 253330 - DNA, 1749 bp, Cannabis indica
accaccacccaccaaaactagccggaccaccacccaccacgacctcaaccgcgcctcaaccacgccggaccacaaccacactcggtcagaccttcaaaagctttatttcatcacaaaaatatcttcatttttctcaccccaaaagcaacgggtaagtgttttttatacaaaatattattagtttttattgtattgcatggatctacacattattcgttgtattatgtcgtttttgtgatctgaaatgaaagtagagttcgtacccgaacgctggttttttcttggatttttcgaattttttgcgattttgtacaccattgtgcgatttttgtgcgatgccaacagaaatcaaaggttagggatgactttcattctttttagcgatttttgtacaccattgtgcgattttgatagttttgcgatttgtgtgcgatatctttacatcattatgcgatttggtttttgttttctttttattatttcattgttgtgttttttgtgcgacattgtgcgatattgttttgtgcttgtgcgattattgtgcaacatgttattgttacataaattttttaacttttcatttgattttatgttgtagcatattcccaaaaagtttactaccaaatacggtgaaactttatccaattgggtattaattaagcttccatgtagttcgaaatggaatggggttaacaaagaaatatgagaatatttgatttgagaaggactggctagattttgcaaagcattatggattaaaaagaggaagtatgataatatttagatatgcggggaattctaaatattatgttgtaatatttgatttaagtacagttgagataaactacccttctgtgcctaccacttttaaccttctgtacagttgagataatcctgcacaaacgtcacacaattataaaaagatatcgcttaaaatcgcatattttgtcaattaagaaaattatcataatatcatagtcaactaaattatgaaaaataaaatcgcaaaaacatcgcacaaatatcaaaagatatttcataaatgtcgcctaaacatagtaagggaaacttggtgtcattcatgtacatgtaacagacttctaatttcagttcatgcaccaaagggtccacatccaactcttcatacaaaacttcatgcacattttccagtgtagtgtcaatgtccaacatcattgtcttacttgttggggaattgaatacacagtcgaaaccctccatagcccaaacaccatcatatagtatagacacaagtatagttgaatctgaccaagaaaaactacaaacaaatatgaaaataaatagaaaaaattagcctaacatatcgcacaacatatcgcataatgttgcacacaagaggcaacaagaaacaaataaaaaatgaaataatgtcgcacaataatcgcacaagaaagaaataaaatcgcataatgtcgcacaaaaaaaataatatcgcacaagcacaaaacgatatcgcattatgttgcacaaaaaatacagcaaggaaataataaaaaaaatattgcataatgatgtaaacacaaatcgcaaaaccattaaaatcgtacaaaatcgtaaggacatcatttaatgtcaccaaaaagaatgaaagtcatccctaacctctgatttttgttggcatcgcacaaaaatcgcacaatggtgtacaaaattgcaaaaatttgaaaaatccatgagaaaaaaaacaagcattcgggtacgaactctact

SEQ ID NO: 253331 - DNA, 531 bp, Cannabis indica
tatttctatcttgttttttttaacaatgaaataatatttcataagtacttattgattagtgagtcatgacattttcgagaaatttttagtggagtagatatggagtatcccacgtgtagagatagagatagagtattagtggtgttgaatattatttagaaatgttatattattagagcattgctatatgacaccagtatatgtaatgatgttgtgttgtgattgattagtgatactttctaaaagctattatattaaattatataagatccgatacttagttggaccaataataatattgacacataagagctctaagcatcactggtgacctttagcatttctcatattattatgaatataatttaatatttagggtcatatatttttagtacaatgatactattaatttatgtgaaaacagtgtaattttatataataattaatctttttttatttttttttcccgcaaagtgaatatagtaacaaatctaataaccgatagaccaaatccaaggcatgggtgaatac

SEQ ID NO: 253332 - DNA, 644 bp, Cannabis indica
agttcttgaattatttcaaagtcgtggtattctaaatatatatttatatatactcatctgactgaaattattttcaaaaactcttttagtttttttatctttgttgttacatgtgtgtttatgtacttattcttatatatttattcacatatttattatataatgatatatattatctatttttattatttataatatattttatataatttgtgtctacaagagaatatatatatatatatactacaacaaatttacatatatattactggcagaaataatactgacagatgttttttgccagtattcattggggtattaccggcagaaaagtccatccgctggtaatagttaataaattttaatttgtaattttttaaataaaaatattaataccgatggaaaaaatttaatatcagcagaaaatccaccactattaatgagggtggaaattttaccgcccaaattttgaaaacagcaatgctagcgaattattaggggcgagatccgctggtattgctagggaattctgacctttttttattactagtggaattccaattaatacttgtgggtcccgccggtaatactgacagagggcattccaccgctaatgtctgccgctaataaattttaaaaataaa

SEQ ID NO: 253333 - DNA, 618 bp, Cannabis indica
gatttatcaaaaaaaaaatattgatttgacataccattttttatttatttttaatttaataatatatattaatttgcttagcaactagtaagacatactattttattttaggtaacactttaaatgttctaattgtgtacaaagttataactcttataactaccacaaaatattttttttcagctatgaatatagtaaaaattatacttcgcaataagatgaaaaatgaatatttaagtagttgttcctagtattgtatattaaaaaagagaaattgtcgaaaaaaaatattagtataaattcacttatcgataacttttatgatatgtaagaaaaaaattctgcgttttaatttaaattataaagttaataaagtatttttaaaatgaaaaaacaaaacaaaggatataataagaagcttctggacagtccgcctgagagtgcatgccctagggttcgagatgcctcttttcctgtcagtgttgccgtcgtcgtcgccgtcaatcggcattcaagtccgtccgtgggttcatccattgtgtgacggttccatctcgagcaaagcctccctgtcactgaagcttgtggctgttagcagacggactctaccattcaagt

SEQ ID NO: 253334 - DNA, 579 bp, Cannabis indica
atttcctttgatttgggagacttctcaaatgtgtcaacatcagaatgtcaacactaactttgatctttggttgctgtcttacaattggctctcttaggttgtgtaatgaccacgtagttaaatcatgggaattaccaaataataaaaggtttaattattagtatataattttttgcctcttagtagaaattagggcttattttcataaataagtcttagggaattatttttcaattacggagatatatttgaatactaggtgcattgtttatattatatattagttttcatgaattgcatgttcactgcccgataacagtggaatgcaatgatttggcctataaagtcttttagatatgggttagtattctagaattagtggggcaatatagttagatatttggaattttggtctactcggggttatggtataggacaaatttacccctaagattttaggttactttgtggtgaaggaagggcaagattgttatttcatcataagttaagcaaattgatattttagtaggaatttcatagttaggctgattgtttcgggaataagaccaaagaaaatgg

SEQ ID NO: 253335 - DNA, 597 bp, Cannabis indica
tagaaattgtatatataataacatttgagtatttggttaactcttaattattgttattattattattattattattattattattattattattattaatattaatgttacaatgtatttagaattgatattttgttttgaaaagtattaattattatttgttaaatgatactttatttattctaaatgttatgttgtacacaatcatgaaaaaataaatacaaaatagattaaatatttttgaatatgtagttggactggaccttatatatatgagccaaattattttcgtgaaaaagtgaaaaacacaaaaagggaatacacataaaccctacactgaaaaaccctacaaccatcttcttccttttttggtgttcagttgcctgctgaaaaactcattgcctgctaaaaaacatggctgaaacaggtacttaatcaaaatacacataacattcatatactattgaagtttcattaccattttattgattgattataaaattgcaaaaagatttgatttcttcatttattctcttcatttaatttaattgcattctgtaatctatggctccaggatttcttccatatttattgatt

SEQ ID NO: 253336 - DNA, 764 bp, Cannabis indica
tcaataaatctccaacttgatttcaatgttgaagttggttaataaatcgttgttaaaataccgttgtcccctcaactcctccgggctcagcttcaggcagtgctcaaacttaacacttggctctacctcggttatcatgttagaaggatcgtcttcatttggaactttggaaatcttcacaacttctttctccacaacctctcgtacgaaatgaagcttgaagtcaatgtgcttagatcatgatgcatacaattcttaattaattaaattgcactctggtaatcacaatgatcactaataaccttctagttgagtttcaactcttccattaaccaagttaaccatagtgcttccttgattgcatctgtcaaggccatatactctccttcagttgtcgatagtgccacaaccttctagagattttccttccaactaatagcagtttcaaacatatatagtaaacacatatctggttaaagactgtcaggtatcaatacaccatgcataatcagaacccacataaccatttatcacatcaaagtattcattccggttattcatgtcgaatgtcagttcccttcaaataatgcataatcaatttcagggcttcccaaagctcttttcaagatttcccatgaatctacttaccatgctcaatgcatatgtctatgtctggtctaagtaaaaaccatgacatacatcagaagccaacaacactagcatatggaactctcgatatctctgactctcagtctcttcttctg

SEQ ID NO: 253337 - DNA, 587 bp, Cannabis indica
agttgtatttcttcctgttgtcggcagaaacaggggctgttgaaatatggtagtagagacagaattcttcaaatggacatactggcatttatgcaaccaaggagcaaacaagtttaatttgtgagtaacaaattcagagacatccactgctgccccatgaaatgatgttctaacaacccaatcaagagagcaacaaccatttgagtttgccacatttggcagtgctccacttctttgagcagctgccaacttttcttgaacgaaattcacttgaaaagccacttccatcgtatattgcagaagaaaaacatttaaaagttgtgtccaatcagcttccttaaaccttagccatatagaaaaactcaaaagggtattgttatgcccctgtcgtaaacccagtgaccaccaaacactatgtggtttagttgaagcatagaaaagacaaacctctcatctacagaagcactcttctcaacaaatttgagctgatgttcttcctgtcttcctcgatcaagtaccaacctaagaagactgatcgtgtgtgtgacagttagtagtcccgtgatccgtaaggggaaacaccgggt

SEQ ID NO: 253338 - DNA, 1115 bp, Cannabis indica
catctcgcaagttatggccttacatccaggaacatatgattaaggtgttaactaattaacccctgagacaagttttatcaaaaccatatgcttctggaagattgataaaatggtcaattgaactgggacagtttgacataacttatcactcaagccttggtggatttcctaagagaaggaataactccagaggaaaatccgcttgttcagtgtgacgcgaatacttgaaaattatacttggatggtgcatccaatgagcatgactcaggtgcagtgatattaatttcgccagaaggttttaagtttcacagtgccttgagatttcaattcgactcgtcaaacaacgaggctgagtatgaagccttgatcgctggtttgaggatatctgaagtgttgaatgttaaaaatctcatatgtcatagtgattcacagctgatagtaaatcaagttctcggggaatactaggctaagggcttaaaaatggccaagtaccaagagaataaaactctaatgtcaatgccttagcaaaactaacctcgcagaaggaattggatgaattaaacttggtcccgatggagatgttaaacgaaccaagtatatgggaaaaggaagatgtcaagattatagatagatcacccacatggatgacacccatagtcaattatcttctcaacgggaaacttccaactgacaaaaatgaggcacgaaaactcctgtatttagtgcctcgctacacgatggtagagggaaaattgtatagaaggggctatttaatgcccctccttcggtgtgttcttcccgctgaagcaaacgagatcatcaaggaaatccatgaaggcttttgtggggatcatgcaggttggcaatgtctatcaaaaaaatattattagacaaggatattattggccaaccataaacaaggatacccttaaatttgtcaagaaatgtgataagtgttggaatatattttaccaggatcttagatctactcacaagtatgttatttaaacaccctaaatatgaactttctaaaacgatagattaaacacatataaagttaagaaaaccttacattgatccaataacactgatgaaacagggaccaagtcttttga

SEQ ID NO: 253339 - DNA, 2810 bp, Cannabis indica
aaacatgaaacactcatttgtaatcttaaaaagtacatttaatttttgttaagaattatttgacgatccatggaagcttttcatgtagcttctcttttcttgttttcagttatgctgttttctcttattgacataatgagttgcggcgactcctcttactttatccagtactgcaacctatgcatattcattcttcaagcttgataggagatttatgttaacaattatttttatatttttgaataatgtgaagttattataagatattaagaactttattttagtttctagaaaagaagttcacgcttgacacattatttgtgggggactaagttgataactttccatctcaccttttagctatttcatacccttgagaaatttggctatcttgtatcgttagctgtcttattggcattattggtgcattgtcaaattctatagctgtttaatatcattgcaaaatcattttatcacacagttactgttttaaccaagaaactttactgctcagggtcgaatttcggattcctagtccaggtctgcatctggctctcaatgcatgtgcagcagctgcagtggcaactcatttaggggttcctctgacacaagtcgggcattccttgtccacgttttgcccagttcacatgagatcagagcttcaagttgctaaaaatggcatcacaatagtgaatgatgcatacaatgctaatcctactagcaccaaagctgccattaacttactaaatgacattgaatgcaggggcaaaagagttgccatacttggagacatgttagaactcggctcaaatgagataaagtttcacgagatgattctcgaacattgttgcaatgcccatatcgatttaattggccttgttgggacgagactcttaactgcggccaagaatctgaacttggttgagcataaaaatgttgtagttgcccatgatgcaaaaactcttgcactagaaattcttaagtggattgatcctgatgatgttgttttggtgaaaggtagtcgcggtatggaaatggagacagttgtgaatgcattgaaggagacggaaatacaaagtggaaattagagttctacaacattgatgaattatccaactaacagaagctacaagcactgatagtaagtggagataaaaaaaaaaagaacactgaagtagtttcatgaaataatgagtgactgacctcgtgtgtggaatggaaatttaaaagcatattttttaagccattagcttaaatttgcaatatttaagtagtaaatttaaaaatgtatcgtttggtttggatgcttctctgtcatattaccttgttgacttgattttcttaaactgttggtatttatattaagaaagcatattttactctttttaactttcaactcagcttaaatcttgacgagaaatggctaaaggttttgtttttattatgtttgccaggcatgtgcacttgcttggaaaggaatcaaagtttgttcatggagtcctaatccaagtctgaggctacacaaaatgagctgctagctgaaagaaaagggatccagattccagatgacctacagaatgacattagccatacatcatgggaatttacaatccagcgaatgttaggcacgttcctttctggggtcgggtcaggtcatcaattaccaatcagtaggaattctgaagttatgggcgtcatgctcgaaaactatatggcaacttttttgaaagatcatgattccacttgctttcgctttttgcgcatttgcgttcttctggatgcatacaaaccgcttctttggggtaagagactttagtttgaggatttccaaaccagtttatgggtggagtttaaatatgaaagacttgctgaattctgtgaattttgtggacgaattactcataagacagatgaatgtccgctgtcttaaatcttcaagaacaaggacttccttctgaacgtacctatcctccaattcgcactgctggtcttcccatactcgctttactcgagcctccagtagttcctccttttcaacaaattcctgtgataattcctcctattcctgtggtgcattcaggaaattatggttttaatatactctatatattacctatatgttcagttgttagcaaccttttgtgtgttgtagtacatttaccctttattcaaccttagtggcttcctatggatgggtgcaaattattattttaccccttattgatatttgttataactattaatgtaacccaacctctataaatgatctattgggtacaaattattattgtaccctttattgatattttattctcaaactcccagcaagctcctcgtaaatgatattttcgtaaatttaattataaaaatgagtactctattatttagcccatcaatttatcatttcacttttcatgtagaaactataaagatgataaatacttacattaaattatactactgatctttaagattgtatggattagtccgtagtgtgaagtggtaatgaataagtcaaaagattcaagttatataactaccgaaaatattatcattcaaaattaaaattgacttaaccaatagtcaacgttatgatactgattaaatttgatctatctatcaactctaatttgatgcgatgaaatacatccaatctacttagttaatgccttggataaggcatcactccttgtgtactccttatgtgtaattcattattgtgacctaatagttgtaattgtgattatccatatatttagaatcataatagactagtaaacatgtattaaacacgtaagtaatgtatttga

SEQ ID NO: 253340 - DNA, 477 bp, Cannabis indica
atactaaactctcgaatcgtcgcatgcataagattgatggcatggtttgagatttcgggtggggttttgaggaaggtaatcatggtatgcatctaaaggcttgggacaaattgtgccttcccaaatcccgtggagggtttggctttcaaaaaactaaggaaatgaacatggcctttctgggaaagtgggggtggaacctgttaactgggtgtcagtctctctgcagcaaaatcttggaagcaaagtacctaaaaggaaaagatttcctctcctgcaaatacaatgattctgattcgtggttttggaaaaatgtggttaaggccaaagcaattttgagaaaaaggacgtgtaaattgatcggggatggaaagaatacgagaatttgggaggacccctacatatcccatggacgggatttcttccctagggcaaaaggagttggtacgacggtgcgtagtagagtttgtgacctccttt

SEQ ID NO: 253341 - DNA, 731 bp, Cannabis indica
agttcgatctatgctagatttatcattcatggatgttgataagataagatccttccatttagtagcaccttaggggatggcatagccttaaagttaaaggtgaggttcaaacaacgaaaggcttacggtggataccaaggcacccagagacgaggaagggcgtaataaggaggaagggcgtaataagcgacgaaatgcttcagggagttgaaaataaggggagatccggatattctcgaataggttaacctttcgaacttctgctaaatccatgggcaggcaagagacgatgggtgttggggacccatatttactatcatgaggtcttttcttgtagctggtatattcataggtttttcctcgaatcattctttcatgaattactgaaagcaaaacaaaaattagttcattcaaattcaagatctaataaatcaaataattctaaatacctcttccaattaacgcttttttgattcccgaatatctaactgattaattaattctttataacgtattctatttttctttgacaaataagacagcatcctttggcgttttcccaaaattttacggagacctctctgagataaatagtcttttctgtgcaattccaaatgtgaagaaagttttcgtatcctatttgtgaggcttagtatttgaaatacaacagaccccttgttttcttctttttcttcgtgcgaaataatcgagataaatgacttttttaccat

SEQ ID NO: 253342 - DNA, 1282 bp, Cannabis indica
tgtgaaatagaccgtttaaacattaatttctacattgtaaattattttgaattttcaaaattttacaggatgtcttaaataactataacgtacacgattataaaaaaatttaaactaaaaaattcttatagataccgaaatatatttagggattatatcagtacactcattttaatgaggtgtattatagaagcacccaaaaatattttaacgtcgattttgaatgatatataaataaatttaaaagaacactagatttctagtgttcttctctcaaaatgttctactaaataaatttctagtgttcttctctcaaaatgttcttttaaattttctttaagagatttctgagatagtgatagtgtgcattatgggtcatacttaatagatattactgttatgagtttggtatcactcaagtataaagatactaagcaatctatcctttataatcgtaagtcacgctgcagagtcgtaagtcgtgctgattcttgtgagaacattgctcaagttatctttgatctgatgatgcttagcttatagcaggggagacgcaaatgcttgtatttgggtacgtaggttatgaaatgaggcaattgaggcaatattacatctttctacaattgatgcaaattctaagttaagtgatattcccaaattcatgtggatcaacatgagtacacataagcttttggacatatggacagtactacgaactatatacatatagagatcagaaatgattatatatagctataaaccacttgttccacttaataattaataatttcatttcgttatacacaactaattaatttagctaaataaatatgaattagggtttttgtgtgtgtaacacgcaagaaaagaacaagaaagtttcatcatatataataataataatataatatgttgaattaataagtaagcaaggcaagaatttaacaataatattgtagtgttttatttggaaagaaaaaaaagctataaatgaagaaaaagattattctcattggaaacattattaagtcggtcaactaccaattaaaatttaaaacatgtctcttctagaaagaataatgtagaatattaattacactagttcaatttgcatatgaattgtaattattatttcacacaaaataaacctacaaattaatatatcgagctatataaataaataatataataataaaaacttgaatttctagaagatcattgtattatttttgtttaaaccacatccaatgtgaaatttttgaaacatacgttcatatatcat

SEQ ID NO: 253343 - DNA, 674 bp, Cannabis indica
ctaagctgagagttctgttcttgaagaaggtcaagaacaagggggtactcgggttgtaagagagaaaactgtgactatttttctctggtgtgtctcgagagctacagagctgagattgctcttaatcttgtaattgtattgatactctcttattccacatattaatgaagaattggtgatgtttctcagctggagtatggccagagatcatgttgatctctaggaccggaaccaggataaaatcttgtgttattctttgtttaatttctgtttttgattcattgtgctgttaactgttttgtgttcattattgctgtgaaagttgtgagtttattgcagattataggattgattcttggtgatattgttgctgaaattacaacatatataacacctccaactaaatacacccccacttctataatttattaaagtattgaaattaaaatattttaaatgacaaagttgaattttctaaagttgcaaaatagtatcaatatccaatagactataaagacatatatattagtgaaatatataacacctcaaactcaacaccccaattctataatttcttttttttttcttcttctttaaaaacaaatcccactttattaaagttttgaaaatatcttaaatgacaaaattgaatttttttcttaatcatcatacaa

SEQ ID NO: 253344 - DNA, 841 bp, Cannabis indica
aacttgttgggaaggttaaccataactttgtgctcgtcggtgtaagtagacaagtaataaaagtcccagtgtagttctttctggttggacacacttttaatgtctacaaacatgaaatctcatgaggcggaggcattcaccatccgttcatttggtgctaaatcttatatccattcaagattaactggaaatgagctattactacataattagtgtaatccgtgaaatagtcttttaacgaaagaatcagaccaactcgaatatgctccatgcttcaagcagtaattctagaaatacccctcgtactacactcgttatcattgttaatcaaggtggcgggtataaaatcctctcctcggggaggatggactgaaaataaaagctttcaccttattttataacataagatttgaaacactcactgagatagctaccaattaaggtgaccttaggcgtaaataattcagccccaaactgaaataaagggtttatggaggagccataatctaaaagtctaaggtacccgatggaaaataaacagtaaaggaggataaattgtaacgccctaacaattaggcacgctacgacaaccaataatgaaaccctaatcccactaatctgagattactagaaagataagagcaggaaaatttgaactttaattgcaatggaataaaaatataacttgtaataattttaactttttttaaacaaatcaaaagataacatgctttgggatcccacaaaactttctcacaaaatattacaagttagttcttgtgccgacctaagcgaaaaaaatatgagattacaaaatacaatcactggtagaccccaaccc

SEQ ID NO: 253345 - DNA, 521 bp, Cannabis indica
tagcaactaataagcttttttgagggaaaaccaggatcagttcgcctggagccattcagatatgatagagattgatcctaaaattatctgtcacgacttgaatatcgacccaaattacccagacaatatataaatgagacgacccttgtattcttagagacaaggggcactgaagcaggaagtgaataagttgttgagtaacgactttatacgcgaggaattttgtcgcttgtggatatccaaccctgtctttgtcccaaaaccaaatggaacttggagaacttgtattgacttgtcagatttaaacaaggcgtgtcgaaaggatttatttctactaccaaggatcgaccagttagtggatgctactgctggacacgagcttatgacattcaaggatgcctattctggatataataagattaaaatgcatgtccctgatcaggaacatacaagcttcgtaaccaacatgggacattattgttataaagtcaggccttatggtttgataaatgttggggcaa

SEQ ID NO: 253346 - DNA, 728 bp, Cannabis indica
ttctataaccacttttgttttttaattttaaaaataaaaaataaaagtatgttctgtaaattttatttttatttttatttgttgattttatttaagttaagttcgggttcaaagctgagatcgagggttgggtccgagtttagagtcggggccatggttcgtttgggtttcaaggtttaagctggagtactcagagtttaaaatattgatcaagaaaaaaaattgtttaaaatatttaaaagtgattttttttttttttattgtttttaaaattttgattcttaattaaaaatttgaaaagtgaaaataattttataaacatgattttaaaaaatattttcacaaatctaattttaaaaataaaaaatatattaaaaaagtattaacaaaccaccatatgttaaaataggagttaacattaacatatattaagcgtctatttatttatttattttatgggtaaaaaataaaatatggttatactatcgtaaattataaaaattataagcattttctaaaaaatattacataaaaaaaataagaaacaatgttggaaaaattcatattacacaatccaataagacagtagtataaggcttcttcaataggacactaaaattttaaaaatagtgaagttttgacacaaaatgttatcctattatatatgtgagagtctatagtgtcctataagaatattttttatttaaggaaatatatttttatttaaa

SEQ ID NO: 253347 - DNA, 629 bp, Cannabis indica
tttaaaatggaatagtcattccacaaaaatagtgaaaagaatattctattgaaatgtcattccaatactttaaaatacaaccaaacaaacgaatggaatgaaaattgttttttttctattccattctatttcattacctccaaccaaacgtcgccttagttctttaaaaagaaaaacccctttgtgaatctgagcaacttctgaatatataacaatagtaagaactgggcactacgagacgtgagctccgtcaggttggtggctccttcgagacgccaactccgactcatttcctcaggtgacggcagcaacgacgttgggaccgtgcgatcaaaattttgtttggtttagaccaaaggtggcatctttgggttaggttggcacggactcattggaccatcgacgtccaatcctcaaatcaacagtgtcacaaaccgggtttgttttgtatttgcgttttatctttagatctaattttcaggttcatgaatactctcttttagttctttgattttgtgtttagatcttttattctttttttgttaaagatttttattgtgatttcatacttttatcgttaatgttataagtatcggtgggagtatttatcaatctattaccactgcaac

SEQ ID NO: 253348 - DNA, 535 bp, Cannabis indica
catgactttgccccttaaaactttaatatgtaatgtcttgctgtaggacataatttttagatttgacaacctatactgatgtttggattctactcttttgatacattttcaggtttgatctgatttacttaattctagacaaggctgatgaacatactgacaggcgccttgccaagcatatagttgcattacattttgagaatcctgaggtatggtgatatatttgccaagtctcttgtttaagctctaatcttgggaaatttattaatcatgatatccaaaattctatgtcactccttgcagagcatagagcaggatgtcttggaccttcctacattgattgcatatgtaagctatgcaagaaagcatattcatccacaattatctgatgaagctgccgaagacttgactcgaggttatgttgacttgagaaggagaggaaatttcccgggaaagtgggaaaaaaggtaaaaaggatttacgttatcaatagatacagaatcgtgtgcacatgtgtctatgacataacagtctc

SEQ ID NO: 253349 - DNA, 692 bp, Cannabis indica
atttatgggagacacattatctgctgatgatgaatttttttctgctattccacataattcttcctcatacttccaaccaacattcatctgttttatctttttatcttcaaaattttcctgtaaatctatttctgcattcctttttgttgtaagacactctctgatttctttcatttctttctctaaattttgaattttatgctcaatgctatttctccattcatgatcattgatagacttcatactattaaaataataagacataaaatattaataaacatttttattattcaatatatatggccatcataaccgtagataccatatattaactttaaaggaatgtttctattatgaaaatataattatttcatttactaaaaatataattaaataaccaattataacattccaaatataagaatatattatttaaaaggtaactattataaacattcctaatttataaattaaatataaattaaggatgtaaaataatttattatattagatactatggtaaatgagaattaattggtgcgttctcatctctatcataaagaaattattttttctaaaatgaaaataaaagtaaggtaggtggtctcgaactcagatctcctcaacaataaacaagtggtacaaccattacaccaatttaaatttttggatattatttggtttacaatata

SEQ ID NO: 253350 - DNA, 935 bp, Cannabis indica
agaagtaacttaactaaatagggataaaatagtctaacgccataattatgaaaggaacccgatattctaaatgtctaacttatctttccctgataaatataagttactaaaccatatcaaagtgacacgaatagccaaaacgtcacattctgttattaccgggcataaaatatataattcataaaaattcacatataacatatataatgcatctagcattcaaatatatttttgtaattgagaaaatatttttctaaggtctatttctgacaataagccataatttctactaaaaggcatataatcataaattactatttaaatcattaattatctactagttccgatgatttaaccatgtgttcattacaattatactcccgttgaaatttcatctaatatactccagacaccgagtcctcacagtggtttcccaccttactatttagctaagtacccaaatcaatactatgattttgcatcaaatacctttatctttaggatatgattcaaattccttaacatacaacatggaaacatcatgtatactgacaatgttaatcataagggtaaacgagaaattattaatctaattttctcgagaagctgtaaaagtcttggggatcctagggcatatttttcccttgtcccaaaaatattttacttcgttcactgatgatattcatagaaatacatgattttcctatactcgaaatctcagtattttcgtagctacagatctacatatctaaggccttattgatctgatgatctgacttcggatctagatattatctggtacgagtttcaaaataatatttcatatcattcaacatcttataggaaccatccttaacatacattgataattgtttgttgtctaaaaacattatcaaaggtagatacttgttttgtgagtttttataattcatcat

SEQ ID NO: 253351 - DNA, 676 bp, Cannabis indica
aagattgaattgaaaaagtttctcaaagaaaacttggatgtgtttgtttgggggcacgaagatatggagggaatagatccaccagtcatgtgccaccatctgaacataattcgaatgggaagctagtaggacaaaaataaagggctttggatgccaagaagtagggttgtacatatattttcgtaaactgcccaaatcgaataacccgcccaaactgaaccgacaaaaaccgacaaaaaacaaaaaccgaaaaaaccgacgaaaaaaaaaaaccgacccaatctgtaaattgggcgggttgaaaataaagtaacccgcccaattaaaccgaactaacccgaaataacgagaataacacttattatttttcaattttatattttttaaaactacaaggagatttttatttaaaaaaattaggcagtttttattaaaataaaagataaaaaattactaaaatttaagactctcactcactcgtctctctcgctcaccatcagcccactctctcgctcaccatcagcccatctctcgctttctctcagtttttatattgtttagtttgctaaaaaaaagttgagatatatgttgctgactataaatttcctaattcttgccaagaatctctctttctctccgctgctatctggtaatggtaacttctctctcttatttg

SEQ ID NO: 253352 - DNA, 524 bp, Cannabis indica
cttttaaatatgaataacaagttacaaaattatacaatttatttatatttttttttatttttatgaatgttgttttgtttctttctactagctaatcaaagagtttcttactagtttttgcaccattttttatagttttgatgccttttatggcttatgtgtcttttatggcttctgtgtcatttttatggcctgtccctatttgtttaggatagttttgtggtatggtcaatggccatgagaggtgatccattttatcacatgatttctacttcaacgactttttcacttttaatagataagttactctagtcttttaagttcttatattttattatggattgatttaccatcgttcatattgtgtggtaatagaaatttattgttttgttattttgtaggttattttgtagaaggtcttcaattacggagaattcactgataagtttaattttaaatataatctgtttgatattgattttcagcagatttaaattagggtgctagtatgttgttactagcca

SEQ ID NO: 253353 - DNA, 510 bp, Cannabis indica
ccatttacttatgttcagttttcataatttttgttatccccttatgcaaaattgacttatcgatgttgatatttgtgccgtattgcgctagagctccctccactcaaacttttagggtgcagtgttgactctgttgacacaaaagagtgatagaaaaaagacgtgagtgttaaaaaatgtatttctctttaaatctattatacagccaaataaaaataaatgtaccatattgataatgtacaaacgggtcatcaattcaatctatattataatgtacaaatggattgatcatgaattcaatctcagtgtaatcaaaagatacttgctttacaaataaaggagtgatccaacatgaaatgggacagagcagaaaacccttgcaatagtggactaaactgaccgtgttctgactaaactattatatttccttgtcttctttatatttccagtacatctgtgtgttcatagcttgaatctcgccattctaggttgagtactcgcacatttttt

SEQ ID NO: 253354 - DNA, 607 bp, Cannabis indica
ctcatgttgttggcttgcttaaagtcaacacggatgcttctgtcgtcgccattggatgctcttgtggcctttgtatgattgttcgagactccaatgatgaggtctttgcttctactacttggaaggtggacggtgttctccaatctgaatgcgcagaagctcttgctattagtaatgctatctctcaatgtattacttttggccttcacaacattcaattcgaatttgattgcaatagcttgattcacaagcttaataattcaatggttttaaatttgtctttaagtttgattctagataatattagagctttatatatacattttaatattgagaattttattttttgttctagaactgttaatgtagtaactaatactcttaaaaaagctagtatagtttgatggtctaaacatccaaattgtatcagaaactttattttagcagatgccatttattaatgaattcttctagctctcaacccctgagtaatcttctcattggtggtgtttattggctattttatcaataataataataacaataataataataataataataacatttttctaattatggtgccaaacacccttatcgttctcta

SEQ ID NO: 253355 - DNA, 651 bp, Cannabis indica
tctactactgagaccaaagagttggggtggtttttagtgtcaattttttaaaaaaggcgtccatcaaaccgaaactaaaagtctattttgtagtagtgccgtttggacagccaggaatgaccttgtatggaagaaccgtgcgagaagtgtgaaagatgtggtgacgtttgctaaatcgagtcttgatcaatggttgaatgctcaaggaaagggtaatattccctcgatgtctcctttcaaagctggagacggtttagagcagtgggttaaaccggtttcaggcatcaaactcaacgtaaacgctgccatcttcgattcattttacaagtacgggtacgggtgtgtggtcagggaccatgcttgtggtctgattaccgtgatagcaggggttttttctggtactgtggcccctgaactggccgaaataatgggcattcgggaagccttaagctggctaaaggctcactcattctctcaggccgtcatcgaaaccgatagccttgtttgtgctgaagcgattaggagtacagaagcttttgtttctgcattcgggttgctggtagatgaatgcaaaaatagtcttaattgtttgtctaatgtttcaattgtttttgttaaacgttcagctaatcgtgctgcgcactttgttgc

SEQ ID NO: 253356 - DNA, 1472 bp, Cannabis indica
cgagtaacatgagacaaaattgctcccgaaaatttaaacaataaaactataacgtcctcaaatagtacaccaaaaaagctagagcttcaacttgtaacataaaaattacacaccaactcattaacatatgaaaatgctccacaaaatatctacaaaaataaaataagataaaaaaaaaaaaagtgaattagcccctaacgatgatattagaactaataaaaaaatactcaatggtaaaagatgacaattctcaaataaattatatttataataaacttatcggcaaagtctctgtaacagtaggtcctccacaaaatcaacctacaaaataacaataaaactactattaccatacaatttagtaaaaaataagtaatgtgaattaagtcaaatctcaaatttcaaaagtgaaatttttaattaagctttatattgactaaattgctaattatattctttaaaaataatatacttttgtcaattaattaatatattttgtctaatcgaaggtgccggtcaaagagtgaaaacgacaccgttcatacggatgaagattgaagattaatggatatggttgcaccgtttgtaattgccagaatatattctctttttacatgtttgtagtcggaatagaacaaccaaaatttagccactaactttccaactatactttctccacccctataaatacatattgatgtaattgtaatgaagtaagtaatacttattacacacactcatcaaaagtattaatatataagaagagtagaagtgttgtatgaagatgaagagccatgtttggtagccaaggatgacttgcctaaataatcctcttcaactaggtttcatcattgatgatatgacctcacctggttttttgggcaagctcctttggctattctcactggctcttgtctatcatgctacacttttcctctctttcatttctaatgatatgccgcaaattgtttagtctggccctgtttatttttatgaacgcttgatctgtgaactattacgcactctttgctatagaacctgctgcagctgattattaatatgcgagttcagcatatctttaggcaatactataatactaatatatattatgtcatcactttcccatatcattaattaatgttacattagttatattcaaaagaacatgttaaattagctgaaaatgttatgatattataatattggagcatataattaatattagaatattgtttatataatgagatatgatacattcattttataacatgacaatgttcggtgaattatatagaattatttatatttgggaatattgtaatatataatattttacttgaaagagtttaaatttttgtatacattctactttattatgacagcatattattccgaataaaatgaagatttcaaaacattatttttttaataaggatgtatattgttttttttatttatttgtataaacttaa

SEQ ID NO: 253357 - DNA, 549 bp, Cannabis indica
atggggatttgtataaaagataagaaaaaagtaaacacagacaatgaacttgagaggaaactctttataagaaaacaacatacaggacgaggtgcaactgagatggttaaaaatctggaaccattcatatccacagacaatgacagtagccctctttgggtttctccacagatcgtcctttttccatgacatgggccctaaagagggtgctcattctgatattaaagttatatgtcgaaatattcaatataaaaatagttttgactgtgaatgaagagattaaacggtgtatatacctttttcttcttcatcataattttggctgcagcctgcaaataaagaactgattttagttttgagaaaaagtcaagtttgaaggatcgtaagaagtgaaaagacgtaaacctgtgtacatagaaatacaccagtaagattcaaatcaatgacatcttgccactgggatttcttcattctcatcattaagttgtccctagtgattcctgaaaatccgaaaaagcatcaagatatcgaatgtggaatgaaaacaac

SEQ ID NO: 253358 - DNA, 575 bp, Cannabis indica
tttatgattctgacaatatttttcgttcccatattttaaatttacaaagttaaattgatgcacaatgaatttatttccttcaaaatgtggtaagaaaatagctgaaaatatcaaaatttcagacaaagtattctactcctaatttttgaggtataaaggtgcacatgatgaaataatatataaatatttttaatacattattataatacacaaatggtcaatttaagatatctattataacacaaatgatcaaacatatctaaatgttaaagaagaaaaaaaccaaaacttcaaataaaactaacgatacatatcatctacctagtattatatatatacatatatattataatatgagtgaaatgcgtattgttctaacaagaattgattgtatcaattatatttaaacatttagattctacatgtaattttttattaaaaaaaatcactagcaattttatttcattattattaatattattattatttaaattaaaaatttttatttttaaataaagtttcaaaaataaaatctttgcaattatattagatacaaccgagtaatttctaacaac

SEQ ID NO: 253359 - DNA, 1322 bp, Cannabis indica
gcataaaacccaacataaccatctttgctgctcttgatagttattttcctcttacccctgaaaccctacactatgttcctttttggatccaagtgtatggcgttccatttatgtgtaaatcctatgatcttgctaggttcatagctatggaaattagggatcttattgaggtggataaggacactattagggagaacactggtccctatttgcgtattagagtcttattggatgttaaccttgctattcggaggggtatgaacattaagttcattaggatggggcgtgagtttattaaatggcttgattttaagtatgaggaggctcccagatttttgctttttccgtgggaagctagaccataccaaaaaaatattgtgttgccttcctgaaaaagtgtgatgaactcttgcatgaacctctctgcgcttataacatcctacttagaggcagagaaaagattactgacaaatcccagccttttcaatatccccatcccccaactattactatggttaactatcaacctgtgaatctcaacctgccacctcaaccattctttggtcactcaatcaatttcccttctttccttcatctcaattcttattttactggcccttttgctcctctaccatccactgttgttctcatgatgcctacacctttgaatcccaatgtttcaagtattacttcacaatctgttcgacctacctttgacatctctttgaggccttctgcttttacatcatactctactgattctcttattgtggctgatagccctgttagccagatagacactttatcctctggcacttctgttcctgtgaatgtttctcgcagtcatgcctccattggtgactttgctatgggagttagctctcctcagggtcagcctaactcatctgttcgtgggaagggtctggcttcaacctctggtgtcaagagaccttcatttcagcctcaacatgttgtggttggaaactctataaggtcctaactcaaacgtgctcgttctggagatcggaagaagaatcttctcctgctactgctgatgtggaacaggcgggtgatgctttgcacacccgcctagaaaaatgagtgttttgagttggaatgcacgtggttcagggagtacgcgtgcattcaggaggctctcccttttggttaaagatcactgccctgatgtggtttttttgattgaaactcgcttgcctatgaaggctattgatagaattagagtagctttaggttttgataatggctttgaaggccctaggaagtattttggaggtggtcttcttcttttgtggaaagctact

SEQ ID NO: 253360 - DNA, 685 bp, Cannabis indica
ttaccacttttcttaccttagttcaaaactcaagcatgcgggcccacctgagtgggaaacaagctaagcgatcccgggtcctatgtcacgacaaagaaattcgataaataacttatccatattcctaacaaaccctagctcaataattagacaagtgtctaactccccactagttgaaaatagtttaaacatcactaaaataacctattctaagttctggaaaacaccccaagcgaaactggcttcgaagccaaaactatgtttttcccccactgctgccaaaaccggtccatcggtttcacttatgcctgtgaaaccggttaaccggtttcgcttgctgcagaaaatggaaactcaagtttttggctccaaaaccaaaccaaatcttctccaaacttgttcaaaccttccagaacagtacaacaatcataatacaacatatctgaagcttcatagcaaaaaaattcaatctctaactctaaatcacatgctcaagtgaagaaatacaacttttagcttcatccaacacatttcaatccaagcagccaaagaaacctctcaaaactattctcaacatattcaaaaacctagcctaatcataacccaaacttaatttaagtcctacagcaacaaagaaacaaaactgtaatgaccgctctagtttatggattagtaaaggcaatta

SEQ ID NO: 253361 - DNA, 451 bp, Cannabis indica
tacgacgttaccaacgagccctagatatatatatctttaataatttaatccttaccaaatcaatagccgcacgtcccgccgtgcccaactccatcactaaactaatgttgataatattcttcaatttcttcaacacaattttcccattgggtttgtgaacttggggagtctagattaattgataaagaagacaacaaacgacgagggtttttctctagagaatttggttggggtggaatgaaaatctttcctaaccaatctttaaaactacccttttctctaaattttgctaccattacaccttgatcatcttccattattcctctcttattttctcccttgatggaaagtaattttcctccacatattatgaatagctcacaaaaatcaggcttgttcttgtgaacgtaaaacgatccactaattgcattcttgattttcctaataaata

SEQ ID NO: 253362 - DNA, 908 bp, Cannabis indica
ataaaaggatagctcccttagttcatttttcacattcagaaaactacccacaaggtcagagcgtatctctctagtttctctctctaggaattggagctttgacacatagcctatttttgtagtaccatctcgtgagaaataaatactcaaattagacgtagctctattactgtccaatacagagagtgaactactataaattgttgtgtctctctttacttttacttaacaactatttcattctcaccattctagcgagaaggtgtggcttagaagtctagtccagatttgtgagtaaatattttggtactttcattgagagccacagctcaagaaagttactagcaagatggttgcaacatgctctacaagtgttgatagagaaatcccaacaactggccaaataattgggggcatgccaattgatggagttggaactaaagccactcctgcccccaggtgccaagagcagacctcagaaccggctccacaactcatccttcaaggccacaaaacactcatgggacaggcaccaacatccaaatcccacctggggagcctcacgtggagattgatgatcctgaggaagctgatcctcgggttacccagctcagccaaactatggctaacttacaacaacagctgggagactctctagaaaattaacatgaatagttttagcactagttcgtggaaaactaaaggaacattgaaagccaattagttgagcaggaatagcgatgagctaatctatctcagcagattaagagatatattgagattgagagagatagagagagatagagtcaaaaatagtagttacggctcgggctaggctgacgcgtgaagggcagagagtagggcctcgagtggacgacaaacggctagcctttgggcttcgagtggag

SEQ ID NO: 253363 - DNA, 740 bp, Cannabis indica
ttggcattcaagaccaaactttttcaccaagttatttgcaaacttacattgagagcgaaacgaacccacattagattgcatcacttggagacctaaaaaataggtgagttcacctaccatgatcattttaaacactagttgcatttgagaaacaaaaacttgcactttagagatagaagtagaaccaaacacaatatcatcaacatatatatgagcaacaataacatcagtattaatgtttttaaggagaagtgttttatcaacatttccccttctgtaatcatctgaaagcaagaactcagttagacactcataccaagcacgtggtgcatatttcaaacaatataaagattagttcaaatcattgtccaaactttgtttcaaacaagctgatgtagctcaatctgcattgcaaggaaccaatcttcatccatcaaggcttctttcgctgattttggttctaaataagaaacaaaacataagaatctaattatattagcatattttcttcttataaccacactctcatccaagtttccaaagatgattctttttaaccatattggatggttccctctaaatggattagtgattgtatttgaagaatgctcaaaatcttttgctgtttaagtttcttaaaaaattgtatctgtagcgacagagtcctacaatgtagcctcggcaacaacttctgtagctccgtcagattccttttccacggtagcaggcttttcaagtaa

SEQ ID NO: 253364 - DNA, 762 bp, Cannabis indica
tggtaatggcctactccccttgttattgtatttaacttatgagtagagaaacaaagagggattgttctctctcgaaagctttacaagaaaaatgagtagtgtatgtgctctctcaaaaatcggccccctttacagtagaattggtccactatttataggagatgttcaaaatagaatttggtttcctcaactgtcaacccaccaatttagggaataaaatgattttcctaaaatactggaaatatgaatggaattttcctttaactaggtcttcattacatataaaataggaactttattaaatacaattatgtcatgcgtttccccttggttggatcgtgcacagtttggaccgcttctttccgaccaggtctgtaatgctgtgtgacaagttacacttgatttctctattatttcttctgatcttgaatacatcttgggcagtcgatccatgagactctttcatccgccttggcctcgaggtgaagatacatgtcacctaaagggacctaccacgtcattcgaccaaaattcagaattacatttacccccaagtctacataggaaccttctagttggtgtgaggacttgctcagctcacgacctacataaataatgtgacgcgttgtggagtaagtaataatgatattgtaggttgtcgtttgttatacatttaatcatgtgaggtacttaatgctctcatatgggattttcgtaccctaggtagtttgtactgacggttgtacttccataaggtactca

SEQ ID NO: 253365 - DNA, 677 bp, Cannabis indica
tctctgagtgttttctcttagatctctctctaaagcaattctttcgatctttttaacagtgaggctagataactatttataggactaaatgcatgaggaaagatttcccttttgcatgcaaaatctataattggtaagaacatacattacatatttagaatatatgaaatgggagattgagacagcatgccatattcctctgattcaatcccataactgtagggattgcctttgtgcttgggcttcatgatatcaactctgaagtagtcaagtcttgatacacagctcggagaactaacttcactcgttgctcggattatcagtccattactctgctcggacaagcagacttcgtacatgcagatatgttgcttaaattctgtttggaacatttctccgcccaaatgtaaagaatgacagacacgtgccactcgtatctactgccacgtcacaatgcaaaaaatggaataacatttgcccccaaagtttgcatgggacttccgaagtcacccgtggacttcacccagtttggatccttttttgaacggtggcacgtgttcgatgcgtctgttggtgattcgacataattctgaccaagagtctcttcgatatttggctcattaatgctgattgctttatgtctcgaatttctccaaaaatttgcacgctttgacggt

SEQ ID NO: 253366 - DNA, 1601 bp, Cannabis indica
agaaatttattttatcaggatcttatttactattcatgtatgttaaattaaggctaatctaacatcctaacatggataccctaaaacaataaaataaacacataaaaaatttaagaaaaccttacattgattgcaacgaaaataaattgtctccttccgttcaactctctaaactcttgttctttttgtcacagagtattaccaagaattaaatctggatcttttttcttcaattgtgttcatcacaatctttcacaaaggcctgagtatcaacttgaataatgtgggttgattctcaaaaccccttagaaaaatattgagaaagaatttagcatagtaaattttgaattagaagaaagaagagaagagaatcgcctcacattgaattttgtgagactagagttatgaaacttaggttaattctctcttctcatcactttctttgtataggcttcacttagggttagatttagataagatgagcttaaaataaagaattgggctgaatctaatcctctaggccgaaatacatatgattttagagttaaatttttaccactttatttcaactaataaaactaaagtgtcttttctaattttagcacttatctcatctaattatttaaataccaattttattttaataattataaatttattatcaaataaaatacaattttattatttttatttaattagacctgcaaagagtactaattaacaaataaacttttatttctcttttcttctcaaaattgtccaaatttggtgaaaattatcaaataagacatagtctattttaaaattctaattgacttgttaaactaattaattgagtctacaagatgatgttatcctagacaatgtggggaccataggcctatgtaaccaagctcctaaaaagcagatcttaaaatttatcaagtaaattttctagcttattaattcctcctaactccactataaattcaaaattgcacttctgattacataaaacactctatacaccaagtatggataccctatgaatctatcgattgtttcaatcacaacgatcattgatcctctatagacggtctatattgagtagggacaaaattaccattttacccttcaatagattttatgcttaaaatacttagctacttgtaagtgatattttagaaaactaatataattattgaaatgagctctctatcatttatcgcgttaagccaagctcttagaaaactattgtctcacttctaataaatatagaagctataaatgttcatatctatgattaacactctcactcaattgcactaccgagttcttaagatgtaagtatgggctattcccgcaggtaagcaagtaacgaacaagtcaaagaaccgtgcaatacatttaagctagagcttaaccatctcaggattgagattaaataatctatgatcaactaagtaatattgacttaaaaaagatataacactaaatttatagtatcttttctactgttaatattggtccagtccgatgtatagccaatacacctgatacttgattactttactaatattaggatttattccctaaaagcaagtaattaatagataatatat

SEQ ID NO: 253367 - DNA, 804 bp, Cannabis indica
aatttattaattatttaatttgtcatataagataatttagatataatattttaaataaaaaagataaagttatcttttaatttaaaatatgtcaaatatcaaaatatctgatcttataattaaataatatataaatatcaaagaaattaatcaatttttaaatttgaccataatttaaaaataaaataatcaatttttaaatttaaacctaaaaatatcaaaattaataataatctactgaaaaataaatattattaaaatatgatatttaagttcaaatatatataaaaataatattttattttaaatttggggtttcaaaattggaaaaattaggatattttgggaaataaaaatccctcaaaattcgagttttgggtgcaggcagcccagtaggctgcacgtgcagccccaggaggctgcacgagaggccttacgcgcgtgcaggaggggcgttgcagtgtgtatggccgagatttctcggtcacttgcagcctcagacgtgcgacgcaacaaggtcacgtgggcgagcttcagcgtgcgctcagacaaaatcttgtctgaatccgctcgcgcaaggggtttcttgtccgactttctggtccccatgagcacctatttgacacacatggcatccgaaacttctaaaattcatatctttttcaatttttatcagaattgagttccgtaaaaatgaaaattgcttaattttttacaaggaatccaaataatatattttcaaaattaaaaaaaatatattttcatgaaaaaaaattctgtacagcacatacattcatcaaataa

SEQ ID NO: 253368 - DNA, 790 bp, Cannabis indica
tgttgcatctcttgtcatcgtagtttaatatgaaaccagattgtatcttcaatcgactgtagaatcttttaatgtggccaatttttccacattagtaacattgtcaattgtctttgatgaccctctctttggacttcttcctctagcaagataggcttcttctttcctagtctccttctgaagttgcaattcaaagtcctttgacttcaatgccgcatgagcacccttcaatgagatcacatccatgccatacttgattgctactttaacttcttaatctgagcaatatgattgcttgacttttttcatctaccttatgataactgttagctaaaccaacaattatttcattaaatttatcaatattatcatctaaggaaagagaagagttcattctaaacccttataatctttcaagaagattaatcttgctcgatattgatggtgccatgtatagctgctctagttttttccacaatcctttgcggtcttttcttggattagctttcttcttactccattggacaagtacataatgatggtgcaatatgccatctcttccatctctgcaatttcctttggcttcttctcagctagtaacttttcatctctaagtacttgcataagtatacccttcaaactctctcgccatagtgcgaaatcagttgatccatcgaacttctctagttcaaacctagccatcgatattctccttcaatctgtgttcttgtagaatttcttggtgagtacttgatgagttcttggtccagaagcaagtgatctttgaatc

SEQ ID NO: 253369 - DNA, 764 bp, Cannabis indica
tatctgtctgccctgttcgttctttatgccacccaaaaaagggatatgccttctccccatgaggttaagttgctttttttatttgaagtctactcccaagcaaggcaggttgggatacttctacttttctcagctagatttcaagtggttaacagggcctggggacaaggccgttagcaaaattgggaattttgttgacgagtattacatggtggattgcatgggctccacctatactcggttccagtagattcctttatatcaccatccacccctcatgctttctctcaaggatagacctcaaagactcactcagttgttgtgctgcccagaatatcactttcttgacctcagaggacaactttgtggagtacaggctctacccaaaggatttgattcctcaacctatgaaggagaaaaagaggaaatccaatgttggccgggctgaggaagctcaccagaagaatgaactcattcaactcaagcgttaagctaagttgaagggaggtgcaggagcaaaacaatatgctcatgagcctcttgagcaagaagatgaggctgaggaagagcaggagaccccactcaaaaggaagaagaaacttttggccgagcctaggcctatcaaacataagattctgatcagggagcccaatatgcctgctcgaccaatccactcctgtaagtagggaaaagggggaaaagccgtcctgggaggagcaaagagactcgtctgatgatgatgagacatcgaggtctgctcggtc

SEQ ID NO: 253370 - DNA, 651 bp, Cannabis indica
tgttttgggggttcctttaataccttgtcatgacaagtatttaggactgacttgttttgtagggaagagtaaaagtgagttgtttcaatctatttttgatcaaatttggaataaattgtttagtttgaagtcaaagcttttttcttcaggtggtcgtgaggtcctcttaaaatctatggttcaagcaattccgacatatgttatggatttcatccgtcttcttgtgaatattgtgaatgaaattcatcgaagtggggtggagatcctgataagcagaagttacactggtttacgtggtctaggctatgttggcataaggcggatggtggaataggatttcgagacatatttttatttaaccaatctctattagctaagcaggcagttcgtctatataactttcctgattttttggctgcaaaagtaatgaaaggattcttttatgtgaatagctgtttgatagaggtggttgaaactaagcagaccttgtttttacggaaaagtattctttggggtcgtgacttatggaaaaaaagagtttgatggttaattgggaagggagaaatggttcgaatttaggaagatgcttggatccctaaagaccatgtgggttgggcttactcattcagggatggtttagatcttcaatat

SEQ ID NO: 253371 - DNA, 672 bp, Cannabis indica
gtgctttgtcccaaattaatgccacgaaggctcctagaattgacggaatgcctagacttttttatgaaaaccattgggaagtggtgggaaggatatcactaggatgtgtttgaatgttcttaataatcacatcgactacaggcacatcaacaaaacccttctctacctaattctgaaagtaaaaagcccaaaacaagttgctgattttcgaccaataagcctttgcaatgtcagctataaaataattgcaaagtgccttgccaaccgaatgaaggacagtctaaaagaagtcatatctgaaaaccaaagtgcatttatccggggtcatctaattcaggataatgctatcttgggttttgaaagtctccagtgcatgaaaaaaggtagattcgggactggaaaaaagatggccctcaaactggatatgtcaaaagcgtatgatagagtgggttggtggttccttgaagcaatgatgatttgtttgggttatgaccaacattgggtgaacaaagttatgaattgcatcacttcggtctccttctcagtccttattaatggtgaagtctgcggccaaattcagcctaactgcgggattcgtcaaggagacccactctcgccttacatgttccttctttgttcggaagacctttcttgccttatccaagaagcgga

SEQ ID NO: 253372 - DNA, 1155 bp, Cannabis indica
gaaaacaacataaaatcaacaagaaaacaacaaaaaaacaaaaaaacaacaaaaaaacaacaaaaaataacatacagataacaaaaaattaataacaaatgaacaaaatttctacataaaagaccgtattttatgtaaataaaatcaaaaaaatcgaaaaaatatttaaaatttcgtgaaaccgtatatttattgtttttttattgtttttttttaagttcgcgagccatgggttgacctgatcaactcagttaactcttttctttttttgtttaaaaaaagactcaagggagtcgggactgtcactattggatgtcgtggaggggacgacggggaggagaggttattggacatcgacagtttcagtggcgagtcggtgacggcaagtgggggagaaaggagtcaagactgtgagaggagacctccgacggctgaagcttctggtcaccttcatcgagggagggccaatatggtctgggtggaagaatggtgtcgtcgtcaatcgggggagggccaatctagtatatgcttagggttgaacaggaagagggggagtcaaggtcaaggggtctggtctgatgatattgataggtaatgatatgtttttaggattttcatatttagttataattgtattttaggaaaataaaatatatataaattaattaaatagttggccgaattcatgggcagctacggatccaactcgaacttgtgtaagtgcaaaaattagactcaaactcgctctacagagctgaacataggggtgttcataaaaatcgaaaaagctgaccatcaaaccgaccagaccgtaaccgacttttcagttccacgtcatcactgaattcggcggtcggtttcgattacgatttttttacatgacagtcggttcggtttttgaaataaaaaattgattaaactaaaaaactgccaaaaactgcaataaactgtccaaaactgcctaaaattgccaaaaaccgtccaaaaccgccaaactgaaaaaaccgctaaaaattgccaaaaatcgtacgaccaattttatacggttataatttctaaacggtcagttacagtttttgtaaaataaaaactgtaatcgatcggtcgactataaaattataaaaactgaccgtaactgaccgattttcatcccta

SEQ ID NO: 253373 - DNA, 632 bp, Cannabis indica
aaccgagagggcattgatttttcagatgctcaaagtatgcaagctgctcaggtacttcttaaccttatattatgtgtgaattgattgaaaatgttcaacatttccacttatttagactatgtgctcgtgtttaaggaatgggaattggctgaaaattcacagggagtcttagagtaccaaacaaggtaactactaccttctcaagtgctacttaataaatatatattgagctatataatcactttcaattaaagcattgtaggcagctattcctttctcttaactgatacatgaaaatatgtccttagtagtaccattagtgttacaaggcactatatgatatagttggcatatgttgaatggtttgtattgcaattgaaaatatttgaacaagtaaatgtaattactcataagatatggtgttgggaacatatgattctatatagcaatgctcttagtagtatgttgttctacattcagaaatatagattatagatagatacatgctacatttgagtacttttggtattatgttttgtctcattctaatacacatttatccataataatgtttaggtattcaaaattccaaagtgtgggaaatatcacattacatttccctgagaatttcg

SEQ ID NO: 253374 - DNA, 1125 bp, Cannabis indica
atcttaaagatttcaaacaaaaacttcaacaataaattaaaatggttatcccgttatcataaaaatatcaaataatcaagaaaccatgttctcctcaattttcagaaagaaacttctcaagcaaacaggggcgaagctatgtgtcggggctttggctaaattgtttacatttatatacataatactttcgaaaatgagaagagcaaaataatacatggtattggaagaaaacaaataattgagattcgataagaaattaaagaatggtgaccatgatttcattttcacgaatctgctcagtacttacatttttaaaatttctaatcggaacacatatagaaataaaaaataaacagtaactaaactaagataccttaatagctatgaagagcagataaacagcaaagggaagcacgaagcaccctagcttgctcctcttggtagtccggtatctggttttggctgcgatggtgggaagcatcctcaacaatccaatccgaagacgaggacgtggacgaagctaaatctgaagagctagtgttttgaaacttatggtgatggtggtgtttgtgttgattaggggtttgattggggaacgatcgggaatctacggaggaggagaagcaacgaaaggcaggaaatcgaaaacgagagctgccattaacggaagcagaacaaccgagaagcagaagaactgcccaccccctggggtttcgctgtgtgtagtcgaagagattagggttggatgtgaataatttagggtcgaagagtttaaagtcgaagagttttaggatatttattaaattttcgtctgtttatatctctcacatttttattttgcatcacttttaaaccctcgcaaacataatactccacagttaataacagacgcaaaataaaagaagttttcaacaatttttggttttttcgtcggtttactttttattgtcatttaagaaatgacgctaattatatattattagtgtcgtttttaaaacgacgcgtctaataatttgggtactattcacgtcggtcaacgccatgaacagtagcgttgaccgacgtaaatagtataatttgtagtagtgtgctaactatgtttctcacctcaagcccaacaaagga

SEQ ID NO: 253375 - DNA, 630 bp, Cannabis indica
ttaagtttttgacttaactttaaaaaatataaatttctattatcatttaataaaatataaggtttaattattaaacttttaaaaaatacaaaatgatatttatatattattaaatgagaatatgccaaaaccttaatattttacttactataatacaatatgatatttcgtgataatgactagacaacttatatttaaaagagtaatttatcgcatacataattaagtttaatttttaattgtagattaatattcaagtttaatttttagcagtaataatacttaagttattttttttagaactctatacctacctaatcattaaatgttaagtcattattcacgtgttatttttgtatagtatatttaaattaaatttttttaacaaaataaaaatttaatgacttagaccaattaaaaattgtcacgtgacaatttacttaatacttaacatctaagtacttataaaaaattaaacttaaatatttatttataatttaaagttaaagttaaatatttatgtcacaaattactattaaaacacaattttttttaatagggataaaatgaaaacaataattacttctgaagctgaattatgaaaaaaagagaatttaaataataataata

SEQ ID NO: 253376 - DNA, 530 bp, Cannabis indica
atattcattcgtagtgaagcaggttctgcaaaagaatatactgcggtcggatgggtggcaaatatttttatgcttaaataattttgtgattattttgcattcgtgttggttgtttgtaattttttttttttttttgtatgttcaatttatagtcattatgttgctaaaattttggtagaattaaaatttaacttggcatgtaaaattaattattatgcttagttttaagtaagcatagaaattagataggaaataagttagtttaagcttattcttctaataagcaatacatgcttatttatttatcttttttttttctttttaattttataaaaagaagatatggataggaaatggatggttactaataggttaattgaagaatataagaacggggttgatttctttttgaagttttgtttggagaatgggagagacccaaattatacatgttgcccatgtgttaagtgttttaatgttagaaagttgagtttcaacatgataaaagaacacttatttttcaatgggat

SEQ ID NO: 253377 - DNA, 744 bp, Cannabis indica
aaacggactagctagtgtgacgtctcgggaaatcgggtcgttacatagttttcattattattcattagatatatgactcttatacgtaccacctaccaataggagctcctagcaatacaaattatcactaattttattgtagcaacaacaagtgatagactgaaactaaacatttcttttaaaaaataaaaaaataaaactaaacatttttggtcatacaaataagcacaaatattattgtgactaattaaaagtaaaaaataaattgtacggacaaggcaacaataaaataattgtggtgctaaatatatttgggcaacactactcacaatagcttctctaaatagagaagctttaaaatattttaagaaccttacaaaaaacacactacaataagtattctatttttcatttttaaagtttatttaaaatttactatttatgttcaacatttatataatactattcattgctctaaatatatatttttgtatgggaatatgtaaatatattaatagagtatatatattaaaagaaaaattgatgctcatgaagttttaaaaatagagtatatatatttgaaaaagggtctccaatcactatcactatacagtaatcagaatcggaataaattaatggagaaatgtaacggaataaatgaaaaataatcggaatcaatatttgtaatatgttgtttactaaaattttttagaaattggaatagttgtgatttatcttgtttac

SEQ ID NO: 253378 - DNA, 630 bp, Cannabis indica
gtattattattgctaaaaattaatcttaattatttatttgcaatcgagagttagatttaagtatttattcgtaaattatttattttttttaataattaatccacgtagatgagtgtagggaagaattcattttgataggcctacctagctagtagctagattcagatttcatatctttcgtcctattgttctctttcatattctccacttgccctattgcttactctttttatatttcgaatttattcactcttccatcctttcctttctgtttccattcctctgatataaaaacttggagtttttgtaagaaaacacaattactgtaatcttactcctttttttttcctttagattttaatttgtatgagattggtttggaagactacaaattagggagcaataactttgtagtcttctcaactagcacggctggtatacattagtctttacacctataattttgtattgactactgtacaccaagtgataatggaccaggttaaattccacaggggttgttttgtggtaataatcgtacgtataggttggaccatttgatgacttgacattatttgattggattaggatatgagagttagatgtgcttttgaaatgaagaaaggacac

SEQ ID NO: 253379 - DNA, 711 bp, Cannabis indica
ttagttggatcattggtaactactttaagggttcccatcacgcagatgacactatctactacaagttaaaatttaaaagggccaagtttttaatccatctcaaaaggtattgtggtgagtttcgaatccttgatctaagtaaggaatgatgtcagtaaagacaatcctgtaactataccccaaaacacgtggttacaacccctcccctctttttgtaagattaagaagaaatataatatcactagctaaactacatgttataacaagatcacataaaataattttaatgaaatgaaatcagttttcatggacaactgttccataaataatatatacatttaattttaatcctgcaaatttaagtagctttagccctttacactttttgttttaaaggttttaaatcacacaaagtcaaagtataatttttatttctgataaaaaaaagtgtttcgtaactattttgttttgtttttttttttgttttttaaatttttttaaaaataaaaatgtgttatgtagattctatttctattttttatttttatttaagtgagagaaataagaaattgaggtgagagaaagtgagtatgggtacgggttcagagtttggactttggagtctggggtccagatttgggtcaaggtttaagttcgaggtccaattttggctctgaggttcattatgaaaaatcttttttttagtcacaa

SEQ ID NO: 253380 - DNA, 898 bp, Cannabis indica
  modified_base (852)..(852): a, c, t, g, unknown or other
  modified_base (854)..(854): a, c, t, g, unknown or other
  modified_base (856)..(856): a, c, t, g, unknown or other
  modified_base (858)..(858): a, c, t, g, unknown or other
  modified_base (860)..(860): a, c, t, g, unknown or other
  modified_base (862)..(862): a, c, t, g, unknown or other
ttttattagcaaattgcatcaaccaatacaatattcgaaatatccgccggagcatttctctcggtgaatatacgaactgaatgaaaacaagagttatgagccatataatgtgcagccttgttagcagaacgtttaacaaattgaatctaaacagattttaaagaatcaagcaactctttacactcttgaatcacccttccaaaaggagaacgcaacagaatcgaagaatgtacatcaagaaggcaatcggtttccagttgcacttcattccacttcttgtctttaatccaactaagagcctccttaatgcctatcgcctccaccacagcagcctctagaaagcccggtttgctacaagaaaaagcttcgacaagatggccatgacaatcgcgagccactccatcagctccgtaccagccttctgattcaaaaatatagctcaatccacattgaccttaatcatattattaaccggtttagaccattgctcccttccttcattctcacccgaagccaaaaacaaaggatttctttttcaattgagtattttgtcattaattaaggttgactctagcagataaaattacatccgaagttgaagtgctcttacctttccagatgaacgcgttacgggcattccaaatggcccaacaaatcatgacggcttcctctctaacttctacattagtaggcataacacacaagtcaaaccagtttgagaacttccctcccaagaaagcaactgaactcaaagaagatttatgccaacaactttgagcaaaacagcatccaatcagcaagattagacaattttctttctttctttaaaaaaaatacaaaaatgttaaaaananananananatatatatatatatatatatatatatatatatatat

SEQ ID NO: 253381 - DNA, 1093 bp, Cannabis indica
actacaaaaaacatgcatgtataatattacatctctacaagtaattggctgaacctataataatgttacttgggttgaaatttcaataccctattcgttgcagctaacaaccaaattaaaatttgttcaacttattaattaacttatgaaaagcaatcaaaattagaccagcaaaattaattaatagtaaatttatatattatgtatatatattattatgccaagttgcgtgtgttgtatatataatagaacaacttagagatttataatttggcaaatgaagctttgactcatgtttgggttaatgtagaaaaagctagattcctaacttaacataaccaattaattcaattaagtaaaaaaaaaacaaaatattattatttggtattagtgatatttaatatgtgacttattataaaaaaaattatcttagtcacaataaagtttgtgattaaaaaatgaaaaattatgatttaatataaataattatttttctatatctaaaactaaattataaaaattataatttattatcactaaatgtatttttagccacaacatttattgtaattaaaacaaaattaataataacttttatctaaatagtgtatattactttttaatggcaagtaattttttgtgactaaaataataatatttttttgtagtaaactatgatgagatgccattgtttgaatattttatttttcttttataataattattaaactaaaatataatactttattataatatgttgtgatggtgttagatatgtctggtaatttgctctgtattcaattacagcacataagaattagggccaataggaaaaggaaaaaaagttgaccctacatttctaaagaaaaacattaaaaagcagtttaattaattcttctaagaggctcttagagaatcactagctactaataacaaactttgccatgaaaatgacatatatacaatatacatataatattatgatattattaggatgagaaaaacaaaagagtactattataagatattagtggtgcataacaccacttaaaaacgtctaataaataattaaatattttataataattattaa

SEQ ID NO: 253382 - DNA, 1130 bp, Cannabis indica
aaaaaattaatttaaaaaaagtatgtagtgtaattttctctacttaccccatcagggcaaaatcccacctcactacaactctttgataaaatttagaatgtatctatttttgtgtgtatatttcctttcatttacataattaattctcaatttgacattatcacgaatcatcttgtctatacattgaggagtcaagcattgcgactcaaaaattcataaattacagtttaacttattttaaaaaatttatatgaatgatattgtaactataacgaatattattataaatatttttttgaaaaaaaatattccgatatgtatttttaggtacggaagttaactaaaaaaatataataaaagattgacaataacattctctttataaaaacattcaatgatcctcaaaatatcaggaatactattaattagagacattttattttctaaaccatcaatcaattgtaagactaatattaggagttgttgtactgtacatgtacccgaagccttttaacaaatcataaccacatttctcttaattaaatgataagaacttaaaacattaatggttcacaaaccaaacaataataattaaattatttgaagcaaaatgccatggttcatagccaatatatatttaattattagggagaatggatgactggtgaaggtttggaaagatctttgtgatcaagttgatgatatgtaacgcatgccattatgagttgcacaaaccaaattggtcaaacattttagaaagatatccatttcgttttcattacttttcttactttttttctacaattaaaaaacaaaatatgtgcggtagaaaatagaaatcataaagacaaaccggcctcgtttgttcccatgacatattatttatatctatattcttattgtacacctattaatactaatttctatcgtcattatcatattatattaaaagattcaaaatactatttaaacttaatgaaattttcattccgaacggaagtctttatttctaattgaaaattggtctaattaaattaaccggaataataatatccaatcaaaagcaaatatgtatgcagaccatgttaatttattttagagaatttctaaaaaaaatattattagtggtt

SEQ ID NO: 253383 - DNA, 726 bp, Cannabis indica
cgaaaccaagacaaaaattaaataacaatacattaataaaactatattacaacaaaatgtaaataaaaattaattaatgtaaaagaacggagacaaaacaattcaataatataatataaaacaatccaaatataaaacttaaaaagatttgatataattatttatcaaaactgaaaagtcattgcaatataagtcatgaacacaaaatgaccaattttcttgcccaataaccataccacaaaactatcttaaataattaaggacaagtcataataaattgcacaataaccgtaaaaggcacaaaagctaataaaaaaaaacaaaaaacggtaaaaaagcatacaaaaacatcaaattattgtgaaaaaaactagcttggttttatattaagtttaattcaagtaattttcttttctagtgcatgttgtttcttggtgttgtttggttttttcatgtagtatttctgtagtacaagtcaaaattttagctctttcataacaactatcaacaaaggaatggtgtttttaatgagttgggggtgttgtgtttgaggatgttatagttttattgtctaaattttcaaggttagttttgttccatgtggcttgcaataaaaattttacaacgcatggtttggcaaagcatgccatttgattagacgataagctatcctaatttaaagagataataccattataaattgttgtattattaataacgtgtgat

SEQ ID NO: 253384 - DNA, 892 bp, Cannabis indica
ttcaatatgtgactattgatgaagatagagattgtatgtaggtatgttgtttatcttagactatggtttggtaggtatgggagggagagagtgggtggatggaggagggagggaaggagagaaacttctctttgtacaaaggggagggggggggactccctctaaactttaaaaatataattcttccaatttgtgaaaatttgtcaaattaagagtgtgaaatattaaaatttatataataacctaacttaatttactttacgtgaccatataatggtcggatggtgtaaatttatgatcgttttgcgaccataataattttttatggtctcacaatgtaatttatggtcgcttttacaaccatacaaagttattttactaataaaaattttcataaagattatttttacaaaacactcttccaatttgggaggattttagaaattagacaaaattaatttttattttttaaaacaaaatcaacaaatttactaaataagataattaaaaaacaataaattaatacttatattttaagggacaatttcgtaattttaccaattaattttttctcccaatcaacaccatacctcataacaaatatcacaaatgagataaattattctctccatccctcttactccccatcctctttaagctcttcatccatcttactctctccttcctattatttacaaattctaatattgtacaagtttcttaacaaagttagctagtattgacgactatatatacataattaattaattatttgagtatgtgcacttaagctataccctaaaacatttactactataaaaacaccttttagaggcgatttttaagacctttcagtgtcggtttttggtaaaatttactagcgatgctgatc

SEQ ID NO: 253385 - DNA, 560 bp, Cannabis indica
aagatctgaaactctaggtctaatcatctagatatgtacaatcgtcactatgttccaaagtgatgttcaactttttccttgcctttacctacacaaagaaaacgtacatgtgagtcgatagactgagtaagaaaaacataaaacataaacatataactttacttgcaactaggtgcacacacatgattaccaaatctcaaacctgcgtccaacgcgtatgagtctcgaactttctttactatagtatgattgaccataatatcacatgcactcagtactctaaaaatactagtgttggtagcatcaatccatactataagtaaaattaatcataatactacatgcactcagtgttctaaaagtactagtgttggtagcacaagttcgcattcgctaaaagcataaaccaaccataataccacatgcactcagtactctaagcgtagtagtgttagtagcattggttcgtactttttgaaacatgtacatatgtatatttattatactaatcttacctaaattatgtaatcatgtgtgcaacctgagtggaaaaactgctc

SEQ ID NO: 253386 - DNA, 536 bp, Cannabis indica
agttgtgagctttttatttatttattagtacaataagttaatttaaaaaaaaaaatgcatacccaaaagctatatgtatatgcatagcaaaggcgacaaaaaatcatttttctctagaaactaattatttgatatgtttaatttggtgatattagaactgaatatatgtgtaaaatatttattaaatatatataaattcaaccatgatcaagtatatatttttcttttcattttttgtttaaaaaggctttatatatatataaatgaagttgtagcatgctgatcacatgtctaagacttatcaattaaaaaaaaaaaaataatatatatatatctgtcctttgcacaattagcttaatgatgcacatgcgcaagtcatgtccatggcattatttccatgacagaacaaaagcagtgaacatatataaaatatattatatatatacatatatctaataatgctattatatatgtattatcacatatattaattgaatgatatatatatatatatatataattgagtacacatctat

SEQ ID NO: 253387 - DNA, 1137 bp, Cannabis indica
cttcttgttgcggcctaatgacagactttgcaccttttctcttaggagtcacccattgctcatttctggtgtgtatagtagcattttccacgacccctgtaccctcagaagtgattccccgttccactttactatacccaccaagtttagcaacattactggcatgtatttcactcttttcagattccgtagcaccactcactttctcagttgaaatccccttactttcaacatcatgttcaacagcagttagcttatccccttgctgttttttcttccacacaataggcttccctttgttacagtttgaaattgagtgtccaagcatatcgcaggccgtacacttggttggaagctactcatttacataagcaatagttctcggaggttcttccttaatctcaacatccaccaacaccctagcatacttgatcatagaccgctcaagagtgaccttgtcagccatactcggctttcctatagtgctaacaagcgcactcaaattcttcttcccccaatattgaagccccaagccatttaacctcacccacacagggatcgatttgaccattcgggttgtgtccatatcctccgaccaaggccttagaatcacaggtttcctatcgaattgaattactccggtttcaagaataatgttcctagtaacctcatccttgaaactaacaagagtgaaccctgagtgcattctcactatcctttccactcccaaattcccccatattctcttgataaatccttcaaacactctaaaaggaggattttcccctaaaacgatacatataaccgaagatcttcagtatgacgcttctaactcagcttcatccaaatctaaatttgcaaccacctgatccccaattttagttggttcagtaaaagtaagttgggagcaagggatttcacttgattcaagttcaatttactccaagtaaactgtgcagatgcctgaaagtccatcgcctccgcatcgtccgcccaattagtcaaattaggagtcgattttaccacttctgcaactacttccttctccggttccagttcatcatacgggtctaagaaaacctccgtagcttcatcttggattgagggcagctcagggctcgctcttgcgacattgat

SEQ ID NO: 253388 - DNA, 801 bp, Cannabis indica
actcaaagttaagtgtgcctaattccaaagtaagctcatggtgggttaccagaaagtagatgcttctttgtcgttcctaattgtatttcgtactttcatttcttcgttaattaaatccaatttccatcactcccttaattaacatcttaccattcctcataagttttattcacttaaacttgaataatttcttttttattgtctacttcaatcttgttaatctctacttattttaacttgtatcaatttcccttgaactaacacaacttttaaatttcctaaacatttacagttaaccaccgttataaagaaaattgatgtaacctatacggtagaggcaacattgctcataccgagcaccgataactaaactagaaatactaatgtcctgaattctcacctgatgacaattaattagagatcattccttattcttggagtttcatttctttgtgtaaagttctatttttggcaatttagatgctaaaacattttttattttatggtgagatttctttgcattcatagctgattttctcacctttattattcggtttttattgctcttttctatcttaggaaagaatgattttcagctggtcttttcttgtatggaaacttcttgtaagagaagaaattctcttatgcaaagttggtttttaaaggaaactttgcctattattattttccttaaaaagtttgattgtgtcttgataagattagatcaaacacactgtttatggcagctatcaagacacaatacaagatcagactcgtttttggcaagtttccttttctggt

SEQ ID NO: 253389 - DNA, 991 bp, Cannabis indica
tgagccttctctctcttccttggccgccaccctctctctcttcttccttcatatttcgaacttaccttagtgaagatcctggtaaattaattccaacacaaagtgcttaccagctgctacagaaacaaaaaccagtcgaagttcggccaaataactcttgtttttggcgaaaattctggcacctgaaactacctcccaaggtcttgaatttattgtggcgagccattacaggttcactcccaacttgtgtcaacctcgtcacgaaacatgttccaatctcccctcaatgtccggtctgccaggctactgcagaaaccgcatcacatgcacttctcacttgccattttgcccgatcttgctggactgtttttggcgtgcctatcgtgatggatatgtccgtttcttttggccactagtttgagcagttgcagaacacacaggacaatgatttcatttgccgagctgcaactctctgttgggctttgtggaaggccagaaacaacgttgtctggaacaaactctcttcaactgtgaaggaagttatgtctacatcttcaattactcttgaacactggaggaaagctcaagataaaagtgctctattatcactatcgtttgaaaataatgatgatggggctgagctatggacaccacctgtaactaataacctcaagattaatgtagatgcgacactcttcccaaatgacaactcatatggctacggtctagttgcaagagatcactttggcaagttcattgaggccaaaactagccaattttctggtagctatccggctgaagtggttgaagacttggggataaaagaagctctaagctggataaaaggaaaatcttgggacaatgtggagcttgaatcggacagtcttttatctgtgcaagcaataagaagtaaccaaaagatgtcctctacttttggaatagttatagaagattgtcgctgttgggttttatgccctaaataaaactcttt

SEQ ID NO: 253390 - DNA, 921 bp, Cannabis indica
gtttattttaattttttatttttttaataataaattgatgattagtatatatattatgattagtttaaaactttaataaatttttttttttattattaaaactttataaattgatttttgataaatttataaaaatactggaatttgggttaacttttacaaaaatactgtcacacggaaatctttacaaaaatattgtgtttttgtaaaacaccagtaaaacacaaagcagaacaactcaaaacaccagtaaaacaccagtagaataccagtgaaaacttaacacagtatactacagtatgaaacttataaaaaaacacagtaaaaaagtaaaaaataccgcctggcagtatttttgtaaaaaaatagcaaaagttagtataccatgtaaatttcccttgatttttaaaatttttattctaatgtttgatattgatgatagtataaactgtttaaattatacactatttttcgtattgtaatttttacagttttaagatctcgcagcatataattagagtttgaaaaattataaaaactacataaatattttggtttgaaaaaaaaatattacaaaccgcattacccgcactacaaacacccataagtagcatgcatcaattgaaaaatgggaaaaagaaaatcataaggatattgtctgagtttaatttaaatatttgtcttgatttggcttcgatatcttttaaattcttcggcaactggtctagtaatagtttggtcaatatattctagaaatagctctaatatcatttaattaattgtttgattatttgccatatccatgtcttaatcttttgacaaagtacacctttaaatacttaatgctacatatatatctatccattaaaaattaataaattgttattttcttaaaacgtacatactagaaggttctaccgt

SEQ ID NO: 253391 - DNA, 986 bp, Cannabis indica
aattaccactagtggcatctttagaccaaaagtccattttgagtataatatcaaactctactatacccaatcttacaagatcaacactcaattccctattctcctcactaattatcgtagacctaatgctccttttggagctaactaattctctatcatgtaacaaggttcttgaccctgtttcataattatttcaaggcctacccaaattatcaattatcttgaccactacatatgaattagtagctctagaatcaaatcatacaaagtaaatatagtagttgactaaaagctgacctgacaccactgaaggactagcttcagcattgacttggatagtcgcaaacaccaaaaatggagtgggtttcgcctcttattccgattcccccttcatcagttgtgggaagtctttctttaaatgccctaccaaaccgcattgaaaacatgccttacagttgcactctcttagatgatgcttcttacaacaagagcaccccaaataagtatagtgacctccaaggccaccctgacctggtttcctacaaaacttctttttctgactcgagcccaatgatgtcaaatgagccttctattggtttttatggtactaaattaggtacgcaacagatgagtttcgtattatctaattatcattgtaccatagcccaaaggatctccagctgtgtgtacattaaattaaaacaataaaaataatgagttttgagtatacctcttgaagcctatccgggtatcctcaaaacttctcgtttgttgtatctcttaattcagtttatgaggaaattgcaatttgactcacacactcacatcagtatcttccaaatcaatctatcacgcacaaggaatagtgtgggcttttaggataaattgtataacctttgttcttattgagttctcaacaaatgagcaagaacaattgagagaaaaaattttcctttttctctatatattacaaaaatttagtttag

SEQ ID NO: 253392 - DNA, 677 bp, Cannabis indica
gaatttatacattaaatataatcatgaaataaatcatgtaaactatgcaacatagaagcgatttttgatcttatattaattagtaaatctgattatattgaaatgggttttatttagggcacaaaacccaatagtcttgagataagatttcagttgggagactaatgattttacaggggatagtaatggtatgttacggtttatgaactgtgtttgtgttcctatagataatgatattaagaaggaaattctgaatgagtctcatacgacttcttactccgttcatccgggaacaactaaaatgtatcaagacctcaagtctatgtactggtggcctcaaatgaagaatgatatagcagaatatgttgcaaagtgttttacatgtcaacaaagtgaaagctgaacactaaagacctgtaggtttgctgtagccattgaatcttccagaatggaaatgggaagacattgccatggactttgtaattggattacctaggattacgaggcagtatgactctgtgtggcgtcatagttgacaggtttacaaaatcaacgcactttttacctgttcggacgaatttctccattgagtagtatgcagaactatatgttatagaaatagtttgtctccatggtgtcctaaagtccattgtatctgatagggattcgaagttcac

SEQ ID NO: 253393 - DNA, 961 bp, Cannabis indica
ttcacttttctggccactccaattgtggttgtggccttcgaattgactgttttcatgcggcccgtatctttctccagttttaggcccaccctcttggcttcaatttcagaaatgaagttatgtgttgcgccggtgtcaatcaaaacgctcttggcctacttaccatttaaagtggcctccacaaccatcaatcccttcccaagggctttctttcctccgacgccatgtttcttaagagcagccatcaatcgacggcacccatgtgcacgcagtcctcgtcttcatcatcttccccacatccttgctcctcttgagcaatggatgcctttcaacttggactggtgggggcaagcagccgctctatgtgggccttggtaaagccaacacttaagaggcttcttccccgctacagcatcacttttagaggaggagctagattcaggagtcctcttgtcccctcccccacttttactcagccattgctttcctgacttcttactcgcagaattgttggtgctggtctgggaattcgtcttcttcggctgcaaattctgagaggtgtaatcagtcagccgctcaactgcagcttgagcagtggcgagatctgacacccgctgcctttgcagctcttgtttagcccatagcttgagttcttcaaggaagtagaaaagtctgtcgacttcgttcatgtccttaatgtcgagcaccaatccggaggacttctttacatagtctcggactgtcccaacttgcttcaactctcttagctggcgtcgagctaggtaggcgacactttctggcagaaattgggcattcaattctttcttaaggtcttcctaagtgtcaatggtgcatttgccactctaaatgtcttcatacttcgtcctccaccacaactttggcgtccccagacatatcatggtgctgttgctacctttgcttcttcagagtcggtccgcac

SEQ ID NO: 253394 - DNA, 737 bp, Cannabis indica
cgaagtccaaagagatacagtccccgaggccaaaaaccaacccaatttagccaacagacaaaaatttatatccttagcacgcctaaatcccaaacctccgcaggctttgggtttacagagacaatcccaggcctttagagagagaaatctaccttctttacactgaccagtccaccaaaattttctcacaattgagtctatgcgatccgtagtcttcctgggcagcaagaaagttgacatagtgtagatagggatagaggcaagaacacttttgataagagtcatccgagccgcttgagatagaaggttggccctccagccttctaaccgagagcaaatcttatcaataacaaaatcaaaatcagaacttcgacggccattgaaaatgatcaagttgcccaaaaatttctcctcccccgacatttcgtcaaaacccaaaccctgaagaaaatcctcacggcacctggcagagcaatttttagagaaaaataatttggatttagacacattaatcatctgccccgaccatttgcaatatttatcaatagcatcaatgaccgtatctcggtttcgttggtcagctttgagaaaaatgagaagatcgtccgcatacatcaagtgagattgaagggccctcgcaagagaaagaaaaaccattcagattacccttactttcttccaacaaaagaattcgagttaacacctccgcgcctataataaataaatagggcgagaga

SEQ ID NO: 253395 - DNA, 795 bp, Cannabis indica
ctcctgctggtgctgctgtttttcgactctttgctgcacaatttcatcatgtcggcagtttgctttcgtgtgtccaaatttagaggattgggaacacttagcaggtagccattcatattccactttcttgtcttgaagctgcccaaattcattgaaataaggaataaaccgaggtggttcatccataatttccatttcaactaagactttagcatactgtaaccgagttcggtcctttgtgtgttgatccaccataatcggcttccctatggtgctaacaagagcacttaagcttttggtacctcagtattgcagacctaaatcttgaagcctgatccacaatggaacagtacgaaccaagttcaaagcatttaaatctgcagactaggggcgaacgatcactggttttcgatcaaaatgcacaatccctgcctccaccacttgatcacgagtagcctcatcattgaacctcaccattatcattcccattgacaacttgctgacttgaaccacacctaaatgaccccaaacccttttgataaacccttcaaaaattgaaatagatggattatcaccaagtaccttgcatatgactgctgtgtttcagttcttctcctcttcttgaacctcttccaaatcgacttgcgctatcttaattccatctctgattagaggctcagtgaacagcagacgtggatcccgattcagtgatttctccttcgtaaacgctcccaggtttgcttagcagatctcagggtttgttgtttctcctcattcatcttcattgcatcctca

SEQ ID NO: 253396 - DNA, 949 bp, Cannabis indica
attaaaaatatactaaacttaatctaaaattaatactaaaaataacctaacacccatcacgagcaccggatttgctgacagtggtctttgttgctaccattgttgcagtatacaactttgatactaaatctttctttagctctctatgaaaacatcaaaatgtttacgaagatgttcaaaaaataataaaatataacaaagctaaagaaatatatcataaacgaagaatgagaccaaagtttttacgtggttcaaggatgaacgacctctagtccacgagttaagattattatcataaaactggaaaagcctctttgatttacatgttttaaccctagaattttcctaagcactcaaggaataagattctaactttttgcatgaatgtgttttcttatatttatagtgctagggtcctaatctgtaaaccttgctcactgatggggtaaatacaggtaatacattgacttcagactcacctagtggagcccgacccatgaggtattgattttctactgacgtggatgccacgtcatgttgatagttgtcaaatcgtgtcctacttttgtggataataaagatacataaatccttaattgataattactttatttccatattctaaagatatgattttcagatatgatcttgagaattaagtcctgatagtgtgggatttaataattaatgaatgatatacagagctgaatatccagttgtcattttactactcatctagacactttgcttgacactattcgaagatacactgtgttggagatttatctcgcatggatcagtcgtctgtccaacattcggaagactgaaatttgctgatggattcagtccattatcttgattggccctattctaattaaactgaaccatcatggaattacacgtgttctctaaccggtaacacggataatacaaaacatataaaatttat

SEQ ID NO: 253397 - DNA, 584 bp, Cannabis indica
tttctctttcttttgaagttaattatagttaaaatcaggaacagacatacattacaccatatatgttatggaccccaagaatatatatgtaaactagtttattttggtcattattctatggcagttctttaaaataatcaaactaaaatttataattattattaacttttttttgtgtttttgtcgatatgtatttactttcttttatttattttatatgaaaaatctatttgtattttttttctttaaaacatttatttcttctttagtaatattaatttgcttggtaagacatactacctcattttttttttaactaccacttcaaattttttaattgtgtatagtgataacttttatatttacacttctagaaataccacaaaatgatatttttcaattatgaaaaatgaatatttaaggtggcatttggtaacaattttttaatcagttttctgtttttaaaattgaaaaagtgaaaatatttttcagaaacattttctataaaacaatttttacttttcaattttttaattagaaatcaaatttaaaaacaaaaaaaaaaaaaattcacttttaatatt

SEQ ID NO: 253398 - DNA, 1507 bp, Cannabis indica
acgatgatgttagtcattattgaaaggaaaatatgaagaagggattctgtataagtagctagctctcattacaagactagccaactcctaacaaagtctaacagttgttaggctgcaaattttgatggaaggggaattccgtttacacaagttgagtcttcattagattaaaagcacaacgacaatactcgtgaaacttgatgattacaatttttaaaacatactacttttgagttttgtatcgtataatatgtttgttcatgaccaatgaatcagtaatggtattttagaagtaaaacttagtttcactttcatgttcttttcttccccttacagatggacacaatgaagccgagtttggaatgtcatggtgtgctggctttggaggatcattttacagtgcctattttgaggtaattttaatctccagtccagaccctgaaaagaaaacagtttcttctgatgtctgtagagactagagaaatcgtaatattgatataaatctctcaggatttccttaaaacaattgggaatctcaagcaaaagctaactcaagcttgcctaatattctaagtacaaactcgcaattgttctgtgttccatcataatgtgtgctattttctctctccaggtgatgcccaaacaaccagggtttgagaagagaacggatctgtatttgttgtatcattacttgaatcattacaatctttttggttctggctatcgttcttctgccatgtccataatagatgactatctacggattctaaaagcctaggctttccttcttctttcttttttctcttttttggtgaccaagtacaatatcaatgtatattgtatctatatgatgttgcttgtcaaattagtattaataaaaatacaccaggttgaactttgttttgttgctttattgcctttggttaaaatgataaattgatcaacaaaaatggttttaatggcaaaaaaacagccatttgataaatatatttaggattatttgggatgaaatttttgtatgttttgattttctatactttaacacttatttttggcaaaacccttatgtttatttttctttgtaaatttgaagtaccaactagatatcattaaattaaatttaagagattttatcattaaaaaaataagagatttaaatgtgtaaaaaattaacacaaaattattttaccactaattattcatatatttatatcaaaatctcaatattcaattgttatttacaataactttaaatatcatgatctagatttatataataactttgaaaagattatcatgatctagatttatatttaattagggtcatgtatatattatattttttgaggctggattttgatacccagaaaggggagcccggagctaccaagaactttaactcttaatgttgaccaagttctttggacctaattacttttaaaagcataatataacaccaacacacactaaatgcattttaattttaaaccatcacaaattctcacat

SEQ ID NO: 253399 - DNA, 449 bp, Cannabis indica
taattacgtggctacacaaacacattaaaactgtgtaattacctccaattacatccaatttcaattcccgggtggctttccaaacgcgcccttagtgtcctctatatatttatcaattgtttaatattttatttcttataacttctaaaaatatgtattattggaaataaaataatatacagtgtattttttataaagattaaaaaataagtatataagttaaataaagcttctacatcaataaaaacataatattaaaccctaagccttatataagttaaataaggcctatacattaataataacataatataaattaatagattatggatatattcgcaattttttttacttattatcttttatttaatttttattaatattgtgagtaaaaaatttaaatatccgcttgcgaagcgcgatttgtttcctagttatattataaaacc

SEQ ID NO: 253400 - DNA, 857 bp, Cannabis indica
gaattcagggtcaatctcaatctttgacccggaccagtacctaaacctaaactcgatcccaggactcggacccggacactaggatcagacctaagacccagatccaagatcaaaactcgggacttgggctcgggactagggacccgaacccggacccgtatgcagacccggattgagacctagacctggaccaataattagtgttgaggtcgagtttattgaaaatatattataactttacacaatctattaatacaagtcaatatcaaatatagtattgtataaacaatatcaatacaatacaatctaacacaatacaatacgacgtaccaaataaactctatatgtataaatatatatatcttatgggaaattaattaataggtccgggatctgcgtgtgggccagaggttggggacatgctctaatggtcaaaggttagggtcgaggttggaattgggatccaagttcaagggtttgtgtccaagttcagaggtttgggtccaagttcaagtccgatggttgggttccaagtttgggttggggtttagggtccaaggtctgggggcctaggttggagtccaagtcctggtggaagttgaagtcaaagccagagtcgaggtccggactagggtcggcgtccgaggtctagagacgggttgagatcaaaagtatttatgaaagagaatatcttatataaatgttgaacaattaaacagtattattttaaggataaatagtggcatacgtacctaaagttttaaatttgtaagtggtataatcccaatgtttatttttagcggcataagtacccaatatttgtaaaattgtaatttttctctgatttcgtcagtaca

SEQ ID NO: 253401 - DNA, 825 bp, Cannabis indica
aggcagtcagaagtgctaaaagaaagaaattcacccagttgactcaaaaagagaacatgagtgttacagaatacacaacgcagtttgatcacttggcaaggttagccttgggaattgtgccaaccgatttcagtaagaaagaaaagtacctggacgggatgaatgcaaaaatcagacatgacctgatgattactaccgatgacaaaaccacctatgttgatatggtggataaagcattacgagctgagggtgcagtgaagtgcaccttagaatctcgagagactccagttgttggcggggcttctacccttcctacatcaggctttggtaggggaggtagtggctcggccaatgatcagaaaagaaaggcgcctactacatctagtggttcagttcaaaacaagaggttccgggggaaccagggtcgaggcaatcggcaaggtagttctgagacctgatacacttacctagagttccccagttgtaaaaggcaccatctgggggagtgtagaggacacgggtgtttccagtgtggtatgtcagggcattataaaagggattgtccccaactcaagactgaagcaccaaagactacagcgaaacccactccagctagggtgttcgcgataactcaggctgatgcagaagccagccccccagtagtaataggtcaactctcggtcaacaactcttatttctctgtgttgtttgattctggggccactcattcctatgtggcagccagaatttttagtaagttggatagaccgcacgatagttatgaatcagggtttggaaccctattacctggcggagagttagtta

SEQ ID NO: 253402 - DNA, 514 bp, Cannabis indica
gtatttgtacattgtcttgatttttttttaattgagtacatggtcttaattttgtttgaaaaagaaagggaaatttacatggtatactaacttttgccatttttttttacaaaaatactaccagacggtattttttacttttttactattttttttataagttttatactgcagtatactgtgttaagttttcactggtgttctactggtgtttttttagttgttcaagtgttgttttgagttgttctgctttgtgttttaatggtgttttataaaaatacagtatttttgaaaaaaaatccgtgtgacagtaattttgtaaaaattaacctaaattccagtatttttgcaaattgtaaatgaaatgaaggcccaatatgagctgaaatgtaaatgtaatgaaatagttgtcagcatacattactcataaatctagggaaattcttatgtgacccaaaagagagtgcagtgactagtaggagtgcgatgcagtttacaatttgcaatctcatat

SEQ ID NO: 253403 - DNA, 789 bp, Cannabis indica
atccacgtgtcccctctcgattggtccacgtattttgggcgaattctggagcaacaccacaaacaataatcactaatttttgacatattatatgatgaggaaatcttgaaatagacaaaaccacagagtgaaatccccgaaattgatgttaaaattcccaaattacagcctttttcttatctatgaaatcctcaacctaaagatgactctctgtataagaagaataaaaattctcaaattaaagccttttttttatctataaaatctccaaaacgatgctctacaaattcaattgacccaaagatgattctctctagaagaagaacaaatatccccaaattacattgaaagtgatactgtacaaacaatcctcttacacaaaaatgactgatgtaaaataataataaaataatgatatattaaattacaaaaattgtataattattattattttaaatcatttaattaaaaattctgcataaattattaagagattaatgtaataaagttatattatatgtaaaaaatttccatatatatttgatttaatcaagtctccattttgctcagcaaagtcatggcccaaatataattacttcaactccattaaactcttttggtgggcctatttgtttgttcaaaacatattaattaaggggctattttcaaatatatgggaaaaaatattaaggttatgataaatatggcataaaaagtaaatgccactaaatatgacattatttaataaatcaaattaaaatataggtttttttgtaaaaaaaaaataaa

SEQ ID NO: 253404 - DNA, 1508 bp, Cannabis indica
tgtaccattagtggaattagaaagtagacaactctgacaacgcttagccgaatctaactaacgaaacactgagttagaaagagaagttgcagcggctagggcgactaaaggaactaatactcagaatcaacctgatcttggggtgagaagaccacgaggttcaagaaccaggagacaagaagccaatcaaggaaatccccaaaacacccaggaggaacaacttgggggtactagtgatgttccagtggatgaacaacaaaataatcaagagcaacgtcgagatgttccttagagatcccaaggatttatgaaccaagggaatgaacataatggtgtaccaggagcttctcacaggaatgaggatatgagatagccccgacctagggagtaggaaatccctcgtggcaacgagagaaaccctgggactcaacctaggataggtgggctgccaccgagacaccctcagcatccctctcgatcagagagggaaggtgtatacatgtacctaaatagaggacgtgtatctaacctcttttgaaggagaagaccaatacaagacgaacaagttctagttcggaacactcaaggtctcaaggacacagtcgatcaagtaggcaaacacgagaagaaagtagaccccgatgttatgccgatcaagaaagcatgagcaatatgcgaagctatcaatctgagagttactcaaaaacgagatatgtgagtaattatgagcaaagacaacctgatctttatgaacatttgaatcaaagacaacccaatctttacaagcaactaaatcagaatgcacctgacttacgccattaactctggcattttaggcaaataagaagcattggaatgtcaatgtttgaatacatcataagtttccccacaacatagggataacacttgaaaaaccaaatttgcaatgctaatgaaaaacccaataacctataaaaaccaccatcttgttccttctgcttcaccttcctaataccaacatcaattttatccttcaatgattcaatagtcatattaaaaacactctttccccaatccatattcgttgtaacgattgttatccaccacatcaatttcctcaacaaaaacaacctttccaagaggaccacccaacaagtagcattgaacgaaatacaagacaaccagcttgactgctagttcatcattatccttaaaattatcagcagtaaaggcaacttggataatattctttgtaattttttattgccctttaaataatgtttaacaatgatattttcatcctgcttatactagaaaatatcagagtcaatgtggtaatttaaacccgtaattaacaaaaattcctcaacactacacctcaacaatttgcctggcacagaaatctaaaattccaacttatttggctgctgaacctcccttaacaacgaacaatgaatgagttggaagtggagactgtactcgggcatacggagaaaattaccaaagacagttttcgagaatatttctag

SEQ ID NO: 253405 - DNA, 677 bp, Cannabis indica
tgaaaaatacatcttttttgtttccattcatcaaaaatatacccacttttttgagtgggttgcccaatataccctcactctctacttaagtcaagcttataatttgtattaacctaaggggtttaataaaaatatcatctttaaaggtgggtatatcttaaagaatatgaaaatagaggtaaaaataaaaacaaataaagtaaagtgggtataccatgtaatttcctcttataatattcagtctgttgggcccttttgttagaaatgaatctgattaggctttcatgtcattgatctttttcttttttctcccccaaacaataattacattttggtaaaatctaatttatttcagaaacaaaaaatcaaatacatgtgttacatgtgacatatgaaattattttaagtacgaaatactaaaagaaaaaaaaatatatagaaatccttgcttagaaatataatgtctttattatgtaatattagttgttaacgcagatttttattaactaaatttgagcatcacgattatgattcaatgcagaaataataaaaactatagaaaaatgaaatatggacaccgggtttttacgtggttttgcagttaaaatactgcatagtccacgagtcaatcttattcatatttctgagtatttttttagggcctcttgtataagagt

SEQ ID NO: 253406 - DNA, 434 bp, Cannabis indica
aaaaaatagtaaaaatatatgtaaatcaaccaaacaacaacaaataattatcataataattaagaaaacacactaaacaacatcaatttatttattaaaaaaaatcagatttgttttttttaaaagaaaacccaaaatgtgtgggtatgaaaatccaaggagatctccctcaatcgttgatattcaatgatttcattagatctcctcctcgattgttgatcctttctcctcggcttcatggagatctccccacggtgatccgactgccatggcagaatatcgaaaaaagcttatcgccggcgttaatggagatcaacccaaagttcctagtgggcattcatggagatcacaaaaaacttttacatctttggtggctgttaatttcagatctccatcacttgattttttggtggagtgttgcctccaatgaagaa

SEQ ID NO: 253407 - DNA, 690 bp, Cannabis indica
gtagcatcgaccactggaggattctgagcagtggaggtagctgagatggtggccctagtacgcaccattgttgaagaggaaagaagcttcaaacgattttttgaagcttgaaggaggaggagtcttctgataccatattagtggaaacagagcatatttctttattgaacaaattgaatgtgaaaatgtttgttacaactgattgaatattaggagaggtacatatatatactggcacagtaaaaagtaactaatataaccgacttaaatccaaaactaaactaatctaatattccataagttgtacacaattgctgttataaggcaccacaccactcacttcttccattttgtgattttccttttccttatccaatcaagcataaaaggatcagaagatatctctttgccatcaaagccaaccaagcaatgaatttatattttggaacacaaaatctgtcccaaataaaagcaaaattcaagtttccattaagagtttgctcatatttactaaacatggcagcaatagaatactgaaagttattaaactcagcacctatataatattgcttcaacaattcttttacctgtaccatgtttgtcttttcactcacactgatatatcttatatttttaaaaaatatatcactagctatctaaaagcaataatgttactaaaactaaccaata

SEQ ID NO: 253408 - DNA, 594 bp, Cannabis indica
acagttgttacagtccggttttcataggatacaatccctgattttgtgggatttatttttcccattttggcagcctttataaggcctttattcattgtattttaattcattcaatatcaataaaacactttcctttcaatccgcaataagagagaataatcataatattcttctttcttaaaaaaatacatttatcaactttattaacagaaaattattcaagattatattaaaaaattcaaaaaaaataatatctcgactcttaataacacgatcagcaacaaaataagatgctcgtgttagaaaataaaaataaacaaagacatcatgcaatcatctattaacaccttacaatcaaatataacacatcaaataagacaacatagagagtggactttggatcgatgacacaattgtaaagctatcagtttcaacaaccactcctaccaagaattcttttttattccagctcaaggcttcttgtacgaccaaagcctctgcaatttcgggagccacctgacctgaacgaaaacaagaaatcgcctccaccattgcaccatcagcatttctagcaacacaaacgaagctataagt

SEQ ID NO: 253409 - DNA, 765 bp, Cannabis indica
tggaagaagtgtatatggagcaacctcctgagtttgttgctcagagggagttaggacgagtttgtcgtcttcgcaaatttttatatggattgaaacaaaatcctcgtgtttggtttagtaaatttagtcaggctgttgagaaatttggtttgttgaaaagtaattctattcattttgtgttctataaaagatcaactgctagtattattttgttagtggtgtatgttgatgacatcgttattactggaaatgatactgaatgtatctcaccccttaagtctttccttcatacccagtttcacacgaaagatttaggggtgttgtagcatttctgagtgttgaagttactcgatgtaaacaggtatttttctatttcaaagaaagtatgcacttgatttgttaactgagacagaaaattgggagcaaaactttgtaatgctccaatgaatccatttgtgcatcttacacgagatggggaaccatttgaagattcttagaatatcgcagattggttggaaagttgaattatctaattgtgactcgtccagatattgcattcccaattagtgtcgttagtcagtttatgtattctccaacaattcctcattggccagtagtagagcaaattttatgttacttgaaaggagcaccaggatgaggtatagtttacaaggatcatggacataccccgatcgagtgcttctctgacgcaaatcgggtaggctccaagacaaaataaacgatccacttcaaaatattgtgtat

SEQ ID NO: 253410 - DNA, 717 bp, Cannabis indica
taaaaaataaagagatggtaaatttttacgtagttcaggtgttaattaactttaatccatgagtcaatctattagcatcttagggctatttttgatgtgtttataatatttggaggaaactctaattgtgcactctatgtttcttgtgaagaagaggaagagtgaacttagcagtcgtttcagctatgttatttgcgactccccctccatagtgggaatatggagggttatttataggctaagtgggcgggtatggacatcgcccatcgacccaccgttagggtttcttacaaaaagtccactaatggggtaaaatacatgcaaaaaagagagctgactattgggacccttgagaagaattgtgcttgtgtgttgcagcagctagacaattggggaccattgtacgccatggacacttgccgccaaaatgtttaacctttaaaagtacaagcctataataactgtctggcaaaaaagtgtctgaggtgtgcgcattaccatattctgacacaggggacaagatctgcttttatgttagaaaatgcataactatcgttgggcaatctagattgcatcaaaggtagacatccatgatactcttgggcgatcagtgtccgcgtcaggcccttcgagtattagttagacagactctaagtttagaccgctctaggtcctaaagaaacaatatgtcttccgtgttcaggaagctatgataag

SEQ ID NO: 253411 - DNA, 618 bp, Cannabis indica
caagtgctctaggcccatagaacgatagagaaaacagtgatgggacacactccattttcattggaattcaacttaaaagatatgttacatgtagaagttaacatcgcaacccacaggcgcaaattctacaatcaggagcaaaatcaagaacttctacatatgtccttggacttgcctgaagaaaaacacaatgagtcacaaataaccaatgcagcttgccaccaccgaataacaagatactttaacaagagagctcgaaagaggttgtttagagtaggagatttcgtgttgagatgtgtctttgcaaatacacaagatctagcagtagaagtgtttaacccaaactaggaaggcccgtatattatagaagctattgtaggaatcggggtttataaattagcttggcttaatggcacgctaataaagaatcactggaacagcgagtatttacggccttattacaagtaattttattatgtaaatgctacatctatctccgtaatcattgatcattgttctgaaaaaaaaaaagttgaattttttaaagtgattataaagttttattttctttaaaattacttggggtcatctatgtgtataataactagattctaccta

SEQ ID NO: 253412 - DNA, 1564 bp, Cannabis indica
aattccatgtgtaagcttgatcacttctgcatgtctatgatctcaattcgaaatctagaaaagtgagaattgaaaatgactaaaattggataatcgttgttctatgtgtaacgagagttttcacatgacttatgtgacatgtagattattgcttaatgttgatttcatgttagtttaattaagagattaattagagaacatgtgatttagaacctaaaagatctgaaaagagttaggttaatttataatctgtcattcacctcaagaacaggatagcaattaggcattaacaattaggtaaacatacaacaggattctcctccctattatctcatcttgctcaactttcacttgtgttatttaagttttctgaattactttcattctttttcaatcataaatactattggtttgccaaatagaattataagtatagtttagtagtaattaatccaattccctgtggttcgacctcacttgcgtgagtatactacttgattgcgtgcacttgcgtagtttttaacaattttagtaacacttatccaacacctggagctacctgcatagaagagataaggggaggtgagcaacctaacaaagctacaaacacattatcatcattagtaatcaagggtaccttccaggttaatcacaatgtataaggtcaattatcgaccaagtcgcgtcttaagtacacttactaagacatatagtaagtcctaagttacacaattgactataatggactcaatactgagccttatacagagttcctaaggggaaccacacataagactattgttttgtatgcctttaaggctgtcatgagaccctaaccgaggtcaacagagggtagaaaactagctgccctttggagccttggccttggcttgccaagtttccagggcttaatgaccggctaaatcccatgacccagcctagtggccagccaggaatcccttttcgaggcataggccggccagcctaaggggtacatccccttggctggctagaccccttgacatccaccctttcctggccaggtcttaaataagaccttggccggtcaaggcttgtacggatccaaacatgtgttttttcaagaactcaaacacattctttgtgttctttgtgttcttcatgactcaaagagccaagaattacaacaaaggtcagattcagatcttttttttctagaaatcacacattatatatcctaaggctatcatgcagatcaaaagattgaaaggacaacaatctaacgttaaaattgatggttattcaaagaaaagaataaagttcatgcattcatagaaaaatcaaccaatgcaagtgaaatagcagaaatagaaagcttacccactacaagaaaccattgaggaggaatgtgggaatcttggatcatcaaaacggcgcaaaaatccctagagaatggtgcttgatgggttcgaccctctattgggaaggaggagcttcttcaaatgaaaatctttagtgagagaagtgaaatgtagaaagtgaaaagtgaaaaaggatttttcccccaaaaaagcacttatgtagt

SEQ ID NO: 253413 - DNA, 675 bp, Cannabis indica
aaagttgtttttgccgtgtcccagtatttttgtaaagttttggtccaaaaacagtatatatgtaaatttccccttatttttagctgctgttttaaattttttcatttataccttctttttcagtttctattcccatcatacccctcccattttataatctctatttatcttcttaactgatatagtgatatttagttcccctaattttctcagaaagctttgcacccatctccacctaccttagactccatgagcttcaacaatatcctttgtaggttttgcatccatttctccactagttgaagcctgttcatatatttattttgaactagatttatgttaggtgcgtattaaaataaagagtaatttacgtcgtaaatacttaagtttacaaataaatatgtaagtttaatttttggcaataataatacctaagttatatttttggaactctatgggtacctaaccgttaaaatattatattatccacgtgtcatttttttattggtatattttaattaattttttacaactaggagttaaacttaagtatttatgccgcaaattactctaaaatgaataaatttattttttattttattttataattatgacataaattttaaataaataaatggtgatataataataaaaaaaatgctagatataactcat

SEQ ID NO: 253414 - DNA, 714 bp, Cannabis indica
aaagtaagatacatatatgagttaccaagataaataaataaaatgtaagagtaaattattaaaaaaattatggtgacgtttggtaatatttttgtttttaaattttttaatcataaaaataaaagtaaaatttttatttttgaagaacaaaaatgtgttttataaccacttttgtttttcaattttaaaaacaaaaaataaaagtgtgttctgtaaatattatttttatttttattagttgattttatttaagtcgggtccaaggtcgggtctaagatcgggactgggggcgggtccaagtctggggctaggtctaggttcggtttccaaggtctaagttggagtcgaaatctaaaatattgattaaaaaaaactgtttaaaaattttttgaaagtgattttgcttttgtttttaaattttagattcttaattaaaaaattgaaaaataaaaacagttttatagaacatgattttggaaaatatttttacttttctaattttaaaaataaaaaaattaattaaaaaggtgttaacaaacgcatcctatatatatatatatatatatttttttaaaaaaaaataatcatatgtaaacattttgaaccattaaaattttagtcaaagtttctaaatgagaaattagaatgatgatttattttagaaatttttacaccaaaaatacaaaatactaactttattacatatatacaaca

SEQ ID NO: 253415 - DNA, 2645 bp, Cannabis indica
ttacaacgtttttcacaaaaatgatactaggcgacatgtcaccgggagtgatattctcaaaccatatatcgataaaacatcgctaaaacattaagaaacttataacacaagtttaggcgacatgtcgcttgggacaatttcagcacacacaaaaaaaattcttgataaaaaaaataaaaattatctagttttttaacatgtcgtacttttagactagtctattcatgttcatatacttaacgtgtttcgcctttgaatttgccatgcttaaatccatcatttttatctgaattgtgctaatttgtaatatcgtgtccaatctcatatctttttcgtattgaatcgtgtcgtacaatatcagaaattggtatttataactaagcaactcccttcacctgctaacatcttcccagtgtgcaacacgtgacaatggatatgtaaaatgattttaagctcctttctatcaaaacacattatgggacacaatgttaatgttgaagagggccatcttttgttgatgcatttcatttctcaaatccagtgattccttcctccaatattgtgaaatacctcccattcccagaattttctggttcctttcatttcaaacttcagacaaagggtgagtgcaacatcaattgattttaccccagtactagtagtaagatccaaatcattaatagggagaataagcaaacacaaaaagattgaaagtggaagaacatgggaattaagcatatgtagagtgtagactctgaatataggtgtttaatggaataaaatgatcaagaacacaatagaacacagctgggtattagagagacccaatatgaatactcttccactactgctcaatttaaattatgtctttccatctacttttccttcttggctgtacggcaggttctagtgttctttcatgtactaaaaaaactacaagttcatatttaacgttcatgtcccctactttcacttgccaaattcttcagtatatttcaactagctcctaaaaggtataatcatttgccaagcataaatgatcaattgcaataaaaatagaacttttgtgattacattgaagaaacatgagagatggtactagagctttcaaacaaacaatgtggtgcggctacactaggcaagtgacctccaattcatccctaaaacatgaggaactacaaagctttgtaacctggaaaaagtagaaccaattttaatagataccgcacaacttcaagtccaagaaattttcatgtctgcatggcagtaacctcatcttcttctccatcttcattattgaacatgtactgattttggaactccattagatactgagttgatctctttacatctaagaacagatggtagacacggttaatgtcttccaattcgacagtctttccctttcgcttcagacacgctagtgagccggaagtaatgagattgatggcatacctcaaggatgtgtctactccaatcttggtcaacaaaccctttgcctcttcagacatatctacttcttcctcctggcatcttatatctagaatctggcgaatttcctgctctgtgtaaggttgggtagagattatgagtaggcgatcaagaagatctatagggatcccatgtggagatttgtaagttgtgccccggatcgtagtgatccctctgtttgtagctacaactaatatgggggccatctcgttttctagtgcacgatttagaaacgaaaagcattcaatgtcaagcatatgcacctcatcgataaagaggacacctggtacaatttctgctttcccttcttccctccactctgctacttttgtgtcaatctgttccctcacttctgcacgaatttcaccagtatcaccagtgaagagggccagaaatccctgagttctgaaatagagaagagttaatgatgggagaataaagccaagtaaaaacaatgaatcaagagataacacaaatggtgaaataagataccctattgaaataggaaaagtccatggatatttgaagaaacaattacagccaaacttgaagaaaaagacgaaaaaaaaaagtctacagcttttacaacaatcaatttcctttatagggctttcacctggaactagaaaatgaaacattgcttcagtgtatggtatttaaaatcattggcattgcagcccatcaaattttcaagaataatcagcaaattatattcgagcttttttaattgctttgttggttttccttagagtgtttgtctagcattgtccatatgtatgaaatatgttaagtagagagtaatgaaggccagcaagaacaactatacatttgagcagatataggtaaaggaaagaattaactaaaaatcatacatttcctacaaggtctccacagctcaaatcatctaagattatcacacaaatcgtaagacttaacaagaaaaatagtacaatggcattatgagcaaaaagagctcatttcatatcggtggataaattctatgaaaaccaaaggatacctgctattgataacatcaaatctcatgaaagtgtgacacagtgaacgaccgtccttacgcttctgcaactccccatctgggcattgccagaaccttggtctggggtccctgtggcagtcgtagtcccttgacctcg

SEQ ID NO: 253416 - DNA, 620 bp, Cannabis indica
aaagtggttaaggagctcaaatcgggtgtcacacacagaattgagatcttttggccaaagaaaatttcggatgaagatagacattggttcaataatttgtaaatattgtaactaaatagatatagaaatcatttataagttgctttcaaaaattaaatgtgaagatgtttattttaggcccagggtgctttttggatgtaagcaaacaatttttgagctaataaaattcttgattcataaaaaaaaatattgataagttaagtttgattttttcaaaaaaaaataaattaaaagtaaaatatcttcttaaattgtaaattaaattttcataacttattagaaaaaccttgttttatatgatgtacaatttagaatttaaaatataacatacttttaaaattaattatatttaataaatatatatttgaagggaattacctcacatattgtttttttaacttttttttttaaatttacggtttcagtttctaaaatagttgcaacgctagttgcaataagggtttctatacgattttttgttgcaatttaggttggagcgctagttgcaataggagtttctatgcagaattccttaagaatcaaaaaaaaaaaaagaaaaa

SEQ ID NO: 253417 - DNA, 546 bp, Cannabis indica
ctccaggactcgtcagcatatttaagctaactataactataagctacctactacgtacctatatatatctatagctttctttctatgccttttttatttttccttctgcactgcttccatctatggctgcttttctagttttgtcattaatgataagtgcctttaaatgtggatattttcaataattacatttattaaaaataattaaatcacgtcaatatcatgtattattctctccataaattaatctaatatccaataataaatattgaccaatttaattataatcaacagccaaatattaaatattctaaattagattaaatgttatttttaaatatccaaattcaatatattcagtatcttatcaaacaaactaatattaaaatttaatttttttattgttagatccaattcaatatatattgaacatattagaaggattgatcctatatactagtctaataactaaattaacaaatacatatataaaatatatctaaagatccaaatccaatattaattagatgactgaaattaattaga

SEQ ID NO: 253418 - DNA, 1230 bp, Cannabis indica
taaaattaatatttataattattttttaaataattaattgatacaataccaattaaaaaatatttcatatgtatactgagaaattttaaatattattaacatcaccacaaagtataatcgattggtataattaatcattaaattttatacattttaaattaataattactacataaactgctaatcagttcataataatatttagcactactaataaataatagcaatacttatatatatttgacttacaaagtaagaatcatatgtgttgtctatataagtttgtgaaccacataaaagtaggataagtgtctcacccaattaaattaattgataacaccgcccactcttctggatgattttggcaacagctcatataattgatagaattgcaaataattaatattatgtttatgtttatgtttattggcaagggcataactgagttgttgaactttttttttataaaaaaaaggctcagttgttgaactaataacttaaaatatacatgaaagataatttcaaattgatccaaagatcgttataatcacccattaatggtcaattccaaagtagaagataaaatatgtacttgctacacagtgacacttttttttttgtctcaactttcttatgaaatattaaagtagttttaattcaagctttatttatgagttttggtgttttcaaaataaggggtgaagcctaaaaaggtaagcgtactaccacatcatttgaaggatttttaatagaatgtgactttttttggactaaaatcaaataacaatactactttggacaatatcatagcaagtaataattaggttacaactcttacaattaaatgccacaagagcctcgtgagaggcattattactactacataaattgactttacggggttagtggatggagaaggtttctactaattattattattattattaaataaaccaaaaacaagcagatcaacaaaatggattggaaaagaatatgtacgagtctgtgaatgtacttgcttctatttgaatgtttattaattaaagatgtgactccatgattaggacatttaaactcaaatgacgctcttaagaatccaacttaattacaatttacacccaccaaatatcaattatcaaacccaatattggtagttgaagcattctgtcatcggttgtgaagtacttacttaaacaaagtggcagaatagattatgaattttcagtaacc

SEQ ID NO: 253419 - DNA, 1236 bp, Cannabis indica
taattaatttaactaattatttactacatatattgaaataaataattgaataaagtttgttttttttagaagtttcgaaatggataaaaaatggatgaatgggaatagattatcaacggagtatagtgaaggtgttgaccgtttcttagaattttgtcggaagtatgccaaaaattctaaattagatctttgtccttgtcttaaatgtggtaacatagagcgtatggacattactaggataaaggagtatttattgaggaacagaataaacaagaggtataaggttggggttcaccacaaggaaaagaacagagtttcgggtgagggacgtctaagtctaacaaggctaagggtgttaatttggactatgaggatgatcacattcccaaaatgataggagatgcacaatttaaattaaatgtcgatcctttgaaattttaaagttttgtagaggaagccgagaagcctatttacccttgtttactgagttttttggcaacaaaataaatatagagctttagaaagtaatgaagacgtaaatagctagattatagaaaatagattttacgtggttcaggcgttaattatccttagatcacacgccgaacaacttcttcgagcttaatgaacccatccgctcgatctagaaattcggtcattgatcccacagttagccttttggatatccttccacaattctccgagaggctcaatgtccctcagtattacagccaatcttccttcttcagtcagccccttaacttttgtagccttaatcataaacctgctaatataagctctggggggttcccctagccttcgctttacttcgaccatgtctttaaggtgcgagggaatttgacgagaggagaaaaattgtgcatggaactctgaagagaaggcattccatgagttaaaccttcctggaggcagtttgaaataccattgatgggcggcctctacgagtgtggcaggaaaaattatgcactgtacatcaccacttacccctgcaagtctatttgcatctcaaaatactctaggtgtgataaaggatcttcttttcctgtatacattttctaagttggtattttgaactttgggggtagctcaagaactttaatttcgagggagaaaggtgattcgcgtgcccggtcgagttcgagattagtaagttttgggccggtcaagccttgtaccatattttttagttgaactatttgtgcttgcccaagtgga

SEQ ID NO: 253420 - DNA, 985 bp, Cannabis indica
ataaattacgcagttgataatacaactctttctgttaatcactcttgaaataccctaactggtagggatgctacgtgtatgtttctacaaattagtttataataataaactaacaaattaataaaacatatgatttaattaaaacttaattaattaaataaataaactaaaacataatattacaaattttaacttcggggatccctatttaaaacttttacaaaagttgccaactcagaattacatccaaaatataaattttaatccgcaaaagcgaaataaaacacatgtccaggaaactcggcctcgctagccagatagactgatatgtacttgctggagaagaccccaacttacgactgatacatcttacctatactacaaagcatctgtgagtcataataactcagcaagaaaagtaataacgtaattggatcgtaggatcgttcccaaaccaccccgtaatggttgggtgcgcatgatttacaacttattgtgatgatcggcctagatctgcaactatatactatgtttgacagaatttagcgaactatagttattttagcgatcgattgtgtcagaaatctcaggaacccaatcagatcgtaggatcgttctcaaacacccaataattaggttgggtgtttacaattgtgacaattgacctagatccgcaactttatactatgtttggctgggtagttttggaacattctcatttggaaccatattttcaagaatttcaacatcaacaatgtcatgattatgattttctaaagaaatatgtggttcttttataataaatttattaagagtttttctttgagattgagtacttaactcttcaatttttttttcttaagaatttaacccaaattcatgttttctaattataggaggcatagctgaaaaaacacaagagttaatataatatttcaaaatacaatcaatatatacagtaataatttattaaattagaagtgaa

SEQ ID NO: 253421 - DNA, 1142 bp, Cannabis indica
aatttagaaaacaacaaaaatatatcagaataaatattttattatagtattgatgtaatttttttttaattatacttgagttggattgtttgggaactccacttcaacttttgagatatgcctttcatggatctaaaaaatgaagtcaggacattagttttatacaaattaaactggaattccggtttctagttttgtagtagtttttccacactttttttttatataaattcgaaacagcccctgctttgattgattctggtcgtcttctcaggtgaagtccccagaattaatggtagttctctttctggttgaatttttgtttcggttgtattgggttgttgcgtagttgcacggtggttgcacgatagttgcctaggaagcagggatcctggattgaaggtgtgtgtaagttgtatttgtgtaatttttttttatataggttgtatatttatttatttggccagctggaaatatttttcgtaatattattacttttttggttaaaactgaaaaaagcccgtagttttataaaaattaatttaaatttaaagtaatgtcgattctttatttttaattttttatgagttatttgagttgtctgtttatatatatatatatatttcgtacaatatatttattttttgttatatgatatatattattattcttagatgatattatatatattttttttatgtagaatgtggtaaatattttattagcataatatatacatttttatataggtatataattttattgacgtgctccatatatttaattgtagttttatatattatatataactatagaatatatcattgttgcccctgattttgcccaatatacgtggaccaactggacagggacacgtggacaaaaagatcttagcatttaaattaattgctaagtcttgatgaagaaaggcgtcttccgggacctgcctcccagagaaggcatccggaggcctaagtaacataaaagcatatccgcgaggtgtcaggcttcccctgagcagtcatctcccatttaatgtcgcatggggaggaaacggtgttgggaactgctacacgcaataaagtcagacgacacaacccccaatctgcacctacaaagtcatgatcacttaagtctattga

SEQ ID NO: 253422 - DNA, 602 bp, Cannabis indica
aataataattcacacttatatatagaaattatatgtgttactatagtataattccttaaaaattgtatatactaaccattcacttctattaacataaaaaaaaaacctaaaaaaataaagaaataaaccaatttttttttttcaaattcataacagaaaaagtgcaataaaatgacataaatattatagcataatttaaacaatccccataaaaattaatacttcttattcttgagatatatttttgttaggaattgcaaactcgttattcaactatagctcttaaaaaaaatataaatcactaattagtaaagaaaacaattataacataactcaatataccaaattatgacatatataactcaatatcaatattcatttagccattatagaatgaaagaaaatataatattatacaataacttcttataaaatcatcctaattaaacatgttaaaactgatcaaactaacacaaattagaaatcataacacagcgaaataatgatcttataacaatgtagtatccataataaattaaaaaataataataaaaaaaaactagagttagataataagctttgactttcataataaatgaaaa

SEQ ID NO: 253423 - DNA, 529 bp, Cannabis indica
aaaagtgttttgggcattttttcagtcataaaaatagtaaagattcaagcagacttggggagaaaaccacacccctgagcccttaaaaatagggcccaatgcccaagttgacttggtgctgggcgcagtgcccaggtggacaatcaacgtgggacgctgtcttcaattggtcaaatgccaaaatagatgtgaccgttgaatctacaatggtcacaaacggggtaggagacctcatcctcaagttaaaaaaccttggaagtataaaaaacaagatccttgggagctcgagggcaagtacccaacacccaagttgaaaagaggcatggtgtggtgggttctactaatctgaatctgatgtcattttgaccatccatctagtttttcacaatgacaaagatctatgaagttagagaattcaaattcacaactttgcatttccaatttcaagcttacccagaaatgaagagtttttagtctctcatttccctaaaacaacaacatctctgagaactggtgactagctttgcta

SEQ ID NO: 253424 - DNA, 599 bp, Cannabis indica
ttaaaaatatgaaaatatttttccatacaactaacttaaattgtaaaaaagccataagttaagtaaatctctaatttttctatatctatgaaatttaaggaaaaaatgccatattctacgtaatttcctctatatttttttgtggtttcaaaaatatatataatatatatggattattttttaataaatattacttattaaagaaaaatttttttaaaaaaataactgtaattaaatgtcaatttaaaaaatattaacttctaaaactaaagttttaatccaatgatccataataaaagaaagcacaattttactacttaattaaaaaaaaaatctctctctaattacattatatcaaaatatatatttttatacatctctttctaactcaaactctaacttttttttttttatcttttctcaggtttcgatagaaccaacttttttttttatttaagttgtttatatattacaaccatgcataatttgggactcgaactcaggtctaacacacaccctcttatgaccacttgagctagcctcaaataatttttgatggaacaacttcaaccatacggcatataatacaaaatgaaaga

SEQ ID NO: 253425 - DNA, 874 bp, Cannabis indica
ttttaacctttttttttaaatttttagagcactcacatcaacttttttactctatcatttaaaatataccattaaaactttacttttttattttatctcaaatttttccattacatcatacaataacttttttatttttcttctctatttcaaaattaatacgtttgacacgattaaatacatattaataaacaaagtataaatattaatgaaactataatagcttatacatgataaaatgaaaaaattaaaccgatttgacataaaattaggcaaaatattaatgaaactataatagcttatacatgataaaatgaaaaaattaaaccgatttgattagtttttatgtatgtgggtaaaataggtattaaataaaaaaacattgtgttgtctaacattaacataacctaaatatgacatgtttgtatgtcacgagtgtagctatttataaccatgtcatgtttatatttacattatatgacacattattaattatgttgtgttcgtgtttaatataattatatgttgtcaaaattcaattaatctaaaatacaatataaaattcacgaattgaagccctattagcaccattaacactacattctatctccgtagaattatccattcttcattaacgttattaggtttttttattcatttcaagtttccaacttccctattctctctcctattcctctcttcctctcattctctatattctctctcacaaaagaccacccaaactcatcatagcacaccactcagtgttatattatttatcaataatataatatataagtcatacatcgatcggtttagtcggttgatactacatattttctaacccaacgtaaagatcagtttgtaaaattct

SEQ ID NO: 253426 - DNA, 656 bp, Cannabis indica
aattaaaaatattaagagtaatttttaaaaattattttaagtttattttttttaaataatggggtgtacttatattttatggagtataaatagaaatcctcttattttattatttacactatttaattttacccccaattaattattttattattatcctatttaaatttaccctttattaattattttattatttacttttttaaaataaaataaaatttgatttaaaataacatactaaaaaaaacatttcccaacagtttatcactgttaggaatactaagtattcactacagttataaaccgttgggtatacttagtattcccaatagttgtaaactgttgggtatacttagtattcctaacagttgtaaaccgttgggtatacttagtattcccaacagttataaattgttggcattcattgttttctttcatttagtattgcccacagttttccaccgttggcattagtttttcccaactgtttctttgcttcagttctaaatcgttgggaaaaatctctgcttatcttttccaacgattttcataattgacccccttattaaccgttgggaaaagtcaattttgtagtagtgttggtggaggccattcgcgtgaaaagatctcctaattggaagctgactgcaaccttt

SEQ ID NO: 253427 - DNA, 749 bp, Cannabis indica
tattatggtaagtttatcatatcgagttcaagttaaattatcactcccttccaatgcatactccatgtatccaacccaagcttactttacccaatgccctggaaaggacatagtacttatcctatcaattaagccatgtgtactgataaatcataggaatacatttaattacataatcttgattactttccactgtgctaacgacacaataaacaagaatatcaatatgataaggattttgatgaatttataaattaaataaacgtataaatgatcagatgaaccaaataatacatataacaagtaataaaaataaatttgtttctttattggtaattgaatagaaaagattacattgaaatagagttttatttaggacacaaagcccaacaaactcccacttgcactaacataaaactatcagtgcatttcaattaatcctaaattcaatttgtgcttttcaaatgtagttgtagtcaaaactttggtaaatggatcatctaatttgtctttagtatccgctttctccaccaatacatctccccttgccacatattctttgatgatgtgatatttcctctttatgtgtttgcttctcttgtggctttgaggctctttactgttggctatggctccaatgttatcacaaagtaaaacaagttccttagcagcctcgacggcagttatatactcaacctccatggtagagtctgacgttgcagtttgtttagcacttctccaaacaactg

SEQ ID NO: 253428 - DNA, 2550 bp, Cannabis indica
atatcgtttatttatttatttcattataagggtgtttgtggtacgggtggtatagtttttgactattttttaaactaaaatctgcacatgtggtttttttaaattctcaaactacacccgcaccgcgaaactaaaaaactgcaccacaataaaagtgcggtacgatgcggtttttacagtttctgcggttcagactatcaccaattattaaactatcacaaatacaacaaattaagcttaagcaacacttctcaataataccataagacttgaaaataaatatgaaaaaaaaaattaagtttcaataatacaataattagtgggctttgagttggacatcacatattgtacctaaataaatataaaatttggtatttttataatgtgcggtgcggtttgaaccgtagattaacaatttaaaactgcaaaccgcaccgcatcgcgtaatttagaaaaaattcaaaccgcgactgcacaaaaaatttcaaaccacatatttttggtagtgcaggcggttagagcagtttgagcggtttaatgaacgcccctatattcctatattctgatataatattcattttaattatttgacttgatcaaatcttgtctaaaaaaatcgaaataaggctttctttttctataaaagaaaatttgcacttactgctcacaattttgtaagtatatcaattttttgtgagttatgatcttattcaaaccgtgtatgagttgtctaaaatgtgtacattaattataaagacacattttagtagctagctaggtttaatatctcttttattgcctttgaaatcattcatattataagaaaaataatatctttgctgtgtggaggagagggtattgttcgtcttcattacaaattaaactgctacttttagtaacaactttttagtcacaacataatttttttgtgactaaatgtgattgttagtcacaacaaaatgttacttgtgactaaaacaaagtaattagttacaagttgtcactaatttagttttaatcacaacaagtattgtgactaaaaatatatttagtcacaataaattgtaattttgtgattaataatatctttagccacagaccttttagtcataacataggaataataatttataattagtcacaatttttttacttttagtcacaggttttgttgtgactaaacgtaaatttctttgtaatgcttgttatttgtgtttatatattttatattgtcttgagtctgtaatcaagtctacaaagaaaaagaacaatgctatacctttaggagaaagtttaagcttttaggagataatttttcaagtctcgtcttgggaggaaacaattgaaaggaattcaaacacttgaaattttaattgaaaaagtatatataataaatcaagtttgcgatatatatacaataaaatcggagtgagaatatataatacaagtgcaatgaattcatccaatgaaaatgaaatacttaattacactatcctagggttttactaaaagcaagttattataattaataatgacaggttagtagaacatatataaattcacttaatttttcacatgatatactccattataaatattccattaatatattctacctatattatacatatacaactactaccactaactaaggtcagaccttaaatttcaataattgattggaaacacatttttgtttgccctagaatcataaaataaacaaatattaattataataactcggacctagttgaaaataatagttggtcaaaacgaaatttacaaaatggaattaataataagtgttttgactaataagaaaaaaaaatatttttttatatgaaaaatagaaactaatcatatagccctaatacatattagtaataataattattattttaacatatagaatgaatttaagaacaacttgggtagccgtccatagtggagtataaacaaactaaagcaaccattttgatgagtttccacaaaaaacaattaaataattatgatgttttccatgaaaaataacaatacacttttatttatttatttattattattataattatatattttttttcctaaaaaaaaaaattacttattttgatcacagatgcactaacttttcttagtccatacccaattgggaaagtggaaactccatattaagttcatgaaaaaaataaattcatactataatatgaagttgccatatgacatgtgttattatctgggccaatgtgttttgccaccttaattattattaattgtaataatatttttttttgggtgattctacaatgcacccccttaaaagggatgtattgatgcacccttaacttgtttcggcatccagaagaattttttagcctaattttttttcatattcatgtacgttatagctatttaagatattctacaaaattttgaaaaaatcagaataatttacaatataaaaaacaatgttcaaacagtctattttacacgtgtataaaataaaatagtcacgcgtgcaacatactatttgaacatagttttcggcgtgtt

SEQ ID NO: 253429 - DNA, 724 bp, Cannabis indica
taagatatgagtttataaatatagataaatttgattatttcttcaaaaaatcttattttatttaaattattaattagattctcaatcatttaatttggtttgattttctaatatacatatttgtaaataaaataaagtttaaaaatgttttttttaagagtaattcaagtttttttaagtaaaattaatatttttaattaatttaatatttttatgagatttttaataattttattattattttttaaaattactagaatattataattactttaaaaaaatagaatattataatttttaaaattatctttttaataaaaaggggtaaaattttgtattggtcaaagtttagagggtaaaaatactaatttttaacagtaaaagaaagaaatctaacaaaaaaaacatcattatataattattatattttagaaaaaatatttaacatatattttaaggagcaaaatcaaatactaactattctattatttattatagcactagtctctcttatataattttatatggctagtaaataatgctaagtgcgcatgcaccaatatatcaactaatcaattaatacaaatataatacttatatacaataaaaaataactaattacatcaggtactaagagatatcacgagtaataatgtactatccaacaaaacggactttataaaatatttattaaaagggaaatttgatatattatgctaaaaaa

SEQ ID NO: 253430 - DNA, 860 bp, Cannabis indica
tattattttttttccctcaaatatttcttatccatgagaaaggtttatttttactttcttccaagataattttttttggcatttatatattatagaattttttttggagaaattcatatacaaaacatatttttttgggcatatttatagtattttttatgtgagacaaaatataaaaaaataagaaaataaatatttggagaattttatataaaaatatttttaattaattaattaattaaaatttataaacttattaaaaatattaataaatgaaagaattaaggagagaacaactaatgataattagagagattttagagtgacatgtcatcacctcatatctctcttttatatatagatagatccaggtttatttttctttctccctagataattttttttggcatttatatatatagtatttttttttttgagaaaatatatatacaaaaaaaaaaacaggaaaatagatatttggagaaattcatatacgaaaatagatttttttttggcatatatattattttttatgtgagaaaaaatatataaaaaaaataagaaaatagatatttgaagaagtttatataaatatatttttaagtaattaatcaattaatatttataaacctgataaaaatatgagaatgagagaattaaggagagaacaattaatgctaattagagagattttagaatgacatgtcaacacctcatatctctcttttatatatatatatatatagtatttttttcatattttggtcaactatagatggtgttaataaaaaaaagtagtttacttactatatactgtaattttcttaattttttttctttttttacttttacttagggtt

SEQ ID NO: 253431 - DNA, 693 bp, Cannabis indica
atttatgttcattaagttttattttttttttcattttcttttttcatatatatattttaacatagatatattgtttttaattttattatttatctagatatttttttagaagactatcaccaatatatataaatttacgaactaattcataatttaaatttaataatcttttatatatattgaattaataacttttaaaagcttcttatattattactttaattaagctaagtttgattcgttgtaaaattatatcgaatgaaatataatagcaattaaatacactttccaatatcaagaagctcattattaagggtagcaatttaaattataacatgcatattttacataaacacagtgaattttaaattataggttcaatatgagatgaaaatttatgtgaatcctgtttttatctgtattttattaatttttcatgtcatggattgtgtttgtgtcaaccttatatctaaaataaatttatgaattctacatgaaatattgatactaaaaatactaatttagcttacaacacatctgttaattctatttttagcgtatttaattgacaaaaatattttattatttattgtatattttcagctggtatatataaatttggtgttcatattttgtgtatctaaacttgaaggaaagttgtctagctttcctatttatggaaattgaggtaaa

SEQ ID NO: 253432 - DNA, 2089 bp, Cannabis indica
ggtactttcattgagagccacagatcaagaaagtcactgattgagatggttgcgacacgttctacaagtgtcgatagacagactccaacaactggcgaatcaactgggggcatgccagttgatggagctgctcttgggactactcttgcaccccgtgcaccagaaacaggcctcggaactagctcctcaactcgtcttccaaggccaccactagtagcttccaagattggcaccaacgactagatcccacctggggagccacgtgtggagatagaagatcctgaggaggtcgatccttaagtagctcagcttagccaaactgtggttgacttgcaacaacagctgcgaaactctcttgataagtaaggcaaacagtttcaacactggtttgtggaaaattggaagaacattgaaagccattgcgtttcgtaggaaaaacaaagagctaacctgtctcaacagattagagaggcttatcgctttaattgtggaactacttcttgaaaaggtatttttgagttggtgagagagacaccctgtcgaccagctggtcacgtgggaactagtgtccaaatcaaaactctgaatgcttggaatgccaccattacacctagtaactgagcaggcactaggcaaacactaggtatggagagctcccaaagggaaaatacctttaatcaagagcctgaaaggactcaagctcgagggcccaaccaatgggtcctccaccttatgttgaacgacctcacaataacgagagaacaatgaggactcttacactaagtcctcttaaatattctcaagagatcaggcctcgagaccctgcaagggaaaagggacctactactcaacttgaaggaagtagtaggagacactacttcgaaactggaggctacaaaatccaacgagtaaggaccaatgagccgcttcatactcgaaagtacttttgagatgaaagagggaagttgtgccattactttgcccgtggccctgatgaccaacaatgcaaatatttctctcgggtacacggagagaatatgaacctgagtgaccaattcaattctcttcattcttgtaatcgtgttgaatattactttgagggaagtagctattacaatgctctaaatgaacactctcacagcgggtcatcccgagatgatcctaagttcattctagaggccttaccaaagttgccttcacgaccccgtggtcaagagacaactacaagacccaagtcgattggagtacctgatcaacctggaaggcacatagaactatgtgatctcttgaacaaaagaagaacggtagacgtaggaacttctagagaagaccctatctaggtgatagaagctccatttgggacgcagaccaccattcatggggttaatcgagctgaattcgacaccttagctgctttagtgagcgggatcatggcacctaagttgtctgaatttaagcttgacaaagaatgatgctcaccaatctctaaaagaatcgcaaccttcctattcctctgaagttcaagaacactttttggcatcaatgcaccgagaatgaagatctactatctcacatcaactacttcgaagtgcagactaatctgcaaggtgtgagagacaacgtcatgtgtagaagcttccttgatacactgacaggtctagcataacgcaaaaatatttttgtatcttacaattattatattatgtgtacatcttactattttttttttatttttagatgtcttcacactacaagaaaattatctttcgccggtgagttttgtcgccggcaaaactatgagtatgtcgtcggcaaagctttggtgggacctttttttgccggcaaagggtgccggcaatagctattggcgtatcaccttttgctggcacagttggtaaattcgctatgaaaagtatttacaccggcgaatttgtttgccagcataaatgcatcgccgactataggaccgctgactgaggtccccatgatgaggttttaccggctagttaacacgtggcaaaagaattggcacgaattcggcgccaaataccaatttagcgcttactctttgccgacgcataaactccct

SEQ ID NO: 253433 - DNA, 738 bp, Cannabis indica
ctaggttcaatgaaactcagagctgttatggcaattacgaagtgagtttttttttttcctctttcagacccatgtctgagtagggttgattttgtttccaaaattttatatttatatgtaaagatttatattataattatttgtattgttacaggaaattgatgaggagaattgttctttccaatcaaccctactcatatgtaaagagtttgattgcgtctgagcccaaggagaagattgatggagcgattttcgatttggtctctttcgagcaaagcgaacaatggtgtgtataaattattagtctaagacattaactatggtactaattaagacatatacacttttttcgtagtatatacagaatgttttatgtattgcaaatgcaaggtaggggtgacttacaataggactaaagtcctctttgcaattattcatgaaacctcaaaatttcaaggtttaagttgttaatttctcttctctttaattcattgctcttgtataaatatctctttttcacacttgctttctttttgttgattgtacagggaacaatttcattcggtcttggctttttcttggtagttataggctggcccatatgtggcatgattttggaggcgtatgggttcattgtgctcttcatgtatattcaatcttcactttcacgattttcactataatttatttattctctcttttgatgtttactgactgcaactatcttgcagtggtttc

SEQ ID NO: 253434 - DNA, 736 bp, Cannabis indica
gtgtaacaaatgaagaagttgcacaactctagtctaaagttcatgaaggcttttgtggtaaacatgttggggcaaaatttatctaagaaaatactaaggcaaggttacttctagccaacaatgattgaagattcaaaggccatgtgaaaaaatgtaacaaatgccaaagatttttccaaaatcccctgagcacctcccaacgagttgatgtggatgcaaagttcgtggccctttaccatatgggaaatggatttgatcggacaatttcccaaaggaaaaggtagagtacaatatgtagttgtaggagtagattacttcactaaatggacagaagctgaaccgttggcaacaataacatccaagaaagttttggatattatggtgaaaacatcatatttcggtacagacttccacaaaaaatttgtttgagacaatggaaaataatttgagagctagatgttcacagacttctgcgcgacacatggaattatccaaagcttctcggtagttgcacacccccaaacaaatagacaggttgaagtagtcaacaagacattaaaagacaccatgaaaaaattgctcaaagaagccaaggggaactggccgaaggaactaccaaaggtactttatttgtacagaacaactgaaagaatggcaaccaggcagacaccttttgccatggcctatggctatgaggtaatgttttccgttgagttagaacctccatcccatagaa

SEQ ID NO: 253435 - DNA, 650 bp, Cannabis indica
caatggtggtggcagaggctacttcaacaacaattgacctgtgtgtcaactttgtggctgcattggtcacacagttcagaaatgttacagaaggtttgatatctcttacaatggtcctgatgagaacaatgacaacttaagtccaaatctaccccaagcacttgttgcttcaagtggaactcatgatgatgatgcctggtatcttgatagtggtgcctctcaccatgtcacccaagatagtgccaatcttcaacaacaaaactcctacaaaggcaaggaaaagattacagtatgtaatggttcttccctttctatatataacattggtaatagtactttaactgcaagaaaatctcttttatctcaaaaatattcttcatgttctagccataacaaagaatttaataagtatttctaagtttactcatgacaataatgtcactgttgaattcactcctgatttgtcttttgtcaaggacaatgactcgaggatccctcttctccaaattctatagtcactagatccatcaaacctgccaatatcgacttttatgttactcatgttaacaaattcagaattaattaaaaattcaatttgagaagacttagtttgattgtccaatgggacatcctcaaactcctttagatca

SEQ ID NO: 253436 - DNA, 1102 bp, Cannabis indica
gcatcgcagaagtcatctccaacgctcccagtagtgtttgaaaaaaagcactgacattccatcagggccaggagccttgtggttactcatggcaaacaaagttcttctaatctcttcacgggaagggcaacaaacaacgtcagcttgattctcgatagaaatcttctctcgaaatagataatcacagtccatcaggcgattgctatcagagccagaaaaaatgctattgaaaaagtccaggaattcatgtcctatcagtgttcggtcattaatccactcattgtttttattcagaatgcagtcaatggcatttcttcttcctttgatcgcagcagaaaggaagaaaaatttagagcatttatcaccatccttaagccacgagatccttcaatctctatcaaatcatattatgagtgtatttttgcttttcattaaaacttgtaaagaattggaaaaactcatagctaagttttggtggaattcgaataagcctcaataaaagggagtgagttggatgagttggaaaagattgtgtaagcacaagaatgtaggaggattgggttttcgaagccttcctgattttaatatggcgctcctagacaaataaggttggcgtttattgactcgcctattgtcttcggctactcgtattttaaaggctcgctatcttcctagtggttcttttcttacagtgaagattggctctaattcgagcttcgtctagcaaagtatctttgaagccagagacttggtggtggccgaggtgtgtaaaagtgttggtgctggtctctcagctagtattttgaaggatccttagcttactgatgttgatcacccttatattttgtctacacattcgagattaattgataatacaatttctagccttatgaagatcgatgctcgtgattgggatgttgagattctaggatggttattctctctattcctctttgctcctccattcatgaggattgttagtactggaggttcgaaaagtcgaggttgtacactgccaagtacttggatgatttaacaaataacttttctaaagataattctattttggaagataatttgggctctaaacataattctaaaa

SEQ ID NO: 253437 - DNA, 1254 bp, Cannabis indica
cacacaactaaatattattatatatcatagtggacatttaagagacaaaaggcatactcccaaccgtaagtagttgtttttactttacccaccaagggtggcaattgtgtggtaagagtactattaacaaatgtgtaaccattattttattaggcctttgattttttagatatccttaattaatttttttttatttgttttggttagattacttcatattttattaaaatataaaagcaaacaaccttagttgtccacatacttaacggtaacgttattgattttgatcacaggcgtggggttctattcaattattactgtcttttatattaattttgccctaaaatcatcgaaatatgctcatcacaacatttcctcgattcctgatatttaagatataattattatttcaaaaaatataatataaatatttataattgacgtcattgccagacccagaaccatatgtttatatatatgagtgtacagttaaatttgacaagccaaatcgttacatagaattacaattgtgatttatatattttttctgttttactataattaatttttcttaaaacgtgtttttgaaatattatttctacacggaaaagcagaagaatgaaaacaaagatatctgtaacctgttacgctgtaacataagtgtacctataagtacatatattaaagtcattaattaaaatcatcaaggaactagtatatatgatcatttggtacaatattcgttgacattttcactgtcaatattttttgtagaaaccaaaaaccttacctaattaatccatcatgaatgatgatagtcatttcccagcgataatttatggtaattataaattcaaaccttcattaaaatattaatattatttcagttatacaatgcattaacatccttctaaacgttaatacagggccggccagagggtggggcagccggggcatacgccccaggccccataattttcgaggccccgaaaaaatttaaataatatatatacatatataaaaacttataatatataaatatttaattccattagttgcatgagaatcttatagcaagactggtaattggtgttatctatgagtagagaggttgtaggttcgatccttcccaccaaaaagaattatactgtaatttttctagttttaagatatttaccttttttaatagtactataaataatgtatatttattatgtattttttaaaaaatttataaatatgtaaaaaaaatta

SEQ ID NO: 253438 - DNA, 738 bp, Cannabis indica
taaagtaaacaagataaatcattattactctatttctaaacaattttaataaataacatattatataaattgattgcgattactttcatttattctgtgacatttgttcatcaatttattccgattatgaataatgtatactaaacataacataaattaatgacctaatgaatgaatgtggttaaccaagctctctaaatatttgtatgaagaaccaccttgtttcaagcagcttattgccatgtccttcaactttgatactctatatcttatctcctctccttctttctccctcatcaactttgtaatcattctctttatctctcctctttccaaaatctcattctccaactgaactcccactttccatacattgctcacatatttagcattcacattttgatcaatgaaacttggcctacagatcatcggaactccttcacaaatactctccatcgttgaattccacccactatgagtccaaaatgctcctatagctaagtggcccagcacttgttgttgtggagcccatttcactacgtgtccacgtccccccaagttctctaaaaacccatttggtaatggttcgagccactccgagccatggaccgacccgggtctaaccacccataagaagggttggtcactattggctagaccccaagctatctccaaaaactcagcctcactcaatactgcaagactcccaaagctaacatagatgactgaattcggtgg

SEQ ID NO: 253439 - DNA, 886 bp, Cannabis indica
atcgaaggccctaagtcacatttttaaaaaccaataagtgttgccctaacactttcggggacttaaattgacaactaaaagtttccctattgatatatatcatagcagtaccctaagtattgagagaacactcaattgggatcctgggaaaaatcttaaaatggacccttaaattctgccaaaatcagacggcccgaaactccactatcctattttaaaacttgcataactcctaaaattctaagaaaaaccttacaaaattttttagggtatctaaaaacatcacaatgaacatttttaatgaagaaaccttaatagaattctcaacagaaatcaaacgaaatggcggtcctaaaactgcctaaatcggatggtccaaaacctccctgtccgagtttggaaatcctataactcatgcaatattgatccaaacattaccaaattttgtcaagatcctaaaaacatcataattaacatatttcataaagaaatctcaaccaagttctcaacagaaatcaaactaaatggtcgtcctaaaactacctaaatcggatagcctgaaactccctgttcgagattggaaatcccataactcatccaatacagatccaaacattaccaaatttttcagagcatctaaacacatcataatgaacatatttcatgaagaaaccttaacccagtttgcaacaaaattcaagttatcacaaccaagttaagtttgagttctttgaactcaaacttgcataactttggctacaacaaccctaaacaattaaaaccacttctaaacagtcctaaataagcttaataataatttcattattaaacatgttctactataaacagccacaaaaaactaacaaaaaccctaaaaaactaataa

SEQ ID NO: 253440 - DNA, 767 bp, Cannabis indica
aaaaatcatagaacaccttttaaatctaaacaatttttaaacataagaggctaggcctggttcattttctaaacaaagaagtcactaaagatacagacatattctatcatatgctacacacataagtaaatatatataagtcttaaaaataaactgttatgttacagtttatgatactcatgatatactttaacagtttgactagctcaatcaattagttaataagttaaaataaatattttaaaatgagaaagatattatgcactcaaaaaattttggagtaagaattgaaattctcttaagatttttctaactttgttctaaaactatcattataagaagataatgtagattaatatgagttaacacaatgaaactttatcctgtcgcccactttacattggtctagaactctataaaagtcactgccactagatacattttgcccgttcacagatggaatttgatatcacctaataagagtcttccataatacacacttcatcagctccactgaatcgatggaatggttttagtccctgcagaacacacttcatcagctccactgaatgatgtaacttttgattacaagaatctctaaaagaaaatccaattcaaaaagaaaaaaaaaaagatttactgcttagtccttatgaaaccagttttgactctatgaaaaatcataataaaacctgtaaaaccataaaaataaatttgtgaactcatacaatatgacaaacttaaaataaataaaatatgacaaaata

SEQ ID NO: 253441 - DNA, 993 bp, Cannabis indica
tagggtcagtcatcaatccaggaagcagccagagtggcgtacccatgtataagagccattattccgtgggtgtaaggacctaatggaggcttgaagcggggacgttacatgcttccccgttcatgctactggtgtttgttattttattttgtttattcattatttcacttgtttctctcggatatattcacttaatactaaggatgaagcctttttggcttttatcaaatttagaaatatgattttcacccaatttaatggctccataaaacatgttagatctgattggggcggtgagttttgctccctctccacattttttcaacaacatagcatactccataagctttcttgtgctcgcacacctcaaaaagatggtcctgttgaagataaaaatttctatgttgtcgctggcctcactcttttagctcactcatctatgcctttagtaattaatagagaatgcatcagagaatatataaatacaattataagataaatgatacattaattataatagtataaataataaatatctaaaaatttcgtattcatatcgagaaggtattcatatcgagaaggtataatcttgtatagatatataagagaattaagattatacgataaaaataaaacaagtcggtagtatattaaagtaataaaaatctttgatatagaactattaagtatgatttactatacactgtacttctagtgtatgtgatttagtgtgtattaatttttatgagaagtaaattttttaggacaaaatagtaatttataaaattattattttgaataattataacaattatgagttgtataattaatagtatttttaactatttagttttattagataaaactatattaattagttaaatctaatattattcttaaaaaatattaaaaagagaaatatattattttagagaaaataatatttaaatcaatccttgtaaaataagagataataagaattaatcaattatt

SEQ ID NO: 253442 - DNA, 554 bp, Cannabis indica
tactatttcaatgattgtttatgtactataacatgctccctagactttgatatctatcaaatcttaccctttacactttgacatatactaaattatgccccttgaatttttatatatgttagacttttttaataaaataaaaaaaaaaatccttaaatcgaataatcacaatagttcagagagtatttataacgaccttaaaagttcaagggtatgatttggtacatgtcaaagttcagggagcaaaaatcctaattaactttaattttaaatagtaataatatataggtaaattagtatttttaacttaataattgtacttttattgttttaactattacaattttttttaactattgagatagttagatttaagaatttttatttaatttcttttaatttaatgattgtctatacattaaataatgcttcttaaactttaatatctagtaaatcatgttttttaaactttaacatgtaccaaatcatatccattaaaactttgattcatgttacattttctgtactaatattaaataaaaattcttaaatct

SEQ ID NO: 253443 - DNA, 512 bp, Cannabis indica
tactttgtgactaaaacatagtagatacaagttgtcactaatttacttttagtcacaacaagtattgtaacaaaaaacacatttagtcagaataaattgtgattttaatgatcaatccctttagccatagatttttttagccacaacataagaattattgtttataattagtcacaactttttacttttaatcataagttttgttgtgacaaaaagtgaaatttttttagtgactgttgtttttattttttatttatttatttatttgaatgaaagcaatctttaacatccgctaatacaatggactgaagagcaaggggaacatcgctctcagtaaaaagataaccagaccaataacaagcactacgtgctatacagtgcgcggctttgttggcagaccgtttaacatgaccaataaaaatattacttaaagaagataaaataaattgacaatcctgaacaaataaaccaaaaatagaaggcatagagacagaactaagaatagcttgaac

SEQ ID NO: 253444 - DNA, 946 bp, Cannabis indica
agcaacgagctgcacagacgtttaaaatcacgctaacacgcctatgctagttagggttttacaaaaatggtaatcgaattttgggtataacaaaaatatttattaaatcaattaaacaatacacatttcttttaaaaaaaaaaatcttattgaagttttcaaaaggagtaaaaaaattatgcaaaaaagagctcatcaataatatcaagtatctcaaaaatatcaagatttttgtaatacttaaagtccatatatccaatattttgatatttatcaagggtaagatccataagtgatcaatttgactattagatattattttacttaatatttttctttttatttgaataacttagtgttatgatgtttttattttattagtattaaattttttttaattgttattttgtatttttaaatatattagtgttttgaaccaattactatttttgtgataaattttaattcaagaactaaaatgtaagattatattttaaaataaaataaaataaggattagaacgcaaaaaaaaaaagttgttcaccaaattggtgtagattcaaaatttaatatcattaatgatgtacaatttggtgcataatttagtgtgtcattggagtgaaatggtgtgaaaatttcacactattttggtgaaatggtgtactattgaagatgctctaataaaataaaatttaaaaatattttttaagagtaatttaggtttttaagtaaatttaatactttttcattaatttaatattttataaggcttttttttaatagtttttttaatttttttagaattataaaaacattacaatttttaaaattaatttattttagtaaatggaagcaaaattttgtactgatcaaaatttaagagataaaaatattaatttttaacagtaaaagaaacaaatttatatcctaatttttacactctgac

SEQ ID NO: 253445 - DNA, 2919 bp, Cannabis indica
ttttggtggcaaaacccccttatgtttatttttctttgcaaatttgacacgccagttaaatattaccgttaaatatcaactggatgaccactgtatacacctttgtatatgtaacggtaaaacctcgaagtcgatacagtagtaatccggttagtatttaacggtaatatttaactaaaactttaaatttgcaaagaaaagtaaactgaagggttttgccaccaaaacaaaagatagaggggttaagtgtataaaaattaaaacataagggggttttgccaccaaaaaaaagataagggggttaagtgtataaaattaaaacataagggggttttgccaccaaaaataaagataagggggttaagtgtataaaaatcaaaacataagggggtttcgccgcaaattgctctacatttaaatgttaaagtgttacagtttgcttggaaattatttcatgatgctttgcctactttgactgaattatataaaagaaaagttattgctttttcaaattgccccttatatagttagtcagatgattcgaatagacacacacttttttggtgtgaggagtaacgaaaggtttgacaattattaaaatttgactctttacaaaatatattgttcagtgtttcatttcaactggtgattttaaaagcatttggattactatcaaaagcaagatttaagctattctttttataactcgatttatttggaaggaacaaaacaataaaccaaaagcattttaatatttttgaaatctctaattttctcattctctccgtaactcctaaagaaacccacatatgtgctctaaccccaaactaaacctgagtcgacgtctatgcccaacgacccagatcggcgtctacctcaaactaaacccaaacctaagtcaaccacgaaccccaatgtcctcaccatccaacccacaaaatcaatttttgctcagtcatagaagcttgacgagcaaaaatctatcagagcctaaacgagaagcccctacttgcgtcgtccaccaagaagacgatccagagaagacccacccatcgagaatctattgaaaaactatcgagaacctatcaaaattctattgcaacacaattttctagaaactatcaagaacttatcaaaaatctttcacaacacaatttttagttaactatcgagaaaccatcgaaaatattacaaaaaattacaataaaaaatcaagtaaaaatatttagaaaaataagcagaccatcaaaaacctatctaaaaataatcgagaaagtgtcgaaaatggccattattgaccttagtacgctatatattgagaagacatcgataccatataaaaaatgcatcaaaatttaaataaaatacccatattacaccataaaatgagatttcactatttaaaaaaatagtagaaactaatacaaataacaaccatacagatctactaaaaatgaactatataattttctaaatatcatcttcatgtggtccatgacggtggagcagcaggctcagtgttcgtgagatggtcgtgtggtcttacgacgtttgtgatcgtcgtggtcttttcggtgtgggtcgtctcttcgacagcagaggagagagatacaatagagagagaaaagagagtttgagagatttctaagggtaggggtacttttggtataaggttattaatattggcattaaatggtatagtgtcgaaaatttattagttatttagatgtctttttaagcatggttattgaaaattttctactataaaggtgttttctttcactacttcattattttaaatcattttgtagataataaattagttaagtattttgattattagtgaaattattacttagagagaatgagaagaaaataaattgacttttttttttagcaaaagatggtttgaaagagtgtttttatttattttggtagcgtttggaaatacttttgtttttttaattttttaatcacaaaaatgaaaatagagtatttgttttttaaaattttgtttttgaaaaataaaaatgtgttctatagctatttttatttttaaaattttataaacaaaaaacaaaaataagttttgtaaagtttgttttcattttttggttttatttaagtcgaataagggatcggatttgggtctaggtccgggcctgagttagggttcgggttcggggccgggtccgagggctgtggctgggctgggttgggtttgggggtttagggtcggggtccggggtatagggttggtgtccgactctgggggctgagtccgaggttgggtatgggctccaaggtcgggtctgggtttggggtcaaggttcgggtctgggtctcagtccaagtttggggtttaggttcgagtttatgtctgggttcgtgtccgaggtcagggtttgagatccgagtatgggtcgtggttcgcggccatttggggttcgagtctagggtcggggttcgcgtccgagcgaggtccaggtttaagcttggctatggggcttaattggattaagaaaaaaaaaactctttattattttttttgaaagtgacttttttatttttaaaattttgattatcgattaaaaaataaagaaagtgaaaacaattttaaagaatttgttttcaaaaaatatcttcacttttctaattaaaaaacgtattaaaaaagtgttactaaataccacatttatgtttctgtatttttctttctaaataaatatgtctattcttatgatttttgtatttgttttttattttttttgggcgatgatttctatgattgatggaattggaggagaatcagaaaatattcgttgagaaaaaaaatgtaaatgtgttttttttgcttattatgtttactaatgtaatgtgtaatagaaatcaatagtacttacattattacaaaagaaa

SEQ ID NO: 253446 - DNA, 480 bp, Cannabis indica
aatttaagtaattattgtttaatatcaaaaaaatattatcttaaaatttaaaaaatttatgtatattaatttaaaattatacatttgtattaattttaatgaataatttttttgaataatttgtaataatattttcatttaaattcttagtaaataaaataaaaattaaaaaaataaaaaataaactattaaaaaaatcttcctgtcttatcataattttagataaatgagattcgatagatcggtcatctacgactctctgaatgcttaaatatttgattagacaaatttatctgtgtaattcaatctaatttttagtaccaaacaggtcctaaaagaaaagaaaataaaagaagcaacgtacactaccaggacctcaaaaagttgattttcatcaaattgaccaacttggttactctattctagaaccatacaccatcccatagaaaatacaacaaagaaaaccaacaccgacttcaa

SEQ ID NO: 253447 - DNA, 759 bp, Cannabis indica
ttttttatttataaaatatacttataaagttttaaaattacaaaaaatacacatttcttaacaaaaaataagaaatcaactacaaaaacaactaaaaatcaatcttacaataactataaataggggtgtttattagaccacatctaatatttttaggcctatccaaatccgatttaattatatattggatgttagattttaccatcccgctccgatccaattaatttcagtcatccaatcgatccaacatccattagatgttagattgaatcgattctatcggttgaatgtatatcatatatatttatttgtttaatttagatttatccaatatttaagacttagtaattttttgattgaattggattcatctaatattttaggtcaagtttgctttggattgaattggatgaagattggattcatccaattcaagaaaaaaaagagtaaaaattttaatcttaatttttatatatacatatacattttacttataacaatataaaaatctaattactcatccaaaactaaaatgaaaaatactaattagttcgattaaatgttggatatatttgatttttggatacctcatccaacatccgattcgatccaattgggatacaaaaaaaaaaaataaaatctgatccgatcacaaattgaacatctaatatttggcgatcggttataattgaatcggtcagttctcattagattagatcagtttatgcacacctctaaactataaatcaactataaata

SEQ ID NO: 253448 - DNA, 1091 bp, Cannabis indica
aacaagatatccctcaaatcgggtcagatatcttgctctaagatgcaaccaccaggaataaatcgagagtgccttgcaatagcatgggcaactcgatttgctgatcgttttacaaaacgtaacttaacatcctttaaaagagataataacaaacgacaatcctctataataataccaaaagtagaagacatattttggttgcttcttattgcttgcacagataaaagactgtcagactcaagctcaacattattccatgtcttgttctttatccaactgagagcttccttgatccccaaagcttcaaccacttcagcaggatagttgccattgcactggcatgttttgccctctaagaacttgccaaaatgatccctcgccactaatccatagtcgtatgagttgtcttgttggaagagcgccgcatctacattaatcttgaggttgtttgttgcaggtggtgtccatagctcacccccatcatcactattgttaaacgatagtgataaaagagcacttttatcttgagctttcctccaatgttcaagagtaattgaagaagtggccagaacttctttgacagtagaattgcatttgttccagacaactttatttcgagctttccacaaagtccaacaaagagttgtcgcacgacagataaagtcaatatcgctggtattctgcagcaactcaaaccagtaaccaaacgtggatgaggggtcaaccgtgacaggccaaccaaagacagcccaacatgctctagcaaagtcgcaagtcagcagagcatgtgttgttgtttctgctgtagtatggaaaacgggacactgtgaagaaattggtacatatttcgtgacaaggttcacacaggttgggagagaacctgctataacacgccacaaaaaattcaagactttgggaggtatcttcaaatgccagaacttacgccaaaaactagaattgtttggccgtaaaccgactggtttttgactctgcagtacggtgataggcgctttgcacagtaaaattccctttgtgatctgttgtccaagaccaacaattaggtctagaagtgttgctaagtggaatgccaa

SEQ ID NO: 253449 - DNA, 1416 bp, Cannabis indica
taaggctgtgaagaatccaattttaagagaaggagattcagactcagatcttggcgataccctgctacagaaaggatacaagggttagagttctgagtggaatgagatattatattccgctgcaaccactgtaaggttcctgatactttatatgtgtttatttcatatcgtttttagaagttcatgtttaggatgttaataacatacttgttagtaaatctagatcctggtaaaataatttcaatatctttccaactagtgatgttcatcttttgatatggtgcatcacatatgtcgaagaaaggggtgaaataacattccttattgcaaaatgaaacatatacaaagaaactacactatcaccaagaccacaggtatgatcttttttttttctttcccgatactctaatcacataaactttttatttgttgttgtcccttcgcataactaaataagtgcatttttttggaagaactttactgtaatgggcgatgcattgtttttctggagcatgaagcctgatgtgctctagcgtttgaaaaataatcaagctttttgaaattgcagtaatgctttcatcattgaaagaaataaaactttagagtttgcattgtatgaaaaacaaaattctgtatcttttgaaaaaagatgacttatttgaatttgttagaattattgtaatggactaatacaatcataggtttaattccataatacacaatcattaactatgtgcctaatagtgctaataaccataatgggatggttaacaacttaattatgtgttagaagcacatgagagcacccttaatactatagtggcccattaaattatagtacaccataaaagacgtcctaagccctattggttaataatccattagggttataagggtaataacatgtatatatatatgtgtggaaaaagggatatatgggtttgtgtggtaaatgaaaaaagggttagctctataaagtgctctctagacttcttctcaaggatcttggtggtgattctctttgaagacattatgtgtggaaaaagggatatatggaactttgtgtggaaacttatataagcttgatttacttgatgttgttcctgttacttctccctcttgtcctttttgttctcttaatgttgttgctggctctaaacgtgcaagattagatttgaaatcttccatgctttggcacaatcatttgggctatatttctagagatagaatggagagattggtgaaagatggtgtgcttcaggatcttgacttctctgatttcactacctgtattgattgtataaaaggaaagttgactggcaaggttagaaagagtaagtcagacagatgcgcagatgtgttagagcttattcatactgatatatgtgggccttttgttccacctgctatgggtgg

SEQ ID NO: 253450 - DNA, 840 bp, Cannabis indica
caacatgatagagtggggttctgacttagactcacaaagttgtcctattttgtcttttttattataattataatcttaatttttatttaagacatagatatagttatttgagatattttacataaaataaaattaaatagcggtaagatattcggcttaaaataaaattaaatggcctttttagcttacatatgtaataatgtaaatgattctatgcatctaattgattgaagttattgaagtcttatgatcccacattataaatggacatgtctatcaaactcttacatagagatataacaagaagctgtctaaaaatattgtaggagtaaaagataatggtaaactaaattaaattggtcatgtaataaattatacataagtatgtattatgttatttaatcgcattgaattacatgtcttatgtaacaacatactttaggatagataccatgaactccacaattgcaaattgttcttgaggaaactcaaagaaaactcaaggaaaagatatcaatgactaccaagtgcttgtaagactttacactagcaaaggaaattctattaaggatgcaagaatgattgagttaaaaactcaactttttataattgctaaatactatttggttgctaaatttattattttttgtgggattataattcaagagttttaaaaacaaaaatgaaaaaaaaaattataagaaaaactgtagaaagtcgtgaaagttcttaatgttttctaaaagtaaataatgaaaaaaagtaacataaattgtttgcaaaaattaccgattatacattctattttgttaaatgataattcaaattttgtattttttc

SEQ ID NO: 253451 - DNA, 1273 bp, Cannabis indica
attaacagataattagggtttaaattataaaacttgattattaattttgaattattaatttatgatgatttatttgaattcagaatgcatcttatatgtcatatatagaaatttcataattttgcatgttttgtgctcggcaacattggaacgcggtgtttcgcaattagaatcacaacttagtatttttttagtatagtggggtagtatatttagacattgggaatgtcgagagtagtcaagattttagagttggcaaaaatacccctaggtggccttttatggtttttagtatgggaggggcaaaatggtcattttgccccattagtctcttgtcctatagtggactttattttagttaaaaatcagatttttgattaatgttaagctgagatttattttaataaaacaaagtattttcccattttctcaatatatcaaaaattagacataaacacatttttctctcaagttctctctctctccttcgaacccacctagaccaagtagggtttgggttgttctataacaattcaagctttttccagcaagtgttaggtgatctcaagctttaggtaagctcctagcaactgctctcttagttttctttagtttcaagtttggattttgcatgaattttgagtagttgagttctgtagttgttgtcattgtttggaatagttttttgaagttaagttatgtttcaatatgttgttttttgttggttttaggggttttagtgttgaatgagcaagcttcgagttttagaactcaagcttggctcattaatgtaaaattttgattctggttatattgggatgttttattgccttgtttatgttatttagggtatatttatcaggtcaggaatgtttggagagatttggagttgatttgaggttgtggtgaaattttgaaagtttcctgcagtgaaccggaattccggttggtccccaggaaaccccacagaaccggaattccggttgggaaccggtctaccggttggagcaattttgggaaccctagtttttcccatttttgtgatggttagggtattcccatgttgtttattgatagggaaacttttagtttcaagtttaagtcccgagaaagtgatttagcgtgtcacttacctatcttatgattgatgtgatttaggagcctataatacgccgaggagttgttccactcaggtcggccaccacacctaaattcgaaaatgaggtaagattagtataacggtatgcatatgtatatacatgtttagtgtgca

SEQ ID NO: 253452 - DNA, 1191 bp, Cannabis indica
tgatggaaaaaaacttgctaaaatgtagcttgaaaagaagaatattttcaattttttaattagggggcattttaacaaaatttaacttgaatccaatcttcatattcatgtcttagtagtacaaattcttgtgactagtggcaaaaaatattctacgatgggtccgggcgacatttcacaaaggggtacacactatcagaaatgtgtgattttcactgtttcgattaaaattattgttagtgcatgaaaactactttatctcgcgatgtgtccattagaaaattgatgcacaacattcttggcttcatcctcataaattttcacaatttttgagatgtgtagggtgagattttaacagaacacgaacgagtgtaagagtaaagaaagaacttgttaaaatttaccctgtaaagaaggatattttcaattttttaattaaggggccatttttacaaaatttcacgcgaaagcaatcttcatattcaattcttagggtagaaattaatatctgccattacattcgttgattcgtattctctaacgttaacacacgtcatcctctaaagtgctagatgaattttgggtataacagaaggaacgaccattccaatataactttagaaaaaaattaatgatttttaacaattttttatgcattttaaattttatattattttaattcctattcccattcccctgaaccgtgaaccctgaaccctaaaacccacactcctaaaccctcaaaccattaaaccgtaaaacactaaaccctaaatcctaaacgctagaacccaaaccccaaaccccaacacccaacaccctgaaccctaacccctgaacacagacccttagatggcattttgtttgaggtaatgaaatggaatggaaaagaaatcattttcattccattcttttatttagtttctttttaaagtattagaatgtcattccaatagaatgcccttttaacacatttggtggaatgaatattctatttcgaaattgaaagaacgacaactatcatgtaactagagaaaaatttaatgatttttataaaattttgtatgcattttaaattttattttattcaattatcattcccattcccctaaaccctaaaccctgaactgtaaactttgaaccttgacccctgaacccctgatcccgaacccctacccccaaccctacccc

SEQ ID NO: 253453 - DNA, 839 bp, Cannabis indica
agactatgtgcttattttgattatatttcagctaagttttttagaaatgtcctgatatctacgtgggagagcaacgtagctttctcaactgcttttggttgagaaaaggtattgaatgtaaaaaacttagaactaaccttttggttgggcagtagtgccaacaatttttagtaatagtgaagtttgaaaaatgagtctatagtttttgtgatttttatcttgaacacaagccaaaatgtacactactgagtttattcacatccatattttttagtttgggttcacttcaatcatatatatgttattattatttttattattattatgtaaagaagatgatacttttcttgacagctcaaagtcgacttagatctatatggaaccgaaaacattgctccaactcacaccctactcatagctaattaactaactaactaactcatacctattttgttacaagttaagtagtcttttgtatagtggattggataatttcttttgattacttaattgttgtatttttttctaatatttcaattcagtgaagttaacaaggatgtttcaattcagtgatatttcatcaatgtttttacatgatttttacttttagaaatctggttctctagtttactatcattgttgctaaacttatttggataggtgatcttgagtgttgatcatcttgatataagtaaaggaattcaataaatgaaggaaaatatgttcctacttagttttgcagtgattagtgtctgttatgccaatttttttttttgaggttcatttgaacccctgtatataggtatattttgatagataatagtgttgggttttatgcc

SEQ ID NO: 253454 - DNA, 585 bp, Cannabis indica
gtgcaactttcgaattcaaactacgattccagcattaacccatctttgactccaattgaggagctatcattacggtagtgaaaacctactcgcggcctcttctactaatgcatctgccacaatattggctttcctggggtgatattgaatttcacagtcgtaatcgttaaccattccagccaacatctctgcctcatatttaaatatttctggatgaaaaagtacttgagactcttatgatcaatataaatctcgcatttttcaccataaaggtaatatcgccatatttttagagcaaatactacagcaacaagctctaaatcacgcattgggtagcgctgctcataatctttcagttgacgagaggcataggctataactttgtcagcctgcatcagaacacatcccagaccctgtctggatgcatcacagtaaacaacaaacttttctcgatatgatggtagagctaacactcctgctgttatcaatcggtgtttcaactgctggaaacttgcttcacaattttctggccatataaatcatttatttttgttagtctaaatcagttagtggcatagagatctt

SEQ ID NO: 253455 - DNA, 1738 bp, Cannabis indica
ctccaaatataacttggattactttctgtttacactaaaattagccctgataacgtggacatcaatgtttaacacgtggcaagaaagatgacatttcggagctgagtagtcagtcaaccttagtcttgcgcccaagttgacttcgcgagaactctaaaatagaagtttggattttaaaaccttattttcaactcactattattcagtattctgtatcatgaatacatagagcaatcaaatccaagccccataagctgaaattacatgaacctgcacccttccaacctaggcacatcgtcttagtgtaaataggtccaatgaactagacataccacaacgatatttgagacatcataaccaaattcagagaaagtttatttttgagcaacccgtgcctaggcacccagcgcccaagttgaaaatttttcaatctgggtgccttctaagtaccaacactttcgaggaagaaacaacactttatgggtgccaaaacaaaggcctagcacccaggttgacacctggggctggcccagtgccatgttgacattttgtcaacctgggtcgattctaatgatattttttgagaattatttccatcatgttctttattttcagcaaagattatgattcaactatttttgagaactaaacagaacatttgaagcgccaaaactgggacctagggcccaggtggacacctggcactaggcttagcgtctatgttgacatattgtcaacctggactgtttccaatcaagtattctcaaaaaagtacttcgggcatttttttctataaagtaaataaaaataaaaaataatacaatataaatttggtattacgaaattattctacatctgtccaatgagatttatagaaataattcttaccggtggggactaaagtaaatttctcaccttataaatttcatgtatatacactcactcacaacattgagtgtagattagtgaggatcacgacttaaacaagatattatacttttgtctaaaagcttattttctctatctctaagcactaagggaactctcatagacataactttagaaattatcaagtcttttagggtttctagcaaagtactttgttgataaaaaaaacttggttcatataaatgagcacattaattagactcctttatatagtattttagatgatcacacttaggcttcatatacaccatatttttctcatataaatgagtattaatataatttgcaacaattatatttcataacttttgaatcatatcatcaattttgtataatacatttttttattacactaaaatgtgatcaaccaaaagaagttacaaaaataattaatcttgtacttccctttatgttacaaagtataggttaaataaattatatatacaatttatttaccaaatatttaatatatattataatttacaattgaaaaatatatatatatatatacacacattattattaatattgtgcataaattatatgtataaaagtcatcatgcatgcatatatgtgtataatttctctctctctctctcttaatttattttatattttgaagaaaaaattgtgtcttgatgatggtactcaaagagacaattaaaatgttttgaagatgggaccaattaaaatgttggaacgacgacataataatatttagtgattgaattcacattctgaagttctttatatattttagactattgaactatatatatatatatatata

SEQ ID NO: 253456 - DNA, 798 bp, Cannabis indica
aaacctcagtcaacattttggtgctttcattgagagctgaaggaagcatcttcaaacagacaataatctgagaagttgagtcagcaatggtggaaactcgcaacaacacacgtcaaccccgtcctcctcaggatgctcaaaatccagaggacgaggaagtggcctcaagagtgaaagtggactccgtggaacgagatgaggccaacgacgacgagtacgagggaaactttgacgagtatgacgcctgcgacgaaggtagttatacagagttgttgctattgaggcaaaaggctgctgatcatgaagcgaaaattgcggccccaaaaagaacaaaataaaaagatgcaagaggtgatggtcgccatgcaaaaagccatggagacagtaggaattcatatacaccctaaggccatcccggaaggacttgaagaaatactgggagaatcctctccaagcacccaaaaacacaagaccagggaaccaagtcctatacggtacccttccgaagaataccaaagaaaaagccctacttctattccaaggagaaagaaaaaggtgcaggatctgcaaaaggtttgctcagatttcccgaaagggaaaggactgcagaggggcaaactccaaaaatggagtcttggccctcagaatcaagaggatcgaaagagcgtgtccgtgcaccaagagcccggggagagaggaaggggaaaccgaagataccctccgattgacttaagacacaaaatcaacgaaaagcacggtgatatgcgggatcacatggacaaaaagaaacatatacca

SEQ ID NO: 253457 - DNA, 1181 bp, Cannabis indica
tattacttattttaatattaaaaatttgaaatggtcatattttgtatattaaaataataataaaatttataaataatctagttaaagtttcaaaattggctaacgatattagatttcaaaatttgttatgtttgaaatatattttagttcaattaaattataatattagaaaaagctttttttaattatcttatcttattagatatttattataattaaaattttatttttcgcaaaataacatgaaattttgaaaaaaaatttaatttttgtttgaatagaaattttagggtttgctaattataaaattttcaaacttaggatatttttttttatttacttattaattaaaattgataatttcctaaccatcaaatatgttatttctcaaattgtttattttggataaatttaattcattaaattataagattaagaatataatattagaaatatgtaaattttaaattaagatattatattataatatcttgttagatatttaattaatttaaattattttaacaaactgaaaaattagttagatatttgaattttagttcgagtttaggatatttaggagatttgttagattttaaatagtttttaatattctctgacagcctaaattttaaattatagttaagatataatgtaaatattttaattttaaaatagaaatatcttaacctactttccaattatctgttacatgtttgtattgtttatttatttatttactcaaaatttttttacaaacctattatttatttgatctaaatttctacgattaacttgttgacagatccaatgatatgattttaataatagtccaattatcaatagatcttataaataatttgtaacaggtaaattttataatttctttaatctctgtaaacctagtaacatgatatggcccatccaaatcacttgacctgtgtgagcctatatgtttgcttttgggctaagatgcttataggaagcccatttgagttttttttttttaattaaatgtactagattactaaaagaaattttcacataaaataattttatttaggcccaattagtattgggctctttcaatgaataacaattgtttatttaatggttaaattcctctccttcgggccttgtgtgagagttagggggcccttagtaatgggtacgacatactg

SEQ ID NO: 253458 - DNA, 1479 bp, Cannabis indica
ttatatactaaatcatactcccccgattttgatatctactaaatcatacttcttgaactttcatccatgttagactttccttactaaaattggacaaaagtctttaaatctaacaatctcaatagtttaggacatgattttgtacatgtcaaagttcagagaacaaaaatcttaattaaccaataaaaaataattattatttgatattaatgaattaaaaattaacactataaagatttttttttttttacacttcataacatttatgttttatttttacggaaatctaaatagaaactcacataacaactaatggtgcaacttaaatcgcaactaaaattcataaagtgactcacttaaaaaccaccagagcaacccaaacagtaaatttgaaaaaaaaaataatatatgggataattcccctaaagtttaatagttaacactttataaatctaagtccaatatttgttttgattctagaagtgacctttcaactttttttggtgtaatttaatagtattttacaatcaattattagcttaatagtttaaagattttgggttcaaacccataaccttccaacttgataatattgaaatttgtccacaactccaaaacaactgcttttggagatcagatcagtcttcatgcttgtgcctcacactttctctcaccagtcactaccttattgacgaccacaaccttaaccacaataatatataaaattatatcgaacattcgaatacacaacaatactcatgattattcctttaaacattctttatcttgtcttattaaaactgtgaaaatgaagagtaatggttagattagatgtacaaacttataaatatagccaaagatgtgtgcagtgcagatcatgccatgaggttcgcaaggaactgcaagagttccactttgtccaaaaaaaacaaaacccaatacataaggaaaacttgatattaaacattaaagccatgtatagttagttatataaacctacttgctttcaaccttaaactctcactttaactctttattttctttcttccttttgatttatgaggcagtggatgtgattgtattgtggaggatattcacttttagttgtgtccaagatttggcctttaaacaattccacctctttattatcttccattacaactttaattaatccccatgcctatttttcaatttaataatccaaaaagcaagagacatcatcattaagccccctctctctctctcttgccattatatatgctattagaaaataggctttctaatattttttaataattattttgttcaataatatttcctacttcatttaacagcaaataaatatttaaatcgcattttttttgtgataactcggattaaaattaaaacttaatacttttctaattattctttgaaaagaaaagaaaacacctctctttaatttgtttaaacacaatacataagtatatatatatatat

SEQ ID NO: 253459 - DNA, 575 bp, Cannabis indica
gcaaagtctttccagctacattgacagaggcctctcaataatggtacttcaaattgatcctaagcaagtttaattcatagaattccttcatatcaaaatttcacgcacaattctcatcttttaggcaactccctgtacacttggaggacttggtcggggttaagcaactgacgaatgaacccctgaaagactacattagtcggttcatgacctaggccacatgggtaaaaggattgaccaaagaggggaaattagcaaaaatacatggaggaattttaccattgagatatttatggaaatatatcaataggctaatagtgaactccatggcagaattcttggaccggacagatggatttataaagttagaagaggcgcggtacgaaatgcttctccaagaatatattccgctggtcaaagcaaaagctcaatacgaccttaagtgcttcagttcaaaaccagggtaggagtagcaaggggaaaaaaaaggtcgaaacggtggaaaatcaagaaaatggaaaaaatggaaagttttaacaattctgaacaccagcaccctcgggagaaagtccaaa

SEQ ID NO: 253460 - DNA, 616 bp, Cannabis indica
ttggcatccaagtgactaaaactactactggtttacacctttctcagacaaagtatataactgatgttctttgcagggccaaacttcaatttgccaatagtttacccactccaatgacaggggggaaaaagctctctgccattggaagtgaccctgtcaaagacccatctcactatcgaagtcttgttggtgctcttcaatatgcaaccataacaagaccagaaatttcatactcggttaacaaagtatctcagtttatgcattctcctcttgagtcacattggaaaactgttaagagaatcttgcgatatttgaaaggaactcttgattatggtcttacacttcagcactctacttctctcgaccttgttggattctgtgatgccgactggacatctgacattgatgatagaagatgaacttctggcttctgcgtttatcttgggcaaaatcttgtgagctggacatcaaagaagcagcctactgtgtctcgatctagtacagaggcagaatatcggagtttagctagtatcactgcagaaatcacatggatacagtcattgctctctgagttaaaaatcccagttcctcgatcaccaatcatatggtgtgataa

SEQ ID NO: 253461 - DNA, 1186 bp, Cannabis indica
ccaaggggtgtggccccaaacattatggtttgcccttatgacttcccattgacagaaaaggacatgcgagtttacataccaaatgttgcatttaggaatttagaagactcaaagttgaaggggtttggcagttgttggttcaaaaaatgggagctttagaaatactggatgtgaggtgcctcttttgaagacattattagtgttggtgtctacacgagctctctgcaacgaagagttactattgaactacaggtggagcaacttggagcatcaacctgaatggtatactccagttgatgaagaggaagatacaactagatgaagctaaattttggaaggttggtattgtttgttgccttttacaacattgtctctagttgaaagagaaatatttaccagttttgaaggctcaaaactcccaataatgttggagcataattaggttgaatcatacttcttgttttacaataaattaggcaatagattgtccaagtgtctacattttgtcatatcaatttcttgaactcatataggaattattcttcgtagaaattattcatatgttacatcatgaatattattattataagaaataatattaccatttcaaatacttattatatttacacatattatataagcttttgttatgtagtgaatgagttttggaataaccccaatgtgaaacctcaccaatgaatgagaaatgaagatcagcatatgacagctgatctaatcaccaccacaactgcaaacaagctattgaagaagaaaccatgcatcacatccactactccaatacccttttgccctattcttcctatttggattcttttttccaagtaatccatcttgatgaactattgttatagctgagttgaatgcactgcaataaaaatgaaagggaaactgaaataataaatacttgtatgcataaataccaagaaacaattcaattcaagaaaactaacacaaaacaacctagggatcgtttgggacagcttttgaaaaaattaaaagttgatttttgaaaaagctatgataaaaaagtgtttggtaaatagttcaaaaacaacttattgaaaaatttatggagaagctacagctaatacagtctaattttttgaaaaacttgttttgattaaaagtctttataataaatttgtactaaaaatatatttactta

SEQ ID NO: 253462 - DNA, 1059 bp, Cannabis indica
aagttgagtttttgagcacccgaggccccgagacccagcgcctaggttgacaatctgtcaatcaggtgccttccaagtgtcccatcaaagacccaattttgcatcgaatccttcttcataaaaaacaggtaaataggtccttcaaaagaaaaaaaaacaacaattcctgggcacaaatagaagggcccagcgcccaagttgacatttggcgctagccttgcacccaagttgacattttgtagacttgggccatttaaaatggagttttttaggaattctttcaagcatcttcttcgtcttcaaaaaatattgatattcaactatttttagggaccaaatagaatttttgaaggggcgaaactaggacccatcccccagattgatatttcgtcaacctgggctattttcgaccaagttcaaaaaaagtgtttcgggcattttttttgttataaaaaataacaaagattcaagtaaacttggggagaaaatcacaaactgaagtccctagaaaaaggcctagcgctcaggttgacttgggactgggcccagcacccaggttgacaatctacctgggacgctaccttcaattgctcaaatgccaaatctgaagtgaccattgaatccaacatggtaaaaaataggggaagacaccctgtcttcaagtttataagccttagaagtataagaaatagaatcctgagagctggattgaaagggcccagcgcccaggttaacaaatggcttggttcgatgggttctgcttatccgaatctaatgtcgttttgaccgttcgtctagtttttcacaaatcaatgatacatgaagttatgaaaatcaaatttacaactttgcatttctcatttccagcactcctgaaaataatgagtttcgagtctcccatatacgcaaaacagtaacatctccgagaactgtgaccagcttcgccaaaacataaaaactggactaagtggtggcaaaattatcacttagaattaataaaaaaataactcccttggacctttctacaattacccatcatcaaagttgacgtcagatttc

SEQ ID NO: 253463 - DNA, 634 bp, Cannabis indica
tttgctttttctttttggttcctttttatttgctttctaagcacctggtcatcctcaaaaggatgagccacaacgtatcccttccaaaaacagtgactaagctcttagggtaaaaagactaaaatgcccttatttccccgcaaagttatctcataaccgtagaggtaaaatggtctaattctattatttcgttaaaccccgatattctaagatattcaataatattgtcccataaaatacttgatacaaatttgtatccatgtgactaaaattgccattcgacctatttccactgttactgggcataaaaatataaaaatatgaaaattcataaatagcatgcatatcacacatataattcaataaaattttcagaattgagaaataataaccatatctatattttcatgaaaatagggtctataaaacataaaatacataaataatcacatagtcatattaattagtgctgagtgtcccactaatcacatgtctaagtataacggtcattacaggtggcgcgacacaaagtaaaaaaaatcctagaaaataaaaaggatgattaaatttaagaatactgagatataagataatgaaatttatctagattggtttgaaattgcagagcgaagga

SEQ ID NO: 253464 - DNA, 1000 bp, Cannabis indica
aataatgtccaacatccagtctactatatcaacaaacgacttgttgaagcagaatgttggtaacctttaattgaaaagcttacttacggtttgatcttagccagaaggaagttaaggcactatttccaagctcaccctggtcgggtttataccgaccaactcttgcaccaagttttgtaaaagcctaatgcttctggatggttactcaagtgggccatagagttgggtcagtataaaataatctttcaatcctgtagaatagttaaagggtaggctttggcgaactttgtggtggaatgtagaagaaaagaggaagacagctcataggatagccatgagccagtacatgagtccctaccagaagagaataaagacaaacctatctgaagattacatgtggacggatcagctaccaatcagctttctagtgcgggaattgctctcaacacacttgggggaaacctctagacagagcaatcaaatttgggtttagagcctccaataacaaagcagagtatgaagcactcatagctgggctaaagctttctcgagaggtacacgctgaatacattgaagtctacagtgatttagagttggtggtaaatcacgtttcaggggagtacatggctcatagagagaagatgatggcttatcttagaaagatccaggacttgcttgcacaattcaagggttacacccttaagaaaattctaagggaagaaaacacaactactgatgcctttgcacgactttcaagcaacatattgacagataaggccaacctaatcccaatccaattattggaggaacctaacatcaactgtgtagaagaagttgaaatgatagacacggtgcagaactggatgacacccatagcagcttacctcaacactggagaacttccaaactataaaaatgaggcttcaaagatgatgagaaaagttgcctggtgttgggttttatgccctaaataaaactcattacaatctgattagttatc

SEQ ID NO: 253465 - DNA, 952 bp, Cannabis indica
ttcatttattgatttatttcatccatggatcagtaccttccaaataatatggcactgagatgatggtatgttattcctagttttaaattacctaatttactatcatatatagttttattgcagttgtaattagttttgaactattgtgagatcttgattgtacattacttcaatgcatatgtttaatttactgattttcaagtgagattttatagtactattatattatgtttaacttctctcactgctgtagatccctctctgttgcaagacaatgtagagtggaactttcataatggctaaattgtagtgacaactatgtattgcttgatttttataattttcctataattctttcttgcacataacatttgaggttttcgcagggaaattggtattccattgtcgatatgggttatccccaatcagcaagtgtttatttttttcttcattttactgttatgtgttctttagatagagatttgagctttaaaatatttagtagatgtattttgattatactcattaatcgagatacaattattaattactagcttttatttgtagtgacaactgaaaatgatgatgtgttatttgtagtggaaggagtactcttcaacaccctccctcgaggtgagatgtggtatagtgttgcttcattgaacctttgtattgtgagtgccttaatgattatatcggcaactacaatttgtatcagagacgtttactgacagatatctataaatttaaaaatttcaactattgacaatatagatacaacatggttatggtgcttagagattatctttcagtgtgactcccagtaggcagttcaagcagtattggcatcacaaatcatgactacagatgctcagaggatgctttgggtgtgtgcttctagcttctgagttggagccagattaggataagggcttcacattcttttttatgt

SEQ ID NO: 253466 - DNA, 1227 bp, Cannabis indica
aggtccgagtccgagtttgaaatcaggactgggtttcgagtctgatcgaagattgaggttgacccataatcctttgtaaatattataatacaaactaatacatatcatttgttatatattaaataatacaacatacattgtattaaaaattttattagtataattaatacaatacgttgctttatctaaacatagtgttatttattatttaatacaatatgacccttatacggcataccaaacgagcccgctaataattaaataacacctcaaataaatataaaacccactaaaaatattagaatagaagaatgtaaatacaaaataaattaaagaaaaagataaaattaattgggctagaaacaaaaatataaaatagaaattttaatattagatttacaaaaattttagcatatcaaatactataaaaaaatcttaaaatgtaaaaaattactataagaaagtgacaaacttataaataatatatttttgtaacttttttatcatagtaattttcaaattattaaataaaattacatcgacccaaaatgttaaattttatttgaaaatgaaggcatttgacttttttttagcattcatgtataattgagggtgcttggacctctacttttttgacaaggattccctgggagacattgtatgattaaaaacaatttaacaccatttcatgaaatgtgtaagtttcttttgtttttgtaccaacataaattggagtgatgcagaaaaaattgaagaagaatacataatgacccttggatataactagtaatttatcttgttgtctgtacttgataaaaagatgaaatgttactgtacatcataacctattttgtactacaacttttatctagtgttctattaatagagagattcttactttaccataaaatggaaagatttaccatttttggcacgttacacttattaaagaaaaataaaaaattcacttttaactttctcattaaagtgccttattatatatatttgaaatggatataaatggattatatcttagtttgattatgagacactctaattgagttaaaattttgatctcacaacacttaaaaatgtgtgtacacttatgagacaaagagagaaataagagtgagaaaatcaattcttatttctttctaatttgttagggtaaattgcggcataaatacttaatgtttcagattttatacacttaaatacctaatgttt

SEQ ID NO: 253467 - DNA, 581 bp, Cannabis indica
ccctgatcaatcccaattcaatgaatacaatgcaatcaagggaggtttagccagacttggtgacaacagatcctacaacattactggcataggaactgtcaaattgaaattaaatgatggtggagttgctgagttgagacaagttaggcatgttcttgagatcaagagaaatcttatctcagtagctatgcttgatcaagaaggatgttctatcaagatagaaagtggggttatgaaaattgttaagggctctatgatagtcatgaagggaatcaaagagaatggaatttatttgctgcaaggtcacacagataattcagaagtgaatgcaacaattaaatcatttaaagatccaacattaatctggcataggagacttgctcgcattagtaatggaggaatgtaagtgctcaagaagaaaggagtctttgggaaggatcaaatccaagagattgaattctgtgagcagtgtgttctaggtaaatctacaagagttaagtttggaaagggtcttcatgtgtcgaaggctattttggactacattcattcagacctatggggaccttcaaggactgaatcca

SEQ ID NO: 253468 - DNA, 591 bp, Cannabis indica
aatgaattttatttagggcacaaaacccaacaataatgacatattagttatataatttttcttgaagattaattatatattacccattatattatatatcaaattttaaaattatatgatttaattttttctattattaatagatttatttttttaacttgtaaggaataaattatcattttaactattactaactcaaaaagaaaaagaaaaaaataaaaagttataagtatgaagttgtaacaataaattctatataaaaaaaaataatttaatagtacaaaaagataaatcaagttgataaaactaattaaaaaaaaccaatactacaaaacatattgaggagttgataatattttgcaaattgtaattaagtcaatattttgttatttttctgttgcttgttagctatctttttattttttatattttttatgttattagttaagttattcaccaattatttttttcgttgtcttagttgtttttaagttatttttcttattttagtaaaacacaatatttttgtaattttaaaaatttaacataatattttggaaaacttgataaaataaaaatgttaaaaaaaaa

SEQ ID NO: 253469 - DNA, 599 bp, Cannabis indica
gttagttggatctaacctacaaaaggttgttgcactatcttctacagaggcagaatacatggctgcaatagaggccattaaagaagcaatttggctcaagagattgacatgtgagctcaacattaactcagaggatgtaactgtgcactatgataatcaaagtgcactacatctcatgaaaaatcccatgtttcatgagaggactaaacgatgcactttattagagatgtgattcaatccaaaattgtctctgtaaggaagatcaatactcatgataaccttgctgatgcttatacaaagagtttgactaaagacaagtttagactttgtcttgacttgctcaacattaactcaaactagagtctcatattgagattcatattcattggacattggattcagttctattggttactattatggcttgaattactatgttgttaaagtgtactaaaccaggtggatattgtggggtttagaacacttaaacaactaaccaaatgtttggatagttggtagttatttcggttagtgtgtgtcctaactaacctactgttataaatagaaactttgcaacaaacaaagagagagagagagag

SEQ ID NO: 253470 - DNA, 1853 bp, Cannabis indica
ggtaaaatatatccaacaacaggatgttccctattttagtgtttaggtagaacttccacctctaaattcttgttgtattcgccagacttgtatgtacctttattgttatcttgtaacatggtgcgaaccttctcagtttggtctaaacatgcttgctgcaggatctttactatcaaggagtattcttcagggataattctcttacgaagaatttctcccctcgatctatatgttgacatgcatggtaactttttatgggtagccatgctgctttgagttggcttggtctcttcttatttcttgtttgtcaagggatcctgctagcaagatgttgtttatctcttgatcagtatagacgagaagtatgagagcagactgctgatggattggggcaagacaaggtggtgaaccattttgaagcattgcttggccatttgggggaggctatggacgactgagtcattgattctatggccgaccagcttgtggaggaggtgaccagcctggttgatggctctatggctggccaggctttcgaaggtcaggccaatgctgaagtttgatcctgtctacactcgattggctttaccctctgacatgattgtcgtagagcctttgtgtactatatcaatagatattcaacttctttcttggtaatgcttcgtagaggtggtgttgggataccacttttatgtgttaggttgtgcaagattggacaccctacaaccttccccctagtctctgctttctggcaagatttttctttggagttatgctgctgtaggtgtatgaacatgttggttgtctagcatgtctattccttttgaaagaaagaggcttagttctttgaagaactgaccaggtaccaagtttgccttggttgttaaggcataactgtgtagtcgagcttgtgcattggctgttgtgtcatctttgggggcttaccttttagtacagcctttgagctgacttaatagctcaggtaggccatcatcttcttgtattgagctgtatattcacctaggacataatctatgactagttgagagtcgtggtgcatgtctaggtgttagcccgcgcttcgtgtgctagcttgaggctagcattcggagcttcatgctcagcctccttgttagaagctttgaaaatggccttgttacctcatgcatcagttgcccccaagtgccgtgggggccatgccagcatcaggcaggtgatcaatgcacctcttgggttcttactctcgcttcttctctggctcccacttttctcttgaactttgagagatttgtggaaatatgcctttacgattggccatgaagctggtgagagcttggccttatttcacttgagtggtcggcctgatgcttcaggtttctttagaacctggcgcaattttttattagtgtatctagaagtatggccttagcttttttggaagctaagagtaagctatgggtcagcttctccatgagtgggtaccgactttagcatcgatcaatctcttgctgatgtagtatacagggtgatgtacactgtgttcttctcttgtgagggcatcactcacaacatgttctatgactactagatggccgagccaattcatttcttcaactcttggaatgcagtttcacattcctttattcactcaaattttttattgcctttgagaatgttgaagaatggtacacaaatcagcttagtgcagcaatgtgtcctgtttggctttgtacttccttgattgttgtgggtgacttcatgtccaaaagggcttggatcttgtttgggtttgagcttcatgttgtagttgcggaggattttaaagaatttttgtctaggtccttcatatgccc

SEQ ID NO: 253471 - DNA, 795 bp, Cannabis indica
gcacgctaaacatgtaaatacatatgaaactattatactaatctcaccttgattctaaattcaagtgtgccggtcaacctaagtggaactgctactgaacgatttacaggtccctaaatcacatcatacgtaaaactgataagtaatacactaaatcacttttcagggacttaaatttaaaacttaaagttttcctatcgataaatagcaaggcaatacactaaatatagagaaaatattaaaaatgagattttcgagaaaacactacaaaaaacaacatgccatttttttgaatccctaactctggaaaaacggtctaccattttttactataaaaagcacaaataatctcatttctccttgaattctaccccaaatctcataaaatgctccagaactcctatttgagtcataaacaacatataccaaatgaaaaatctatcatcaagctactaaacacaaaaacactattagaggtccaagcttgagttcaataactcaactcaagcttcaacataataacaattaacaaaatatgctccaagcaactcaaataacaacacattaatcccagaaactcatcccaaattattagctcaaacatacaaaaaccaaaaacataaagacttgcatgagaacctagttctttaactacgaacttcaaagaaaattagaagagaagcttaccttgaaaggatactgaaaaacatggctagaggtccttaatttggtctaaaattgatggaaaaagccatttgttcttagggttttttttggtaatatcccggaaaataa

SEQ ID NO: 253472 - DNA, 976 bp, Cannabis indica
tttattatttattttttttttgaaacaagtagtatttagtttttgatattaagaatattaaattttaaaataaaataaataaatgcaatgcatctgggccctccacgtgtccatttttatgagtaaacggaagtggtagtaacagtgtaagaaaattgtaacattgggtatttttgcctccaaaatataaagataaaatatttaagtgtataaaatctaaaatattaaatatttatgcctcaatttacccaaaatagtaattacgatttttggcccagaaatgatatttcttcatttatttatcaatttgtgacataaaacttcaaataaatatcacttgaaaatagattttattattcaaatgtatggcttgcattttgcaatatgattgtaaatttgttgtggactatgtatactatttcttcatatactaatgtaatttctgtagtattagtattgtttgtattggtctgcattacttgaaagagttcaattgtttcctcatacctactttcttctttgtattattggtgacgaacttcgatttgtatttttcgaatcaatgtcaaactctaatagaattactcctaatttttatttattttgttgattatccatttgtataatgacattacatatttatactagttaggtaatagtaacaatttattaattagtccctatatcattttagagaaatgctaaaaggcaccagtagtacctagcaccattcaatgtgtcagtatcgttattggtccaactaagtaccgggtcccatataatttaatgaaatagcttttagggagtatcgctagccaatcgcaacgtgacatgtcgagaaataggcatcactgatgcctaatagcaatgctcatcattttatgtaacagcgtagagatcataggaaacataattaaaatgtgattagggtccaatttagacagaacagtgatagtatctgatagcacatgaaatt

SEQ ID NO: 253473 - DNA, 520 bp, Cannabis indica
catccgcaaagaagatatgagaagtaccagggccactccaactgattctaataccctttgtctcactcttttttatagactcctcaaagagcctagataaaactctgcatcccagatgaaaagatacgaggagagatgatccccttgtcgaataccacgagaggaattaatcctgccaacttgaccaccattaaggcaaacattgagggttgtagttgagatgcattgatcaatccaattacaaaattaatccgggaccccaaaacatcttaaaacatgatcaacgaactgccagctaagcttgtcataggttttcataagatcaattttgatagcgaagaatccctctctgccttttttcatattaaaactgtggatgatttcctgaactataacattgttgtcttgaatatcccttccagaacgaaggcaacttgagtagggaaaataattttgagaaggagaggcttattttatttgtaatgatcttgaaaattactttgtaagatacattgcaaat

SEQ ID NO: 253474 - DNA, 1346 bp, Cannabis indica
gaccaagacataaaatggataagttgaaaaatacctctttttttgtatctattaataaaaaatacctctttttttgtatctattaataaaaaataccctcatattatacctatttttttgagtgaattgcctaatatactctcactttctacttaagtctagcatataatttacatataacctaaggaatctaatggggacatcattcttttatgggtatatctaaaaaaatatgaaaatggaggtaaaaattaaaataagtaaagcaaaatgagtatacaatgtaatttcctcgacataaaatcaacatgctacaatttttttagaaaatatatttgaactacgagcttacgtggaaagtaagttagacccaactagtagttaaaaagatgcaataataatccaaaactcataaaacacatcaatgtgtatagatttatatatttatgggtatgtataaacattaaacactcacatgatacttatatatgtgtataacccaccgaatatgcatactcatataaacagagctactgatgttttcaatttcaaaaagagaaaaaaaaggaaaaattattccatccatggcatttaaatacagcaatggctacaaaaaatatatatatatatttatatttatatattactcattttgaaatctaaatttgacttattaaataatcataaaattataaccctaaatagaagaacaaaacccaattttttagatttttagaaattcctaaatttttgaaacatgaaccttaaattttcaaagaatcaatcaaaggtggctctgataccacttgttaaaattatttgtcactcataaaatatgctataacaatattcaactccatagataaacatattacatataattataagtgtataaccatagatctaaagaatacctttattgattcaaagagaagaactcaaatagcgaaagcataccttaatccatagatagtgattatcttaattcatgtagagataatctttgtagtgattttgggtaatgatcttccaagaaaacaagacttagggttttctagttttctctctttatggggaaagatgagaataaaaattgactcttgtttcttgaggaccactccctatttataacctcatagctaggttattaattttaactaaatctaatttagcccctcaatatattagaaatatcacttagggtatctacacatttagcccatgatacttttatatctaatgacccacaattactaaaacaatcactatatttaggtcaaacttcaaatagcgatacacacaaatacatataagcccacattagagattttaatccaacaagttag

SEQ ID NO: 253475 - DNA, 779 bp, Cannabis indica
acttattttaagttaattatgttaaaaaaaattacaaaaaattgagttcactgtctattttgtattattttaaaaaaatatagggtctgagttgttatttaacaaaatagagaatccaatttgtaacgtttataaaacacaagatttaaaatagtatttacttattttcaaaaaaaaaaaaatagtatttacttagaaattaccaataattaataaaatatttaaatatgtagaaaaaataatttgatatataacgtaatgtaaaataatatgtattttaaaagattgaagagatttttacattaaatattgaaatttctaaattttttttctgtgatgcaaatttttttttaaaaaatacgtgtaattttttatattgtatactttgttaaattttcaggttgttccacggttgtttttttttagttattccactgttattttagctgttctgttttgttcttttatggttgttttataaaaagttatgtgactgtaaaatttaaaacttttacctaaattcaatatttttgtaaaaacttcaatactaatagagtagagaagttatcgagagtgctcaaaagacattaagaacatatatacgtgagaaggtagtaaattaatataccaaaactcattaaaaataaaaatataatttttaaaataaaactaattaatacatgaagatcacaaaatattaaaatgaaatatatcaatgttttattttaaaatttgttatttaaaatagaaaaatttgtagcataaatatctaaatttaa

SEQ ID NO: 253476 - DNA, 609 bp, Cannabis indica
ttaatctcacctaatccctaagacacctacagtataggttatgtatgccctattttgtaccttttatgaacttgtgctcatacattgctagcactcaaagataagttatccctttttgaatcttccctaccaatttctataaatacccctgaacaaaatgggaaagggaacgaagaagggagagagagagaaaaaagaaactcaccaagaacattatctgtataaggactctcattaataacaaagactcgtggactacgggtcattaatacccgaaccacgtaaaaatcatttgcattaattatccctaaaactctcatcattatctcatttaatcggttgccgaaaatttcgatcaatattttggtgctttcattgagagccgtgggaagcgttgttggagacaaaacagtcaaagaataagagttgcaatggaggaaactcgaaacaacacacgccaacctcgccccccccccccaacggatcttcagaacccagaaggtgaagaggctgcttcacgcttaaatatgggctcaaaggaacgagatgagacgaacgacaaggaatatgaagaaaatttcaaagggtacgatgcttacgacaaaggta

SEQ ID NO: 253477 - DNA, 761 bp, Cannabis indica
attaatttcatgattttatttttgtatatatgataatgataattacgataatgatgatttcacaatgtttgcgtgtaaaagtcctaaaagcattgaaagaaaaatagacttttaaagtattgtatatatgatattaataaattacttataggaagagccaatgatcgataattgatttaatttgtttgtcttcacaacaatatttatattagaagctaaattatgaccagctagctaatataaataagaacaaagtgatgattttgattattagttgttgttcataagtagaaaattgaaatcatacttctacctgtatacttggagttgtgaaatttgattgaagtaatttgttattaacttcgctggagacttgaacctctttacttatatcacctgctctctttgccttttccttatgtggaacagtctgtttttagtaggtttttgattgatatgaaataatatgggatgttttattttttattactattttattctgtgtgtgcatttacttgctgaggtatatcgttgtactctgtatattcatcaagtacctctccaataagaattgaatttcaatggtaagagttagaatattaatcttgccatcattagtttacgatccatacaagcgtttgtcaccgcaatattatccaccattgcaaacttatctattttagcatatgttcattagaaaaaaatcaaatcttaaatctgctttaggcatagtcaactactacttaccaaatagtttggta

SEQ ID NO: 253478 - DNA, 1529 bp, Cannabis indica
ttttggggcttttcattgagagcaaaagtcataaattttctctttacttcaaatttaatcataaacacgatggtggtacaaactcgtagaggcatggtcaatcaggtagatccaccagcagtgcatcttgcactgcagaatctaggaaatgcaagggtcctaccagtaaaaaatcttgaacaaccaatcacgcaaccaccaatcgtgggtcatggtgtgatgtatcctttgatggaatctcactcagtgtgtaagagactggaaataccagttcagcagccaatctagctattcccagtactaggattctgccagcaacaaatgtccaaacaaccgttggagatgacactgagatccagaaactccttgatgctcttgggctcatgcaaggccatactaatactctacatcatgataaggaagagctccgtgctacagtgaaccttgcatgtgaagagcaaagtcgtctgtttgctgaatggaaggagaaagaggtggaaacattgagggctcaacaagcagccattgatgaccgaacaagataggccaccatactgatacaaagagcctacaaagttactaatcagcaacgtgcgaccagcatcccgctgggcgagtcagacgaagatccaattgggaacgcttcccaaactctgaacgatcagccgtccaatgcccagtcataggctccacctgtgggccaagtggatgcggccagaccttatctagtgattcgtcagcaggaattatacataataactccacccagactaatggttccagccaagtgattggccaaaccaaccagccattgagacaacctaatgcatatgtatttagtagactaggaacaactcatgatcttagggatgacctgaacagaaggagagggttagacgaacaacatgtctcgctagccactcaacccgggacccatgctcaaaatccagctcaaagagatcctgacgtgaccctggttggccaagaggccgagtaagttcaaccatccgtgaaggcacagttggatgaactaaaaaatatgttccaaggtctggccagtcagaagaacaacgatcttgagttggactgagcacgtggatccccttttactctagagatcaatgttctagagttgccccgcaagttcaagatgccgacctggaagatgtatactgggaaagaagatcccttatgacatctcaaatattttgaaacgcaaatggacctacaaggagtacgaggagatgtatgttgcagattttttcctgccacactctcagaagccgccaattaatggaaattcaagttgacatgaagagagaaagaccagtcgattctatgagtgacttcctcgatcgcgcaaattgttttaaaaagctcgaagaggccattcagcgagcagaagtcaagcttaagccaggccagtcacaagttccctctgctggaacatctgttcagttcccccagtacccaagaaattcaagctcgggcggtaaaaggtctaacaacaacaacaaaagaaagggaaa

SEQ ID NO: 253479 - DNA, 529 bp, Cannabis indica
attttgtaaacgggatcccggaactttgtaaatgtaatatattatgttttaattaaataagcaaaactttaatgaatcacgatttcctataatctcgttgattggcaatgagctgcacagtacgttaaaaatcacactaacacgcctataatagttagggtgttagaattacaagaaaaggccttttatcccagttttttaggctttttatcccggtttttgctaaaatgaaaaccgggatgtatgacagtgagataaaaggtatttaaaaaaccggaataaaaggggtacttttcatcccggtttttatgattttttcataaaaccatggataaaaagtatccctttcattccaatttttagagaaaagtgggatagaagggtacattttatcccagttttttgattaaatgtccccttttgatcccattttgcaaatgtataggttttttattttttgttcttttaattttattatatttcatttcattcattaataataaatataatttttatttttataattata

SEQ ID NO: 253480 - DNA, 801 bp, Cannabis indica
tagtgtggaataattgaatcaattaaattgaataaggttaaggtttttggttttaccaaagccacgtttttagttatctatggttaactagggaaaaatctcctaacctatttaaataattcattgaatatatatataattgaacttaacttcccacattcttctctctacattacgataccactaactatctcaagccatttatatgtaatttaatttttcaatatttatttagctttatatgttaacaacacagccctccataaagctccaatcgaaaaggtctaattactatcttaaaaaaagaattagtcaaactcaaattggatatttctacaatattttttttttgctagaaactcctttatttgtaatactcctctaaagctcggctactactacctaattttaaagaatatttcattctaacttaatatatacctatcttaataaagctttatatatcaatctagttatgaaccaattcgtattagtttttgataaaatgggccaagccctagctttaagaaaaataaatataccataattaattaaataatattaacaaaataattattttcacaccaataataatataataaattttgaatactatatatatttaaacctggtattacattttgtgataaatatatatttgtttttttttttcgagtgttacagacccctaacttgagtcatttgcacatctttggctactgttgctacattttaaatgatcgagatcatctaggaaaattcgatgttcaaagtgacgaaggaagttttctcaaatattct

SEQ ID NO: 253481 - DNA, 1240 bp, Cannabis indica
tcataactatcaaacgatctaccaagtttaacaccaattatggccgcaacacacgagtgagtggccccagagtcaaatagaatagagaaatacgagttattgaccgagagctgacatgtaacaactgaggggctagcttctgcatcaccctaagtaagagcaagcaccgttgttggagcgagattttcttttgtcttctgctcttcattctttaattgtaggcaatctcttttgtaatgcccaggcataccacacttaaaacatccttgccctctacactcacccagatggtgcttcttacagttgggacactatggataattgtatcaggttttagaaccaccatgacggttgccacgaccttggttccctcgaaacctcttgttctgacttaagccactagatgctgacgatgcctttctcttctgattagttgttgagtcactaccacccctaccataaccagaggtaggaggagtagtggttccaccaacaatatgtgtccttcggactcctgaacgcacttactaaaattaattggcacaattcctgaggccaacctatcaaactgggttgtatactctgtaacaaacatattctcttcctaagtcagctgagtaaattattttctttgtgtgctatggactacctcgttgtagtactttgcattaaacaactcctaaattcttcctaggtaatagcagtaacatcctgaataagaagcaccatatcccaccagactagggcatcctcctagaatcggaatgttgcacaagccactctgtcattgcctgtgactcttataaagttcagaatccgagtaatgacaatcagccattgttcgactttcattacatctggacctcccaaaaagactagaggtgtctgcttccaaaacctttcgtacagtggttccatccagttcacaatagcaaccggccctgcctagacaacaagggtaggagctacctacaccacaagagcaggcattgttggagcaccctgctacctcagacatctaatctcttcatctttctcataaattctggcttgcatcgctgcgaacctgttctcccaatcttgagcagcctgcaatgggttaccatttgcccggccacgtgctctacctcttgggcctctaccttagccatgaatatttgagggaaactgaactccctaaccgccactagatctaaccaaattattctagtttctcgtgttctgcctggcgtccatccta

SEQ ID NO: 253482 - DNA, 518 bp, Cannabis indica
cccaccggaaaccggtcaaaggagccaccgtcttcacccctgtggtcctccacagtcatttttttattattattttctcaataaacggctaagttcagagacttagatgagaaaacagcacaaataacaaaacccaaaattccaaaaacaaatttaataagaaagtttcaatttttaacaatgaaacttggttgtctgtgccttttctcaggaacccagaagccaaataaccattaccaagaggacccaataaaaaaagtttcaattttgaagtctgaaacttggttgtctgagtcttttctcaaaaacccattagccagataaacattaacaagagaacaacaaaagcatgaaaaagaagcaagaaagtggtagtaagtaaaagctgaagaaatggacaatgatggcgatggccagaacagactgaagggtttcaacccaataaaacagaaatcctttttaagtattattttagtaaagcctcttcacctctctctctctctctactgctatttttg

SEQ ID NO: 253483 - DNA, 870 bp, Cannabis indica
tagcagtattcctccatttgaagattcggggagtcgtggaaagtcgtttgtgatcctttggcggtcgaccccttcgtttcggggtgtgactctcttcctgttctggtatactctgcctcttcagtctgcccctacgcctagtaggccttccttcagggctacttccaatggagaatatcactggattaagagacattgagagggctatcctttgccgtaccacccttcgtcgtttgcttactttgatcctcattgggtgaagaggccacacttgaagcataactttggaagtttttcatacttgtactgtacctatagatcttttagtttttgccttttgagaaagaaacccgcgaaaataggtttattgagatcaatggtggccctaaatcgcagggtactcattccaacaacatcttctatgccctgcggcaggtcaaaaactggggagacctttgttgcaagttctttcacattggatagattccaatagaatgggggaatgctctccacattgacccagataggggttttatcaatcggacttccgccggagttagccaagctggctacggcataataaccagaagagccccacaaacaaaccatgggcgtctagccagcacattcatggcatcatttttgtttgcaaatgtcaactgtagcagcccaccctcaagctccttccacttccatcccttgatttcattccatgataatttaagagagccttgaatggctccttgtccaagcatatacctgctgaatatcttcccaagtagaactttgttttcttcctgtggctcgtcaacttctcccggattgagagagaaagtaatgccatcttgattgatttgaacaacgccttca

SEQ ID NO: 253484 - DNA, 569 bp, Cannabis indica
gtgaatccacctccaattcccttgtaaaaccacgacaagtcaaaccattctccaccatcgtcatcacgagctgaattggaagcgggaacatgcgaagactcatcatcatcatctccgggacatgaacttggtagaggatttctacaaagaccaaggttcatggaatatgaggaagcattgaagctatgtaattgagtaccaatagggattcttcctcacagtcgattatttgatagatctaagtaactcaaagaagatacttcagctaagtttgtgggaatttcaccatttattttattgtaggaaaaatcaagcacttgtaggttggtcagtttcccaatctttctaggaattttctagacaaattattccttaatagatttagtgcacccaactgagagagatgagtcacttccataggaatctctctattcaatttgttacttgataggtcaataactcttagtaatcccaaaatcttcacatactcatgttgtaccactttccatgtgattgatgcattattttcataagaaatgggattaggattacaagcacgatctaaacca

SEQ ID NO: 253485 - DNA, 1021 bp, Cannabis indica
gatcaggatataaaaataatgtactatagaaaaatttgattcataatctcacacctgtttcttctacataatctcacacatacttttttttttatgaaaacgggggtgtcaacacacccaattcattgacaaaaaaaaaaaatctactacaagcacaataaaacaacagagaaataaaaaacaccaacaaacagaacaaatgtaaattcaaaaacagacgcagcaacaaaaatcgaactacagcatccataacactcaaaacagcccggcttaacctgcattctttttccactttacatagtcattcaatacctcatgatccatgtcgctgtactatagatacttcctgtgactcgagcctcccttgcccgtttcgcaatgttgtgcgccatgaagttacatcttcgagagacatgtccaattttccaattttttaatctcctgcaaagctagtgaaatcgcctcctaagatacactaggttgaagtcgatcccctctcatattcctttcagaatgcttcaacaacccggatattatcactttggaaaataactcgctcaatcttcatttccaccattaattcagctgccatacacaccgcaaaggcttcaccaatttttggatcagctgtgtgtcgcctctctattttaatcaaaataatagatccctggtcattacgcacaatggttgccgccaccatttccccatcatcataagcaacatcacagttgcaacaatacctggactcagaaggggggctccaagcacaaaaatcatcaatagcattagtggccactagtttatgctccctgattttactattgacatttgttataacctgccaaaccatggttcgagcatgaccacacaccacagagttcctttctctccacattgcttccactatgcacagtccaacaatcattacatcctcaaaagaaatgtttggaggcctgttacgcccatctaagtgttgggttttatgccctaaataaaactctttacaatctgattagttatc

SEQ ID NO: 253486 - DNA, 584 bp, Cannabis indica
ctcaatacattaaatacaaataacagaataagcactggtgttggaatacctagtggataaaaaaaataatcttcctctgacacagcgttctgtttggaaccttgtttttgatgaggaaaaagttagagagaaaggctggaggaataaaaccctaatgctaatttgtacgagcttttatttaacatttttatcttaacgattccagaccctctaaaatagcattaaattcctccctcttcccctaaaattcttttcactaacattttgttaaaacaagaggattggaatctctcaagcacaaacatttacttaaaaattcacgttctaatcacggcctaaatgaaaataattctcaccagcatcattgcagtttcagagagctctgttaagaaagtactttgccctgccataatatggtctttggcacccatccgaacaaagattctatcaacaggagaaagctcaaatctttctgcaggcacatcagctcctaactgtagaagaaagtgaaatcaggaaaataacaataattctttagaattgacaattttcatattaagaagaaagcatcaactggggaaaaa

SEQ ID NO: 253487 - DNA, 980 bp, Cannabis indica
taattaattattttactttcaaaatatgattcctattatattttactactatcatacagtaacttttggacttctgttaaataaacgaagcttaatttgataattataaaaatttgaaggataaaatatgatagtgataattgtttgataggtaaaattacaaattacttaacagaaatcttatatttcactaaacttaatgaaaagtatttagcattaacaataatttagcaaaaaattgcatggataaaattttggtcaaatattttttcaaatgactaaatctatatttttgcctaaaacacattggaggagctacgacaaaatacaaaaatgagtaaagataattttaatcatcatttctttggaaaaaaaaaaacaaaacacaaacaaaaacttaaatatatacaataagtaaaaagtaaaaattagtataaactctaaatgtcaattactaacatttatagaagaatagatgctaagtacaagaataggaattcaccttattggaataaattattgaaaaaattcactctctcattctattcttctctttcttttctctcttattttatttttttcaaaggctagatggaccttatttgagacgaagtgactataggcgggttggggagtgatgtttttggcggttgttgttgtggtaagtgttgatgttattggaatggcgttgatgctgatgactagcgatagtgtaacttctagattaggaggcggaataacaaatccatggaggtctccttctcctccttgagagcgctgctcgagtgaagcaggcttagcttgccttcctttcgaattggggaggagtctgacgcttagtgtcacaaaacccccttcctgtggaaaattggtccatccaagctctcgtccgagacggcggtggtcttcgaattctcttgggagtcccctccatgacccaagcaagtgaagcctatgccaaggcttgatgtttaggatga

SEQ ID NO: 253488 - DNA, 697 bp, Cannabis indica
attactacaaattctgctttgtagagattactacaagttctactttgtagagagattgaatacttctattatattctaattatatggcttggactggactgatttattgttagtacatgtaattaattctaaataaatacagaataaagtaccaatgtaattaaatttatgtaattctacacactaattaattaatcaggactcatttgattatgatgtacgtaaaatgaggtgataaactcaaattttccattaacaaaattagctttattatttaaaaaatatattttcttttatcaacaatatatatattttagatggtataattaatatccaaaatgtgttataaaaaaaaaatcaatataccggtatattaattgtaaatatttgttatcatcaaaaaaaaaattgtaaatatctattttttaaaaaagataactgtaaatatcaatttctctaacaataaaaatataaatattaattattttcattttctttaataataataataataataattttatttttaaaaaaggaaaaatgaaatttaaattcaaataaacgaaataattttaaaaaggaaatagattttttgtaagtcggcggatgctttgtataaatacagaggagagttattgagaaactgcgaaagaaagagaaagcaaaggtgagagccaaagaagagaagagagagaga

SEQ ID NO: 253489 - DNA, 633 bp, Cannabis indica
gttcccaccaaaagccatctatcatctatttccgaagaatcctcagcaacattgtcaaaaatcagtccttcctcatcctcatcgtcaatcgaaagcgcagcagccatcctctccactgtatccccttgatccattgtgaccaactaaaaataaacttgagacaaacacgacaaagtaaagtgatcaaacccaaaaaactgtcaacgaacaaacaaccatgtcaaaaagacaggacatatatatcaaaataaattaaaatagggatacttatgctcctattgattattttaatacttttgctcatgttgctagaacaactaccataagggtgtttataaattaaattaattatttgaacgttctatagaagacaatttactcattaattaataaatgtttatttttgatttgtcctgaaaatgtttatctagaggtacttataaaacatatcataatgttattaaaaaatgtgatgatttaaaagtgataatagtaaagtaaataatattagggttcttttgccttaattaaaactctaattatatataaccattttcttatcaatataaagaaaattattttcacttcactaccaaaaaaatactacttatatgaccaacacaataggtgctg

SEQ ID NO: 253490 - DNA, 1123 bp, Cannabis indica
aggccttatttccaagcccaccctatttgggtatacaccgaccgatcattactccaagtattgcaaaagctgacgcttctggacggttacataaatgggcggtagagttgggccattacgaaataatctttcaaccacaaacaacagtcaaaggataggccttagcagactttttagttgagtgcacgggcaaagaagaaagtagcataagggataacccggagctagtacaagagtcgctgtagaacaacaacgaagatagacctacctggaaattgctcgtagatgggtcggctacagatcaactgtctagtgtaggaatttcccttgtcacacattggtgcaacatctccacagggcagttaaatttggattgaaagcttccaataatgaaggagagtatgaagccctcattggtggcttaaaacttgctcgagagctgcatgctgaatacattgaggtctgtagtgattcacagtaaatcatgtttgaagagagtacaaagcccgggggagagatagcttatctaagaaagatacaggatatgctcgcacaattcaagggctataccctcagcccaattccaagagaagaaaacacaactgctaatgccttagccaagcttacgagcagcacagtaattgataaggccaatctagtgttggaatatattttaccaggatctagatttactaacaagtatgcttttaacatcctaaagatgaacttctaaaatgatataaaataaacacataaaaggtatgcgaaaccttacattagttgcaatggaattaaatgactcatttcgcttagatctctaacccgtgtatcatttctatagcagagtatcaccaagatctgagctcaaaactccttttgttgtttggattcttcaagttcttacacactatggttgaggactaacttgctatgtgtgggcatacactcaatcactatagatcgaatttgatagtcaagaaagctataggaatttgaaattagaagaagaaaggaagaagaaaaagtctcattaacctagttgtcaaagagaaagaaaactaggtttaaagctttttaagcattagttggataatgagactatagctttctttttatactaatt

SEQ ID NO: 253491 - DNA, 1474 bp, Cannabis indica
cctactaagtggaaaatggaggactgtggtgttattttggacaagatcaaaaaacatttgcataactgggctgcaaaacacctctcttatgctggtagaatgcaattgattcaaacggttcttctggggctcaggaactactagatgaacatattcattctccctcaaagcatagttaaggaagtggaaaagctttgcagatttttcttatggggacacaatggcaaaagaagcaagattcatattgcttcttgggacaaggtttgtctcccaaaaagctttggtgggttaggattcaggaatggtgctttatggaatcgtgcaagcttagccaaattcgtttgggcagtcattgaaaaacatgatgttttatgggttaagtgggttaatacagtgtacttgaaaggagtggatatctaggattacaatcttcctacagataccagttggtactggaggaaactctgcaatctcagatcagtttttagcccagagaagcttcaggcagcaagcagttcaggtaaaatcaaggctgcccggttgtataatagtttgattaatgctgatgattgcttgaacactagtgctgtttggtgtaagctttccttgcccaagcacagatttcttctctggcaggttgttaactgtcagttgctcactggagatcagcttccaagatttaacatcttcatagctgactctagctgtccagtgtgcgggttgcagatagagagccacaagcatctgttttttgactgctgttattccaggaaaatcattgctgcaatatttaggtggcttgggtttaagggttggtccagcaagtttgaaaattggcgaaattggttgaagataaaaacaggtagagtgaaggaggacattctttatgcaactgtggcagctactgtgtatagcttatggaacaacaggaatcagtgtgtgtataaggactattgtttgtcggtagcagccgtagttaatgaaattcaatatactgttaagcataggttgtatagtctcaaagataggaaattgaaaggttgtaattatagtttactttacaaaatgctgaactgaagtttctgcttgttggagcagttacttgctggtgtaatttgtttgttcttgtgattaatgaattcttttctttgataaaaaaaaaaaaagtaattgacataacctgaactggagagcaatgaacatgaacttatagttttatgttttatgtgatacttctataaaacaaacattgtttaatgtattaacattgatgaaacggcaacccaacttgcatactaaaatctagttcccagctgtacaaacaaaccattaattgtattatcttcatgttaagataatgtgcttaaattggatgttacagagtcattcaaagatagttgttagcaataaacatttaagtccaaagcaacatcagagtccttgcaatggacatggtgtctccttcattaaattt

SEQ ID NO: 253492 - DNA, 847 bp, Cannabis indica
aatacagcctatagcgatgttgacaactactttttcttttagcatgaggaaattttggaagaataggaagggtatgagagtacaaatcaaatatttgctagaaaaaagtaatggtcggttctagtgcaaattaacatattttgcccaagctttagatatggcgcattattgtgagctcgctcctttgctctagaaaaaagctatggaatagtaaattcttagagaaacataaaattttgtggtggtgtattctgtccaaagcaatctcagatcgttcagagatctgtaaaagattttctattgagaatgttagttgccccttttgtgggagtgaggatgaatctcttgaacatctgttttgtcctatagtgtggcttttcaattgtggaggttttctccttggagtattttccctatctgtggtaccagttttaaatgtgggactggataaaattcatttagggccttaaactcaaagacatcaatactgaggaggtctttttttatgcttcgttaatagttgacaccatctggcgaatccgcaacgataaggtacacaataattttcgagttgatgtgaaaaagtgtattgagtctattcgtttatcttttgcagattaccatgtttttttgttcccttgaacatctccgagtttggcagatgtctggcgtcctccccctcaggaatagctgaagttgaattgtgatgttaaagtggggttggacagcatgtgtgttgcagtcgtgtaagggatcatcttggcagggtgatttaggttcaaacatctagattggagtttctgatgcgttatgtggggagcggcagcttgctgcaaggctctagata

SEQ ID NO: 253493 - DNA, 717 bp, Cannabis indica
cctattgctcatgcaatttgggatcctcattttggccaaccagctgtggaagcttttactcgagagggtgctcttagcccagtgaatattgcctattcaggtgtttatcagtggtggtatacaatcagtttacgtactaatgaagatctatataatggagctcttttttattatttctttcggccatatctttagtagcgagttggttacaactacaaccgaaatggaaaccgagcgtttcgtggtttaaaaatgctaaatctcgtcttaatcatcatttgtcaggactattcggagtaagctccttggcttggataagacatttagttcatgtcgctattcctggatccagggggaatatgttcgatggaataattttttagacgtattgctgtatccccaaggattaggcccactttttacaggtcaatggaatctttatgctcaaaaccctaattcaagtagtcatttatttggcacctcccaaggagcaggaacttctattccaactcttcttgggaacctgtttggaaagaaaagaaacctgtttcaaggaactaccctccatgaacaaatactgtgatatcaaatactgtggattttgatgtaccatcatttatttactgtcatttatttacttagaggttttgatgtactatctcaggatcaactgtggatttttcttagcatcttatggatgatttggaacaatagaaa

SEQ ID NO: 253494 - DNA, 828 bp, Cannabis indica
aaaatgacattcttacccttgtttcatgcatatacttcatttaggcctaggggcaattttgtcattttgaccatttgactcacttttgcaacaaaatgaattttagagaaattgaaatgcatttatggttttgatcagccctaactgaccctcctttcccctctctctttctcaaaattttcttcacttgaatatttgctttcaattggatttttggggtgtgcttggagcttaggattttggtgcttgtgtggggaagatcttgaggtagtttccatcttttgttactaaatttttgttgttgtaattttgaaatgaaaatatgtgtgggatcatgaaatgtgttcttgagttgcatgtttgtgaaattgaaggtgatttgggtgtttgttgtgagttttgagctattagaattgtgtatattgcatctaggttaattttggatgattttagggttgaatcatgttgctaatttctgggatgttcgctttgaagctttggatttttaagcttgtgcaattgtgtgcatctatggtgtttgtgataaatgcttgattttgttgttgtttttgattttgagctttgtgtgatgctcaaatgaataccaatgttagattggtttggttttagttgaaagattggattttgtatggttttgtttgagttttgggtatgttttggttgaggttcaaaaatatgaaaaagttggcatttttagaccttaaaattttgttatctgggtttttcgaacaatgtggccacggtcgaattttcggtcgccgcagccaaaacctagcagagagccatcccattttctcgattttgttt

SEQ ID NO: 253495 - DNA, 716 bp, Cannabis indica
agataattcttgatctagagaatttggatcaagataatttattcatgtcatatgcagtagcattgaagctttgtaattgagtaccagtaggaattcttcctaaaaatctattatttgatagatccaagtgttagaaaaagagcagtcgtccacacctgattattctcctccttaatgtgctatcatagactatttcccatttcatgggattctattatcctaaggagccaatcatattgatagagaatattttattgttacagaattattctccttttttgtactataaatacacctgtgtaatgattgatataattacagatgaatcaatacaatcaatatcacaatattatctctgtttttcctttgttgttggtgtctcctgagattactgaagttgttggtgtgaaggaggctttgagttggatgaagatgagaaatgtgtctgatgtggaagttgaaactgattctttagtagttgttcaggctattaatggctcggttcaaatgccatctcagtttggattacttgttcaagattgtcaagtgctcctttcagcattacataatgtttttatttcttttgttaagtgatctgcaaataagaccgctcactgcattgcaaggtggtcttgttttacgtcagattgtatgatcttgatgagctttctgctccatctgatttgctttcattaattgtaagggatgatagtttt

SEQ ID NO: 253496 - DNA, 792 bp, Cannabis indica
atttagttgtagaacaagtgagacctggcaatagaaatggatcgcatttaagaaaattaggttggaaaatttaattaaaagacgggtagaaattatgatcgaaaacaaatgaaaaatcattgagataatgttaaaaaaggagtggcagttgagggattcatcacttagaggagagactggacttggttgggacacacaaaggcaaacagttgatgctcctaatgaatagtgggaggaaaagttacaagtaggtttttgtacatacctcttataattatgatttctttatatatatatataacaatcatattattttgttttctgattaataaataaatcaacagaagtatcccgatgctgctaaatttcgagtaagaggtttagaacattctttcaagctagatgagtaatttagagatgttaccgctacaggggctagagcttgggcaccaacttctgtttcacttcctcctttatacgcagaggatcataatgatatagagatcaatgagaatatagaggaaagtgaccatgagagagtgtgtcaatgttacgaaaattgtgaaacaatacgcaagtgcacgcaatcaagtagtaaactcacgcaagtgaggtcgaaccacagggaattggattaattactattaaattatacttataattctatttggcaaatcaatactttttacgatttaaaaagaataaaagtaattcaggaaacttaaataacacaagtgaatattaatcaagatgagactatagggaggagaatcctgttgtttgtttacccaa

SEQ ID NO: 253497 - DNA, 663 bp, Cannabis indica
gatctacttatggtataattagggtcaactttggataataatgagtttatcttatttaggctcaaaatgtgtagaaataaagaaatccggccattaaagctcaaaaaagttaactaatattaaaattttaaggatggcttgaaaggcataatcgatccaaagaatgcctaaatcgttttcttagtcatgcatcatttattatttcgcctcagatagcaagcaagttctagaatttttcacatatcaaaattagcatacataaagcaattcatttgctagaaattcacctattaggattctatgttcttttaaagcacaaaattgaaattagtcaagactgtgatctaaccaagcacacagatttttttgaaaataaataaaattttcaaaccatactatctacttactttcatattgactcacacttagaaaattgactcataacacacaataaacataaaaacacaaaaataactaaaatgaaaactaaaattttttaagttcaacccctaaatttaactgaccctaaagactaaaaaaaagaacttatttggggtacctcccaagagcactgtcgttaacgtaatataacctgatgctggttctctcttacaaaattcaattgggataaagtccacctcttgcatctagaagggtctaaat

SEQ ID NO: 253498 - DNA, 792 bp, Cannabis indica
tcactaaaagtagctgttttttgtagtgtagctaacctttggcggcatctctagatgcactactgggtcagctcgataatttctttgagtactccaactcatggagacatatgagtcctcgtggtcctcatatgactgcctactagtcctattcactagtagtagctcacttagcacttaagtgctaggggtggtggagagctgacaccaggttttgctcccttaataggacattctaaacttttaaccttctaccaagaacatatataatttttgctctgtagacatttgattataaacatataccaattctcaaagttcttcaaattttgattgcaacattgtatccctagacgttataaatggcgaataccaaattttatctcgaacaacattgaagatatttatgaaaatatcactgtcatacattctaggcatcagcatgccaccacacaccaacatgtgccattacttgaccacctcacggacaccactacttaacttgtattgtgccatcttggatgctgacaaattacacatagcactactttgagtagggttgttcatataaaccggaaaaccgcagtttaaatccggaccacgacaatccaaaccactgtaaaccgtcaccggagaaaccatttttggtggtttggtcaatccagaccgtttacggcgtaatggttcggttgtggtttgtaataaataaataattgttaaaccggaccggaccgtttataataaataatgaatttatatatatatttttttatatatgattatatgtctaat

SEQ ID NO: 253499 - DNA, 1339 bp, Cannabis indica
taggattttaccctataaagctaccctgttcatgcttgggtttggtgaccctggccagttcttgactaagacatggaccctggtcgaccctttcaaaacttgagaactttagccagcatgagccttggttccaattgggtaaccaattttctgtcctcttttgactttgataagaatccagctctgtaggcatatacaacattagtctcatatgtaattcccttagaaactctgtatgaaacttaatggtgagtctattatagtcgaatgttcaagttaagactcaacatggcttggaacatataaggaaccatgccttagccgtagcctggtacgtggcccctataggagctctgtcctgttcttttctggttatacggttcttgcagggccttgacctcatgcatgtgaaccgatttcatatccagcctcaaggctttcatgctcttgctttggcctataggccctctattttcaaacactactattatttagccttaaagccttctatgataaacatatgattgtcctagctatcttcttatggccttaacatgtaagtgtctagatttacttgtcaagctaaagtatgcctccacgacttagaggcaggtttagtagcttattctaagcgttaaaatttctctacataagttctttgtgctagttcgatgcattgcgaggtatgggtgctcctcaagtttggtcacttgctattcatcaagtttcacagaccttgcctgggacttttcttggggtgcaacctattgtatgcatgtggaactaaaagaataactttaagaagttaatctttatcaggaagtagtttagacaaagttggtcttacgtgtaacaaaagcatatagcttagtgtctacttttgaaatcatgtattgtgcaatgaccatcactgaagagtgatggaaggccattctaaaaagtaatgggtactagctcttttatgggttcctgcacgacgaaacgttagaaggactaattgacaagttggctagtgagactatttacagagatgttccctatttcagtgtttgggtagaagttctaactcaaagttcctgttgtacttgctaaacttgtgtgcacctttattgttatcttgtaacatggtgcgaccttctcaatttggtctgaacatgcttcttgtaggatatttgctgccaaggagtattcttcagggagtaattctcttacaaagaatttctttccttgatctgtttgttcaagggcctggtaactctttgtgggcagccatgctactttgagttggcttggtctcttcttctttcccttttgttaagggatcctgctagcaagatgt

SEQ ID NO: 253500 - DNA, 567 bp, Cannabis indica
gtcacaacataagaatgatatttgtaattagtcacaactattttatttttaaccacaatttttgttgtgactaaaaataaatttttttgtagtaaatacaaatatataggtatttttttttctaaaagaaatatacatatatatatatgcaactatatatagatgaacttatacttatatgaaaaatttatgaataggaacgttttttgttttggtatatgaaattataattaaattttgtgtattatatctataactaagaaactaaccgcgtttcgtgtacggttgtattctatttaatgataattaaattataaaactatatcaaattttaaattttaatatttttgtataattttttttttaatagtgagtacctatttcaaattttattttttaactcttaataacacaagaaaaataaattaatattttagagttgatttttctaattattttaaacttaataaattataattattaattaatttattgtagacagacatatatttctataaagttcgtttttaaaatatatatcttcggcataaattaaattgaaatcaa

SEQ ID NO: 253501 - DNA, 838 bp, Cannabis indica
tgtgattataatgaattagatgattattataatagaattttaacaattcgcaacactttaaaattaaaaatttaccaaacattcagctctcaattttttttcttttacgagttttgctacatctattttttctcgtagtacaactacaaactacagttggttttttttttttttacaacacaactgtaccaaactggcccttaaaattgtatttatagataatgtatattattttaatttttcgtaccgtattgtgttactttttagtattatactatttcatgtttaaatttgtattttttcatgccgcatcaaaaaatccagcccgtattttaagtactaaggctaaacaaacacaaaatttgtacacactgtataatatgtacttaaaattatatttaagttttactataaataatattatgtcatttttaattatgtgtatgatttaagtgtgtcacaatcattactcttcaaaataattgcaaaaaaattgtttgtgtgcctactttaaattatatatgaaagttgagtatttcactatggataatacaatatcatttttaattatgtgcttcaaaattttcataatcgttattcttcaaaataattgcaaaatgacgtatttaagcactctaattagtttacgatcaccattagaatttgagcatatcacaaactcacaattaataaaaatatgtcatttatgacaaaatcttagtaggatgatcatatgttgttggtgttactattaagtctttaatgaatagttgtaggatatttatgtaaatatagttaaaacccatagactatttccaacttttctcttttttttttt

SEQ ID NO: 253502 - DNA, 682 bp, Cannabis indica
atgattttgaggaaaaggaatgcaattgaatgaaaatcgcaggaaaaatgtgagagacaaagagggcatgcaaattcaaatgagaggtttgtggagatttttttgaagtttgaaggtttgtggattgaaaatggcgaatataatacacaatttcaaatttatacctaaaatgtggtaactatttgatcaaatgaaatctgatcaaacggatgggaactgtacaaaaaaagaatagtcagagcattaaatgaagaactgatgtgcttcaaagttttgaactatcaaattctaagcatgtaaattttaaatgggaaaaatacaatagtacccttaaagacatttaaaaattgaggtctatgtacaaaaactgaagttgctatgattgaaactcttaactttcaagttatcattctaagcaaattacctctcactcctctcacctcaaggccagtcccaatcgaacatactacactacaaaaaatattatctttagtgataatattttaatatctttagtgataatattttaatgacaatatatattttttgtaattaaatattattacttatcactaaaatataatattttaatacaagttgttattaatttaattttaattacaataagtgttgtgactaaaaatatatttaataataatcaattataatttttgtgactaat

SEQ ID NO: 253503 - DNA, 588 bp, Cannabis indica
atgtccactccgagtccaatcttcaggataactagctctttcctggaaaggagttacagctggctagttatccctcctgcattgatagttccgaatagtcgactttagtagacttatatcctatcaagaagtgtcttgaactagggtccgtgatcctcgagctcggaagctcattcatgttcccggaggccctggtgctcatgctgacgtggagacttcgctaaatgaggagttggttaagttagttattttctaactaacttaacaacctcatttttttgcagccactaactttaggatcttgatcctaaggctatatataccaccttggtttgtcttttcagaaagatatagaacacgagaaattagactctgtccagacgagattgagagtttgaaagagagagaaaaaaagattgggaggtagagagagaggtaccgagtaaagagagagatagggtttaggttttgtaagaagattctactgtagatgaagaagattcttaggtgtaaagtgtgagagttgaaacactttgtaaggactcaacaaagaatctcgtctcgtctgttttgtatctattcttgctc

SEQ ID NO: 253504 - DNA, 1717 bp, Cannabis indica
ggcaatgcaatagaggattatcacactaaagcctcaacttgtctgattaggcaatgtgatataatgaagattgttactttataaagtaatatatatatatatatataatttatattattaaatgaatatgatttcaattattggtataatggttttgtattaccagatacctgtatactgatgcttattcgtgatacatgccagtagtgatttggatttcatcgtatgaacaattcgtgatggtttgattttgattgtatataaatgagaatattcgaataataaaatatgtgattatcattattacttttcttgctgagtccttgtgacccatgggtgctatgtggtacaggtaaagtcaaagaaaaactaaatcaaccatgaggtgagagtcttctctagcaatgtacatattgaccttaccgccctacgtgttgagttgtcatgagtttttttgggctgtatctactttgtattttggttttatgtttttgaggcatcatcgtatatagttgttttgtaaaactttttataacaggggtccctggtacacgtttttatgccattataatgtccattttttaatgttttattttaattaagttttaatattatcacgatttttaataattaattaatctattagtgttaaactagtttataaaattatactcgtgacgtccatacagattagggcgttataccatttttaattactataatcaatatcattttattaagaataaatatcatcttaatacattaaataattaatgaggccattaatgaatgattattgaataatcatatttccactcaaaagtttgaaattagaaagtgttaacttttccattaatttcaaactcatcaagctttgatgttccatatgttagaacaattactaatttaaattagttggacattcaaaccttcatggtatatcttatatttttataaatctcattcattgaaaacggtttagttccactggaaaatataatttaatttaaaaacaatatttgttgttataaagaacaatctagttttcttaagatcattttctatttaaatgagaagtgcactcccactaaaaatactttattacttttgaatgtaattaattgttatgactattaaaatttaattttgactttttaaaattacactccttttagttgtcatattaattaagatttatttgtatgaacactttctatcatcattctcaatcttgatgtaattcaaccacattcattaaaactcatttaatatatttaaattatatctcatatttatttaaatggttagttataatctattttattaaagagattcaattattgtgtgttcaaatgtgaggtaattcaattagattattctaattgaatatgtatatttctactaatagtttcttacttaaatatttattatacatgattggaatagatttctatatccatttatatgtttgatagtaattcaaacctctcaattaaatctcatttaatctcaatgtttaacaatttagaatcaaaataatattttaattcttgacaaacttaaatgtagaaatatcgataagttactatagcaaatagttacttaattattagctactcaaaataaataattgaagttatttaaactttattttagaaatattatatgagcgttgaagtctttagttaacttttcacacataagtttgtaaataaat

SEQ ID NO: 253505 - DNA, 531 bp, Cannabis indica
ccatccaggccatgttcaaattacccatggtccctgataaatttgcccaataatcatcacaaagttccttcctcagaggagcataaacaaaacagcacacccaaggtttaaagtttctatctttcccgaagcggacaatgatcttatcgatatccagagttagaacctgaatgtcccatctgattttctagaacagggcaacaccttcagctgtggcaacagatgaaacagccacgcccacattgaatcccaaactttgccaaattctttccatatccaaattgctcttcttagtctccatgagaaaaacaacataattgaacattgtaatgctcattatatgttgatgtgattgaacattgcattgcattaaaaatgagaattccaatattattgaataataaaaatatactctattttttcaaaaaataatataataaatatacattatatataggtgcaccaatcgtcaacagatgcagcgtcgtcgctattagtgacggcactaaacgaagggcgtgacgtgatcat

SEQ ID NO: 253506 - DNA, 1025 bp, Cannabis indica
attattacaatattaataacacaaatttggtttatttgttaaacgatcaacaaatatagtaacttataattgtgctagagcttcaataattttcctggttgtattttcgataaagagtctttttcattcgacttgctaccatctttagtagcggatttcgatgattaataaagatgtatcttccattcaaaaaaaaaaaaaaaaaaataaaataaataacaccaagaagaagcagcgatatacatcacactattggtatctttcctggaaatgtaattagggctgaacatttagacccgcaaactcaaaaaatccgaacacccgccccgacctgctgccaaaaaaactgaacaattaaaaacccgtgtggtcgggttgggtccaacccgaaaataccccacacgggtttcgggttcgggttttaaaaatgtataattttttagtcgggttttaattcgtaatccgaacaacaataaataaaaaattaaaaatatttttttattacaaaaaaataataattttaattgttaaaatttataacttaaaattgaaaaacaatactattcacttttactgtattgtacactataactattcactattcattccaccaaaaaagcttagaagaattcaagaaactcccagcaaaggcggctgcttcttctccggcggggtctcatcccagtggtggactcaatccggtgagcctcatccctaacatctaaacctcctttgccctcttccgtttttccaaaatctgatagctcgtgttcgcctgtcgcccccgctggtgtttgcccgtatccgcctgctcattgctcgctaactgtcgagatatgcttctccgttcttgactccttagttattaatgttatatgatttttataatttatattttaacatacattattgattatatatttaattaatatttatataataattatagtattatactataaatctagctattgtctactgaaattattatgggaaattatagtaaatggccccaaatcatagga

SEQ ID NO: 253507 - DNA, 991 bp, Cannabis indica
aaaatcacgtaatacgcctatgatagttagggtgttatagcatgccccatccttgaatagcatagagggcgttgagggcagataagtacttaatgccattgcgagtgagctgggtcagacaaaggcaaaaatagtctgccaccctcttgaagtatgggtggaaaggcaccatcaccccttttttagtgtgagcacccgaccaagcacaaaaccctttctgtgggtttgttgcctggtgattcgaagaagggacgtaacactccagtccgcccaagtacccagccttatccaaggccctcatgcgcgcctcacttattttggatggagggctcacccatctggcaccaaaggcactttgcctcttgtgaggaactgcttcagtaagctcctcggtgacatagtcctccccttcgactaagactttagcctccgcagacaccggctccccggcctcattatacctccaaaatttggaggttcagccactccttcctcctcgacctcggaagggctaccagggcggacgtcgtcctgctcctctatcccctagacctcaatgtccccctcatggtcttccacttccatggcgggcagatcctgctcgacacttggcaatgtggcgagctgggtcaaatgaggatcagatgcgttgacttttcgcatcgtcttctttgtgcgggccatcatcctcctcccggacgggtactgatgtgtgtgtcgtgcaacaatgacggcagggacagcaattggaatgccaaagttaccagcacttggacggccaacaggaagggtattagcaacacttggccaaacaatgtatgtccaattggatggaagataacgcctccaacctttcttcaattcccaaatgaagtggttgtacccctctcctgcgatctgctcggagtaataatggtgttgcactatgggttccggagtaagagaacgatcactactcacctccctatcttcaaagctcgagttagaaagt

SEQ ID NO: 253508 - DNA, 538 bp, Cannabis indica
agttaactctaaaaatgaagaacattatttggagtcttttccaccactggattcctgtcaaaaccgagctaacgaagagaggtatggccttaaatctttactgtgatcagtgtaatgtttatgttgaagacatttgtcatgctctctggtattgtcctaagactcaagatctttggaagcacttcggttttctccatcttttcctgcctaacattggtaaagcccctgatttcctatttatcatgaaggatcggtgttctaaggagacgtttatcctttttcttggtgttacttggttaatatggcaccgtagaaataaatgcatctttcaacagaaaaactttgataacaaagtttggatagaatgggcctcgaacttgattgatttccagcttcaaaccgattctactcctcctcttcctcctctgaaaaagtctccggttagctggtctcctcctccctcgggcaccttcatgatcaacgcagatgtttctctaattgtgggacaaccaggttgtggtttaggggtggttattcg

SEQ ID NO: 253509 - DNA, 501 bp, Cannabis indica
atgaagaactagaggtgagaaactaagggaagcaaggatcgagcttcagggtgtttctaagggttgaagcttctgattaaggctcaaacaagggaagcgtttcatcatacttgatcactaaatactgtactcttaaacagattgtaatcttgccaattgtcataatgaaagactaatcctaagggagttcaaaggggattaggctcttcataattgtgaaggaagttcgaacctctgtaatcttgattgtgttctttaattctgtcatttacatttctgcatttttgaattattgatttctggtttgattattatgttttatgcttgctgaggttgttgaaacacaacagtatgctattcgaacgttttccaatttccaccacacttgatctcaagatctctctgttctcagtgtctgtcatcctgtcaactccattttccatattagccttatacgatatgaacgattcaagtggacaaacacttgttttgactttattt

SEQ ID NO: 253510 - DNA, 800 bp, Cannabis indica
gcatattgatttcgttttttatttggccaatattcctcttttgatgttgatatttcatatatacaagtagtaattatgtatgaattattattgtagggtgtttgaaaataattgtgtaattattaaagtagtacacagtatgttaataacaatttaattacatcaattttcaattatttaggctttttaattatttccatgtaattatgtagtcaaataaatatacaaaattgtgtagttacattcaattgcactcaatttcaacctgcccttagtaattggcagtaattacataaaaaattaacattgattatccaaaaatagtagtactgctctaaattacactattttaattacttttcaactttccaaacacaccctaaaagtatacttagcaatacaatgagcgagaaagtttacatttctatgctcgaaacaaaaaacaactgtacgacaaagagcatcaatgtttacaagaatattgtttttttaatgataaattatttaatatttcattaaaatacaaaaaaaaaaaaataaaattattgttttttaatcacctacaatcatctatttccatttttatttacatacaatttaatcaatatacatttaggtcattatatatgtactcaactcatacaaaaaaatgaaacaattaatcattacaatatatatctagatttacacaagtatatatatactaggtgaatgtacgtgccgagccacgtattgttaatttcatttaagattttagtctttttaagattttaaatatatttatttttaaagattacaaa

SEQ ID NO: 253511 - DNA, 727 bp, Cannabis indica
aaaacataattaattctaaaaaaaaaaatctgttttatattctcactcaaattgcaattaaaactaaaaactgaaatcaacgtcgtgggcttcgatctagaaaattgcaagtcgtggcctgaatttcgtttcgacaaatcagcccctgtggcccgtagcgcgactgtgtaaaaacacgtcccatactcggatagtaatttggtcataagatgtttcgaaaagctgagaataagatctagaactttcatgttcctctcaaaatccaattctgtctttaaaagtgtcgtaagctacaaataaattctgccttgtaaaatcgatctcttcaaaattatcatttttcaccaaagtgtgctaaaaccgttccaaaatatttgaaacacgtaattagccttctaaagtgctaatgaaataaaatcacactaatcaacggtttaaataattaattcaaaaataacattaaggaaaaattacacaattaaatagacaaatatgcactttatcacactgacttttctgacttttcaaatacttaatttagacttttttttttgtttgtttcaaggtggtatgatactatacgcatacacattattgcactaactaagactttgctaaaactattgataatatgcgttagtcttcttattctaccgtttgaaaaaacaaaaatgacacaaaacattatcaaaacgcgctttgagccaaaagcaatcagctcatagaa

SEQ ID NO: 253512 - DNA, 697 bp, Cannabis indica
tcctctcttctctttttcttcgtttttttttttactctttcttgctctgtacaaaaacaaaggatctatggcagaatttttcttttcttttcgtgttctctttttctgaaaatggaggctgccttctttttgagaacctcttaggttttgtaccatttgcccagcataaaccctacacatggcatgaatctagcctctccaagtattttctctagccaccactcctagaacgccatgtcatctccacaaatgccaccacatttaatgaagtgccagctcatccttgtccaagtaattttacacaaactgctactaacctgtttgctgcagcaaaaacttcatagaatttcaacaaagttaacaacttgactaattactattttctttgccaatttatacacaaaagttattgatttctaactaacaacctcaaattgcacacataaacataaaacattgaaactttcacaaattaaaagacaaattaactaaaatgacacacaattgcataaaaacatgtttaaagtgatatcaaataactctttactcaagagttatcagggtggtgcagagctgacactatggtacccccttaaagagcattatgagcttttagccttctaccaagaacatacatgattttggctctgtggacatatggttgaaccatataacaaatcacatagattcgccaatc

SEQ ID NO: 253513 - DNA, 1288 bp, Cannabis indica
ctcaaaccctctcgttattttttctttgatttggtgagaaattggttggatttgaagcataatcttggtggatctttgagcttacctttggattgaagttgaggttgctttctatgattttaatcttggttttaattactgaatattgttgaaaatcatgagtttgttgaagatgatgatagtttgcatggtagtgatgttgttttgttaatttgagtgagtgttgcttggatttttggtgtgtttgttgtttgatctctagagggaattctagggtttttctcttgccttgaattcaagttatttgttaatgatatgttgctgatggaaatttattgggatgcatggtttttaagctgtagttcaagagcttgaacatttctaagtcaaagcatgatgttgggttatttgtgcaatttgaattttgagagttgttgttgatgttgttagctctctattgtgatgatttttttttatctgtaagaagtttattttgggtatggtttgattaaggttcgaatatatggaaaagtgagcatttgtagaccttaaaatttggttttctgggtttttcgaacccagtggccgcggccagatttatggtcgcccagccatagacctagtagagagccatcctttttcctgatttttgttttggccataacttttgactcgagactccgttttggacattctttatatcgttggaaagctcgttccgagcgctatatgattatctatattttgaatgccaattttatgttatgtgaaagtggaattagggattaaccctatttttgaaatcccggattgtgtgactaggattactggcacgtgatcaggagcacataggggtttgtgaatctttgttattgcgagacaacaggtaagactgtagttttcacgtagagtatgcgcggtggtgcttatgttgaatatgatatatgtgagtaattataaccgagattagggttgttacccgaatatgagcggttaatagcctagggttattaccctagtgatataagttgagtaaatgctatgccatgctatgtatatgattatattgagatttaagggttatgcgttcaaggcataatcgggttggactcggtaaccataaccgagatgaaccattctaaggccttatcgtatttagaggtgtgagagcaacacgtaggtctacgccacgtagacataaatagacgtgtgaaagtaacacgtaggtttacgtcaagtaaacataaataggcatgtgagcccaacatgcaggtctgtgacacacaga

SEQ ID NO: 253514 - DNA, 834 bp, Cannabis indica
tcaaagttacatttggaggagatactactggtcaacttcttcatcttttcatacttgctgccaagccccttctggtataactgcttgatgacctttaggcatgcattatcaacttttgtcaacaacaaaggcttgacaaaaagtgtgaagggtgtcagaggtaatagatgtagtgtagtgttttcctttcccatgataactgagtagaggtggcgggaataaccttaggcgctgagggtggtggaggaggatctcaattattccttgatgttttggtgcctcacctatgcgggcttccaccatcgaatgcatcagaccccttctgggagtgagttttataggactgccttcttgaggctgctaattgtaagacctattctttggtctccacccttgccctcttgttggcgacaccataagatgaacaagccagctttttattaatcacgattggcccatcataatcagagttatccccctattgttctttataagaacctatcttaactattccacgaccaggacaggttcagttaggttgatgatggaagtagacatggcttccatgctcggagccttagaagcaactttcgaatttgaagccgaaggtgctggctgttgagattcgctcccagaagcctggttcttctttccttcatctccaccaccctggcgatttcttgaaccttgtcaagttgggatttgatgttgcacgcgaacctatttagttgccccatttatagagtggttggttgatctacttaaaacaaaaaaattgtccatcaaacaaggccataacaaaatatgtgatctttactaagatatctatcatgc

SEQ ID NO: 253515 - DNA, 3319 bp, Cannabis indica
tctttctttcttaaagtttccctgtcttttttctttttttaacggcagacagaaagagcaagatcttttataaataacaataataataatgcctgcaccgtttggtggcggtgaaactgtcaatggagactcatcggacggtgtagatcgttccaaagatatccctcgagattttcgtggcttcccatctttaatgtcttcttgctctcccattactctcaaggtacgtgacacacagtaccatataattaatctccttttttaattaaatgctttctattattattattattattatttcgttccttccttttcatcattatcatcatcaggtgcttttattgctttatacgaagttaataataagtcagtagtatttgctgatgaataatcaaatgtttctgtatttcatcattattatagttcatagacgtgacttaccgtgtgaaaatcgacaacaaacaaaccagcagtatcggtcgacgaatgttcggcaacgaaccacgaccgtccgatcatgaaagatcaacaacgtcggcaacgaacgaacgaacgatcctgcatggagtcacaggaatggcattctcgggagaaatcatggccatacttggcccttccgggagcggaaaatcaacgcttctaaatgcaattgcagggaggctccaaggacacggctgcagcggaacagttctggccaacggtagaaaattcagtaaacccgtactaaaaagaaccggtttcgtatcacaagacgatgttctgtatccacacctaacggtccgggaaacattaatcttctgttccctctttcgtctaccgagaacactttcgcgaaaggacaaagtctcggtggccgagtcggttatatctgagttaggcttagagaaatgtcagaacacgatcatagggaacagcttcgttcgtggagtttcgggtggtgagaggaagagggtgagcatagcacacgagctactcataaacccgagcttgttggtactagacgagccgacttcgggtctggactcgaccgcggcgcacaggctgttgagcacgttgggtgcactggctcagaaggggaagactgtggtgacgtcgatacaccagccctcgagccgggtttaccagatgtttgactcggtgttggtgttgtctgaaggaaggtgcttgtactatgggaaagggaatgaggccatgaactacttcgactccctaggcttttcgccgtccttccccatgaaccctgcggatttcctgcttgatctcgctaacggtatgttaaccttttcctctatccctaatatatacactctactactatagtcgattattattttatttttttttggggtttattgatcatcataaaatgaattcgatcgatcgcatgatgccacgtcaataatcaagttatattatttgtgtgtttctttaattatatatttagtaaattaattttcatacatggatggttataatatttgttgttttctcaaaaataatacgaagaatatataaattaaatttagtatatagagagatatagatagagattagatatgtagccaggtggtccagatcagaatgcagcatatttgattgtccattatcattatcactattattattattattctattattatatatatatatatatactgcgttaggacatgattataattcattcccactaacaattagtattacttctccatatttggtgtctgccattaacaattgtgtgtattgctcatagttattatatatagtacttattctcatgtttttgcctactagcttttatgggctgtgtgtgtttattgtctcttttaattgattctgaatcgatgcaacatggaaccaatatatatgtattattatttaacaatgtcttcacttcagtaacgatttaaagtatatattaaaaagattttaaagacataagttcttaaaattaaatagcgtagtaataatccagaatatcttgtaacgctcatttgacttaagaaaattaaaaataatattattcctatagaggctataatgatgaagtgtgtacgtagctgtattaattttgactgtgaataattaaggatggtgcgcgagctttgatgatgactgatgactgacatataccattgcccaataagccatttttcaatgacaaaatgtgtcaaaatttttactatactctcgctcggcctgtgtagcaattgactcttataatattatatattattgttttcttaattgtctgaagttttggtcattatgttcttgccttctccgtataaaaattggtatatctcattcagtgaaaagaaaaaatagaagcctacatactctagtctagtgacttccacttgtcttctactctcaattattgttatttttccttgatttcatactaatttcatttttccttgatttcatactaatttccatctcaggcaaaaacaagattagataacattaatatatatctcttcggcctcagccctgtcaggaaaaactttatcaaaagccctatctttcctttcctctttttgtttttactttttcttttgtcattttttctataaatcacaaatcagagcacatgacacgtttccttcgtttctggaaactagggatccaaacttgaatatgtatttcgaaataacacacagatgtccttatattgacataaagacactcacacctagctatataaatagtgcgcaagaaaaacacagagagtagcgagaaaagatccactttattggaaagcaaaactagcaagctattagttgttgttgttgttgttgttatctttttgttgttggaaatccacatggcgatggattgatatttagtgccatgaagaaacattttccaatgcataacgtataattactcaggtcaaacaaacaaaatctcttttcctctgtgtacgaagatttagaaaatcaaaacgtcatggcattgagtatggagtccatatatatcatttatatatatatatatattatatggtacccacatgatgatatatatatatatgtccctttttcttaaggggattaatcagcgatatcttggatgtacatagatgatgaactttatggaccaatatcctatcctgatttttttgagggatgatgtcctcattgtgatcattcaatatacatgcataaatatagagactgatgatcagttgacccactttatcattgaggtatagtattgttgctttttagaaacaagatatccttatatctgggtaaactagctactatgtgtcctattgttaccaattaggcattatatatatatatttt

SEQ ID NO: 253516 - DNA, 644 bp, Cannabis indica
ctcaaacatctaagagcactttggtgaaagatatgctctataaacactttgagagctgtaactagaattcactttgtcttccttaatgatctgcccgatattatctcacattcaatacaattaaaagatgagtaggtcattatccatatacaagggggccgaacctctatatatcttggtgttctttatatatatttattattccaaactatttattgttgattaacttgtgattatttaactatgagtcaattgtctattttttcagtcgacaaaggtcatagtagtaaatgtgctctcttgtaagatcatctccaatggagatacaaataagcaatgtaaatctaaaatatagctcacttaaaaaaatatacttcaataatgtgccaaaaggtgatgtaaatttggcacatagcaaatgttgtgccaaatgatacaaaatttgcatcatcataaatattaatagtattattgacttttatgtcacttttattattttattaatgtatttagctataacattgatgatgaactatttatattctttttctattgttttacataataataaaataataatattaatgataaaattattattttttttcttttaataaacaaattaaattttgcatcaagttttg

SEQ ID NO: 253517 - DNA, 892 bp, Cannabis indica
gtatgattcttttgcttttctgcataattcttattggtgaactttggcttgatgtagtttccaatcaattttgttgtaccttgtcgcttgtctgcaaatcttatgttaagatcacaagggtgtatcaactttctatcatatttacagattatgaaagacttggttggtccaattcttgatgccattagtgcttacttgtattttagatccaagcaataaattttgtatatttttgcacaagactttttgaccttgtattgaaagttgtttctaattgcacagaaactaagcacactttgtagtatttctttgtccttgtaagtttgtgcttcttctatttcaggatgttgagtatctgtgattagtagttcgtcataatcagcgatttcaacctctctgtatgggttgttttttagttgctcaactattttctcatctaccagttttgcatagtccatgaagtcaaatattgttttcccttcttccaccgttgtgtcttgcattgtttgttgttgagttgttaattcttctcttggtggtgcgttgtctaccatttttgttattgcatatttttctgtaactaatgagttgctcattttcaagaatgttggattgtgggttgttgttgttgtgttgctgactacgttcacacacaatggatacgttgtgaagtcgagttcttttaattttagctgtacataggagtatatgctttgatcttcccttattctcaacgattagtatcattcttttacttggtattttagttacaggtcagtattttctttgttgcattctaacagttcttttagcttatgtatgagttcatcatatttacaatcaattggtatgaattttccactagcttcgtaatttgtataatttattccat

SEQ ID NO: 253518 - DNA, 628 bp, Cannabis indica
ggtgcggattaggacggagtttggatactcagccctgagggattgctcatgggcgccccaaaatgtgacaatgcgaaggctaaagcgagactttgattgtatcctggggtagcggagaattggataccgtttacttggggagtggcaggagatggagctcctggaagttgagctccaggcacatatcccgataccccgatcggatagtatcctttgtaagccactatttgggcttttcccaaattgatgtactttcagactctgttctgaaagtcttgaaggctagctattccctcttgctgccactcattccaaaaaggggttcccgtatggattccagcctgaagaagggccaactgttgtccgtcatccacctttttggtcttcgaggcctcctccttgaatctattatgaagttctttagggtttttacgggtaattgttttatgttagtcaaagcgctaacctcgaggttaatctttcttactgcgaatgacttgtaacttgttctagtagtccactgatcccggctccaacttcttgaaccattattcagcagacctgctgaacgttagcggaaagcacaaacattttacgtcgttgctgaccctcatgatgacattacctt

SEQ ID NO: 253519 - DNA, 693 bp, Cannabis indica
tagaggtgtaagaagatcctagtcccactaccctaagcggattggcagcaatgatggatcttgatctggttttgtcgacaatgttgttcttgacttgaatctgttagtgtttgactttgatgtgataaatttctgtgggatcttcacttgcgtatgtgtaaataaaatttaaaaactataaaaatattataaattccgtagagaccgtatttttgttttttttttttattatttttggggtttttgaaattatcccaagctatttgaggaaattacattgtatacctactttactttacatgttttaatttttacctttattttaatattttttaagatatacccacttttatagatgatgtccctgtaatatcccttaagttaatataaattatgtccagacttaaataaagggtgaaggtatattggacaattcactcacaaatgtgggtatattttaatgtaatataataggaaaacttacaaaaatactggaatttgagttaacttttacaaaaatactatcatatagaaatgttttcaaaaatactatatttttataaaataccagtagaacacagaacagaacaactcaaaacaacagtataacaactataaaatactagtagaacactagtaaaaacttaacacaatatattagcagtatgaaaattataaaaaaatacagtaaaa

SEQ ID NO: 253520 - DNA, 545 bp, Cannabis indica
tgtatcacatacaagtgttgttaaaagttaaaaaacccattaaaagtgttgttctgattaaatcgtcgtctttgtagcagctaagtttttgcagcaagaaagacaaccactggaggctgattaatgggcattcaagaagggttattggctagtattcaacagggtaaggtttagtgtggagattgactgtttgagggcgatttaactgattaaggaaagtgaaggtagttgtcgggacattgacgtattacccgatcagattcatttattgttgcaacatcctagtgtgttgggtttgttttttatttttagagaaaccaatattgtggctcacattttagccaatcaagttttgtaaatcaaagctagtgctatgtggattggagttgtacctccttatattcgtcaagcttttcggtttgatgagccattttctttgtaattgtcttagttgaatgaattcatttttggaaaaaaattgctttgaaataattttttgattgcataattttttatttttagtgagaaattttgttgtgactaaa

SEQ ID NO: 253521 - DNA, 673 bp, Cannabis indica
tagtaagatataattgtgtacacctgtgtagaaactctgtgttccacgacaggactaaacacgtaaagatcaaatattactttatcaggcataaagtgacgcaaggagagattcaagtagaaaaagttcctacataagagaacctagcagacatgggaactaaggtggtgactctcaaaaagttcaaacactagatgaacttattgggagttgacaaaaggatggtaactgtaaaaacaaatatgaccctcaaagacaaaaatataaaattacataaaagaaagagacctctttttcagactacttgtatgcaaatttaggtagaaattattgcataaattcccacacaggttgtctcttttatcaatctcaattaaaaatacaaggaatataaataacagaggaggctcaacagctcattataactctacaacacagcaacacaaccaactcccaacaaaaggggattacagttacaacaaacaactcaatactctctcaagattctaacaaacttcataatagcttattctcaaccatcaaaattgtataaaagaaaagaaaaccatatcagaaagagagaatattttacaacttgcattgttgcttcgactctagagttagagagagagcagaaaaaggctctcatggagagagaaatactaagaaagaa

SEQ ID NO: 253522 - DNA, 1409 bp, Cannabis indica
ttttttaaaaaaaaacttataatagagcgttacacctaaaaaaaatataaagagttgagttaatacgtgcaatatttatgagatgatttcttggattgtgaaaattcctttgaggcagctacaaaacacagatgtagtacataccaattcttcattttacgcctctttacttcactgcaacaacaatacatattttaatatttcatattttatccctatacatatacatctatagatggcgactaacttctataggcaagaaaaaaatcataaattaaggtgtgaaggaggaaggagaggtagggggatatatatatagtacttgtggatgtgattatgatgtgtagtcttgtcacaatataaataataataataaataatattaacaaaacctgatatgacttaacaagggctgatattaccgaaaataaagttgattttttcaatcctttgaaaaacataatttcaacgaacccaacaaaatgggcagtttggttaaatttttccttggaagacgtaatttaaacaatccaaatgggcggttaggttagggttggttaaatttgatttgaaaaattcaaaatgtaaaatatgttaaatatatttttcccaaaacatcaacaaatatccacataaacctctcacatgtagcaaccaaatataaaattttattgtgataacattaaaaagttaaaagtacaacaaataaacatgtgtccccaattgaaatggatacactaatagcccgtttaatttggtgttatcatcttggcaatggaatgacagttatattcatattaatatttatctttcattatttttatgtattttatttaacaataaattaaataattatttttattaatattgaataataattcaatacactagttttataacaaaatcactaactgataccgaactagggttctacttagtggtgccgaggaacactcgcaaccagtgacagtattacaataggtgtttagggacgtccaggacacaaagactgtattaaagttaggtgtagggtatcggcgttactagtttcataaaaaaaatcactgactgataccgaagtagggttctactaagtggtgccgatgtataatcgcagtacgtgacactatcactataagtgtttatgggtcccagacccaaagtacgtaatcaagttaggtgtagtatatcgagtcactagtttcgtaatgaaatcactaaccaataccgaactaggcttctactaagtggtgtcgatgtacactcgcaacagtaacactatcaatgtaggtgtttaggggttgccggacacaaattctgtaatcaagttaggtgtattcgatccaagtcaccagctacacctaacttgattacatactttgtgtcacgggaccctaaacatctaaagt

SEQ ID NO: 253523 - DNA, 966 bp, Cannabis indica
cttactccattaccaaaataattacatatttaataaaatatgttcaattaaatactatattattttccgagatattacaactatcccctcctttatagaaatttcgtcctcgaaatttattcacacaactcgggacacagctcccgctaactgcgactttaactcccaaatcttatttcaatcttgttgttctttcacttagcactataattagcgatatagtcattattccgcaatactttctcttttctattcaaaaatctgaaccgattctttctcatatgacaagtgtgtttgaaatttaatattcttgtaactccgtatatggatcgcttctatctcatacttctgaagcattgaagtatatattagaaactctagtttaaagcaaggtagtatggctagctaataagctacccaacatatcctttccaagccgattaacttgggacttaacttccctttcttaccaatttctgaatttccctttcattgagaccacctgaagaaagataaaatttccaacatagaatttaatatctatacactttggatcagcatagctcttccatccactatataagcaatatacgaacttaaatctctaaactgcatcagtaccacattaacagtactctaataactgttattatatgaaaacttagcagactatgcttatttcaggaactcccaaaatttattacacttgcttgttacaagctcactcagcatttgaatgtaaactttaaatctcaatctgagataattactttcagaacaccacaggattgaactattcccttgacaaatagattagcacactaattttccacaaacatattccactctgacaaagaaactgtactgatcttatatatcttggttagtcccgagtataatgagtatggtgtagtatgaaactcatttagaaccttctattcaatacctttatatgactaatacacc

SEQ ID NO: 253524 - DNA, 1726 bp, Cannabis indica
aataaccacgacaaccaaggattacaaccttgctcctcttgaaggggaggatatctgggttatctcgggagggccacatattgtgggggaaagcaacaatgcccaaaagagatatgtaaaagaagtgaagaatgagcagtcttctgtttcttcggaaccatccaagaaagctaagactaaagaacctccgattgtattcttggaggtagatgaaaaaatcgtgagatatcctcacatcgacccactagtaattaccatccagctcgctaataagaggacaaaaagggtgctggtggacaacggaagttaagtgaacatcctttataaggatacactgaggaaaatggggcttgaaaaaaccaaactgaaaccttgcatggtaaatctatgtggatttataggcgatagtgtcgccagttaaggaataattaagctttcattaacattgggtgaagtacctttatccaccactgtaatgcaagagtttttggttgttcacctgccatcagcctacaacatactactgggtcgactagcattaattggactaggggtagttagttcaactaagcacttatctctgaagttttagacatcaacgggtgtgggagtagtgtgaggtgaccaaatgcttgctcgtgaatgctaccgcaaaaagctgcagaacagaaaggccggtcaccagctaatggcaatcttgactggagaaggtgactagaaggatgaagatcttgatcctcggattcaagatgaaaggaatttattggaaccgattgaggaattggaagagattcttctagatccaggaaatcccacaatgtgtgtgttcattgggaagaacctggatgaataattgaaatagcaatcagtaagttttttaagggagaatcaagatcagttcgcctagagccatgcatatatgatagggattaatcctaagattatctgccacaactttaatgttaacccaaataacccaattaagagacagaagaggcgacccttggattctgagagagaaggagcactcaagcaggaagtagataagttgttggttaacgactttatacgcgaggcattttatccctcgtagatatccaatcttgttgtcgtcgcaaaaacaaatggaacttggagaacttgtatagaccttttagatttgagtaaggcatgtccaaaggattgctttccactatcgatgattgaccacttagtggatgcaacagctggacacgagcttatgccattcatggatgcatactctggatatgaccagataaaaattcatgttcttgatcaggaacatacaagcttcgtaacaaacatgggactttatttctataaagtcatgccgtttggtttgaaaaatgcaggggcaacatatcagcaacttatgaatgaaatatttgcgagacaaattggaaaaaacaaggaagtctacgtcgatgatatgttggtgaagtcgataaatagtggagatcatactacagacctcgtggagtgctttgaaatattaaaaaaagtacaatatgaagcttaacccgaaaaagtgttcctttggagtttcctcaggaaagtttttgggattcatagtcaacgcgaggggcattgaagcaaaccctgagaagatcaaggatatgatagatatcccatcacaaaccaaaccaatggaattttaggccttaacataaagaatgccatcacttaacagattcaactactacaa

SEQ ID NO: 253525 - DNA, 659 bp, Cannabis indica
gagagagagagagattagggtttcagagttagagtgatttggaggctagaattagacttaacttttttaggttagagttaaggcctttatataggaaaatctaaatcctaagttacaactaaaatcattagatatttacatattaaattgagtaaatataaaatactaaattgccccttaaaagtaattattttccatcagtttgttaggctgtttagagtccaattcccaagtagcttgcagtccatgtatcaggttgtacagagaatcctatttggtcaatcctagccagccatacattgtaggatatggtctagccgaccatgcaggttttgcaggtggagatttggcaagccatggtcctaccagaacttggcaagtcatatgcctgctaggatcttataggtcatgttcctgtcagctttaccaagaggaggccagcctttggcaagtgaatgttagcttcgtacacctttcccttgtagaaatcaggttcccttggttgaacataagctctcttcgtctgaaagtcaccttttggccggccagcttgtgcctaaatcctgcttggccatacaagctcactctacccagcctataggcttctcttagtcggctagacatgttggtatagcttcttgatggctcgcttcactcct

SEQ ID NO: 253526 - DNA, 855 bp, Cannabis indica
aagctcctaataagtagatccaaaatttaccaagtaaatttcccatcttattaattcttctcgactccactatagattcagaattgcactcatgattacatagaatgctctatatgttccaaatattgatatgctatgaattatctattgttttaatcaaaataatcaacaattatcaacagatgatttacattgagtaaggacaaatttaccgttctacccctcaatgtattttatatccttaaaatacttagcgtcctataattgatatttcagtaaactaatataattactgaaataaaagctcttccatttatatctattaagctaagctcaaaggaaatcatcatttcacttttatataattatagaagctatagattctatatctatgattagcgctctcactcaattgtactttcatgttcccaagatataaatattggatcatttgccagctttaacgaacaagtcaaaaaacacaaataatacagttaagttagaacctaaccatctcaggattaagatctattgatcaataagtttatgatattttttctactgttaatatcgattcagtccaatgtatactctatacatctgatactagtatactttactaataccctggaaagaacattctacttagtgtaagtaaattttatctctgattatcacatcagtgtaaatctagtgcactgataaatcatgggactaagaactttgaaacatataatcacaattactttccactgtgatgacctcactgtaattgtgaataactatatgttctaaatttaatagaatttgtatattaaaaccataatcataaaaactacatgtaaacttaaataa

SEQ ID NO: 253527 - DNA, 1059 bp, Cannabis indica
ctaaccacagaaaagatgttagaaggacaatactgatgcagaaatactaaacaagagtatttacataatttgccactcaaagacatgacacttacaatctcccccttggcaaattatgatcaacgacaaaccacttaaagacaaacaaatgtttagacatacacaaacataagaaaacacacagcacacccaaaatattaactctgtgtacaaagtttatcaaaaggcaaaataactccccctcgatgatcataatcaatcactgctggaacaagagaccagaggagcacatgaaccaagaatcctcgagtcaccaccatcaggagcagatgactgagccatagtggaaatctccccctgaacagctgccacatttgaaggctccccttggacaacagcagtatgtgaagtctccccctggataccagcctcaatatccgcaccctgctcaaaccatgaatcaatctccctttcaagaccagctgatggagaaacaacctgagcaccttgaatatcagtagataaatgtacttgaaggtctacagacgtctatggatgactttgttcagcagatggatctactgctgcatgagatggagagaggccaggagaggccttattctggtcagacccattagcagaagagctagagacaatcccctgagaatgaacagctggagaagcttcagattcctttaggacatttgccatagcagtgagaacatcaatgactaatttttcaaagcgatgttgcctgagttgatcacgagcataggaggtggccagatcagtaactgaggtgatcaactgagattgccaggaagtggaagcagccccatctcgagaagttgaaggagcagttggagcagaaggcaagtcttccattagagaagccccaacggcagatacatccatgactggcagtggaagtggtttgctatgcacaagattaaacgacttaccaatggttgggactggcagcaatttgtctttctcataaacaactagagagcctcgtttaaccactctgttaatcaagctgggataaggcagggtatg

SEQ ID NO: 253528 - DNA, 658 bp, Cannabis indica
ccacacttttaggcctaaacgtgaggagggtgtattaagagttagtcccacattgctaatgtgtggaaataaattgaatgggctactcctcccattgccaattggttttgagatggaaccacattcatcttatccccaaattctaacaatataggcacgaacatggcacttggtgtgacatttttggactggtgtatccgcgtttctcagtatgcaaatactgatctgttgtgcactatggaaacagtttgttgggcaatttggaaagcctgtaacgacctggtatggaagaaaaaagttgttcagcctgagaacatagttgggtttgcaaaaaagtatcttgatcaatggaaaaatgctcatcagtcgggcttagatacgtcttggtctgcttatcaagcaggggacggtaatgagcattggtgtccaccacaagttaatagcattaagattaatgtagacggagcgttgttcgaggaaagtagatcctatggccttggttgtgtggctagagactcaaacagcttgcttattgaggggagtacacggttgatacatggtgtggttgaaccaattttggtggatgtcttgggtatcaaagaggtgctcagttgggttaaagaattgaagtggcgacatattatgttagaatttgatt

SEQ ID NO: 253529 - DNA, 1025 bp, Cannabis indica
gcttgttaattacatattaataccttttcacattttgtgtcttctagtgggttaaattctatattatgggtgatcagaacactgtacaaatatttttcttccctttctttatcaccttattattatccattattgaaaattcaaataatgcttctttctttgccttcattacatctgtatttaaattgatataaaatctcatatgagcttgattaataatagtattagctatgtatgaatgatttcatactttaaagcctaattggtttttcttttgttttacttttcagatgctacaagtgaaatgcgaatgggcatttaattttgaaggcattttgtggtagttggaagaacttttagaactgttgaaagcttaagaatactttcttgaatattttgttgttcgataactagtattgaatggtttaagacttttagattatttattattttatttaatattttttaaggattaattatttaatgttgaatacatatgattttatgaatattttataaatcatataattagcacttaaatatatatatttatataatttataatgcactatatgtattattgcttaaaagatcaaagctttccaaatgctaaaaataacacaaaaatgtgttattgcttcaaagattgaagcattccaaatactaaaaataacacaaaaataatgttatagtttcaaagattgaatcttttcaaataataaaaataacacaaaaacgtgttattgcttcttttataattataagtataaatgtttgttatgcaaactattttatataatgcaagaaatgtgttattaaaaaatatactataagaatattttataattgaccaaatgtattatagaattaactataaataacataactaaaaacttatttattcattaaaataagacaaccaatgtgttattgttaattatataataacacatatgtataactatgaaaatgtgttatgtaaaaaggtcggatctacgatagcactgcttttcttaagccctcat

SEQ ID NO: 253530 - DNA, 592 bp, Cannabis indica
tgatcatatttgacttaggataataagaatattaagataagaccctttaattaatttgactaaagatattctttactaagaagcaatgaaatggagggttttgatcatttttttttacaataaacaaaactctttttctattgtcactaaatgattgatttgagttttctttccaaaaaagaaaaaagtgttttgttttaaatgtatagtttaccagttttgttgaaactttttaatccaactttccaaaaatatcatattcacagggcaataaaatgaaaacagctaataataaatcacctatatattgttgacaaaatattgccctatataccaaattttactgtcctcctcttgtgaatatcgcaagtgaataattaattacatttggtagtttttatgtcgttgtcaacaaatatttaattttcattttccatttttttttaatttttttttattttttttttgagaaaaaattctcattttacctttagattaataaaagatgaattagtacttaatagaaataaaattattaaattaataatctcgtgctagagtttctttaaatatttaagggtaaataccattt

SEQ ID NO: 253531 - DNA, 732 bp, Cannabis indica
tgaagtgtaaaaaagaaaaaactgcttctttattttattttaataataattattattattttaggttgttgcccctaatttagaagaagtgttaaagtggatgttcatgccatcctctatgtccttccaaaatgtgagaaagattgaaatatcaaatcatgctgcaatgataaatttaatgaattcctccaccgccagaagtctagtacaacttcaggaaatgaccattgagaagtgtaaagaaatgagacaagtaattgtggatgaggaggaagctggtgagaatgtgatggtcttccccaaattagagattttagcgtttcatcgtttacccaatttgaaaagcttcaactgcggaaatagtgacatacagtttcctaatttggaaaaagtagctgtgatcgaatgccctcgcatggagaatttctcttttggaaatgtaatcacttctaagttggctaaagtaattacaaagttacagtatgaatccgtttgcatgatgaagtatgaacatggcataaaaaaggtttggaagggtgatctcaaaacaagcgtaagaaggatttgggaggaaaacaaataattgggtatgtatatatataaaccaatcaaccattcttgcttttattataagggtaaatagcggcataagtacccaaagttttgagtttgtaagtggcataaacccaatgattttttttagtggcataagtatccaatgtttgtaaaact

SEQ ID NO: 253532 - DNA, 626 bp, Cannabis indica
ggattaggatttaagagaggaatcttaatttttaatgaatttttatggcagaaatgggtgcgatttcaaggcaggtttttcctctctgtgaaaatctcaatttttggtgtcctaaattacacgccaaatctaggcatcatgttaaattctttaagaagttaatctttggtatattccctccctctcaggttaattttacctctctcatatcttgtttatctcaacatatacacatatttgagtaattggaaaaaattaatcttttttctaatctactttgaaaaataataagatttaaggtatgtaacctctgtatattcttacatatataaatatcaaaaatatttgcaggatgaagaacccaatgaccgtaagattgggaagctatgtgaatatgctttgaaaaaacctcttcgtattctaaaaggtacatgaaaaagcaattcaataaattgttgtatgtaggttatatggattattgatggattttaatttatttgattaaattatttgaacctttagatcacaacatcttttgagcaaatgtgtacagggatttgagaaatgagaaatttcattcagaacaggaatttcatcttttgagcaatcatactatcatgttccca

SEQ ID NO: 253533 - DNA, 706 bp, Cannabis indica
gaactccaagatcgtcacatcacctctctcgactatgacccttagtagacagtacttcttctcaatgtgcttgcctctcttgtggccccttggttccttagagttagccaccactccactattgtcacattagagcactagtagtttctctacttttggaactacttccagagcaatgtagaatttcttcaaaccaaatcgcttccttagctactttgcaagctgctatatattcagctttcatagttgaatctgcaatacttgttttcttaatgcttttccagactatagctccttcaccaaaagtaaatactgaccaagatgtcgactttcgagtatctttgtctaattgaaattcagaatcaatatatctagtagaatttaactctccaccggaatatacaatcatgacatctctcattctccaaagatacttgagaatgtgctttacagcattcaaatgttctaaacctggattagattgataacgactagcaatccctgcaatttagcatatatgtcaggccttgtacgcaacattgcatacatcaagctcctaactactgatgcataagggtactttctcatatcctcttcatctttaagagtctttggacattgatccttacatagaataacgccatgtctggatggtaattgtgttgggttttatgccctaaatgaaacccattttaatataatcaga

SEQ ID NO: 253534 - DNA, 1170 bp, Cannabis indica
tacgaatacatggcattatgatttctatggtgggtaatagtcgattaggtatagaagtcagctctcttctttctgttcgaacgaacttctccattaatcagtatgctgagtatatgttagagaaatagtttatcttcatggtgctccaaagtctattgtatctaacagagattcgaagttcacgtaaagattataggagagtctacatcgagcaatggatacacagttaaagtttagtacaatatttcatctcagacagatggacagtccgaaatgtctacaaaggtttagaagagatgatacgggcatgtgtattggatttcaaaggatcttgggtaaagtaccttcccttgatcaagttttctaacaataataactaccaatcaacaatcgagatggctgcttatgaaatgctttatggtagaaagtatagatcatctatccattgggatgaattaggtgaaaaaagttcttatgtcctgaagtttttcaaaaaataagtgaggcaattgacaaaattagagcttagatgctcgctgctcattgtaaacagaagagttatgctgatccaaagtgacagaatgtttacttttaggttaaagagatggtattcctcagtatttcacctatgaaaggtgtaaaatactttggtaagagagggaaattaagcccaaggttcaattgaccttttgaaatcctagagagcatagggaaactagagtacatgttggctatgcccccctcgcaagcaactgtacataatgtattttatctttcgatgcttcagaagtatgtgtcagactcatctcataaattgagttacaaagtcttggaacttcagccagacctctcgtatgaggagcaatcagtagagatacttgatagaagagagaaagtcttgagaagcaagacactaatagtagtgaaaagtgctatggagaaacttcaaggtcgaagaagcgacctgggagttagaatctgacatgaggcagaaatatcctgagttggtcaggtaaatttcgaggtaaaatttctataaggaggggataattataatatcctaaaatttagaaatggattagcaaccctaactaacgaatttaagaataattgtgggataatgttattatataatcaattatgttgtgtaatatgagaatatttgaattt

SEQ ID NO: 253535 - DNA, 587 bp, Cannabis indica
aatttctataaggaggggataattataataacctaaaatttagaaatggattagcaaccctaactaacgtaattaagaataattgtgggataatgttattatataatcaattatgttgtgtaatatgagaatatttgaatttaagaccccatttatgagataggggaatttttgtaattttgactcaataaggttaaaatggtaatttttactatataggatgcttatggactacattattatatagtatgttctctttgttattttacaggtaagttttgacaagatattgaggaagtcacaatcgattattttggcacgaactgagttcagggtccacaatttatgaattgtgtttttttgaaaataacataaaatatatatgattatatgagaatatgtgtgattgtaaatgactaaattgcacttgatgattaaatatgttgatttttggccctagggccaaaattgtcattttaaccaaaatatgtaaattcagatatatttgctatttttgaaaattagaatcaaaaatccattttcttgcttcttgaagttcccactgacctccttctctttctccctta

SEQ ID NO: 253536 - DNA, 568 bp, Cannabis indica
aaatcaatagtgctatttacataacgtatgattcttttcaaagtagaaacatgtgattctaggggatttccttgataatgagcacaaacaccaacactgtaacaaatattaggatgactagcagtaagatacaataaactgccaatcatacttcggtataaattaggatctacctatactccttgttcatgtttggataatttcaaggttttgctcataggagtcttagaatgtttagcattttcaagtccaaactttttcaccaagtattttgcatacttactttgagagacaaaagtgccttggagacccaaaaaataggtgagtttacttggtatgcaaaatatcatttcaaactttgcaaactcttgttatattttaattacaaaaacctgcactttacagttagaagtaaatctaaacataatatcatcaacatatatttaagtaacaataacattactattaatatttttgatgaaaagtattttatcaatatttccttttttataatcatgagaaagcaaaaactcagttagacgcttataccaagcacgaggtgcttgtt

SEQ ID NO: 253537 - DNA, 1171 bp, Cannabis indica
aaactaacagtagtttcttcatcagtttcttccaaaagtggagtcaagtgaaaccctgacttcaccggtagtgttgtagttccatattgttgtaatatattattttttgttgtacactaatggaaaaaaccctctaaataaaaaatgaaatttacattctattgaaattatcaatttaattactgttaaacggtataattaacttttatagcgtgtatattttttatttgtattatattcatttttaaagcttactttttactgtgttgatcagtgatatttgtcacgtcagtcacattgagtcattttttttctaagttgaatgcacgttacccctaccgaacccatttctcttctccattattttcaatctcactttcttttctttttatctttattttttagtttttttttatttgtttgaaaaattcatccatattttttcaaatgtgggtggttacacacatttgataaattggtgaactgaataccatttcggttcagttttttttcttctaaaaaccatattccctctagtttctccctcttttgttggtcattgtttccctataaatagtcgtttcattctatccatggttgtttcatattcattttcttcttcttcagttgtaaaaaaagcacaaaaaacttctctaaaaactgtgaagagtttgacaatgggtaagaaaggtgctgctaagaataaatttttgaagatgatccccctagccctacatttccaataacttttaaaagaaagttagtagttatgtggagaagaagaaatcaaaacgttttaaagctatcattaagattcagactctaattttgagcttaaagatgaagattttgagatagagaaagtgacaaaggtatttatcttttttatttgggattgggggggggggggggggtcgggttaatcaagtcttgttgttgttgtttatgtttttttcattgtgtgttgttttcaatcttgttttgcagttttgggtcgtgttattttagggtttttgttcgtgcatgtttgctgacaggtttcaatttcggattctattcattgctctcagattctttatattttatatgttttgttatttatagtatgtactatttgataagggtgttcatcaaaccgctcaaactgcccgcaccgtaaaaaaatatggtt

SEQ ID NO: 253538 - DNA, 725 bp, Cannabis indica
tttttaataaaaaattaataactttgtaaatcgcttaattagttttaaaattttaatttattttttaaattttttaatctattcaaagtaattttttcttaatatctaaattaatttgttaagatttactgaaaaaagtattaaatttttctcatgtttattttgagggctacgatttgatagttgtcaatgtttaaggagaaaagttgataatttataaagacacgtcatcatttaaatggaataatgagacgaaacctaacagaaggactaaatttctgtagatgtaaaagttcagagaaaattcttaacaagctgtatattttagggggcaaaatcaatattatcgaaagttcaagagtaaagtttgctaattattcttttgaaaatggtggagatttgagttttttgtgtgatttgggtaggttttgggaaaatggtggatgaacatggtgagaacttttgaaatccttagttttgattaaaaaaatttcaaatttagtgacaaaaggtgtttgtggaggttttacttttagaaaccctaaaaataaaaagaaataaaataaaataaataaaaaaaacaaaatcttagacaaacattaactacataaacaaatattatcacaagtaagttaccaattagacacgttttcttttcctttttgtttatctttgcctgaatcacaattgactcatatttcctcattgatatcgtttctaatgta

SEQ ID NO: 253539 - DNA, 639 bp, Cannabis indica
aaaatttatatgctaataacattaatttaaaatcgttacacttaattatttagttttttttgttaaatatttaaaaagtaaaaagtggaatagattgaatgtattttccaaagataaaaaaacggctaaactcctccatcttttgtttttttaaaggagttatttactcaaaaaaaaaaataaaccagagtcaaaaaacaaagtcaagctccctagaaaacaaaacaacctcaaattcgaatagaaaaacttatacttagttcttttagttataaaaaataatttaatatcatttgtgaaattccgtattttaatattcccagtttaattatttaattaagtgattaattaaatacggaataatgaaactggtactgaaaacagtttttccgtagttacagaatacaactctgtaaaccacttgaggttagctcaagtggccacaggagggtgcgtgtgtgttggaggtcctgggttcgagtcccaggttatgcatggttgtaatatataaacgcttaaaataaaaaaaaaagaatacaactctgtaactctagagaaacccagaaaaacaaacagttgttaacgaaaattatgatactacgcaagtatacgcaatcaagtagtaaactcacacaggtg

SEQ ID NO: 253540 - DNA, 3388 bp, Cannabis indica
gcgccgtcgaggtcgaggtccacagttgccgagctttgccactgtaatccgatttcagcaccaattcaagccaaactctgtcattatttgccactcaaatttcagttcaggttttgttgaaattttgataatttttttgtgttattggcctgattttatattaaaaatttatctcggagcttacttgggaattagttggcatgcatgtgaattttgatgataagaaaatcagattttcttgctgaaatttggtggctatgaaatgagtttggagaaacattaggttgtggttgcttggagctaaatgaatttggctactggaatctagtgagattttcttgttcaaattttgaattgattagtgggtagtgctgagatatttttaattcaagaaaatttagaatttgggggcttattgatgttgcggtttggttgttttattgtaagtaccaaatcaggttgtaagcttgtttgtatggtggtgatagtttgaaagtctgcttgtgttttattgaagatcacttagaaaattattagaaaaattgagttgcataattgagattgtgaatgattgagattttggatacacattgattttgggttgatcgaggtggtgtcaaagtaattgcttacttggttactagtcaatactgaattatagaaatcatagacaataaattgtttgaatggaactaatcactcttgttcatgctatcttcattaataatcttaattactttggttatttttttataacaccaatattcattcgaattatacttatactacacacatatatggatttatatagtattttgttctttacatcgtaaggacattatgtaattggcctcaacatggttgggccctgtcccttctggcagattgtggaattcccgctgttggaatctgcttggcctacaacctcagtagcgcgcctcaacataatattttgctctcgagctaaattctccaatattctgatcgactctctgctatggacactgttagtgctaccatgttatcaaaatttcagacccagtaaagatcccaaccacgaaattggtagaacccagtttctccaatcagtgtgcaaaccttttctgttaatacccagtatttttgttatcggaaacaccattttcgaagggcattgatcacttcgagtatggaagaaacagaaatggcggatagtaaagatgggttatcaagctttaaatgggtggaggttggtccccatcttacagaagcccagaaagaagctatctctcaactctcaccaaagatgacaaaacgttgcaaggctctaatgaagcagctcatttgcttttctactctccaagctagtttgtctgaattactaggtgcgtgggtaaagattatgaagcctcgccgagctgattggcttgttgttcttaagcaattgaaactcatggaccacccactttatcttgaggttttctcttcttctgtttaattccttatcaatttttccattatttacattttttttttcatgcttgataatggttactctgtttttattagtagtgatagattgaataagtatgtgcttcgctttgtttttcagttgatctttgataagttgatattgtggagtttaacttttttaatgaaatcttttgagagagatggaggtagagagattattgaatgttttttttttttttttttgtatgttattgcgaggttacttacaggagaactagtatgcaaaaagtttaattgagtttttcaaagtttaactttacataaatttgtcatgtcttagaataagaactcacatgtcattgcactagtatattcttaagtatgcttatgtgaattttcttttgtgggttatgtttttattagataatggccttattctttgaaatttctctttttgaattgtgtactgtcatttgaagagatgttttagccacggagttgagttataataactataagaataatataataagctgcaaagtatgccaacttcccatgatgagattggtaaggagaagtttatataaaattggcacttataaagtttgattgagttaagttttaagcattttgaaattttatgctaacatctcaattttattgttcaatacatgcgcgtttaagcagttttaaaatgtccaactatttaatctgactgtcaaaatctatttcttgcacaatttctaggtggccagtctcgcgcttgtagaagattcttttgaagctaatattcgtgattatacaaagataatccatgggcatggaaaacgaaatcaacttatagatgctgaaaagacccttgcaaccatgagaagcagaggctttatatgtgatcaggtaatcttgaccacatttattcacatgtatagcaaggctggtaatcttgagttagctgaagaaacttttgaagaacttaagctgcttggagaaccattggacaaaagatcatatggctcaatgatcatggcctacataagagctggaatgccggagcagggagaggttttactgagagaaatggatgcccaagaaatttatgctggaagggaagtttacaaagcattactaagagcatattcattggctggtgacgcagaaggagctcaaagagtgtttgatgcaattcagctcgctgctatatctcctgaccataagttttgtggactccttataaatgcatatggagtatcaggtcaaagtgaaaaggcacgtgctgctttcgaaaacatgaggagagcaggtctcacacctagtgataaatgcatagcgctggtgatatctgcttatgaaagggagaataagcttcaaaaggcattagagtttttgatagtgttggagagagatggaataattattggaaaagaagcttcagaaacactggtgggatggtttaaaaatcttggagtagtgaaagaggttgatactgtcttgagagaattttctgtaaaagaggcgaattccaaatttcaggctacctaatttcaatcttcaaccacaatcttaaaggcaacatagcatatttgtttcctatttatttatggttcttttgactgccaggaatatagaaaatggtaagtgtagctctgaatgaaacacattgcataccaccattgaactttctcacaatttcttttatcatcagatactgaaatttaacaatctatataccaattcgctagaacaggttcactttcgggccgtgggcccatataattgttcaaattattcaggtcacttgtccaactttggctaggtaaaatttatattatgttacaaaggacaggagtggagtttataggctgggagcattgcattctaatatgtagatttacttacacttacttttcagtgagtttttctttctcttttttttttt

SEQ ID NO: 253541 - DNA, 653 bp, Cannabis indica
gtttacccaaaaataaaagtatcatcacaataataaatttatataaaaatatctttataaattacttatagggacacgattttgttccgtaatgtacttttacggaatgtattccgtgatacattacatgggtctcagggtacattagatgtgtgtcagggtaagtttactattttttttaacccccaatttacccttagatcaatctcagcccttacatcaaataactcctctcatctaacggctgtcgtacatcacgaaatacattccgtaaaggtacaaaaatgggacaaaatcatgtcccaattattatatattgtcattttaagaaacattaattgtaaaattgtacgaaggcaaaagtatgctcattgttttactaataaattttaataataatatatttcttaaaattaaaaatagatattttacacttaagaaccaaaaaataataaaacacagaagacgttattaaaaaataaaacagaaaagacgagaaaacagatctatcatatcatacctaaaaatttaaaaggaataaatgatcaaataatgaaaatatatattttttacaagatttaaatataagaaaaaacatcttcaaaataatatatttttttttaaccgagcggcttgttaatttatatataact

SEQ ID NO: 253542 - DNA, 4290 bp, Cannabis indica
gagtaagtgattcaacaatacatttgcatggcatggattttcatcgtatttttactcacgtgactttcacgtgagttcaaaagagagagaagaaagtgaaagtaattttgtgttgataatttgattttgatgcagggattttgtttgagtgcaagggatcaagcataggagttctagctagtggaccaaagcagctgaggcatgaagtggccaatatatgctcctctggtttagtggaaaatttgcattttgagtccattagctttagctggtgattatgattgtgattccctccactctagtatttctacttgtgttgttgtgtatcgctatcgactagtgctgctttcttctaattttgacctgtttctcttaattaatagctaatatctatacacaataggtacatgtaatgtatgcatatatgtatatgtatgtaatagaactttgtaatttgggtccgtagaataaaagtgaccaatgtgagttgttgtgtgtacttattgttgcaaaatgttactactgtactacctcagtatcaattgaacagaaaaatttactattatatttcaattgttttatgaaaagaaaatgaaaaaaataatgaactaaatccaaaactactaggtttgaaaaacaaaaggcaaatgaaccaattacagatttacatctacaaaataataggggatatcattataattttataatattcatttcaatttctctaaatttctctcctatatttttcttctgattcatttccttcctgcctaacatagcctaaaattgcttcttcttttttaacaatgatttatttacttttgattgttgttttgtttaggtttttcatagaagctcttttaaacaaccagtctaaagggactgcatggatagaattttaaaagcatctttttagtttttaaagtctctaaaaaatattttattgttgttttagtttccaataaggtttttttttataataaaaagaaaaaaaaacagcagaaggtaaagtccaacaaactatctcttgtggaagaactttctaaaagcgaaagtaaagtgagcccaaccaaccgggctggtatggagtaactcctctcattatatcaggcccaaaagaatttttttattcagtagtaaaagttaagagattaagccatactgaatatgttgagattgttgtgaatattccaagtaagttgctaagtgagattaaattatgggaaatgaaaggaaggtgatattttattagacacaaaacataaaaataaaataactgaactcgtaattttcaaaccaaacttacctgttacttcccaacctctctcttctttccctttcttcctccccaaaaaatttatacattacatactatgaagaaatgaaaaatcatatccaatgtaaagcattggaccagtacatatttccccctaactcatatcaacaagaacaatgtaaagccccaaggaaaatagtaaataatctacttctatgaaaggatgtataaacttgaagtagccccattttttctgtactttctcacttgacgcagctgccctcgataggctgttgtcatttattattactcagaaaaagagttctcgctgagaagtgtcacaaaatgagaatcaatttggttgtcaaagaagatcccaaaattgcaaaaccaaaaaataatgctcactattcctcctcattcacaattgatgacagtttctccgccaagttctcgagcagatcatgatactcaacgaatgttacatgtgactgaaaaacacattagtaagggataaatgcaattagcagggtgttggtgttaacgttagctttatcattattcttaacgacagtttaaagagacaatacctgcaaggtgatgctgtatgctttccataatcgcatatcatgccggaaaagatcaaataggacctgtgcaattttaagaagcagctaaaaaggtcacatgggtggtaaaagcaaagcatggacattcagaaacttttgtttatttcagtagcccaagaacttaaagaaaaataaactactatccctgtcaaaaagcaagagatgtagcagaaatatcttgcaaaataattatatctaatatgcccatagacgtaaataatctttaaaccttggcaatgctaacgagctttccacatgaattactcgtgtataaaatgagcataaaaatcccacacaaatgatgtgaacatgtttgtaatatgtgaggtacagattttgacagcattaagaccagcatacctcagaccgccttaaaagagtagcaagcacgactatccactccttgaacttgacagaacacatatgtgccaaaagaaattctgcatccaaccgactttgcaatgttcccatttggagctggactcgtaagagagagtagatttggtcagtaaaagacttcattcaaccaaacattttacagtctggctcaatatcctaattttttctctataaaaaagatttctacatcatcacaaaattcaagatgtaatttaatcatctttagacaaacattataactggaaattgattttgttgacatccaattctattatacaatcccttttactggtccatccccaaaacaaccgggactttatcacacaccataagatggtcgtacaattaaagggaaggttatgttgagctgtgacaaagtggcagtgataaatattaatgcagattgaactagagaattttaagatagagatttgccttttggccaattaattcaagccctgcagcaaaattctccaacctagcagaaccatgtctctcccgttgaagatattcctgaaataaattgttagaacacttagaatcatttggcagcaaaaaaaaaatccatattcctatatgacaagtgcaagccttttcaattaccactaaatcaaactgagtgcccttcacaaaagcaactagtttagaaagttcttttccagacatcaaatagctagcatggttttctaagatgttcttaacagaagtgacatgagcactctgttctttgaatgaagtgctgctccaaagaaaaatttcaatattagtatcatttattaaaaagctgcaaaatctgatagagcataaattaagggaaatgtacattaaccttttatccaaggactgcttcctgtaactagaacggaataagaaataacccaagaaccttggagatagattgtcggagtctgttgacgcaggttccaactcccttcctgatctcagcaagaaccttacctaggaacaagaaaaggatcaaactcctgttaacattcctgtatctagaagagccttgtttgtgtttaaacagcaaaaatgtgcattagaaaagataccagctctcctgcaagttcatatagagattcatcgagtgttgcctgcatcatgtgaccaattcttcttagaagcattatccaaagaaaccaatatccaaaaacaaagactatttttaaaatgaaaactatgcaagtacctgcaataagcgtaaggcacagtactggctgactgcaggaccttcaagtttagcaataacctatgatatccaaaaacaaaatatattcaccaacttgcataatcctcctcaatcggctattttatgctgcatttgcagctggaacattttcatatcaaaaggcaaagttttttgaaattgtagtgttgtggaaagtgggtgtgattataaaccttataaatacaggcactatagaaaacatttcaaaaattatgcttcccatatatgtaatgattagagagcaatatgtaaaattttaaattttcatgctttggtcaacaaaaattcactcaactaacaaaactaaacatcttcaatggaactaaacagattgtttacgaagtactagaattacatcccaattatcgagcaaacaaaataaattatgaaactagaaataaatgaatataattaactgcatttccaagtttagttagaacggaagacatcagaagttatcaaatgaaatcgcttctctgacagaagttataactaattttgaggaaaaattattcttacgagtatgtagcatgctccagtccggtaccatctacgttggaaacattcctcaaataacctgtaaagtggaactacaaaaattaatgttttacaattaaaaattatagcaataagataccaacaaagcattcaacaataatgggccctcaagtatcagctacaaatgacttatttcctacatttcgcaaaagtttgttcttttgtcacttacagacaatgctaaaactattttatat

SEQ ID NO: 253543 - DNA, 900 bp, Cannabis indica
tcaaccacttgaagcctggctgaaagaagtaaaaataccccgacctaccttgcttgggggtagacttcaggtcgaagaaccaagcgacctcatggggagaaggagcatcttaaccctgggaagcgtagaggacgaagagagcggataaatacttaatgcaattggtagtaatctcagctgggcagaggccgaaaaagtccgccacatcccagaagtacttatgcaagggcatcaacgccccttgctggccgtgagcccccaaccaagcgcacatccccttatcagggtttgtggtacgattttcgtgggcgggaatgtagtagtccagttcgcccaggtatccgtcctggtcgagactgcctccgaaatcttggacggaggacttacccacctggcgcccaaggcaccctgcgtcctctgaggaactgcctcaacaagctcctcactgacgtagtcgacgccctcaaccaggacgtccccgtcagcatcaactggttgcccagcctcattgtactccccatagttagggggttcaatctcttcctctccctcagcagcaggaggattttcccgacgcaactcgtccagctcctcaacctccttgacttcagctacccctcatggtcctcctccattgggaccgtcaaatcctgttcggcatcgggcagagtggcgagccgagccacttgggggtaagaagcgtcagccagacacgtggtcttcttcgtacgagccatcatcctatggctgggtacaaaatcaaaaggagaattagcacgaagacgagggtggacttcgtgtagaagttgaagcagctcctggtcgatttgatgctcgggctcccaagactcacgtgggttcatctataaaagacaacacacaagatgagtgttggacgga

SEQ ID NO: 253544 - DNA, 690 bp, Cannabis indica
acctccctctctcttcccattccctctatctaattttcctcccagcccgagcaccactccaccaccacaaagaacaatttttccttctcttcactcattttcgtcacttgtcttcactgcactacaagctactacactacaagctacactacatattttctctcattttttggacagagcaccatacacgaagctaatatgtaattttttttttgtgtaatcttattggtagttgttatatttagtttacaatgttgttttgatgcttgatctgtgggttgttgctattattttctaattttttgtgttgaaatggttgcagtcaatgaatactgcatttatcctggttctgcaattttttcgtcttgtccgatggagtccgatgtagccccgatggtggttcgatacaccacttggtatcaagatagggatgaaagcccgatatgggtccgatggggcccgatgggttgtccgatttggggttggggactttgattttggatgggcccgattgttgggttttctatcctaaataaaacatattttaatattataaaattcactaattaataaaagatcataaattattttatgttgcatggttcacatgatttatttcatgattattcttaatgtacagattctattaagtccagaacatatatatttgttcatgattatagtgtcgtc

SEQ ID NO: 253545 - DNA, 850 bp, Cannabis indica
tattttggaagactgctagactaaaaccatcgggtcccggtgctttattgccttcacaatcaaaaacaactctccttatttcttcctcatcaaatggtcgctctaattctctagctgattcagtagaaatttgtctccaaaaaattccttccacacccatcccctctcttctttcagaggtgtagagtttggtataataaccaatcaattcttcgactatttcatcttccttgtcgaccacatctccgttttctttctcaattctagatattgtgtttctggccttccttgcattcaacagattatggaaaaatctgatatttgcatctccctccttagcccacttgcatttagacttcagccacacattcctttcttcttcaaatgctaacttttgccattccttcttgatctcccttctctcttcattcaaagtttcattccatctgttgcttccttctagtctatctagatcttctaaccttctttctagagcaattttcctcatgcggttatctccaaaagtagatttgctccacacctttatcttctcttgtatcttctttaatttgctcatgaattttgttcctgaccaacttgacaccgatgtctctttccaccatttttcgaagacttggaaaaagacttgtgttccaaccattggttgtcatatctaaaggggcaagggccccaattcggtggatctgaatcaagtattaccagactgtgatctaaaactactctgactgccatttcctgtctgacatatggataggcgatgttccacttgttagtaaacaagaatctatctagtctgctacagattggattttctcgaaagtttgaccac

SEQ ID NO: 253546 - DNA, 1038 bp, Cannabis indica
aatgagtgctttagagaaaaagcgaacatggaaagttgaaaagctaaccaaaggtgctccgatagttggctgtaagtgggtttttacacccaaatttaatggggatggcactctaaagaggctaaaagcttggctagttgccaaaggttcacacaaaggtaaggtattgattacactaagacctttgctccagtagccaaacttaatactgttcggatcttgttgtctattgcagctaatttaaattagcctttgagacagtttaacatagagaatgctttcttaaatggaagaagtgtaggtgtgttagactaactgatttgagagttggttaaagttagttaaagattagttggaagttagttaaggtctgttaatagtttttgttcagctgtaagtataattgaattacctataaatataaatgtaatagttgttagttagtttttttaatttattagaccttttttattatgagttgttacagtttgtaatttataaaaagccatttggctatcaagtggataataagaatgattattcaccaaaatcaaaatcacaggttgtaactttagatgaattccattatttgttttaatctccctttctccattaaagttataaatttttgtttcttttcaatatacatatacatatatatttaaaaaaagcatggctagttattgtggaaatagtagtgcataacagaaaaataggaactcagtagttggtggagaacaaatgtccatctcagatgataatattacacttgattggtgtagctactagcttatgtgatagaagtcaacaagtaagtttttatacgtctcatagaagaatactaacaagattatattagaaaggtctatcatacaacaataaagaacaaagaacactcttacattgatgggattcgtttgaataacctgaggtcccagacatcctggggtacaaccaacatatttataagatcctggagaaagaaatttcataagaacattcgtcaatgaacatattcatgttcacaacccctaaagg

SEQ ID NO: 253547 - DNA, 1265 bp, Cannabis indica
aaagaataacaacaaagaaagataactttatttcagaactttgcttaacaatgaaattggtctaataacaataatgctttgctctcaaagagtgtaaacaaaaaaatgtattcccatgacttggaacatggagcttggtcagcctagtttacttgattgaaacactgtgatttgtattgaggaaaataaagactagtatactcacgagacccgattgctttcatttcttatcttggttatccaattcttgtggcggtttgcattctgtgcatgctgtagaggatggaggaggaaagtaatctgagagactgacacgaaatgttcggttcttctcattgttcccgggaacatgaaggagtgcatccatgattataatgtcccagtcgcgaggacgcaaaaaggaaaaccatgtctcctctgtgaaagtgataaaagagaggattaataagctagagaaattcttgtaaatgtaagccttaatagtccaaaatggaaatgaatgatatgcaagtctctgacataacaaaccaaagtgagtacatattgttttggcttctgttgtgaattcatgtaatgtatagacaaagaatatggatagagatcaaacaccagtagatacattagaaatctgcatggatgtaacaaaaacagaaaaatttgccttggtttgctatctatctatatgatatagggagcttcgacggtgctccccatttcctatggttgcgcactactttctcactgtgtctctcccgagcaagagagaggagagagacagagagagaaggagagggggagcacggtgcactctctctgttttacaaaagttaccattcaaattctctcttttattaaaggataattggaccctgtattttttaaaatggcgtaaaataatacttcgagctcaatttttgtcatcctttttatataactaacctgaaatcaatttctataacataaagggatacaaaaaatataatcaacatgatcataacatctccaaatcaagttatgttctatttttactaaaatttggctcaagatattattatgttatctaaaatttgacaaaacagagagtacaatcagtaacttttgcaaaacacaaatcaaaaagtatttatcctattgtatatgttatcttagtatgtgtgtggggaaagtgcatcacaagtctctaacatgtcatctgtgaatggatggtacattgtaaaggttcaaatacctccattacgcactgccttcaactgcaagactcctgt

SEQ ID NO: 253548 - DNA, 1024 bp, Cannabis indica
tcttattttgagccatggtcttgtgagaagtaaccgagttgtcagaatctgactcgtgatgagttgatagtggttgtttgacaggaccaagaggttgaaagagtgggttgtcgatgatcgtctttgacgattgagaagcagacgatgactaaagatattgttaacccttaaaagtctctcttgagtatttcttgtactaaacacgtacacctgagattatagaaagtaaaaaaaaaataggttaataaagcaaaaattaaatatgaacattaaaataaaaaaatagtccccaacaacggtgctaaaaatttaatgcgtgttgtaagtcacaataaatttactaatattcatttccaatacctccaattattttagcataattgtaagtaagggtcgatcccacaaggactatatttatttaataatcaaatattaatgacaaaagtttaaaaagggaggtgttatgtttagaaaaaacataaataaaaacaaatttaaagtgagactatgatatgtgaaactagttaaaggttatttgccaccctcaagagtcattcctaattcctattaatgaatgcaattttagtttccaagtaaactattaatcccgtagataaagctgaagcagtcaattatcttaatccccctattacatgtaatcaagggaaaacagtcaaaaattaactcttttacttaagcagtaaatccacgaagcatgcaatttatttaacttagataaagctttaagatttatagagatacactaatctaggcaataaatcaatgaagcatatactttatttaacctaggttctattcttcatcacaattaaaatacctatgacaatattaaaaaatgtaatttatcacaaatacttaaaatcctagactatttggtgaatagtaatcctaagatgacaatagattaaagtaaaacctaatttagtgatcatctaaacaagattaaaacaataatcatgacattgaacataaaagaatagaagcaattcgatataatagaaac

SEQ ID NO: 253549 - DNA, 1332 bp, Cannabis indica
tatttagacttgtccatggaggtcaatttgaagtacatggaatcgccccttcgtgaaagttggcttgctcaagataggaagctgtatgagagttggccacggatagattgggctgaccagagtgatgaggaggtactggctgaccatactcttgagctacctgtcaaccagcctgctggagcactagccatgcaacctttatcggagcactaagtctcctacaaagtatttcctttcctagacttgtttattgaagtacctggcaaccttttgctggaaggcatgcagatttaggtcggtttggtctcttctttcttctattttgttaagggattgttccagtaaggtgtggtttacttcttggtcataggatatcctcctatgggatggtggttccagtttaacgggcaacattgatttatagataggctaatgcaaagggtgtctatctgtggccatcttctcagtggtcctgtgtgatcagagtacctctgggagtaaatcacgccaatttccttttggctagatagatgcccttggctggccagcccccgccagctggacagatgcccttggtcggccagcccccttccttggccaaccaaattagccagactcccttggccggtcaggccaatctatgggttgacatgcggttggtcataccattagcttgggtttggcgggtccacctacctaaaattattgttcaaaggtggaacaaaataactctagttcccgctccttgagttattattgtcttatgggttttcacttatattaggatccagcctatcaaaaataaggtccctaggccttagagcaacatattctcaaatatttcagaggagagaattactatgctggccagtaagggcctggttagttggttatgtcccctctttggagttgttttttatcctccaacacctcctactactaggaactggctattcctgtcatatgacctatctggcaagatttggccgtcttcaggtagaggaaggtctgtccttgtgttcaagtgacctggttggactatatgtccattgtctacctgcctgtagaccatggctggcctgtcaatgaccttttcttgcaaaggatctctttttagatcctgacctcttctggcaattctctcattgaactgtcatattaggtcactggcctccctattacagcagttcagctttgcttgatgggcctggaggatggcctcctaatcgtccatccaccctaggaatttgtgtttttgctgggcaaaagcatcacaaccagtagcgcgtagatcttcttatattttctgagtgacctgccctacaacttctc

SEQ ID NO: 253550 - DNA, 521 bp, Cannabis indica
cattctctgctgaatttttcattttaaaagaaatttttaagaatatgatgcattctttagaatttgtgcataaaaaaattagcatgttgttgtcaagacctcctcgcaaggtttgtttataatttgtttttaaactgttaattattgtttaattttcaataattattgatttatgtttatttttttatgtcaaggattctcatgatgttgaggattatgataatgaggaagatactgagattgaggaggcttctcatggggatgaggatgatggtgagaatgaagagggtgagactgatgagggtgtgaatgaagagggtgagaatgaagagaatgaagagggtgaggatgtttctcggggcaaaaaattgataaaaaaaggtgtcattaatgatcaggatgatgatattgatggtaatggtgaaggagattgtggtaatgacgatgaggtatcaaaagatgttgtcaacaatgagaaaaaacaaaatgttgatgatgattttttcaaaggttatagccag

SEQ ID NO: 253551 - DNA, 786 bp, Cannabis indica
agttaatcttgtttggacagaataaatgtcaagctcaaagaaaaaataatccggatatggaaccctataaaatctctcaatatcgtggatattatttggtctccacttgacatttgacaatgccttcatcctttcaaaagaaaaattatttatcaaaaaaaaaaaagagagccaataacattaaaaaagagtagaaaccaatatcaataataatgataaagagaaatggaaaagcagataagcgtggtcggttatatggcagagagaagagaatgggttacataataaggggaacgtgctatggccaagccttcccggacctattggcccagcgcttcaggatcttaggacaaccttcatgagtaacgctcacttatctaaccgttgatctagcctaataatattcctataatatatattattcgaatctatggctccaacttccctacaaaaaataaataaatgaataagactcaacttttcatattagtgatattcaacatatgtagatatatagatttagagctgaaaacatatttatatctatgattgttaattctatttataatttctcaatttgacacagtccactaaaaacactcataaaagataattatcgaacattttcacgtagaaaaaggatgcaaaatatctataatagcactagtgatggttcgtgtttgtgtatcgctttttgtatcgtgctaacgttttaagtttattgaaaaactgctgacataaatgtacatgagtcatgacacaaaaaaattataaaattcaaacaca

SEQ ID NO: 253552 - DNA, 1332 bp, Cannabis indica
gttgtagttgattgctgttgttttcagaggcttatttatgcatttttgagtagattcaagcaggttttgatgcatgttagtggggtttaaccaagcttgagttttgaactcaaagcttggagctttaatggcaatttttgtatctgtgcttactgggttgttttattgctttggaactgctattaggggtatttagagcaggtttggaaagtttgaattagtttggggtggatttggtcgagttatggaattttgaaaaattcctgcactgaactggaattccagttcaggatggcctgtaggaaccggaattccggttggtgttctgggttccttccagaagtggaattccggttgtagaaccggtctgccggttggagaaaaattgggaaccctagttcttcccatttttgagttgtttagggtattgctatgctttttatcgatatggaaacctttagtttctagtttaagtccccgggaagtgatttagcgtgtcacttaacagtgttgtgattattatggtttaggagcatgtaattcgccgagcagttcgctccactcatgttgaccggcacacctgaattcgaaatcaaagtaagattagtataacagtatgcatatgtatttacatgtttagcgtgcatgttaggaagcctgttagattacattagatatgtatgttggctttgtaccattcgacagtatcacatcagtacggctagagtatgactagcgtaccgagtataggctgatattatggttgatggtaccgtactgtttgactgtataaaatccgtatgcttagagtatgactgacataccgagtataggctgatactgtaacacatcggtaaggctatagtataactagcgtaccgaatataggctgttactctgtcaaaagtaccgtcatacgaacgttcgagactcagtaccgtgtgggacacggggattaaggttgtggtcaggggtatgggcgtctgatcataacccgggatttatgtaagttttatgatttatgcttttcttactgagtttgtcgactcacagtgctatgtttatgtgtaggtaagggcaaggcaaaagctggggaaccgtgaggatgagccgatgaagattgtacatgttggggcggttgggcctgaagcatacgatcctcaggacatcagagcttctgtagttagtcgttgagcgacaagtattttgtaatgaacagtgaactttttgtaaagtattttgtaaatgggatcccaaagtattttgtatgaaatgttataagtatttaattaaataagcaaaattttaattaatcacgatttccataaacct

SEQ ID NO: 253553 - DNA, 969 bp, Cannabis indica
acctagtataaacgcttggagtgtgactatgtgaggacgaagagccagactcagcgtcatttacctcattccgcggctgggcctgctacacgggttacattgttctaggtcctcttcttgttgtacctcgtggcggagctttcatgcggctggatccctcagcgttggctgattcaagtcgatcccaccctggtcggtccttcgttccctacgagtgcggttagttcgtcgtctagtattagttacctgagagttatccgagcgggtggttggtactcgaggtggacgtcgagtcctattttgtccatcaatctcagcctgtaaagcccacatttgatcttgtaatgtcgtgtattggtcgatagttagctagacaatgccttcaaataccacggcaggtgtgataggcagaaactgccccaccgtggccgccagtgttgatgtttctccagcatgagcgacagcttttgggaacaaattgagaggtgtaatatttgttcttcccactcctctatttatggtgtcgacgggaggtgttctgttcccaggaagtgggacattcatcgtcccgatgttgattgatccattgttgttatcccaagttgtctgatttccaaccatagtgattttccttcaaaatcaacaaaatatttcattcccacagacggcgccaaatattgttgaaggaattttaacaacaccaaaataaaatataataataatataaagaggagtttatgcgagtactcaacctagaatggcgagtattcaaattaaggacacaaaatacttaataaaaaattggaaataaaaagaacacaagagagtatagtggttcagtcagatcacggtctgcttagtccactgcagcaaggatttctgtctcgcttccatttcacgttggatcactcctttatatacaaagcaagtgtcctttgaattacacagagattgaattcattatcaatc

SEQ ID NO: 253554 - DNA, 2709 bp, Cannabis indica
actttttttttttttgtaaaaagaatcatattattaagcagccacactaggcttatctgccaacaaggggacagcagcacaagagggcaaaaaatctgtccaaatacaagaagaatgagtcgttcgactccaaatggctaaagcatttgctacaacattacaaactctaggaacataagaaaactttacagaaataaaatgattcttaagagttaaaatttccttaatcatcatgccccaatccgaagaggtatctgtagcagtaagcaaacaattgataactcccaaacagtcagaattaatcataatctgaggtaaagaccatttgtgagccaatgaaagccccagccgaattgctgctgcctcagctagctgcaccgaaagtataccaggaagaaattttgtttctgcaactattaaatctcctctatggtttctaattacagcacataacccacatcccatagtatcttgaattaaggatgcatcagtagtaatggacacaaaattaatggggggaggaagccatttctgctgaaccgaagcagccttgagctttcggggttgctgcgtatcaccaaaataatcttccaactgatctagagcccatttaacccaaccgtgagtctcttgaactttattttgaaaaataaatttgttcctacgctgccaaatgagccaagacatccctattaaatgaagaagtttatccttagggaagttttcccataagaaaaacaaaaagtcaggagcatttgggattcttacaaacattttagtatcaaacccagcaaatttccaaatcttttgaacactagaacaaaaccataaggcatgacaaatatcctccttttccttcttacaccaaacacaagtagtatcaaaagacatacctctcattgagagctcaactttcgtgggaatccattgattaaacacacgccaaatgaaatttttcatctttgggattagtttagaactccaaatgaacttccaccgagcttttaagggagcattgtttgagctggcagcaatattagaatgagtgaatctcagcttataaccgctggctactgaataatgcccatgtttattcaagctccaagcaagccaatcggttcttgagggtatgggaattatgccaagaacccacgggatgtcatctctatgaaaacagctatgaacttcctctactttccaattaccttcttcattgatcaacttatccaaagtagtatgttccgggagtaaaactttagaccgaagagagaaaggaaagccccttggaatccaagcatcttcatttatgcgaatcgaacacccatttccaacacaccaccgcgagcctttaagtaagatctctctaccccatataatacttcgccaaacaatggacccataatgtcctaagcttgctgtcataaatgtaccatgaggataatataaagctttcatcactctagtcattaagcaattgggttcggtcattaacttccatccttgtttcgccaatatggcttggttgaaatcctcaagatctcgaaatcccataccgccttgctccttaagtttacacaatttcttccaattaccccaatgaagcttgtgtttgttggatgtagaaccccaccaaaaccgagcaatcattccttcaatttctttgagaatgccttttgaaattcgaaagcaactcattatgtagcaagggatcgcttgaatcaccgctttaatcaatatctccttccccgcttgagaaaaaagacccatcttccaaccttgtagtttagcttccaccttgtctttaattttagcaaagacttgctttttattcttacccacaaaagaaggcatacctaaatatttagtgtgattcttaaccaaagaaacacccaaacaggcagcaaggttctccgctaagtttgtattaatcttgcttcccacacacatttcagatttctcaaaattaatacattggccagataagagctcataccttttcaacacttctttaatcaccttgcactcatccatgttagcttcgaggaagataagactgtcgtctgcgaaaaataaatgagagagtctttgattaagatttccaaaccgtaaacctttaatttgcccagctctttccgcttcatgaatgagacaagtaagaccttcagaacatataagaaaaaggaacggagatagtggatctccttggcgtaatcccctacttggttgaaaaagaccttttgaagtaccatttaataatactgaaaaggaaaccgaacgaacacaattcataattttcattatccactccttctcatagcccaaacattccatcatagcttctaaaaagtcccattctacccgatcatacgccttagacatatccagttttaaagccatcttacttccatttccacaacgacctttcctcatgcaatgaaggctttcgaacccaataatggcgttatcttgtattattctaccaccaataaaagcactttgattttccgagatggctgaattcatacttaatttcattcggttggcgagacatttggacaccaccttataaaccacattacaaaggctaataggtcggaattccgacatctttgtaggttgcttcacctttggaatgaggcatataagggtgtcgttgatttttctgcaatctgaattatggttcagaatatcaaggcaggcagcagtaaa

SEQ ID NO: 253555 - DNA, 968 bp, Cannabis indica
atttgaattgaaccattatcatatttcaaacaacaaaatccaaaagtaaaagggaagaaagacatcgccaagttaaacatggtaaaactttcactacttaagcaacaaggaacgataaatttgaaatcactttaatttagacacgagtgtttgctgatgaaacaataaaaagcaacctcttgcagtgtgcctaaacagagcttctgaacgcgataggggtagttacttacatctacagggttctctaaaaacttaaagaagctacatttcattatttatattatctaataaatattaaaaagatggacagtagatagatcatttcttttacatcaaaactaaagcataaaattatcataaataaatataccaagtacataagcaaacagagaaagatccttcataaatctctacgaaggatgctcaaacaataaactaaaaaacctatgatggctttctaactcaattagaattaaaaaaaatatagctgaacaaaaaggtccaagaaacttgaaaccttaattctatctcaaacatgtgttcttaattgcccaatcaatcgcatcaagaacatagattatgaattaaggaatatagtttcacgtgctcgagcaatgaaactataaaaacacccagttttaccctaattagaaaagaaaagagaaaatccaagttgtgccagaggaaaaaggcttacaaattaaacaaagcctggttacgattagcaccgacattgcacttggtattgaagaacttaccaaaacacttgcagcagaggtcgattagatgttcgttctcggtgcattcccatgtcccatggaagattttgaagatggagagagagaagaatctctgttccaacaaaaacgaagttgaggaaattataaaagtagttttatttgtagccaagtacactccattaattaagcaaaaacaaaaaaaaaaggttacactccattaattgaaaa

SEQ ID NO: 253556 - DNA, 4405 bp, Cannabis indica
tcagtggctgggctttcatggttttttacatttttctcgccccctccttatacgagcattctgtcatcgaaactttaaatactttcatatagttacatggagcattgaccaaaatgaacatgaacctgctaagcaaaaaaagaacatgaacagcaatttgcgtagtctttatttttaggtacttttttatttatactgttataattaattttttatttatttataaaaatagaaataacataattttaaatggaaaaataacataatttcaaaataaaaataatttttataaaataaaaaacagtatataatctcgaaatagaaataacataacctagtggagacacttggatccattatattccacacttttaaaaaaactatacaatgggaagttggctccgggtgtgagtctagtcctttgtgactttaaggtgtttcttgcctgaatcaaagtgttttttttagctgcacattttctctttactgcttgagtcatggtgatagtgaatgaactagagaaggaaatggtgacaatagaagtggatactagggatagtatgattgctaagacactggaaagggacagtgaaatggagattaaaatgatggatttgtttgaagatttgagtttagaggatatagttgctaacaaagcttgtgttggtaaaatgatggggtgtaagaacatggttgcctctgtggtaaaaaaagattctcatgggcatttggaacttggaggatgtgtggagaatgaaaaagtttgaagatggagtgctggggttcttctttgagtcggaggctgactgcacttttgtcatgaacaaaagaccatggttggtgaatggagtcttgttaaatttgaagccatggccgattgaaggtgaagtgcgactgtcgaagtttgaactagcgcgtttttgggtggagttccatggacttcccacctgttgtctctcggaaaataatgttccattacttgccaagaaggtggggcaactggtgaagtccgacggcaaaagcaaggaggagacagtaaggtgtggttttctccgatgttgggtagatgtgtggctcagtcatccaatcccagtaggattcttccttaaggcgggttcaataccggaagtttgggttcagttcaaatatgagaaattaccatatctttgttttaactgtggcatgcttgctcacataaataaagattgttcagcaccaacggcatgggttacaccacctaaaggagcagttgtgcgcatgtatggtccttggatcaaggtagagggaccgtcgggaagttgtttttctacagcaacttacaggagagaaatcgtccaatgcaatgaaggagctaagctcaatggagttgggcagagaactagaggcaattggaagaggagaccgctggcttttcgaaaggaggttggagaagggtcttctcaggcgccggctgaccatgacagatcaaagaagaaagaggacggcagaccgaagatgttagttgtcgacactcagtcgtgtacgatgcatggtgctgtgcatggtactaggcgtcagtggattgcgaaggacgatgacgtggcaattggtgaaggaaggaaagtggtccctagtgggaatgatgcacgtggagaatgtttgaatattccccccaaaagtgtccttactgagctacctacccctgattttgctaatgtggaccaaggaaatgacatgggaattttacctgttattgggccatctttaatccaaagcctcaatataccacatatatggagttgcaaatcccaaatgccacattacttccctaagcccattaatttcaagtggcccacaaatgacccagaattacaaaagctatattgtgagcttcttgggccggactacactaacatgtacaaggcacaaccatctttaatatataatccccctaatgtctctgaaatgattgtgcatttattagggtcaaagaagagaaaagcctaccaatggtatcagcccatcccagataaattgaaagaatctccttttgaggaagaggtgcacgagactggtactatagccactgctactattgaagacaaactgaccgatgctgatgggaaggagatagccgttgagacgtttaaacttgggacaagtgggggttcgacaagaattagacgcaaaaagggcgaaacctataattccatcctaaagagaagctctggagtcaagacaagaagaagcaaaaaactggcccgagagaggaatgaaggtaattctaatagttcaattaatcttgatcaagtgctggcgcaatgtgttgaggttccaatcaactgcgtgcaaaattttggagatggcgaggaggcggccaatgtcatgcccccaccttcgccatgaggtgcctagcttggaattgtcgcggtcttcaaagaccggcggcggagagagccttaaaaaagctctctcggggagaggggttcgatgtaattttcttgatggaaacaaaggtggatgaagcgtctatggtggaaataactactagactcggatatcatgaatgttgttgtatttcttctatcggaaagtggggggtttctgtgtagtgtggaagagaaatttcaagattcaggtgtaaagtaaatttaattctggctttgaatgtgtgatcgaggaaggccacagcatagcttggactctgttgttaatctacgggactccctatgggcgagagaaaatcgccttttggcattggttgacagatatagttcgacattgtgattccaaatggatggtgtgtggagatttaaatgttattgcgaatgaattggagaaaaggggaggcaaagagtaccagaatagggagggaattcatcttcaaaatttcttgattgatacgggcggaaatgaccttggttttgtgggaccaaaatacacttggatgagaaaaaggggggcttcaaacactgttagactacggcttgacagggccatagtcagcactgattggtgtttgcaatttcctgaagcagcagtgtttcaccatctgatcttggcgtctgatcatgctcctgtggctctggatacacaaccgaatactcacaagctccattacctttttcggttcctggaagtgtggacgactgacccgagatgtggagctattataaaggaggcgtggaataaaccatactctggacaagcaggcatccgtgtgtgcaagaagcttagggagaccaaagttgctctcaaggagtggaatagaaatgttttcgggttctgtgatcaacaacttaagaggctctatgctcgtttaagtattttacagacacagcaaagtgaggcggctagtgaagaggagacagaggtgcaattggagatcattgatttagagcataaacttgaaaggatttggaagcaaaaatctcgcgaactctgggtagcgcttggtgactgcaactccaagttttttcatacttcaaccatgatccgacgacggaggaatactattcgtgcccttctagatgatgataataaatggctcttcgacagggaaggaatggggaatttcttcttaaagaaatttagttccctatttactagccaacaaccccggatagaggaagaggagttcgagatgctgtttgaaaggcatgtaagtgaagaggacaacacagagctctgtcgtgtgccttctaaagatgaaatcaagacggtagtctggaagctgaaccctttaaaggccccggggccggatggtttttcagggatttttaataggaattgctggacttcggttggggacgagatttgtcgaatggtgcaggagttttttcagtatggtaagttggtggaaaaactaaatcatactttcttgtgtcttatcccaaagagtgaaactccatcttcctttgatcagtttcggccgattagcctgtgtaactttgggtataagattattgctcgctagcttatggacagattaaagccgattttagataagttggttagtccttttcaatcggcgttccttcttgggaggtggattgcagaatgttcagtgcttgcttcagaagcgctccatgcgcttaacaagattaaaggccgaaagggattcatggctataaagaccgatatgcacaaggcttacgatatgcttgaatggggttttctgatgcgggtgcttaaggctaatggattcaatgaaaagttctgcaatatgatattcaaatgtgtggcaactgtttctttctcaattctactgaatggagcgcctctgaaacctttaagcccaaggagagggctaaggcagggggatcccctctcgccttaccttttcattctgtgaagtgaagttctttcgaagttgatggtgcgatccgaagcaagaagacaaatatcgggaatcaaagttggtaaa

SEQ ID NO: 253557 - DNA, 711 bp, Cannabis indica
tatagtaaatagacaaatagtgcgatgccaccattaattgtgtgttgtatatatatattgataatcaaggattatgtgttcaaggcataatcaggttggactcggtaaccatgaccaagatgaactattctaaggccttattgtacatagacgtgtgagcgtaacacgtgggtctatgccacatagacgtaattaggtgtgtgagcgtaacacgcaggtctgtgtcatacagacaaaaggtgaaatggcagtaatacttatgtgatattttaagtatgttatttttatttttatactgtcttgttgggcttggctcacggttgctctactgtgcaggaaagggtaaatttgtctctaatcagccatgagtataggagctgggcgatgtatgtacatgttcgggccattctagaccaagtgggttggggtctactagtgtaacgctgttttgccgcctagatcggctattgggaaaagacttgtaataaatattttgtaaaagattttcgggatcccgaaatatgtaactttgattattgggttaaagtaattacaagtgtttatttttattctgttattgtttaaagtttaaatttctcgtgcttttctgtttagtaatcccgtctaggggattatggtttctaaatcatctcgggtgacgtgcctgttagtgagggcattacagaagtaatggtcagtcggcatggattc

SEQ ID NO: 253558 - DNA, 620 bp, Cannabis indica
atagatatgggaaagaaatgaaaagaaacatatgatagaataaataatacaattatgatcaactaaagtactctcaagaaaattattacttgttgtggtgcattataaccatttggaactgcaaatgcttcatcatcaagagggatatcagctgccggccacactgaccgtacgaatgtgcttgttatccccgcattcgccttgtccagaatgcttgtgaagagaaaaaatttgactatgatttgaaacaacagggattgcctcgttgcaacctcggccatggttagggatggagcctgtgaatcacaatggactgactacctacatctcaaaaatacaaaagtaatttttacttaccatgaaaaatcaaccagagaaacatgaacactgaaatgcacctacaaagttacaacccattactacaatatttcaaaatatcaaatgatttagtttgagaaacctcaggataaacacttgttggaggtacatgtagcgtcataaaaaagtgttagagagtcccacattgataatatgtgaaaattaaataccacaagatgcatgggctacttgttgggtatcaacccaagtctcacatttgaagaatagacaagagttgtctt

SEQ ID NO: 253559 - DNA, 1798 bp, Cannabis indica
ttttgccctcaaaatttacctagataatttagggatacagctcccgcatctgcgactctaattcccaagtcgcttcctcatagaataagttgtctgaagttcaatatcatcataactcaaattacgtgtcatatctgacacatacatcctcaacatagagatgtggaagacattatgaaccctggacaatgcgggtggtaaagccaatcataaggccacttggcctatctgctccaatatctaaagaggatcgatgaatctagagttaatcttttattttttttttctaaatctacgcacccctttcataggtgatactcaaacaaatactgagtctcccacttaaaatttaatatccctatgctttaattctgtgaagcttttttgtgtacctaatgaggcgagtatatatcattcatcgtgtccttttattacctgtgttactccaatgaacatgtgtccaacatctttctcataccatacttattaaagtacctaaccaataatacatataatcatcacttttaggcaaacacttcgtcagtggaaaatattattctaagataatcttacctttatcaattataatcacaacatatttctaaaattctattaatcctcatttattatataaattatctacactggtagatagcatattaactcggtatgtccaaccattactactcagtcgaaactataagatcccacaatacatagttcataattgtgtctttctattcctcctatgggacctcctaaactggtctactgacttcacttattaacaagttaagtattcgtttatcgaaagatagtcaattagagcacttcttaattctacttattaacatatgcttaactcgataccttgtaaatatttacttattaacacatcttttcctcttggtaatctctgaaacgactattgattttgcatcctaatatgaatctttctagcgtactttttcctcacttgtacgctttccaagatgactccccaaaagatttctcatcttaagattaccccaagttaagtatgcttaactccaaggtaagcacatggtgggtcattagaaagtagattcttctttgtcgttcctacttgtatttcttatttttgtccttctgttatttaaatccaatttccatcactctgtttattattctcttacaattcctcatcgattttgttcacttatgcttgaggaatttccatcttattgtcaacttgaatcttatccatctccattaattttaacttgcatccgttttctgagtttttggctaatcacaaattgatcaaagatcaatccttcatctcaaagctatatatctatgttaggtagaaatcctaaaattccctttttaacacacccaaaaatatacatatttcaagtatattctctattttatttacaatcccttagtgtgagctatcactctaacttgtagtgagtctcccgttgatggtgttgattcatcaacatctaagactcgtatattctttttctgttattaccactaaggttttactacataattcacacgttactattgcttcattgcaatcatcactatcttcatacttggttaatcactctaaaattcattttaccctcaattatgtagtccattgtttaataaataacctatttgtgatccaacattcaccaatcactcgaatacatgtccattaaattgcatctcaatttataagcttttccccaatctgggtgagtatgcctttccatcattgcttagtaatgaaatcttttctcagaattttaatggtctc

SEQ ID NO: 253560 - DNA, 1300 bp, Cannabis indica
atgggtattacccatgaatggttactaaacaaatttaactataaatattaattttaaaaatatcaaactatcgaattttgatctaataacgaataatgaaatcacaaatttgaatttctatgcttaatttaactacttaattaaaaaaaatatcaaaaaatatctatttttacactatatcaaaaatatgttcatacaaaaatatttaactcaaactcaactttttcttttcttatttttcttgctaaaaaatcttttttttaaaatttttttttaccgatggaacaatctcagcccatatgatataaaaatagacagattttttaattagatagaaaaattaagcataaaaactcaaaattttctaattttacccattcatggataatacccattaagagtgcacccatatatatatatataatagatactaaagagagagatgttaaataagtatgaccacaaggagtattattctatgtgattgtttattatgttataacaaaaatgtaacaaataaataaatagaattactttccattttattattttatcatctcaacgtaaccttaattcaacaacttcatcttcaaaactctctcaccgattatctcttattagaaaagtggttaaactaataattttttttaaaatgtaaattattattcaaaacttataattttaaaaaaaaaaaattgtgaattggaacacaaattttaaaaaggttaattagtaattttccccccgaactttgacataattatgctccctgaacttttttgaccgttaaaaattcccccagaactattacgattgttaaattgaagaacttttatgtaattttagtaaaaaaattctaacatggatgaaagttcatggggcatgatttagtacatattaaagtttgaagggcatgatttggtaaatattaaagtctggggagcatgatttagtacataaacaatcactgaaacagtaaacttgaatgaaattagacaaaagtccttaaatctaacaatctcaatagttcaggggactttttaacgggtaaaaatgttcagagggcatgatttggtatatgtcaaagttcggggaaaaaaattgctaattagccttttaaaaatgagtattgaaatttgaaaacatgttattaaaagttgtttggtgtctttggagttttttttccttaaagctaaataaaaatttttattagtaaataaatgggacatagtttattacatatagctcattaagtagaaattacaataataggctaactgcattcaaaaaaaaaaaaaaa

SEQ ID NO: 253561 - DNA, 1026 bp, Cannabis indica
ttttttaaaagtttaattataatatgaatccttcgtaatatttaatttattactaatgagcttacaccagatataataatcgggaaaacaccaaaaatgataatcgaaaaactaaataataattttttaaaaaaatatgcataacaattcttaaattagcttctcttctcgttttttttttcttttttttttcttttttttaagagtgttcatgtgcactttatgaaataaaaacgctctttcaaaatataatatatatatatatgtatatactagatgaaagttacgtggtaaatattagttttatttaagttttagtgaattttttttttaagaattcaataactaattgtaattattttttaaaagatttgttctataaaagtaaacttgttaagaataccataattgtatatataaacttatgatgtacacattgttattaataatactaaaaaattagtaatattagaaattaaaataaataacctatataaaattgaaaaattgtaagaaaaaagaatgactaacatgttaaattagaagaaaaattcttttaaagaagaagaataaaatttgcataaaataataaataaaaaatattctgaaaaagaaattttacaaaaataataaataaatactgtaggaatgaaaagtaaaattaatatataaaacatgagaaataattaaaattaaataattaataaatataaattaaaaagttgaattataagaataaataattgactaataataataataataaatgagagctggcttttgtgggtatgaagatgagtttctgaaaaggaatgaaaccattgagagattgttgttgttggggaggtgtagaggtggtctcagagacctgtaaataccgtctcttccatacccagatttctccattgtagggtagtatatcaaatttaacaaaatgacccgtaaaaagaaactcataaataaacagagaacaaaaccaaaggtaaaagaaaaatcataaaataaagagaagcaaataaacattta

SEQ ID NO: 253562 - DNA, 603 bp, Cannabis indica
atttgtttaatgattattgcaggcacttaacagttctaagaaatcctcagccaaatggcattgctgagagaatgaatacaactattcttgaaagggttaggtgcatgttgatatactctggtttgcctaagaagttttgggcagaggctgctgtcacagcatgctacctaatcaataggtgcccttcatctgtaatcaatttcaaaattccaactgaaatgtggtgtggccatgtaaccagttatgaacacttgaagatttttggttgtgtggcctatgctcacatcaaacaggggaaacttcatcctagagctagaaaatgtatttttctaggatatcctgaaggggtgaaaggatataagatgtggagcatagaagaaggaaatcatcaaagaaatttcatcagtagggatgttgtgtttgatgaaaacaccatgtacaaggatctggcaaagaattcacacacagcaaatgagaatttcaaggagaaagttcaaattgaggtggagcaaactgggaaaattcagataacagatgatattgttgaacaggaagttgaacaagaacttgaagagcaaactgatgaagaacttggaaatgatg

SEQ ID NO: 253563 - DNA, 544 bp, Cannabis indica
ttatttccagccatttttctttctgaattattaatagaagagagaaattaattaagctatataagaaaaagaagaacagacactttttttttttgaaagcaagaagaacactcactttaataaataaacaataagactatttagtttctctattgatttacggtttatatttataggcaccacagatttggtaaaagtcttttcctttcttttttttattaggattagaaatatcaattacattattattttatctgttaaagaaataaatcttttatttttaaaagcacatgcatggcgtgacacgtgtccataaaccaatcggacgttccattgttagttagaggaatagaaatatggattcggaaaaaccaaatacaatttattaattaacagaaaaaatcaacttaaccgcccgatatatgtagcttcaaacttaagtatatcattaattatttaatgcaaaagcaaatttaaatatatcattatatatatatttttttaaaaaaaactatcagtatattgtctacaattatacatatat

SEQ ID NO: 253564 - DNA, 618 bp, Cannabis indica
cagttggtactcttaatccaactaagaacttccttgattcttagagcttccacgacttcagctgagtagtgtgtaggaacttaattgctttgtagcatatcttagcttcaataagtttgcccatattatctcttgcaacaatttcgaaaccataggaattctcatgatgaaaaagtgcagtgtccacattaatcttgatgtgatttgcaactggtttagttcaaatctcggccccatcatcactattataaaaagataatgataaagcaagagtattctaaacttttcgccaataatcaagagtagtagaagctcaaactaaaacatcataaacttactattaattaattaactctattagtattactttcttccctttacatttttcctcttaattttgagatattaatttcttattacatatttgtgatcaaaatattaaaattatttcactctatcaaaaaaaaatatatattaaaattattaatgtagcaattattaagtattcaagctatatacaacttcttaagtttttttttttttttttaactttacttagtattaaataataatttaattttaagtagtgttcattattattattattttaaaagtaag

SEQ ID NO: 253565 - DNA, 1150 bp, Cannabis indica
tagtgagctagtgaagtgcatataccatagatattttatttagacaacacatgatgattgtgataataagtagtattaagtaaacatttataggcataaaaggataggtcacaaaatataaagtttaattctataaaaataacttataatgaaattacttaagagaaaactaaaagtaattaattctcaaaattgtaatatgatttttgtattttaaaactagaaattgaaatagaagttcaacaattaaactggaataaaataatattttaaaacataaataatttaatcaagaatttaaataaaagctttgtcttctagcttggaccaacaccacctcacaatcccaacttagcctaaactcgctcaaatatagatcccaagttttaagcctcttaatctggaaggatgaacatatatatggttagtagatctagaatcaataacccaaatgaattaattattctctaaaatacagtaatccacaacaaaagatttattgagaaataccttgactctttcctaaaaaaactttcgacactagaatttccagtacaatttttcattgcaatagaatgattttccttttccttttgccttggtaccatttctttctcttgttgattttggtattggtggaaatgtttgccttagctttgattacaccattggtagaagtaataagaactttatgttcacccagaaactttctttggtgatgtggacatcaatgtttgacatgtgacaaggaggatgacgttatggagttccgtagactgaagtcatagcagttgatctgggaggagaccctagccttgcaccaggttgacttcaagagctccaagatgaaagttctaacttcaataacttgaattcaacttattgtctttcagtattacgtaccatgaagtcatagagtaatcaaatccaagccttgggagctgaaattacacaaatcaacaccttggaagccaacttgggcacctagggtttcacccatttctctagttaacattcccaacaagggttttagttttttggactgtattagtgcaaatgggtaaaaaatttcttcggggaatcaactagacataccacaaatatgtttgaggtattagaattagatctagagcaagttcattttttagca

SEQ ID NO: 253566 - DNA, 617 bp, Cannabis indica
ttctttaagtttcttgaatttcttttattctgttaaaatcttgaacattatcgatttgccaaatagaatcataagtataatttagtggtagttaatcaaattccctgtggttcgacctcgctcgcgtgagtttactacttgattacgtatacttacgtactgttctaaattttcgtaacacttgacaggtcttatcgatggaatgtcgatagtttgtcgaatatgttaaatttttgccctttttttaattttttttttatatataattttttggtacttttctctaacttaccttttttttttgtttaaaattgcaggatcgactatgtttcttgttgtatcgtacgatggtgtttggtgtgttgagggttttaattgggtttataaagccgaatgcagtttaacgttgacggttagaactgacacaaccatacaacaaatgcttttttatttagttttcaaactttgagacatatttattttttattttctactaggttatgcttttttaggtagatttttcttttatcttctatatggatttatgaatgcataataaatatttgtaaaaatattagtttaatttaattttttttattttgccttaatggataccc

SEQ ID NO: 253567 - DNA, 524 bp, Cannabis indica
tttttggagcctactatatttttatattacctcttatttactattaatagtgtagaattactttaatacttctatagtcatttttatcacttacacattttaataacaacactttaattaaaaaaaattatttattgttgtgtcgaattccacacaatatcttagcatattatttagaaaaaaaaaatttcttaaaatattaaaacataacattgtatcattatgttaacattttattgaaattttctaaatagtgtttagttaattagttttaatgtaatatttgttaaaatgaataaactatctctttttgttgaagtaaatgcatttcatcaattgttttagttcacatattcaattaatttgaaaaaacaatgatgatggtaagaaaaaattgagccatgtttaagtaaatatatatgcttaattacaagtcctgggaaacttacaaaaatactgtttttctactaaatgttttcaaaaatactgggacacggcaaactttacatttttactgtccaagc

SEQ ID NO: 253568 - DNA, 771 bp, Cannabis indica
tattttgccgtttagatcggctacaaagaaatgacttgtaatagcatttgtaaatatttttgggatcccaactgtttaaaagtttaaaaagtattacaagtttattttcattctatttaatataaaagtttaaattatgcgctattttgattagaaatcccgattaggggattagggtttcataagtattttgggtagcgtgcctgattatttagggtgttacatcaggtgtacaagaggaggcactaacctcgttacgtggatgagatataatgactgtgaagacacttagcgtataatttatagtatacaagctaagtataacatacgggtgaaccaaagcaagtgatagcaaggcgtccacctcgacataggaagacatgctcgcgatatcttcacctttgaatgagattcacagctctaacgaggcagttctcttagataaaggctgacattcaaatgatattgacagttgatgatcaccttgtcaccaaaaactgcgattgtcagatagggtgttatgcttccagagtaaaagcgacgagatttacattatcaaccttgaaaggaaataggaaaagccccagctcactatcaaggttaccgctgctatattcccagcgaaacatcccagaacgatacggtttgtaacgtatttaatacccgttattttgacccagtaaaagtgaactaatcacagttgtgtgatatttaaataggaatcatgacagagttaactaaactattcggaatggcatcaatccaatctcg

SEQ ID NO: 253569 - DNA, 563 bp, Cannabis indica
ttgagttgtggcacccaatgactcccttccgtgaatacaattgttgatatggtttcttaggtaatctttacgaggtttggctttctcagtttagcctcttctcttttggcattcagccttgttcaaagatcattcatagaaagacttcggcttttgtcatctgatggcggatacacctcttcgacattatcagttccactaacagaattgccacagtgatttgtgtcgttttgggtagtatgcttcttagctttagcgttaaatttgtgatttttcttttgagtttggcttgtagatttggacttctatgctattgggttttggcaggcttctttgatgtttcacctacttttcctttccatttgtccttatgaggaccgtaggtttcaagatttttgggatcaaccttccaggtagcattgtcttttggagcggtatagtcaattttgctagcagtggtaagttctttaattatagcttctattctcgccattttttgtgcatcaacaaagagaattgtttctgcaacgacaatttatattctacttctttcaactttctag

SEQ ID NO: 253570 - DNA, 554 bp, Cannabis indica
ttttttttgcctatgatccatttcaactcaagaccagccctgcagtagaatatatatgttcagctcattactaaaataataagagggatgagcaacattgtactcttgagcaattaaaaatgtgtaatatatgctattagaattagtcaaatatgttagttaattattgtttatagattgttataagttcagttaggttgttacttaagtcagctaagttagttaaattactaactaacttagctcctctaattgtaccattcttttatacataaatacaattcaagcattcaagcttctcttcttcttctatgttttctgttttcctcatatggtatcagcagtaaccttgcccactgcgtcaacagcgagaccttctagacactctcaagatggtgtcctccattcacaaatgagcaacctcaattggagtccaatcctgatgcaacttctgttcatgttcttaattcctctaatatgacatcaaagctcaacaatacgatctcaagttgacaatgaaatcctcgatcctgttcaatcttctctagatttac

SEQ ID NO: 253571 - DNA, 540 bp, Cannabis indica
aatactagtttttaaacaaaattagatccttagtttgagtaagttcagttgtataaataaaatgtatgtgattgatatcagattaattaaatggatttttacactcaatactcaaattttaactattttactttttaatgtgaagtggatttttttttttaaaaaaaatactgttattttttaaaaaatactgtgtaaggtttatactgtgtactttgttaaattttttacagttatttcacgattgttttacggttgttttttagttgttccacttttatttaatggttcttttttgttgttttacggatattttataaaaatactatttttataaaaaaatttcgtgtgacaataaaattataaatttttctttaaaatacaattttttttaatggttatgcttttcttgtttagcacagttgttagtgattgcaagaatttattaagtactttgtgtaatatttttttttaattttgtgaaacaatcaacaaatgtaacagatcattcctttgtaagggtctttatatctcaccctg

SEQ ID NO: 253572 - DNA, 741 bp, Cannabis indica
cttacactttggaggaagcttcttttggaggactgctgacacattctcccccacacttactttttcattaccccttcacttgtgcttattggtgcaaagatccttcgaaaacttggcatatcgtggtacttgtttaatggcatcaagaagaggaatgttcacttccacctagcggaatgtttgaagaatttccttgtcagcttcttccttcttagtattcttgaatctacttgtgaagggtggctgtatgacaatggtagggctggactgtttggcttaggtgcctccttttcatctttagactatcatcttgtggtttgggtggcactggttttagttttgggatgataggtgggtcgtattgtttctcacttcttaaggtcactacactggcattctccttaggatttttctcaggttgggatggtagttgattgcacaattgagattgcatccgattacaagattatgataggtaacccacttgatgaagaaaccaatttcttagtgattttttcggtaatttttctagcgacaatgccaatttcgatgactttttcaacgccggcagcaactctggtgacttttccgacactgtcagcttcttcggtgacttttttggcgccaacagcaaactccagcgaattttccaacaccagtgacaactccgcgcaatccctatagtttcatttgtttaatttttttttttttaaaaataagatatatgaagggaattttaat

SEQ ID NO: 253573 - DNA, 699 bp, Cannabis indica
tttaatttataacttttaaaaaataattttatttttttgttgaatttttaaatatttttctctatttgttaagatataagtttataaatataaataagtttgattttttcttcaaaaattttagtttatttaaattatttattagatttttaataattttaatttaaatttttaagatacgtgtttataaataaaataaagtttgaaaatatttttagaaatgatttaagttttattaagtaaaattaatattttatcaaattttttaagaatttttattatttttttccgtaatgtataaaatattataattgctttaaaaaaaattaaatattataatttttaagaagaattttaacaaacggtatattttaaataataaattcaaatagtgtcgcaagtttagagggcaaaatttaagatatgtaggctcaaaacaattttgaaagaagcgcaaccatatatacaaatatataaactcatttacttagagaatataataaatttcctaaaaaaaaaattaagatatggaagatcagaataattgtaagtgaggtacaagataaatgtactttttagaattactaacaagaaattacataaataacttgtgacaaaagtctattaatttgtggataataatggataatttgtaagtttaaattgtaaagaataatatatataataaataaagggaat

SEQ ID NO: 253574 - DNA, 839 bp, Cannabis indica
gatcgcaacttgaagtccttactatggtcgacactctctctaagctctcttgatcgcaaacttgaagtccttacgggttcgatcgtgaattttattgctgagttcgatcgtgattttcttgtgagatattttaaaactaaatttcagcgacatcaaacaaaagagaatactaacctcatcagtagctgattgattaggttttccacaaggaagggagaaggagttgtaccaacggtggttggaggaggcggtgggtcttcttgcagccattgctggtggtgaggatgaatactggaaccgaccattgctgctgttggaaggagggacgatgaagactaatggttctttgtcatccaaacttgggtttgggtttcctttttgggattgggattgagagtgagactacgattgaaaagaacttgtgtgaaatgtaaaaatataggaggagacggtatgcgattggaatttctgcaactggattcaggtgagaaatgtaaaaggaaaaagaacaaactttcaatgatgcaatagaatttagggagcgggggtttctctgtgatatttaggaataagggtttgagagagtgctaaagtaaattgggggaactaaaaatatagcggaaaaaattttggggtttgccgggaagaacgaaaattttagcaatcgggtttgcttttggtaatgactaattatctaatttactatatttatatattatttaatattttaataaaaatacttccacatcttatacatacacttgatcaatatttggttaaaataataatcttatttatcaaaattcttcactaaattgtacatatgaaaaacaatatat

SEQ ID NO: 253575 - DNA, 579 bp, Cannabis indica
acaacatcttagcctactatcctaaatacctgaacactccaggcctaaccatcccaatatgtacaatcatcatccgactctagactcactgctgcttagcatttgccttatccttacctacacatgtaaacatatatgtgagtcgacagacttagtaagaaaagtatagtttataaacatataactagaatgtaatcaggcacccatacacctaatcatgatcatatatcctgcgtccaatgagtataagctttgaatgttcttcatgacagtatgatcgaccataatatcaacctatactatgtactttagtcgtaccgatgtgatagcatcaatccatacttaactatattaccaaatatatatttgtcgatattcagtgtaactctatatacactaataccactcttactgatatgttatctaataggaaatcataaacacatgtatgcatgtatatctattatactaatcttacctcaaatcttaaattttgatatgccgatcaacttgagtggaaactgctgcttgacgattaaaggtgtaacaccctaactagcataggcgtgttagcgtgat

SEQ ID NO: 253576 - DNA, 861 bp, Cannabis indica
gttttttcattaattttatttcacaaattattattaataatatataatatcactagactcgatccactttgtaatgacacctcgatcctataataacaatttattattgcaactaccaaatatttaataagttttctttttctgttttatatgttcacattcaaaaattgataatatatatatgtagtaaatttcattcaagaaagattactgattggattgaaatcattcgaaatcaaaattaatatattgaaaacaaaatttattaccacttagcaaaatacagataaaatccattctttatatataaaatttatatgtaatgaatctaatgatctatattttttttataaaataataataataagttaaggacctatatatgtagaatcttatagaatattttaaaatatttatatatattgttgattggttcatcatgaatttaaaacctcataaatgattgttcagcttgattcatgtataatatagagagagtattgttaaagggtattattggtccctcgtattttttttagtgtcatactgttattgatgtaattaaataacgagttctaataagttttaaaaaatatcgctaaccaatcataaggtcatacatatgaaaggtgttggacaccactagtgcccaatagcaatactctaatatacatataagttatttatgagcattgctattgggcatgcacaagtagtgcccagcacttttcgcctcacgattgattagcgatattgcctaaaagctattttcttaagttatatgggagccgatacttaattacatcaatagtgatataacactaaggcgagtgttaggcaccaataataccttttagcaat

SEQ ID NO: 253577 - DNA, 565 bp, Cannabis indica
atcgaaaaggacaaaacagaaaggtttcttggcataaaacagtcttgatttgatctcttcaaaatcaaaaccgctataataattttccccaaagccttacttttcactctatgaaagtttattcattctcagtgttacagcaaaaacgatagaggtggttccgtacatatatatatattaaaaaatgcatcaaacccagaaaagaaaatctatcagaaaacccagaaatgaaaatatatgaggaaacccagaagtgaaatgcttgtgaacaacttcatagctagcagaaaatgtacctgagagacttactagttgagaaggtcggggaagagagagcaggtcaccggtggaaggccgaactgcggagggtggaggtgggagacggagggagtggagtgtaacagtgaacctgtgaaggagagaagcacccagttcgaaggagagataataggtgtgatgtttgatttatgatgcaatgtatgtaacgataattgtgtaatattataagactttcttttttggacggaatgcaaataaaatttaaaatgtaataaaaaaattgaat

SEQ ID NO: 253578 - DNA, 534 bp, Cannabis indica
gtggggtcgcggtggtcgttaagagaagagaccgaggtggttgttggttgtgcatgagggttaggtagattagctagagagagagactacaaaaaatcttacttttagtcacaacaaaacttgtgacaaaaagtaaaaaaacttttgactaattataaattatcatttctatgttgtgactaaaaaattcgcggctaaaggtatttggttacaaaaattataatatgttatgactaaatgtatttttacaatacttgttgtgactaaaactaaattagtaaaaacttgtaactaaaaactatattttagtcacaagtagcattttgttgtgactaaaagtcacatttagtcacaaaaatattatattgtgactaaaaagttatcactaaaaaatattagttttttgtagagagagagaaagagggacggttgtttgaaatgagaaggatattttgggaaagtaaagtgtacctatttttaacaatttggatatatttaagtttagagtttcaatttaagtatatataaattatg

SEQ ID NO: 253579 - DNA, 798 bp, Cannabis indica
tatttttaattttctgaattgtcttatttaattcacaaaaagtattattttaccagatagaatcataagtataatttagtagtaattagtccaattccctgtggttcgacctcacttgcgtgagctactacttgattgcgtatacttgcgtagtgatcataattttcgtaacagtaatcaagaaaaattatttagttattgttatttattatgattgtaacaattaaattatataaatttttacaataattatttagaaaataaaaattaaataaatagaaatataaatgaaatagaataaagattggcatttgcacgtgctaacctcacctagtatatatatataaatattatctacattaaaattaaaatttaaagagtaaactcaaatcggtcaccaaagtagtactatacaatacattcacaataacatggccaccacacagtattaacaacattaaattatacatatttagctaaagtatgtgataaagcaagtcttcaacaaacaaacaattagttaggatatcttgtattttctactaacttctgttagtttttctctctataactgtgtaatctttcttccatatatacatacaagttccctgactgagtcttgcatcttttgcaagctcatttttaatttgtctagagcaatgtaaaaagtaaacattttggaaactattatcattaaaaagaatatttagcaaaacaagactcaaaatagagttcaaaaacaataagattttttttttaattttgtagcactgtactttgtaacagtatttttttttt

SEQ ID NO: 253580 - DNA, 733 bp, Cannabis indica
aaaaaaaatagaaattctatattttaaaacaataataagtttcgatcgaaaaatactggaaaagtcagtgttaccgaaaaattcactagaaaagttactgaaaaagtcattgtcatcggaaaagttaccatcgtcgaaaaaagtcgtcggaaaaatcactggaaaaatcaccagaagtagatgtctcagatataaacaaaaatggaactagttctataacataatgaatcaaaacaaatcgtacgaaataacttaaaccgattataattgaaatataaacaattttgtaacataatgaataaaaacaaataacacaaaataactcaaacaagttataattaaaaaaaatcgattctataacagtgttataataaataaaaacaaataatacgaaataattcaaaccggttataactaaaatagaactagttatataacataatgaatgagtgttttggggatagatatggtatgggtgtaattatttggtgagtttgagcatgttgaatggatgtttttatttgagttattttacttaactagtttttgtgtgtgagtttctatcttagttgctttacgaaaccaatttttttgtctcaaatttttaactagttgataaatataaccagtttctttatattatatgcgagttattgtgtgttattatttgtgtttatttattttgttatggaactggttcttttcatatttatgcctcaatattttttaaatt

SEQ ID NO: 253581 - DNA, 1311 bp, Cannabis indica
tttctggaaccgtttgctcctccacgttgagcttcatttcttcgaagatggggcctcccacgcttggtcagtggagcatcaaaatcagaatcatagtcttcaaggatcgggcgtttacccttggatttgttggccaaagttttcttgcccattttcgatttttgtttgagaactggagaaggtgatgatgatgaacgagtgattgccatcttataaataaatttgaaaaaagatgaaactgagagggaaaaacagttgagaaatcgtgggtttagtgggagttgaaattttgtggatgaacaaaaaacgagagggaaaaaacgtgatcaataatgggtggttaagcttatgaatggaggttacttgatcttcaaaacaacttagaaacagaaggaaaaatcgaaaatgaaattgaaagaaaatgaaaaaagagagggaagagagtgggatttgattgatgagtgatggggatggcacacgtgtctgtgcatggaatgatgactaagtggtatttttgtaataaaacaaacatggtaagtaaaaaagttgatgtaggcgtgtaggggtttttttgtaataaattgtgtaaattggatttttgatgtaaaaatttcttgaaaatatccatatctaactcatcctcagaatcagaatccagagcaacacatttcctaactctattgacaacatgattatcttcagaaatctttcctttctcgactatcttctccttatctcgttttttctttgtaactaaatctttactctttcctgaactcgaagccttagaaccaccggggacacacattgataaatctttttcagttccaccacaatcagagagaggcaacaaagaaggagaattggacgattgaaggatcgtcatttcagctaaaaagaaacaatatgatcaaaaagaaaaaaagaaaccctaaccctaatattcgcttaacacatttgaaaaatttttgaaatgaaaagaaagaggaaatgaaaaattgaacaaaaaagaaagaaagagggatactagtaataccatcaatcctcctacatgattgacgtgttgtagcttctcaggctcacgtcacacgctcacgcgaatagagaagagatttttaaacaaatgggccgaaaatgtagggaaaaaaagcccaattgaaaaaatattaaaaaagaggaaacaaccaaaacaaaagggcaacaatgtgtcaataaaacttacttacaaaaacaaggttatttttataaataatttccaaatttaggtgccccataaaaatttcccttctttaattatgccataaaaaagta

SEQ ID NO: 253582 - DNA, 663 bp, Cannabis indica
atatatatatatatattgtgtttatgtgtagcttattgctttgagttgtaattcttctcctcatctctatattctctattttatgtgtatattttgtttagagttgtaacattatttaatccgtgattttgtcctttgtattatttgtcattgagttataatcatgttggtttgatatttctattggagcacagcaattttccaacaagctatacttctcctcgtaatattattttactacgatggtattagcaaggtggttacttctctccatgtatacatatgtggattaatcagttgcaagctcttattcctaagtatgtgggtcaatgagctgcaagctcttattcctaagtatgtgggtcaatgagctgcaagctctttgctatctcgtcttgaacacttccattatatattctatttatcccaagatggactcactatctcgccaatcttaatggataatagttattattcttatctcgcatctacttatatggcaacgagtttgattatctctatcaatcgtacttattgaaacgagttatttaagttgtatttaataacgtaatttaataatacaatcattgagctaattcatatttcttttgaagtacacgtgtcaagtttctgaaggaaataaaaaaaaacaaaaaaccaaaa

SEQ ID NO: 253583 - DNA, 660 bp, Cannabis indica
tatatatattgctctttatttatctatgatatgatagagaatatatatatataaattatgcatatttcctcaagattatgcgtcttcgataaaatcttgcatatatcctgaagattatgcaaaaataatattcatctttatataattgactgaaatataatgaaaaaaaataaatacatattcatatatatataaatactctataaaatttttatatatatatcttgaagattatgcaaatataatatttatcaatgtataattgattgaaatataataaaaagtgaatatgtattatcatatatttgataataatgaaaataattataatattcttatagatttcataaatatttcttgaagtaaatattttatatttgttaaaaaaaaatattatatttatgtgaatacaatcaaagaattattaaaataattattattgatacaattttatagtgggttttgattactcaaaaaaataataagaaaattgcattgaaacaacaaagtgtaagaataataatgaaaatgactaatgttatttaaatacacgagacatgtatttattgttcatcatttcctacagagaatgataaatgaattcatttaattttaaagagcggtcatattctatatattagtcatgttattatacatatg

SEQ ID NO: 253584 - DNA, 639 bp, Cannabis indica
gatagatagattatagagtagagaagttgatggaggacttctaataattttgtttatattgtgataatttattaaaaaattaatatttttgattgagaaggtaaaaaatgcgtttaattttaaaataactaattacagagttggaaaaacaattattatagaataatgtctcaatgttcacattatttaaagaaaatatatatacagaatcacgattctttttcctaaaatattaaatgaaattatttaattgtaataaagatgaatacaactaaaatgagcaaagtatataaataggaatgctttataacttttcttaatgagtagatgctttgcatgatgtatcaaaatatagatgtagttctttatatttcaaataatatttatttaatattaatttgaaatcatgtatattcaatattttagattcaaaatactagtaaaaagttatatgcgaggcacgtatactaattttatgttaggtattttttactttatagtgtaatatatattatagtgtttaagtaaatactggatgtaatatattatagtgtttaagaaaatttgataatttaagtgtaatatgttcttaagataatctaaaaataaactaaaaattcatgttcaaatactaaagaa

SEQ ID NO: 253585 - DNA, 568 bp, Cannabis indica
tatctataattattaagttgttttttagtttttaagttaattagatcgaatttctaaacattttttttttttggtttgcagccaggatcatcttcagcagcctgtactccctaggagaaatagtatgcattagttattgtaattgggtgttaatggtaaataacactcataattcataaatttatactcataaggtgggttcataattcataaatttatactcataaggtgggtgggtatatattctttcagagttaatttatatacacaggtgtgttgacgtcgctgaattaaaaaacagtcaaaattaaagcatagagaatatgttgggtaatgacacgtctcctcataatattaaaattatcaatcggaagaaatttatatatgaaggacggctgcattcttcttcatgcgatacagaacttatttgtaccaattaaaagtgaaacattaaaatgtatatatagggctcgtttgtaacgccgtattgtaatgtattatattgtgttagattgtgttgtattgtattgtattagtattatttaatacaatacaatgtttggtattg

SEQ ID NO: 253586 - DNA, 813 bp, Cannabis indica
tggaataacctatatttggactacgatatataaatctcaacttatttgtaattttttactctcgtaataaatttaaatatataagaggtattaagtaaagaaacccttaatgctatccaaactacataggtgctctcgtcctatgtcaaaagttttccttatcacattatagcttaatcaatactcacttctcagattttgtatgaaaaatataaacaattaattaatggccagacaattaaaaaaaattaagaacgaatgaattagatgcacatagaaaattagggaaagaattaaatcatattagaacaataataagacgtcaaataatctccattaccctaaataaaaatccagctactcctactcattgtaaatgattgacacaaattaaataagaacataagaagaaagaagaacaaaaggaatcgtcgaaaaaacgttgttggaaagtcttctaggttgaatctgctctctaattttgttctctctaattgcttccaaaaagtgttgaaaaatacccctttatatagctaaaaaaaatagaaaaaacctaatttctaattttcgttgtttgacatcttattatagttctaatatgatttaattcttcccccaattttctatgtgcatcgatttcattcgttcttaattttttttaattgtcattttgatacaaaatttgagaagtgagtattgactatgctatagtgaaatagggacaaatttcgatataggacgagagtacctatgtggttttgatagcatttagggtttctttacttaatgtctcttatatgttttaatttatca

SEQ ID NO: 253587 - DNA, 961 bp, Cannabis indica
aaaaatactgtaatttggattaacttttaacaaaaatgctgtcacatggaaaaagttttcaaaaatactgtgtttatataaaacaccagtaaaacacaaaacagaacaactcaaaacaacagtagaacatttacaaaataccagtagaacaccaagtgaaaacttaacacaatatactgcagtatgaaacttaataaaaaaacacagtaaaaaagtaaaaaataccgcatggcagtatttttataaaaaaattagcaaaagttagtataccatgtaaatttcctttttttttcgtcaattgtttttttttctttgcaaacttttttgttcatttagtttatttgagaagaaaaccctccaaaactctaccttaaagagcaacaactctaaaaaggaagaagagggagatatcataaaaaatttacggcatcacccacaattaaattttgaatacaattcagataatcaggccaccaaattttgctagatgccacagataaagtaaattagaaattacagaatatataaataaattataagaatttactttttatggcataaataaataatactatattatgagggttttttttttatgagattttttatgccatatttttgtaaaaagagatagaaattctatatttgtaaaacaataataaattttgctaaaaagtcaccgtcaccggaaaagtcactggcaccgaaaaagttagtgacactggaaaagtcgccagaaaagtcatcgtcgccgaaaaagtcacagtcaccggagaaaatcactgaaaaagtcgctagaaataaatatcccagagataaacaaaaatagaaccggttctattacataatgaataaaaataaataacacaaaataactcaatccggttataattgaaatataatcggttctgtaacataatgaataaaaataaataacacaaaataactcaaacaagttata

SEQ ID NO: 253588 - DNA, 594 bp, Cannabis indica
tttatacacattatttttaataaaaatacaatggattagaattttagtccttggtttgaaattgaaatgcatgttgaataattgaagagagtttgatcttttaaaataaattgccattagtctaagatctttagtcaattataaaactataaatgaaattttttctttattttttagttttattctttctcattacttgaggacaaacaataatttaagtttgaggatgtgtcaccgagatagatccatacttaatttcggcattttaaaatttatggcgggccttgagttgaccactcagttagagcaaaagaaaatttacatgtggcacctaattttgcatttaatttacaaaaataaccttaagagtgtaattatgtttttgtaccgtgggtcttacatttttacagtttatatgatgatttcatgaattaaacttattttgctgctagtgtgatttatttatttgctgtcataaatgagaatgtttattattattattattattattattattattattattattattattattattttagttgataataatttttgattgttccatcttagttttattgtttgtttttt

SEQ ID NO: 253589 - DNA, 508 bp, Cannabis indica
aatgaccataggatggtccactcctaatcactttagaataactatccaacatgcaaaccatagttaacatttctaacttttcttaagtttatgatcagggtatccctgaatctagtaatagtgtatactaagtatacaaccattccatcaatatgaggttttcttgagatcagacttagatgggacaacatacaatgtcatttactatctctaagacattttcctagaaagactcaggcagctgctagtaactaatcatacacctttcactttcatcaatatgcgactcttaagttttgggaaggtgagtttggatacaattcaaaattcaacttaataatctttgagctacataaaatatttctccaccactattagttcgcaagatctttaaccacttaccttaatagttttcaccattgctagaaattcataaaatttcttaaatattttaaatttccttatttaatgtataatctagattgatcatcttaagaatttaacaata

SEQ ID NO: 253590 - DNA, 979 bp, Cannabis indica
ctaataggaattgaatcattatgaaaagaaaatatttaatttagagggagaagaagaggcaataattggaactaaatatcattcaatttggggatcctcaaaaaaaaaataagaaaagttcggtcgttgagtgagaaatggtttattcagggaaagttacaatccctaccatgtaattgtgcacctacacgacttcatcgacgttatttttttgactagaagacgaagagctaactattgagactttgggctatccggacacatacttcgtgaaatggttcatgcatgtttgttgcctagagcaacaagatccagttggtaaggattaaaatagcccttaattttcatttttctatttatttctataatcatctatcgtagagggctcctttaccattctgtacaaatgggctattctatttgtatataagggtaaagtggccaattcaatccttgtttgtcccctagttcccatttcttctcttcatcgcgtggtagagcagcttggtagctcgcaaggctcataaccttgaggtcacgggttcaaatcctgtctccgcaaaatttttttgacaaaaaatggagtttggttttgttaattaattaattaattaatgttttcctttttgggtgggaggaaagaaccaatatactattgtgatcaactatatttaatcatatatcctattaaattaaatacattaaccccattatcatgggcggacagcaggaatcgaacccacatcttctccttggcaaagaaaatttttaccattcaactatattcacacttgtttttgatcgtgatatccaagtatggatcatattttagctgagcgatgctaaatactctctatttagtatttctatttataatttctatatatttgtatgtacaactttagtctagtacattttttttattccatttcaacgatttctataattaatataatgtattataatacataatgcatag

SEQ ID NO: 253591 - DNA, 1036 bp, Cannabis indica
ttgattgctcatatgaatagttatatcatctattcatattttagctttagtattatttttcaacgcattcttgtacctcgttaaaatacatgctagattgatgtgagccgttagaacattcaactcacatctagctttatgttgttttatgagttgatctcattgacaactgctatttttgactattcctttctagagaaaaaggtttttcaattctttgattttatattgtctgtagaaaattttaatcaattatcgtttcctttgtggaaaaaatttaaaatgggtttccaatataatatgtatttctagatgaattctagttaatatacacatatacatgcccatcaagtaattttaaagaagataaagtaattacttgaacaaactttactttattaataataagaatttacatattacagagataaatacaacatttatattttgaattaactggtaataaggccacaaatgttcactattccagtgtttctttattagcgagtcgttaagccgagctaattaataaacccaggttcccactgctgctaataacatagggaccttcccagtttgggttaaacacttcagcaaccggatctcgtgtgtttgcaaatgctcaccttaacacaaaatctccaatattaaagagccttttctaaactcttttgttaaattatctcttgattccatgttgataggctgcattagttatttgcaactgattacgcctttcttcaagtaagttaaaggtcaggtttcgaagctcttggttttctacttgattatagaattcatgcctatgggtcgcaatgttagcttctactggtagcattgcttcagagccaaatgctaacgagaatggagtgtgtcccgttgctattttctcttttattttgtgagcccaaagtacttgtggtagctcatctacccatcttcctttagcagcatccaacttcttcttaatagtatcttttaaggttttgttaacaacttctacttgtctgtttgcttggggtcttgatactgacga

SEQ ID NO: 253592 - DNA, 539 bp, Cannabis indica
aaaaaagctacctttagtgacaacctcttagtcacatcataattttttttgtgattaaatgtcaattttagttacaacaaaaaattacttgtgagtaaaatctaccttttagattcatgttattaccaatttagttttagttacaataagtattctgactaaattaacaaattcagtcataacaaattataatttttgtgcgtgactaaaggtattagtcacaaaaatcataattgattgtgaataaatattgtacttttagtctaatacttgttgtaactaaaagtaaattagtgacaacttgtacttaaatactatgttttagtcacaagtagttttttgttgtgactaattaaaagtcagtcataaaaaaaaatttatgttgtgactaaaaattactgtttttttatagtgcttataaaataaaatagacacacatataattaaatatttaaattctattttacacacgatgaattatttaaattttttttgaataggttaagtataataataatgtgctccaagaacaaagaact

SEQ ID NO: 253593 - DNA, 813 bp, Cannabis indica
atactatatataacattcataaattactcttttcaataccaataaattctaagatataatctcaaagatcctaacatcaaatcatttggtaagatacaattatttaaaaaaaaaaataaaaaatgtaatatttatacttacttgtattttattttatttttcttctaatttttcattttgttggctcacgaaaatagtttagagattttatgaaattaaagggctcccaaaatttctaatttttataacattaaaatttaaaatactaataaaaattccaaaatagctcacatcacatcatacaatgggaccatgaatcaatcatgtttttcatcgactttactcacttaaatattatatatataaaaattagattttatcccaaaaaattaaataaaaaaattgtctataaaatcagattattaaagggttcttttctcttgcataatatttcttcttctactctttctctcatctttgaagatgaaaattccaccatggttaattttgttactactgagtatagctcagtttatgatcagttacggtgctggtgcagtggagctcagtgaggaagcgtccacattttcgggcccagaaaatggtgggcttagtagagcccagtttccgatgggctttgtgttcggaacggcgacctctgcttaccaagtcgaaggcatggcccataaagatggtcgtgggcccagcatttgggatgtcttcataaaaaatcccggtcagttattattattattattattttgaattattttataaatactcaaaattaaaaaaatatagggtgattctaca

SEQ ID NO: 253594 - DNA, 2188 bp, Cannabis indica
cacccaatgtaaggttctcatactttatatgtgtttatttataatcgttttagaagttcataattaggatgttaattaacatacttgtgagtagatctaagatcctggtaaaattatttccaacagaaattgtacctgtggccgaggcagatacagtaaaaggtttagaaaatgatatgcaactatggcatcaaaggctcagacatatgagtgaacaagacatgagggaattcacaagaagggagtcattaaaaagcttcagacatgtgcattaccattctatgagacttgtatttatggcaagcaacacaaagatcaagtttacagcagcaactcacaacacaaatggagttctagagtatgtgcatgctgacctttgggggctaagtagaatcccaacacattcaggtaaacactacttactatctattattgatgatttcagtagatgtgtttggacctatttacttaaaactaaaaatgagtgtctagaacaatttaagatacgaaaagctcgggtagaaaacaaaacaaatttaaaggttaagacacttggaaccgataatggtctagaattcatcaacactgaatttgatagattgtgtaatgaacatgagataacaaggcataggacagttgtgaaaactccacaacagaatggagttgttgagcgtatgaatagaacccttttgaacaaagtgagatgtttacttcttagttcggggttgggaaagccttattggggagagggctttagctactgcttgttaccttgttaataggagtcctaatagagtcatagacttgaagacaccttatgagatgttgtatgggaagataccaaacatgaaacacttgagagtgtttggatgtgcaggttgtacattaatctaatgataagctagatgctagatctgtcataggcacatttctaggatatcctataggcaaaaaggttatagaatctgcataaaccaaaatggaaaacctaattaaggtggttatttctaaaaatgttgtgtttaatgaaaatgattttcctcacttgaaagctgagaaaggcagtgtgttacctgatgcagattcatttggcaaatgggaagatttggcagagtttgaaattgagcttaaaggatttgaaccaagtgagaagaatgacaacacatgcacaacttcatataagaataaggaacaaccagatttatctgactaccaacttgctaaagatagaaccagaagaaaaatccatataccaacaaggtttgcagaagttgatctgattgcctatgctttatcaatagatcattcatgtgatatactagaaccattgagtatagaagaggctttaaatgaaaagtacaagaaggaatggtcttgggctgtggatgatgaattaagctcgcttagaaagaacaagaaatgggtattggttccaagacttgaggataagaaggtgatctcatgcaaatggattttaaagattaaagaaggtgaggtagagaatgagcctgtaagatttaaggcaagattagttgccaaatgtttcactcaggtggaagggatagattacaccgaggtgttctcacctgtagtgaagtataagaccattagacttatcttgtcaatggcaactcagcaaggtttaaaagtggagcagcttgatgttaaaactgtgtttctaaatggttatctagaagaaaaaatatacatggagtaaccacctagatttcaggtggaacaagatggaaaagagatgatttgtaagttggaaaagtccctatacggccttaagcaatcacctcgacaatggaacaacagattcgacaactatgttcaggagattggtttcacaaggtccaagtttgatcacagtttgtatttcaagcacctagaagagtcagcagttgtgtatcttctactctatgtagatgatatgttaataatgggcaaagacaaagcagtaatcaaaggaattaaagatgaactcaaggcagaatttgacatgaaagaattgggagaagtaaagaagatacttgatttagaagttcatagatccaagagtgatggagtcatggatctaaagcaaaagaactacattgagaagatcctaacacagttcaagatgcaagattctaagagcactttagtacctcttggaggatagtttgtattaaccaaggaagaaatc

SEQ ID NO: 253595 - DNA, 420 bp, Cannabis indica
tgaaagagagcagttttgacttcgtcaaaggtgaaaggagatgagaggaaagttgattgagtagggatctagacttttctggagatcattggcctttttgacgtcataaggggaaacagtaggacccaccatgagacgctctatatccgattggatatttttgatacgatttgagaattgatttttatttcgaccccaagaggacaaggagacagaacaattattctgtttagacagaaaagtgaggatggggttattggaggtggaagaatttaagtccgtacaccaactttcacttaaaagcttagggaagtcaggctcgagtaaccagtgattgtcaaaacaaaaagtggtattgcgagcaaacataacaggattaccatcaagcaacactttaagcgctctatgatcagaaccaaa

SEQ ID NO: 253596 - DNA, 801 bp, Cannabis indica
attatattatattgtattaaattataatatattatattgtattagtattatttaatatgctattatatgttgtatgacttttattaatagattatgtaaagttataatgtattttcaataaactcaatcccaacaccgattacgagtctagtctcgggtcgcagctccgagtcgcgagtctaggtcaaggttcgggtcctgggtttgagttcgggtctggatcggagattgaggttgaccaaaatttttggtcgtaataattaatataatgcattactttatctaaacataatattatttattattcaacacgaaccaaacaagcccttaaagtagagtaagggccgatcctaaggtatatagaaccttccggcccttgaagttacacactattttcgattttattgggattgttgctatcattatgcttgagtgttattttttctccttcttctttgttcagatgtgtatcttatttaagttgttcattggctctgaatttgaatattcacttgtgttaatcatagtctgttaggataaagccctacattactgtactacattgctattgttatggcagtagggctttatccattcatgctaggagattttagtcttgtttcttttttagacattgagagaatatcaattgggccaaagcttgtttgttcgtgttagtagcgtgactatccttgtccatgtttaaattgaggatattctcagatttttattggccttatagtttatggtgcgattgtttgttacgacttttatcgtcatagttgattatttgattatttc

SEQ ID NO: 253597 - DNA, 786 bp, Cannabis indica
tcttgtctcctggtttccgtcgttaatgtcagtaaaagtcctaactcgcatactgcggtatgatactgcagcttagatatagatcactcttcaaaaatattatatttactttgaatcgtgctaacgttggacaatttgggactttccttcgaaacaacaatgcttgttatattggcaaacattacaaattttattttcccaactttgaaactgtctatattgatgctttacaagctttacattctgaactttggggaccaacacctaatggctatagatattatataagctttattgatgcttataatagacacacgtgaatttatatgctaagaactaaaaatgaggctttatccacctttgtcaatttcaaaatacaagaagaattacaattaaatgctaagatcaaacttatacgatctgactggggggtaaatatcaagctttgactagctttttataggctaatgacatactacacagagtatcttgtctccatactcttgaacaaaatggtataactgaacttaaatatagacacattgtagagagtggtctcacattgcttgctcaagcctctctacctttcaaattatgggatgaagcatataggtcaattgtttttctcattaatagaatcccaacccctcaacttggatacatttcccctttagagaaacttttccaagtcaaacatgattactcttcactcaaagtgtttggttgtctatatttcccaaatcttaggcctaacaataaaaataaaatgcagtatagatccaaacc

SEQ ID NO: 253598 - DNA, 758 bp, Cannabis indica
ggtgtcaccctttcaaaaatcaatggtgcgcgatcaaaagtccaaggacttccatcgataaccctttcaatatctacctcatggtaaaattgaaagaaaaaatgatttggaccgagttctttgacatacatacctctccccggctgccaaagagtggccattttatgttgcatagcctgaaaatctactccctgtttggttaggaatctccccacaagacaccaacgatcgtcaaactccaatagatcttcatcatcatcatcatacactaatctgcccatctcctcctcctccattgcatcattcataaactcctccgccataccgtaaaaaactttgataagaagtacgtagactcaattacagaacaaaacaaaacaatactttttagaacccaaccatgtcaatagacaagactcaccttgcatttacatttagtatgccctattcagaaaaaaagatatgccctttttcaaaatttgaccaaactgtttgggtgacagtttttattcttggtctttgtgattgtgggtataaattcaaaaaaaagttattatgggcatatttattttaattattagctttttattaacttttatatttaatagggtattatttattttttaagaagggaaattttatttataccttaaaattttttaaagacactcaattttaatattttttattttatttaaaatttatatttttaattgtactaagttttttaacttttttcttccaattcatattcttaa

SEQ ID NO: 253599 - DNA, 563 bp, Cannabis indica
aagcaacactcaatgcaggcacagtcattgtcacattctaccccaatttctgcatgtccttacgggataaacggttgctagatgccttgaaagttcagctgcaaattgtgggcatagaccaagatcctgattccctaggatccacattacactatcaaatggcttacagggtgcaaaatcatgccattgacatctcaattccgggaagttcagatgcgttgatgataactgtcgatacaaaccatgtaccaacatgcattcacattcctcgccagatcacaacagaagaactccaacaaatacttccaacctcatggatcaccaactacgaaaagacccaaaagccactaccatcagttcactcagcagatcccgtgttcaagtccaaaaaggatggttcaatcgaaatatccttcccaaagaatgaaacaactccaagagttttctcaactcaatacatgatgtcgacaatcatcccagaagccgcagaaatatcatccttcgataaaaatggttcccctatatatgcctttaaatcaacttcagggcacatatactgggac

SEQ ID NO: 253600 - DNA, 557 bp, Cannabis indica
aagaagtttgttgatttcaatgatggagtcactcaaatagatgttgaggctactgttcaatctggtgtgaaagcagttgagattatggtaacgttaattgtatgattttttttttggttgtttaatggttgtgattgtttagatttttctaattatttttttaagatataaaagcagatgtcttcagggggaatttttggtgattctggtaaccaggttccagattctaaaaatgttgagcctacggatggtcatgttgtatgtgttgttgaggtatggttgttttaccatttttgttaagttgctcaacactttttgtattaacactgactttatgttttttccctctttgtttttatatttattcttagatgggtacagcaggtgtcactgttgattctaatattcgacttgttgaagatcatcaaattctcgttaaagaaactccgcttcttgacaaaaggaaatctaagaaaccaatagctttgacgtctctgtttatggagtttgactctttgttttcaagttctaaacatggttctggttatggagttgtt

SEQ ID NO: 253601 - DNA, 1265 bp, Cannabis indica
taattttgggtcctatgtcacgacaagggtaaatcaagtctattccaaaacactgtcttaaacccacataaaataacctagggtttctaaccaaaacttatggtgaaaacaccctaaattaaaatacatattttggctatagtctatgtctcatattgtagagctcttcataagcttcgaaatggtatatagaatgtctaatacggacacccaagtgaaaagttatggctaaaatacgaaaatcggcgattcttcaaaattgaccatccgaaattctggttggtgcaaccctgtaccatccaaaattccggttcaccacactaaaaactcaaaaatttcaaatcttcaaagtcccaaaacttgttccaaacctaaccaattgtttccaaacatcatagaacagttttataacatgtatacaacatatctcaaaactcaaaatcaacaagtaacttaaaatacaaacttcaccattgttgtgtaaaaactaaacaccttaaaccttatttcttcaaattcatgcataacagacctaatatccaatcaaactaagcttaaatcataaacaattcaaacctaaaaacatgtcttaactccagcaatcacacatactcgaaatcaatataaaccccaaccaaaactcaacctataacacaagaaattcaagagaaaagaggaagaactcatgtcacaccttgtgtagcacctagggtaaataaatatagcttaaacttggtggaattgatgaagaaaatactcttagttgctactgatttctacggctcgaaggggtagaaagaaaagagagaatgaggttatgtttttttttttgcttgaataatcttcttatttcctaggtaatacataaattaaaacataaaataaatttactctaactttctaattcagccaagaaagcactaaagggaaaaaataaaataaaacttttgtaaatgactatgttaccctcattaaaaaaaaacttaagttatttactaatgtaagggtattttggtcaaactaactatcccgacttaaaccaatatctcaatttttaacctagtccggtataattcaaatataacatagttttaaccatcgtgacatttctcattactccatcgagttccacagttgtcaggcccaaaaatattttattcgaattatggtatctacgatatccacatattctaatacaagctccgtaattaataaattgcgctttattattaatttactcatatttctctaatcaactcgtaatt

SEQ ID NO: 253602 - DNA, 1608 bp, Cannabis indica
tttgaaacatttctccagccaagtgtaagaaataactgacacttgtcactagtacatgccgccacatcatagtgaaaaaaatgggataatatttgctcccaagtctgcacgggacttctgaagtcgcgcgttgacttcactcaatttgaattcttgtttgaacgggtggcacatgttcgatgcgcctgttggtgatccgatgtgattttgaccaaaggtctctttgatattcggctcataaacgctgattgattcgtacctcgaaatcttcctgagatttgcatgcttttgacggttgctcttcttcaggtacttgattacttgatttcccaacgtttactattgggggaaatcgaggcatttaaatttcaaaacgattacacttcttcactaatttgcttataaatagcgcaaaaagtcttaataaaccatttttagcatttctttctcgacgatttcagagcaaaaacatcttttccttaaattcttcaaagaatttccagaaagtgtcgatcagcattatccaagcaatcccaaagcttcgaacagtgagtaagttcttcatctttttattctttaatatttgaatctatggttttctagatttcctttgtagaaaattcaatagtcttgaacttgttttaggaaaaccggagagaatctaggttttggaatatgaaattttgattgtaatggcattctgactttaatttaacgataatcggtttcacttgcccattcggggtttagtgaagattaacccttaatatgaagtcttgaaattatcgggttataaacctaaatcatgcaaatttcccctttaatccttggtcggcctagtcagtatacttattagtttttgttcgatatcccagccaaatactcatcttgtgtcctaccttttgtagatgaaccctggtgagctttgggaaggagaacatcgtatttaccaggatcttctccaacttctgtatgaggattaacctcgtctctgtgctagtccatcttcatcaagcgacggtctttctaatttgagtttcgaggactaggaggtaagtagtgaatgcacacttccctaaaactcgaggtgcaacataatttctatcctgacaagatagcgcgtgaaggttatgaatgcttcatttacgaactcaagaaggggtggcgacgatatttgtcgtctagctagacatacatcgtccggccagatatagttgatactatactcgtgggtcgaccagatcctgttgccgttggtatacctattgccacctttgtcgtgaccgttgctaggcacaccaatcaaatgtcgccaaaggataggatgatggcccgcactaaacaaacaatgcaaagaattgcttcaactgatcctcacgtggctcggcttgccacgatgtcgagcgctgaacaagcctagcctactgctgaggaggaggataatgaaggggacatcgaagtccagaggtggaggatcagggtgaggtccatcctgacagtccatctaaagctgaggaggaggaagttgctcggggatcgcccttcggtggttacaatgaggaaggcgaacccgtgtccgaggccaatgaagtcttggtagaaggtgag

SEQ ID NO: 253603 - DNA, 523 bp, Cannabis indica
gacagctaaagcaaagattctccaatcagatagttcctcccaagataataatgtagataagtcgagctcagttttattacaacccttacaagggcataacaagcttagtgtagatgttgcagtaagaagtcatgttaataaacatagatatggggccataattcaagattctcatgatagagttatagcaggtttccattcttctgcgatttcaagtttttctctaatctttcctgaagcaaaggctcttctctgtgctttacactggtgccaaacgatccatttttctatcaaccttgtggtcttagattaccaagtgttaatctcgaaaatccttaagaagatgagatatcattcaaccttgtctgatctgatttggaaaatcatcgactctttgtcctcttttcctaatgccacaatccgattcgcacccagaagcaacaacaaattagcacataacctcgcccaagctgcattaggaacatataaagagtgtatttggaacaattgtgtttcaaatctt

SEQ ID NO: 253604 - DNA, 851 bp, Cannabis indica
tgcagttgaaattctgcatagtcgacaagtaaatcttattagttttctgatagttttctcagggccattcttgcatgatttttttcatcccccttttggtcttacttgccactatttataatcacatagtaggcagttaattacaaagttgactgtaatctttttacaacgattattccctggaatcgtgggatctgattacatatcacgttaagtaaacgggatttttatttaaatttcacacagctgtgaatatcccgcttttactgggaaaaaatcgatgcgtattaaagatatatggtaggccttgtcttattggaatgcctcgctgggaatggagccgagttaatctgatggcgagctggagctcatcatattgtcttcccaaggttgatattgcttttattttaattctgacaactacattttttgatggcgagatgatctttttcgcgtgcatgctctcttaaggcgaggtggacgcctcacttatctctcgctttggttcacccaccgattatacttagtttgtacaccgtacactatacgctaagtatcttcattgtcatcatatctcctccacgtaacgagattagtgccttttcttgtacacctaaagttacatggtttctcgtcaaagcacaaggcaacagtttgtacatttttatctcgcataagactgttcagtcagccgagttgtaaacatactcttgttaattatacttttaacgagttattccatttcaagtgtaattatcattacgtgtttgagttctttattcttcccagcttgacacgtgtcttcctttgatgtgcttgccgaatttcgggtataataattgcccttaaaa

SEQ ID NO: 253605 - DNA, 2072 bp, Cannabis indica
aaaatatgtgaatttgaaactaaatcacatattgaattaataattattggagattatattcctggaaagtcaaggcagctaaatactatagtgaggaggggtgtaaagggaatgcatgtgtttgatcatgcaattcccatgtgttgatcaccattgttgcgtaattgggacttaaatctcgaattgtattattgctgactcaaatcaataagttgattaatcatttgtttgattctcattatttagttagtgtgatcttgattgttgttagtggcataacaactgcattagggtgaagtaatttcattacaatatacatgtaactaatgagacatgtgatgaagtagctcatttgaatgaagaccacaaaccaaacgattaaacaaaacttcaaacaattataaaagccaataataattgtttgtgaatagaacgttttttcttcgggatcatattgggtatcaagcgaattacgtaaagctctaaggacattgataaaactacaattcacgtgcacttacgtatatggtcaaatcaatttgtcaaattgcacagcctcgttaaagctctaaggacgttgatacccaatatgatccccaataataattgatttgaccatattatctaatggtcaaattgcactgcctcgttaaagctctaaggacgttgcatacatgagtattgtttgaggattcactatataccactttggtttaatttcctatatttaaacacttatatatataacgttattagttttgtctattgacatggtttttaagtttctctctcggtttaagtttcttgcttgtttttatttggttcttgttttcggagtcttggttgttgttctggttcgagtatggaggagggtataggcgtgcaaattccgcttgaagaagaagaggcagctgtcttatcttatgaagcaactgctacagtcaatgccgactatgataacagatggtgtatcattggaaggttcttgactgaaaggcaaattgactttgaggccatgcaacacttggtggcgtcgctgtggcagccggggaaggagatgtttgtcaaagagttggatacgaatcgttatctcttccaattctatcatgagattgatatccaaagtatgatgaacggcagcccttggacttctaacaggtttttgttaatttttacgaggttgcagcgggggaaagatccaagattggttactttaaatgaagtggatatgtgggtgcaattacatgatattaggtcagggtttaaaacggctatggttgttaaggatgtagcaaactatattgggaaatttgttgaagcggatgaaaggaattttatgggcttatggagggattatcttcgtgttcgtgtcactttgaatgttacaaagccattaaagagacggatgaagctttgtaatactgacaggattgaattctgggttaactttaagtatgaacatcttcccactttctgttttatttgtggcattatggggcattctgaacgtctttgcccacggcgtttcgaggttggcgagggtttgttagttaactcgtatggcaaatggatgagtaaggcctttatgtaaaaatcatatgattggagcgaaatggctcaagcaattcatgactgccatggatgagcctgcaacaaccacgactgctcgttcagaggttcgattgaggatgccgacaactgtaggtggattggaggtgttcgacgatgcagcgaacacagtttatcgtttgttcagaggctcgacgatggcttctcaaggtcgaatggatttggggctgaggatgatggagccggagtcgaggatggtggagtaagagtcgaggttggtggagtcgggtccgaggagggtggagtcggggaggacgacggtggagtcaggtctgaagagggtggagttgaggacgatcatggtggagtcggggacgatcatggtggggtcggggacgatgagggtggagttggggtcgatggaggtggagtcggggacgatggtggtggggaccggtccgatgttagtggagatggggatgatggggacgggtcagtatcgt

SEQ ID NO: 253606 - DNA, 791 bp, Cannabis indica
tcaaactgactggggaggggagtatagacaatttgctagatttctaagtgatcaagggattcattttcatcatccatgtcgacatgatcatgaacaaaatgggagagctaaaagaaaatataggcacataactgaaactagtttggtgcttcttgctcaagctagtttatctttgtcatattggtggtatgcttttcaaagtgttgtgtttactataaattgacttcttagcacagttcttggttttaaatccttatgaatgcttgtttggaagtctaccagattacaagatactcaagccctttggttgtgcttgttttccacacttgaggccatacaataatcacaaattggaatatagatctgatcaatgcatttttcttggttactcttctcatcacaaaggttatctttgtgaaaattccaaaggcagaatatacagagctaggaatgtagtctttcatgagagctacttccctgctttcactatctccaatgctaatcaggtacaaccctctacctcatctccatttactacttcttcattttctaatactactactggtgctaacaatgttcctggttgtgctactgtctcaaccaacactcccttgcccaaccaaaattctacaatgcccacccaagcacctagatctaatcaccctatacccctgcaacatctaagcaggtcaatgcccatcattgctcctaccctgcagcactcaccaatacagtttcccacactagaaataaaccaacaaagccctaaaattaaccaacaaagcccagaa

SEQ ID NO: 253607 - DNA, 545 bp, Cannabis indica
ttcctcttggtggaaccatagtcgagcagcccttctcgattggtggtatgttattcttctcgtctaaatttccctctcaatttttaaccctcttacttaactctactgctattattttcattcatacttggttgacacaccacacctctgttaatagttatttaaactagaaacctctttgcataatttgggtagcttctccaagccagtgataggcctccacttactattgtctatgctaagaaaaaagaggactaggaaggctaaggatggggtggcagcagataattaaatttaaatctgctataaacttctgttatgtgggaatttattgggtagtactgaggtgtatgataagcctcatgagtattagcaataagtaatagtttgtttctatgtgaaaaggtgtctagcattttaattgaactctttgtgaatacctgggattcctatcaatacaattccaatttccatctcagcttgttttttcccttattttactgctgaatattaatttgtccaggatctggctctagttatttgta

SEQ ID NO: 253608 - DNA, 676 bp, Cannabis indica
atcttcaggtactcataagatccactggagaaaatggacccacatttgcagttccaaattctttgagggtctagggttcaaggacatcgttcaccataatcaagccacgcttgctaaacaagcctggcacattttttccaacccaaactccttagttacttccctactaaaagctaaatatttcaaaaacagtagctttctccaggcctctattggacactctctttcctactgttggcgcaacattttttggggcagggatcttctctaaaagggtttaattgtgaaagtgggggatggtcaatctatttccatcactatccataaatggattcccaactctagccacatctcttttaaggataactcccctccccccgaggataaggtttctttttcatcaaggaggatggcacttgggactctctcaaactcaacaatttctttccccgccatatagtggactccatcctcaaagtgcctatagatcccataagcaagggcagtctcatttggggtaatagtccttcaggcttattgactctcaattctacttatcacttggcaaattccacctctcctcaaccatcttccttttctctagacattttcaaaccctggtggaaggcattttggtcttccactgtgcccctaaggatcaaacactttatttgga

SEQ ID NO: 253609 - DNA, 1295 bp, Cannabis indica
aaagaatagtatataggataattctcttttattaggggcttaatttaagttatagttattataggatatatttttgcggctactgttttcgaatttgaaattgtcacaattttggttatataaaaaaggttatcattacgctttttttaaaaaaaaaaaaaaatagatcattattataaattgtgctatctattataaaagaattgttatagaaactcttaatgatactaaaaaatagcaagtagaaatttttttttcctagcctgccactatatatcaaactgtaatcaacgcaatagggggcatttgcatcaattacagattaacagaagtccaaagttattgtttacgaatcgatacaattggagatgagagtttcaagtattgtttgccgaccgattcaaacgctcaactttgtcaattctagactgacgcaaaaacttaaacaaatatgcctactgaatatagaatttggatataagatgaatgaggttctatctcaaaaccaattggcaataggagtagcctattactcttatatattctattatctttccacacattaacaatgtgcgactctctaacacacgcggatggacaatattgtgctagtgataacacaaactaaaccgaccaatgactaccacccccaaccttgtccgcgcgaaaatacaagctagttttatagtaggtttaatagcattcattccaaacatcataaacaataaagctgatctttcgatagtttcaaaatgttaatttcagtcttttaaagaaaatgtgtacctcttagtccgacagtcaaagaagagttgttgttccaaacaggagcaccagaattcgtggtccaataaggagagtcgtaagcacttgaaggtcggtactgaaatcatttaaaaagaaacgattacgagtactaatgatcttaaaataacaaatgagtgataaccctgtcaaaatgcttgaacgctaatataaactaaaatataaaatagctaattaagaacttaggtgaggtttgattagaggtaataaaataaaatggaaatgaaacaatttatattctattgtttggttacattttaaagtattgaatatcattttaatggaatggcctttccaccaatttagtggaatgactattccattttgaaataaaagaaaagactattccattttgaaataaaagaaaagactattccattttgaaataaaagaaaagactattccaatgcaaaatttgaaaaaaatttaatattttttttatcaatttttgtatgcattttaaattttat

SEQ ID NO: 253610 - DNA, 1104 bp, Cannabis indica
gcataaaacccaacacaatgttcctttcttgggttttactgatacctgctcacaattcccactgcatggcaaatgtctggtctagtgcatagcatagcatacatcagacttccaactgctgaagcataaggaaacattctcatatgttctatctcttggagatcagtggggcactattccttagatagtcccaagccatgtatagaaggcataataacccctttggcattggtcattgaggaatgctctagctacttatcaatgtaagctacttgcaagtgagcaagtgatctattattccagtttctaataatttggataccgagaacataattagcttcacccaagtctttcatttggaattacatgttaagccattcgtttacatcggtcacctccttgacattgttgccaatgactaagatgtcattaacataaaggaccaggaatactaccacttgattatcattgtgttggtaaacacattgttcatcttcattttggtgaaagctgtaggatttgattatttcatcacaccttttgttccaagagcgagaagcctgcttaagtccataaataaacctatttatcttgcaaactttctcttcttgtcctagaagtttataaccttctgcttgctccatatagattatctcatcaagaatgctattaaggaaagctatcttgacatctatttaccaaatctcataatcaaaagtttctgttatggagagaagtatcctgatggatttgagcatggcaattggacaaaaagtatcctcataatccacaccttctctatgggtataaccctttgatacaagtctagctttaaaagttttgacttgtccatcagcaccttttttctccttgtagacccatttaaatccgattggatgagaatcatcaggtgcatctacatattcgtagagttttttttttaatggaattcatttctgaatccatgtctgttgaccattatttctgttccgaaatcatctttaactatttataggtcaatgggtcgtcattaacaccgtcacgaaaaaccatattaatttcaccatctaagccataacaagatggttttgtagaaaccctccc

SEQ ID NO: 253611 - DNA, 484 bp, Cannabis indica
ggtttgttcaagcttgaaggtaagtttttcaccctgttctcccagttttattcaagtttcaagttagatataagttacggttttggttccgggattggggtattaaactgaagtaagaataagtttctaggcttgaattagagtttatttaagattgacttggttataatcagctcagttagggttgagttagaggaattcaggatttctaagcttaaattctactttatgctatattgattaaattaatgaattgttgtgtattaatgcttaggatgtgttgtgtatatgatattagttttatctggagtggttgggcaggtgtggttgagttttggttcgagttggaggagaaaactcaagattacaactctgcagaaccggtcaaccagttggttctggtgcagcagaaccagtcgaccagtttgcttgcaggggaaattttcagttttcttcactattacaaaaggccaaattcgcgacg

SEQ ID NO: 253612 - DNA, 569 bp, Cannabis indica
aaatcagctatttagatgagttacaagaaccagttgtagtattaatacttatatatgtacgtcttttacactgtaattttcacaataatccatttcaaaagcaccactgaacccatagtgtctccattctgctatagttttgatcataaagatgttttctgggatagaaaggttttattgaagaaaaaaaacaataaatgcttggagctaaagccattatgacttttgctcacgctcacggctaagtaacacgtaatagcaaagtggtaatacaaaatatttaagttctcataaactcttgtgcaaggagaaaaacataccttcactgaccagtatggaacagaaactacacggtgttcatcaacctggtaatcaaaacaattacgaaagaaaaggacagaaagtcaataatcaatagagcaacatttcaagcaattcatacagacaatcctatttgacgacagcagcgacatgtctgtgtttgtcattatacagttaaagcatgtacatttaaatatacaaaacaaacaagagaattcactttgcaatgaagaatgttaactagtgta

SEQ ID NO: 253613 - DNA, 535 bp, Cannabis indica
caatcttgatagaaaaaactaccgtaaccatctggcctcgacgctttatccctggaattgaaaacacaaccctcttcacatcatcaacggaatagggagctaataaaaatatcttagttatctaaaataattattatttgtgagataaatatttacttaggtatcttaaataattatattttgtgaataaataaataatttgtaatactcccacatttattatgagagagttttttcacaacttcaaagaatattaatatatacatgtatatatttaaactattctataaattatgtaaaatattatttatagaaagtataataatgcttctatagcctctttgagaaccaaatttctcaaccttttccccttgtaatatatccccattataccaaagctagtcacttaggagcaattcaactacaaaataggtagtcttcttaacaagaaagagtaggtgtgtgtgattgtgcctcatgggagcgctatggctccctccctctattctttttttaagaaaagggctaatgtgac

SEQ ID NO: 253614 - DNA, 764 bp, Cannabis indica
gaatctgatatgaaccttaaacctcggttctcaacacaatacaacataaattcaatttaactacatggaataaagattttacctcttcaagcctatcataggatccttgtttcttttcgtatacttgttcgaacatccaatccaaagctttatgggcttgatgaataatccacaccaaatttttcaaatcaacatcaacactcagaataaaagtgagcttataaatataatatgatgagtgaccaattctgattacagtatattctcaactcataacacactgtaatggagattggaaaaaaccacacaaccacacttagtacgtagtgtgttgcgtgtagagaaagagagtgagatgcgagagagagagtgagaaaaacttgctcttttatgttacatatatttcactcttatatatatatatattttataggagaaggttctaatggttacattaaatatgtaaccatcgtggttacattttttttagccattagattattattgaatggttatgaataatttggaaattaaataaaaataaataataattaacttataacctaatagtcacctaataatttattttcttataaaactttaatgaagattaattatattttaaaattaaattaattataattattaattaatttttcttaatttattattcaataaggatcttttagcaatttttttatcctaaaattattaaaatttttatagcaactctttataatttaaaattatacacatataatttc

SEQ ID NO: 253615 - DNA, 572 bp, Cannabis indica
tttgttttaataattatgtgccaaatttagtacgaagtaaaaattgtgtcaaattttacacaataaaataaaggacatgattcaaaattacatcacaataaatattttacttttatataatttgtattgtgttataattatgtagttgtaataataaataattgactatttatagtaataaaattaataataacattattatttatatactgaagggtaatcaaatataaaattttgtattaagttatgtaaattagtctttttaattatcactaaatatagcacaattttatatttttcacttgagatggttaaagactctatgacaatttttatttatttggttatttataatacttgtattatgatgtttttaatgtttaacgttattatttgttttacttaatcaattatagtttatatgtataataaatgtttagaataacattgtatcataaatatatcaattaaatttatatgtgcttgtgcataattataaagggtaatttatttatttattaaaaaaagtaattttatttatacaaaaagtgataatattttagggttatttg

SEQ ID NO: 253616 - DNA, 440 bp, Cannabis indica
gacaaatgatcgctggggtccgtgtccccgatgtaagctgccatttcgagcatcttgaaatttttggggagctctacctctaaaatgtacctggcgcatggctcccggtcctcacagtcagagtccgagtcgtcccccttttgtcttcaggagactcgggcaatgtctttgcgcagtatggctagctcagcaagaattccttcgtttagtgtttctgcggagaccgtcggtgcgttttttttgtccaaatgatcctgcaaatcaccatgtctctcgttgatctgatttcttagatcaatgggagggtatcttcggttccctcttccttttcccctgggttcctgatgcacagaaacgatctttcggtcctctcaatcctgagggccaagactcctttttgggagttttcccttctgtagacctttccctttcgggaaatc

SEQ ID NO: 253617 - DNA, 1223 bp, Cannabis indica
tcggtttggttcgggttaacccgtttaaaccaatctttatttattttttttttcattgttgttagtttttggtgttcaaataattgatttgaaaaaataaatgtatagtatatgcctttcaaaattaaaatagttatagtttaaattaatgttaaaaaataaatatgaattgaataaacattaaagtattaaataatatttttcaaaaaatagaataaaaaaaatatactcatatgtaaattctaaatttcaacttcaatattcaaatacaatcaaaattatcaactataaattctaaatttcaaaataaacactataaaatacaaactttaaatgtaaaatagtttaactattaaacataatttatatattatgttataaataattttagtaaaaaatatgtaaatcggtttattcgggttatttgggtgggttagaataatatttaacccgcccaatatattcattgagcattttgaattatttgtaaagttattcgggttgtattttttgtcggtttattctatttggtttgggcgatttgttcgggttgggcggtttgttaagtttttttgaacaaccctactctaaactaaaatcgttactaggtttcttacttgtcggtaatcttgatcaggtagagacaatcacatgaataccggggagtgggattcaggttgtctggtttgaccacgacggtaacatttggataccagggattaggtgttcatggtagtaactgtgatacttaaatatcaattttgagaatcagggttgttttattaaataacgacatcgatgtatagccgatacatccaatgctattttactttactaattccttggaaaagacattccccttgtccaagtgtaagcaaacatcattgctgattatcacgtcagtgtaaatccagtacactgataaatcataggactaaataatttgaaataatttttgtagggtgttgaaatagaagatttcccattctatattataaatatacaagggtaatttgaggctaaaattcctatacttttatgtttgttacggtttaacccccttattcgaaaaattatggctactccctaggctcgacaattattttgctctgtagtccttctctgtctattttggtctgttaagtgacaaagtagtttgctacggtgcacacatgggaaatttttattagtccacctaatattaataatttaaatattaaaaa

SEQ ID NO: 253618 - DNA, 615 bp, Cannabis indica
agtgggctgtaatttttgactcagaagagaaattaaggtctgaatgtcttcttgtttggtgatgttggccaatagagacaaaagatctgtggaagcatatgcttgattggccgagggttgagtatgttcagttttctttttatcaccatagccaggagggaatccaatcaagaaaaaacatttctctttaagatgccctggtttgtggcaattggtacaatagggtctcatgcgtttattgcgcccttggtttgcagcagcagctgatgcagatggagtttgtgcaacagctgaggtagaagggtcctggacagtagcaatgagagggggaatttgggggtttttgagtttcctccgtcgttcttcatggataatcatggagaagactttcgacagggatagaaaaggcttgataagcaagatttgtgctctaacagggaaaaaggactcattcaaacatgttaggaattgaagaacttgttcttgattcaagaacgcaagattatctacaaaagtgacacaagtacaaggaattcttggaagaatttcttgtatttcatcccacatacatttcagtttagtgaagtatgaacttacagtgtcatcaccctggtg

SEQ ID NO: 253619 - DNA, 1802 bp, Cannabis indica
actaactgaagcataaatgtatataaagttctgttatcccctcaagatggattgatatgttgtatacatatagttttggcaagtgtgagaagtaagggtggtagagggaagaggtttggtgaatgcattagtgagttggaaggttgatattgatagggattagccgaatggtgttgttcttgaatccccgatgtaatgacaatcttgctctatatgtttaatccgttcgtggaaggtgagactgttgactatgtggatagctgattgattgtcacaatagataaaggctgtagcatcttgcggtatttgaaaatcagtgagcaaatattgtaaccatgtaagctcactacttgaggcagccaacgcacgatactcagcctcagtagagttctttgagatttttcgttgcttcttggtacgccacgagacgagacagtcaccaaagaacacacaaaaacctacggtgaaacgcctagtagttggacaagaggcccgatcaaagtatgagaatccacaaagatgcaatgaaaatgatgtagagtaaaggaggccttgaccaggacttccttttaagtaacgaatcaaatggtgaactgcctggaaatgtggtgtacgaggttccaacatgaactggctgaggttgtgaacgacgtatgtgatgtcagatcttgataaagtaaggtaaaggagttgaccaatgagttgacgatatggtgaaggatcatcgagaggttctccttgttcatcatctagtttgatacggggatctattagggttttggcaggcttactgcctgtatatcttgtatcttctaggagttgaattgtgtattttcgttgagataagaacaaaaaatcataaaattaacctagattacccataacagtataaaaaaggtgagtacgaacccacattatacacaaaatttcataactgtatataaataaaaaataagaaataatatagtcaaatctcattccaaatattactaagcctctccctccacgaaccaccaaccgccagcgaatacaaactgccacgaatcgccaaccacgcatctacgaactaccaacaacaaccatccatctacagtaaaaagatagattaagaatggttttaatctatgagaagctttacataatggagaataatattctaacaacaaaaccaaactagacgaaagtcccgacgaaggcttctccccatcgagctacagagaaaagagacaaagagggagttcgtctccactagcgcaccatctatcgttcgtctccattagagccaccatccctgtcattcctctccaccatcgccaagatctgggggttttctacagagttagatcttgggtttatatggagaggaaaaacatctggaaagatatggaggttttgaagggtgtagaattcataatcgatcacctagccacattcggccattcacctggctgtctgcttgattgtctaccttccttccgcccagaccaagaaaggaacaaagagagagggggaggcggttgggaatgatgagctaggtttgagaaattttccaaacaaacttgttgaccgaggttttcggcaaccaatataataatatttaagagagctgtaagaagttaatacacgagatttttacgtggttggagcattaatgagccttagtccacgagtctttattatttatgagagtatttattacagagaatgttcttggtggttttttctttcttcttcttatgaaacccagaattcttgacccctgccttaatgagtttggggggtatttatagtgtttttctagg

SEQ ID NO: 253620 - DNA, 1086 bp, Cannabis indica
ccacatagtacatataataagctctagatcctcttttgagtgcaaagatgatagatggaaaatgtaatcacctatgtacatttgttgagcaaagtgatatcgatggtaaaatttgtgtttttccacaccttcttagcatttctacatgtaaataaggcatgcccaattaattttcaagcatgtgtacataataaaaaagttgttgaatctattatttctttttgcgaagagcggcaacaactggtagagcatcttgaatgactctccaagcaaatattttaatattaggtggcaaatttaatgcctagaaattttcccaccatgtatggtaagttttggatatcgaagagtcatatgcttctgccaattcatcaattaaatggaaccctgatttgaccgaataaatgccagaagtactatgatgccaaatgagctgatcctgtgattgaaagatacttaagggaatggataaaatcatgtcaacacctacggaagtgaagtacgaatgtaacaggtttacatcccatatttttttctcactaatgagatttgtaactattaaagatggcgggcttgagtaggaaagaggttgaatgttgtgatgtccaagtatctaaggtccaaagcacaattcaccttaaaaccatttccaattttgtatcgaagtcctttgattaacatctttctctcccaacaaatgccttgccatgttaacgaaggaaaatatcccacatttgcctctaagaaattattgttggaaaaatatttgtgcttcaataatcgactcagcaaggaattaggcatttcaaagattccccaagcttgagtgactcgaggggtagacaagaattggctcagtttgctaactgagtaagaaatgtttgatcttataattgttaagttttgaagttttccaacaattcttctgtacaaaattggatcaacaagcttatctttctcatcttgtccaagtttgaggttagcttccattggtgtattcatagatttgcatccaagataaccaagatcttcaaataattacaaggaatagggtctttaagaaacaaaaatccctttctctgatct

SEQ ID NO: 253621 - DNA, 649 bp, Cannabis indica
aataaccctatatatttaacagattacaatgctaaacaagcattatcataaagatgtacctcagctagatgatatgcaatgtatttgtttaataatgttccaccaaaaacaaatttgtttaagagaattgctattggacaccaataatgcatgctaagcatttttcataagtggtgccccataattagttagcgatattgtctaaacgttatctttttaaattatataggactcaatacttaattacacctatagcaatataacaccgaagagagtgctgggtaccaacggtgccttttaacaattctctttgtttaatagtcaaaatataaagaaggtaatggccaatgttgaccattttagctgccatttttagacatatgcctcatgtcttgagagctttcccacctcagctaccatattccttcatagaaataattttggcaactattgaaattagacaattaatgaagagaaaaacgatctttaaccataagaatcaacattttgaaaaattaatagcttctctgtttacattaaaggaaactatcattgttcatctgtatttgatgatagcatggatcaaattgtttagtgaattaaataatattaatggtctctcaagctttaaatagtcccttcaatgcca

SEQ ID NO: 253622 - DNA, 1346 bp, Cannabis indica
agacaatccgactccacaactaccccgtgccaagccttcttcttaatccagctgagagcttcacgaacccccatggcctcagccatctccggttgaacaacaccagccctacaacatgtgatagcctccaccaaatggccacttgcatcccgagcaacacacacaaagctatatgtgccattgctgtcaaaaattgcagcatcaacattgatttttatcgatgtagcagctggtttctgccatgtatccgagccatcagcagcagagagataagcaggaagagggacgagtgatctgtcttgagcttgagaccaattcgagagagtaacttgagcaagaacagctacactctcggctgtagacaccttctcagaccagaccagatcatttctggttttccaaatcgcccagcaggtcacggcaatttgttctctagtggctgcatcaattcgatcaaatacagcttccaaccaaccagcaaaagaaacatagccctgaatatttagcgtgataccactgcagttccaacattgtgcagcaaaaggacagtcaaccaagcagtgaaacggagtctcaggttgattaacacacctgggacaattgctttgtatcggtacatgtcttgattggagccttgttttcgtgggaagacaatctgaagtcgctcgccataacaaatccttagctttaggaggaacacgtaatttccaaatcagtttccaaacccctgagctatataaattaactcctgcttccttattcatttgcaaatatctgtatgttgatttaactgtaaagtgcccagttttttccaagttccaaaaccaggaatcacatatccgacttgaagataagggaatactaagaattaaattagaatccctgttgttaaacaaatctcgcaccaagtctccatcccaagctaactctccaggaaccatcaacacactaacatttttgtccaataaggccggatgagaggaagtaacaattggatttgcagggtcgggtaaccacggatcccgaataatgttcaccttagtcccattaccaatgcgacatcttaccccattgcgcaccaagtcttgagtttcatgaatactgcgccaaacaaaactcgggttaccacctagctccgccgagagaaaatttccattcttgtaataacgggctctaaaaattctacttaccaaagactccggaaaagataagagacgccaaccttgcttactcaataaactaaggttgaaatctctaagatttctaaagcccataccccctttagatttgtgaatggtaagtttgtcccaactcttccaatgtatgcctttattgttcttagtaga

SEQ ID NO: 253623 - DNA, 925 bp, Cannabis indica
ggtatttttggaccattaatatgaattttagctgtaattattattaaacaaggtgagcggcaaggatagctgcttgaaattgtttagagaactttatatatgatatgtaatttgcaataggataagaagtggaaggtgcctttgtttgagtttggcatatgtagtcttgtaaatgggtagggggaatggattttcgaccacttttggtgtgaatcttggggttgggtatagcagatggtgttgttggtatggctgctgggatctcagcaattggagaaggattttgtttattttcatcagatttgtctgatagttgggtggaaatatgtgagtgtggtacaacaggttgtgttgtttggatttttgctgggatttcagcagtgggaaattgatgtggtacaacaggttgttttgtttgggatgctgctgggatgtcagcagtaggaaattgattgtctgatggaggtagagagataaaaatctgtctatttgatggtttatattttgatggccttgtttgagagggaatatattttcataaaaaactacatctcttgagtggaagatggtgtgagattggatgtcaagaagactgtaagctttcatgttgttaggataacctatgaatatacaggctcgagcccttggtgaaaatttatttgggatgtgaacgtgtgaggcataagctaagcgtccaaaattgcgtaagtgattgtattgaggggatgtgttatgcagcaattcataggaggttttatcatgtaaaagaatggatggtgtcctatttatgagatatgttgttgtcttgaccatatgtccccaatataataagggtaagttggattggaaggctaaggcacgggctactgtgagtatatgctgatgtttatgttccactacaacattttgttgtgggcggccaaca

SEQ ID NO: 253624 - DNA, 724 bp, Cannabis indica
taaacgattgtttaaaaacatcaagaaaaaccatttatgtagtactgtattctctcttctataaaagaccacctagactcaccacggtgcaccgcttaccaccgcgctccgctcaccaccacacacgtctcattttcctgctttaaaagatctgtgttagatttttatttgaacttacattaacttttattgattttattaaaacttgggttgattaataatttcttgatgtgttagctcatattattagtgatcaatagttaatggacttaacatctatatgtgtgtgtaaaatctatttgctgcaaaaatatagactattctagttaattgaagcctttgatgagcagacacagtccaactaaagttatatagctaagtctcttccctaactctataaatacatattatctaaattgtatacttttgataatcagatacataaaactgcttctaatttagagatctagaacggaagacatttgatagtattgcactatcaaattgcagtaattgctatagatcaatcaggtatgtatacctaattattatatattattattgtgctctatattatatacaattttatatattgagattattattttttctaacatgtggtatcatattgtcaattgtatatgatttagaacctattttattttacaattgattgatatatgttaattttctcaaattacttattaatttcgttattatttta

SEQ ID NO: 253625 - DNA, 691 bp, Cannabis indica
gatcgaacgataaatcccctcaaaatttattcggaaggaaaaagtgatttaataacgaaaatattgctaatatacggtatattatataccgatccatacgtacatgtttcataaggggcttacattagtatctacatatattggaaacgttttttaattacacatgtaaatatttacttattgtttctatgtacttcggtataggatttaaaaatatgtgtaggttacttgttaggatattttatattctttaaggatttgtgtttcatttcaataataattgatgtatgcttggcaaattcttatcaacaatattggtactctagatgttattcaactgattataaattataaaagtaataactataatataatataggtgcttgtgctggataagagattcatttaattcaaacattttcatctcgtccattgtagaatggaagttttgaatttcttacaagttcagaagaaccatttcacacttacattaacttataatttattaatgttatgagaagtttacgtagcagaccaagtcatcacaccgcgtatacacatgaacgggaaggcacatattaattcacatcaaacacaaataaaaatattaaaactccaataaatcaacagtagagtttcctagaataatccaagcggtctcattgctcgacaaacataataaattagaatg

SEQ ID NO: 253626 - DNA, 835 bp, Cannabis indica
attgtgtttatcaatgatattcttgtgtaccctcgatcagaagcagaacatgagcaacacttcgtatagaactgcaatggctcagagaccataaactttatgcaaaatttaaaaagtgtgagttttggctgtcacaagtgtctttttcgggacatattgtcgagaaagacacgattatggtagacccagggaagattgaagcagtaaggaattggcctagaccgaaaacagttactgagatacgaagtttcttaggtttagcaagctactatcgacgttttatagaaggattctccaagatcgcaatgtcgttgtctgagttaaccagaaataatcagcggtttgtattgtcagataagtgtgagaaaagtttccaagaattgaaacaacggttaattacaactccagttttagccttgccatctgattaagaaaagtttgtggtgtattgtgatgcatctaggcaaggtttaggctatgtgttaattcaagcagacaaggtcatagcctatgcctcatgacaattgaaagattacgagcaacgttatccaactcatgacctagaactagcagcagtggtgtttgccttgaagatttggcgacactacttatatggtgaaccgtgtgaaatttatactgaccacaaaagtctcaagtactttttcactcagaaagatttaaacatgagacaaaggcagtggttagagttagtgaaagactatgattgtgaaattgtgtatcacaccggaaaggaaaatattgttgcagatgccttgagtcaaaaaagggcctgatcaagcgttcaatatggtaatgatttctccccagttagcct

SEQ ID NO: 253627 - DNA, 1000 bp, Cannabis indica
tgcataaatagactccctcttattacatgcctcaagcttgatgtattccaccttctaatcgaaccttgttgaaacttcaagatctcgaactctcttcgatctccttgaagagtgcttgcttcctcccgatgcaagacttgaaaagaaatctatcgaaagctttgtaaaaccttctcccgaaggtagcactgttgttcttcttcttctttgtagacttgaatacagactcaagacaatacaaaatacaaataaatagagtaagagtcgaacacactcttctctacaaaataaagacagatatgagtgaatacaaagatacaaaagagatactaaacctagctgctataaggtgtatttataatcaatatacaccttattgacagcttacacacggcctgaacaagaccacaatccattagaaaattccctaaaataaaacttcaatcagcctaggaattttcatttctgtacctacatgagtagtaaatgagactttccttttatagaaaagaaaagtttagctccagttttctcctcaagaaattcgatcaaacaaaatgggaaactcacacaagattagaatatcacagctggttaggtagaaaagaaatgagtaaccaaacttcctttttgacttaattttctataaataagaaagctagacaactattcttccaaagatagattgcttaatattaaattcacatataaaataaggaaaacaatatttacacacaaccgaaattaaacaataaattaataaaatatttttgtcacttaaatatgccaaaaatagaattaacaatctccccttttggcattttgattgacaaaccattttatttagagaaaatttacatcaagtgttagaaacaaaaacaaaagactatagaaaatactcccctgcatgaaagtactctaacacataaaataaaataactttttaaacggaaaagtttacaaaccacaaacaaagtaactttttaaacagaaaagtgca

SEQ ID NO: 253628 - DNA, 518 bp, Cannabis indica
tacgcagtctaataatatgtcgccacatgtttttaatgtgacacttaatgatacaaaaaaaagtacgaccgcaacaaaattgtaagataaccgaccgatcggttacggtttttattttacaaaaaccctaactgattatttagaaattataaccgtataaaactgattgtatgatttttagtattttttcggtttgacggttttggacgatttttggtagtttttggtggttttggacggtttatggcagtttttagcagttttagccgtttttttggtttaactaattttttgtttcgaaaacctaagccgactgctatatcaaaaaaattgtaaccggccaaatttggtgatgacgtggaactaaaaattcggttatggtttggtcggtttcgattttttaatttttacgaatacccctaagataagatatttttacaattacactttccaattctcatggccccatgaaaattgaattaattacactgtgtgattactaaaaactttttatatta

SEQ ID NO: 253629 - DNA, 719 bp, Cannabis indica
taaaccctttctaaaaaaaaacaaaaaaaacacaacataccttcgacattttcagttcgggtcacggtggtgtcgccggttgagctttgaatgttgtttgttgagcgttgacggtggtcggttgagtgttgtgggttgagcgtcggttgatcgcgggtgagcgtcgttggggttggggttttcgtcggggtccgtgggttgagcatgggtgagcgtttggggttggggttgagcgtgggtgagcgtttgggtgagcgtttcgtgggtccgtggtgagcgtttcgtgggtgagcgtttgggaggcaattagtccgatggtccgtgggtggcgttgggtgttggtgagttgagagagagagagtcggctgagattaggatttcaaatgggaggggtacttttggaaaattagtaaaatggtcatatattaccaattttagtaagtatgtatttagggaaaaaataatagagttttgtaagtatggaaattcaaatttcccttttagtaatacatttttaaccaatagaatagagaattggatgtgagtgctcatagctttttttttatatacatttgtagctatttgacattagctcttgtgagtgtttattttgcattagccatttacagcgtagagaaatagagaatccaaaattaatgaagaccaagacaaattataaagactatattacctataaactataattaacaaaaaaaaaa

SEQ ID NO: 253630 - DNA, 3038 bp, Cannabis indica
aacgaagaaattccttcaacaggtgcgctaccttattgggaacgagattaaggaatgctcggtggacagctggtttcagaacaaaaatctgaaaagatgaaaacaatgtatgattcttagaaacacaaaaagcacagaatagaaaagatcatacaatcaaaactttgaccacctaaattttccacacaaaagaagactagacatacctgatatttgatctctggtgtcaaattaaacgttaccttgtttgtctggaagaaatagtaaagaaaagaaaataatataagataagataaaagataataataagaccaaaaagaaccaagggacttatgaattttctttctacaaatctatgccgagaaacacatcaacactgtggaaagaaaatgactacaaaaatactttaaaaggagagattatacccgaccatcggccataggtttggtgtctaatatcattgtacttttgaaaccaatccgttgttttaactttctgttgctatcgccatcaagcaatttctgaaatcagatttaagggagtgttaaaatatcacaatccttcgaataacttacttcagtaaagttagtagctgacctttcttgttgcccagaactcagattctgttaagataccaccgatcacgaattgcttatgaagtttctgcaattcgctgtgaaggaacaatcttagttctatgaacaaaaggttttaataatcaaatcagtgagtcattgagatcagtcctgttgtacttgtacattttaactttaattatttctttttacaaaagagatcttagatcttcaaaaagtaatatgtgtaacattcggttacctatcttctcgcaatagcttcatccgaagctccaaatctgctgtactgagttgttcatcagaaaatgtaactgcaactttctcggaagcaactttcggagcagaaacaacttttgcagcttctgcagcctttgcaaggcaattacctaaatacaaaatgcaatgaaatcgatattaaacagaacttcaaatggaagacactatcgggctgaggaaggaataacattgtcatgaaaaatgtgcttgcaaatgagaattacccacaaattctcggcatacatgaagatcagcaaagctttcaaactcaaatatgtaactcccaccctgtaacaatacatcccaataagaaagggacaagagattagtttgaaagaaactcaaactagtcattgtggcaactgaacatatcgaaatactataacaaaagaaacctgatcatgggggagattaagccaaggtggtttatttgaaccctccttagtgtgtttatgacctgaatattttaacagaatgaataaagaaacagcatttagagaattgagcatgaacctcaaaagacttcctgaaactgagtacctttaatgtgtacaaaatccacatttagctttacattagaagtaggatcatgaggactgaatgaaaactttctttcattctgcatcaaaagagtaacaattccaaagttacaaagaaaaatcatcatccataaacatacattgcagcaactcaaaatcaacagtttcccaacctataaaaaaaactactttttgaccattgttattagataccaccataccgaccttttactctataattggctatgagtttctacccaatattgaaattcaccaataaagatattagtttcaaatttactaactttcaaacacttggggggcaatgaatcaagttgggatttttcaaacacttttttctatttcccatcaagtaaaatatccatctgatcacaaatatttcataccaaacattaatcaataaaagtataatcaaaagagtaaaaagacaaaagaaaaagaccatcttgagaagaccaggagtgccagggtccttgactgaggtcttgtatttagctcgtttaatcacttgcccagttgacatctttgcttcaccaataaatccaatccaatcaaatgatcatatatgggtttagatcaaataacaaaaagattgaaaatttggattaaaagcaggaagacggtaatgggtgttatcacatttctataaaataaataaaagctagggtttttctgaaaaaaggtattggggttaattgaagttgagtctaattaagaaaggtaaacgggtgtcccctgttaatgggagcaacgaagaagacgactccagaatctcctaagcaattctctctctcttctcactctctctctgtgagtagctttattgagcgccaatgaggaattgggattgggacaagaaaacgacatgtcgttttatgagtgaaagaccacaaacgacaacaacttgactctgctctcttactgttgttcgtttactaatgaaaaacgtggtcgttttagtgcatggttgaaagggatttgtcgttttcttcgagactacatatcgttttatgttaactgttttcttcttggataaaaatctcaaacaaacgacatgtcgtttaaacaattatgttccatttgacaaacttatcgttaaacattattattactctatttggtaaaaatacatgtattataaaaactcctttccttcctcaaattttgtatgataattttttttttaacaacgtttattttaaacaaaattctaccaatcatttaagtttcttccaatttactagtaaaacgatctgctaacaaaattacttttagttaagttgtcatttcacggagaaaattgctcgtacaagtttcttgctgggacttttttctgtttaaaaaacaataattttctaaattgattaataaacattgagtgattctacaatgcacccccttaaaagaaatgtattgatgcactcttaacttatttcggcatttcagaaaaaaaaactttagtctaatttttttttaatatttcatgtacgttatagctatttaagatatcctacaaaattttgagaaattcggaataatttacaatgtagaaaacaatgttcaaaccgtcaattttacacgcgtataaaacaaaatagtcacgcgt

SEQ ID NO: 253631 - DNA, 481 bp, Cannabis indica
aatcagtcatcaatgttattcctacttatgctataagtctatttcccttggtcgtggggcttggcaatgggattcattgcttgtgtgcttagattttagtggggcagggatgatgataaaaagaatatcccttggtatactttgtctcgcttgtggtttcgtgatatgtttctctttaatcaatcattgcttgttaaacaagtagctcagttatttaatcatcctgattctttaatcaaaacgtgcttctttctttggaagagcattctttagggacgggacttttggaagcaaggtttttactggctggttgggaaaggcgatactatcaaaattcaggaagatgcaaagataccaaagtaccatgtgggtcgaacgtattcttttaagggggtcatactctttaattggagtgatctcaaacttgattctcgtaggtggaattcttctcttatttaggataagtttgacaatgtgaaag

SEQ ID NO: 253632 - DNA, 688 bp, Cannabis indica
tttgttatatattaaataatataacttgtattaaaaaaattcgtcataataattaatacaatacattgctttatccaaatataatactattatttaacacaatacagttcttatatgtagaaattacacaatatatgggaaaattataagaatttactttgttatagcataaataaataataccatggggttatggattatttttattatttttttacttatatctaggcttttttatgccatatttttgtaaaaaaaataaaaatctcaaatttgtaaaataataataagtatcaccgaaaaaagtcaccggcgacgaaaaagttagtgtcactgtcaccagaaaagtcacaattaccaaaaaagtcactgaaaaaaccagaagtagatgtctcaaatataaataataatagaattagttttgtaacataatgaataaaaaaataacacaaaataacttaaaccggttataattgaaatataaccggttctgtaccataataaataataacaaataatacaaaataactcaaactagttataattaaaatagaactggttctataatattataatgaataaatataagtaacacaaaataattaaaaccggttataactaaatcaaagacggttatataacataatgaatgagtatttttgggatagatatggtatggatgtaatta

SEQ ID NO: 253633 - DNA, 731 bp, Cannabis indica
gaatgttgattacaaataatggtaataaaataaaaaatttggacatccacataattaataatatttataacaattcattaaatataatcctcattagtatcattttatactattaaattagaattcgagttagtagtgttttatcatattctacaaactttagttaagaaaaagaacatagagaatagaaaaataaaattaagaaaaattaaatagtaaattgaattataaaattaagaaaatagattaagatatatatagaatttagaaattgaattaaaaaaaatgattcgtgattattttttaaaaatgtatagtatatacatatatttattttcgtaaatatttttaaatttgaaattttttttctttttagaaaaattaaaagaaaaagtaataaaaaaaatagagaatatttggttttttatatactcaataatactaattaaatattcttttttacatataaattttgggtaagtaatgggagtgactaccatttttttaggattaaggatgatagtatatttaagatatatatatatatattagatggatgttacgtgccgagccacgtaaatgtaagttttatttaagatttggagtttttttttaatttttgtaacttaaagtggtatgattatttgaacgatttgttttattctaaactctaaaccaagtttagcacgtgccctgaaagagtttggaaaacaatgcatttgtgataactc

SEQ ID NO: 253634 - DNA, 1020 bp, Cannabis indica
agaagaactggtaaaacagatgatctggaatcactgtgtttgggtctcagtcctttgagttttaagtctaatctttcaataataataataataataataaagaacgaaaaaaagaagaaagaatgaaaacaagaaagtctaaacaaatagagctctcataaaaatattaggttctctcacaaataaatatatatataaataaaacgacataataaggaaatttaagggtttgggagcacttaaatgactaaagccattttgtaacatacttattcctaatttgatattctcttcaaagtgttttttaagcgatataacaaatgaatcctatgtctctggtacaatatcaataaatatacatggatgttctatcttaaaattaattaatgatgaataaaataatttatatttttatatataatttaatatatttacatttaattcacgtgaaacaatattctttaatataccgataaatttatacaagttaaaaacaacaatgaaagaaatataattatagaaataggcataacattaacagtatacgcttttaaaaagatgatccttcctttaaaagaagaggaaaaagaaaatacccgtggggaagcattgttgcgaaagtaagattttaaattcttaagtatatatgtaaggccaaaactccttaacccgtattttattttcacctttcaaataaagaatatcttgattcttaatgtgaattttttattacaaataaataatgaagtccaagtgttcataatttttaatgtttacctgttattattgtattcgtatcccgttaaatttgaattcaaagaaggaataagagagggaagtaaacgtaatcaaactatattttgcatgattttccaacttccctatattaatatagagcaagttggatatgtgtgacaatattaataaattctcaaatgtaatagtaatttatattatagtattacgtcaaggaaaaattggttacaaattcaaaatcaattgacttatcccttaaatgtt

SEQ ID NO: 253635 - DNA, 578 bp, Cannabis indica
gcaatttgagatgtaccagtgcggagatgaactctattgcacacatagcagacagtattaaaaacttctgcccaaaaacgttttgatatgtccttggcttgcatcatgacacgagccatttcttacagagttctatttctcttaacgactccattctgctgaggagtttttggggctgaaaattcatggcgtattcccattccattgcaaaactcagagaagatagaatttttgaattcttgcccatgatcactccttagcctaaatacttttccaactttggagtctttctcagtttgtagtctcaatattagagcaggaagaatccaaaggtctcagatttctctctaaggaactcaacccaggtaaaccgagaatagccatccaccaagaccattacatatctctttcaactgagactttcattttcattggccccatcaagtccacatgcattagttccaacatacgttagaagtctgttgataagagggtgagatgccctatgttgtttccctaagctgacatggtccacaaattctatccttggataccttcattttaggaactccccttac

SEQ ID NO: 253636 - DNA, 696 bp, Cannabis indica
tgtaatgttagcatattgttcagttatactttaggttagttttatatttatttaaaacaatgaatattttataataacagctaaaaccacatacatttttgaaaggcgaatacgtaggaatacatgtcggagaattgaaccaaagagtctacatcagaagccacatcagcaagtatagagagaggtcccctgaccccaatccaattgggttagctttggaaaaatacttgtttgttttgccaaaatatttagtaggaaagaaaataaaagtacctcctagctctttccttcatctctcaacaatcaaaatccaaacactattgtatatgatatgtatacacatacaacagtgccaaaaagaagagcctataaaatgcggcaaccttatcatacccttaaaattgttaatactattttaaattttgttaaaataataaaaagaataatgtactttttaaaatagtacaaataagtatttttaatataattaacttaaagataatttttagtataaatataaaaaacataattaattttgtcataacacctctaataccaggtatgattaagtttcattttgactaaaaatcaatttaaaatattattttaaaaaatacaaaattcaatttatcattttacaaaataaataaactatttaataatttttacaaaatacaaaatttaaaataatattta

SEQ ID NO: 253637 - DNA, 1473 bp, Cannabis indica
tttccatagagaagttaatgtgtgtgttggagagcccacatgccacttccattctcatgccgtgatttgctctttaaactcctctctacaagttactcaatatgtacgtatgaacatagaaatgtattcaattaatgatatgttctcacataaattttatatacacagttacatatgtggttagtctctttaataagtaggacatatctaaaataaaaatatgttgttgcatttacttgttatataagtatgtgtctaatttatatgtgcacatatcattactctattgcataatgttaaacaagataaaagtaatgttaaatactcatttgaattgcatacttattacaacgagtaaggttaaattacgctaatataattcgtgttgatttaaaaagtcagtcattattatttcagaaagtaaccaaagtgacataccaaatatatactaagtagatacaaataaagaaggggcattatagttatgcatgttgattaaagtttcatgtaatataaactcaatttggtgaatttgtacccttaattattaataatctatcaattcaactataaattaagaaaaaaaataaatagcaatataaatatttaattttaaatttataagccgtataaattttataatttcttagtagcataagtatttaatgttagtaatagtaaaattttcatttaattttatcaatactaaatagactatgttagtatcttgaacaagacacgtgtaattgtaaattcaaattcaattgggctcaaaaaaaaaatgtagtataatttacttctaaatttttttttaataaatttaaaacggagtatatattaataaaattggacaaaaattataacatcgcatatttatactactaaaaaaatcattaaattatatggatactataaatacaaaactttgagtaaaccgtatgtaccttttaaccaaacaaaactcgttctcctttacatatttacttgtaatatatataagtgtgttctctcttcccattacatgttcttaaaatatttttccaaatatgtttatactttatactatttcaaaactttttttcccattttcttttattgactacattttttttaaactaacatatctgagaatttcacggtaatgcctgacaatcatatatatatatgtaaacatatgttagaatcaaataataaatatacactttattaatacagtaaattattaaagaaaaaaacaatttaatcaatgtttatgagtaagttctctcatatgttaataaaaaaaaaaaaaaaaaaaaaagaacatactattttaaattatatgttttcatcaattactattttggacttttatgttttaaaaaatttattttgtacttagtattttacaaaatattacaattaagagcataaagttaaagtattttttaaatataacttaaatgtttcatatttataataaaagttacacca

SEQ ID NO: 253638 - DNA, 742 bp, Cannabis indica
tgtttaaacaacatacttgtgagtagatctaagatcctggtaaaagaatttccaacattgattggatcctcttgctttggaccaactgttggcgaagggaaggtttcttcttattcaagtgctctcgcagatctagttgggagtaattgctggtagatctcgtcttactcattgactgcgtcctacttatagactttttttttaagttgcacggagatttacttgttcccatactctccgaatcattagctcgttgagtactttctcctttttgagttgatcgactgggttctggattgcctcgaaggcacacttgcttattcacgctctgttctttcctcccgagagtagtttttcgtatttcccccatcagggtacgtacgagtcctcactctatgggtttgggaagaaccctggtgattcctaataggtgatctccgttctcctggctaagttcctcatgagggatttcttgttcatcagttttcggttgtctcctttctggtcgttcatcctgattctcagggggtgtctcattttccccacgttgttcttcccaggccttttcctatctcctagtttgtgagccacgaggtctgcctcgtggtcttctcactcaaggttcaggttgatttctacgccgccctagtcgaggctacctctcgttctaactcagcgttttgacgttgtgcctcttctagacgacgtctcaagcggcagctttccatttcataagttcttt

SEQ ID NO: 253639 - DNA, 382 bp, Cannabis indica
ggccagggctagtaacggttggagaaaatggagttcaagttttccccgtaaccaaagtgaaagtccttggagggcttccgacgggagtgatggttatcaatcataggctccgttggatttggagcaaagatttgtagaaatggaagctgtgattcaacgacatgaagaagagactcagaggttgaaacaataaagatcttctgtagtatctttaccacaaatgccaatcatttttgattcggtattaccgacggaacattgaatggctggtaatcaagtggaatcattgtatgaaaagatttggatccatgaatcttcagtctttcagggggattcgaatgtgaaaaatgcttcttgggctgaaatgttggaaattatttta

SEQ ID NO: 253640 - DNA, 664 bp, Cannabis indica
tttttcatatttttggattcaattcaatctccataataacttaaatccaatccattccgtaaaagtacagattaaatcggttattttagattggtcactttctaatattgaattacttaaaaaatttaattcttttttcacataactaacaataaaataaattattattattttatgtctctgttatactcatattttgagcacaatatgatattgacacatgtaaagaaactagctcgtgttataaagcaattcgccttagaaaatacatgtggtagaaatattcaaactcatcattttaaagataagggtgagctatgaataataactgtcgattgataagattggtgagatgaacaatcaatttagaaggttcatctcgagacatacagaatacataacagaatgataatgcttggaaagggcagataatgaattatttatagagcttgcaactcattgactcacatacttacgagtatgctaaaagactaagggtcacattttcagcatgattcatctcgaaattatcatactgtgatggtgtcttgcatttacttcgcccaacacttatgaaagggcgcgagaattattacttaaagtatacctaggagctgacaaccctctttagaataaattatcttgagaagattatttgaattac

SEQ ID NO: 253641 - DNA, 865 bp, Cannabis indica
ttgcctgaatctatttattgttttagtaaagttagaagatacattatgtatgtatataatcaactaaaatatattagtgtcaaaggttataattataatataatatcaaatttcataatgtacatatattacggtttttttttttttttgggggaggggggggagaaataaaatatgtcaaatatgctcatacgttgatcactataaatgtcatatacgaaatacaattgcaaactaaaattaattaaccctcaaaaaatattaaaattaaaaaactctatagtttacctattttcagattcattaatgaacaatcgatttgtgagattaggcaatgggtcaggcacatagaactctgaggcagttcggtcaggaatgccgatttcccagacggttggaccgtttcttggtggtatataaactagattgtttaaatctattgtattccctattatatgtaacaaaattattaataagttgaataattctaattttataaatatttattacagtgaaattggtatattgtatatatatatatatacctgcttggatagcaattgtattgttgtacatgtaatctcctattacaccagggacccatgcatataaattataatttccaggtcgaacattttttattaagaaaactccctcttcatctgcttgagtccagaattggtaaccctaaattgttacacatatattagttattttatgtgtaattaatacacgattaattattgtcatttcatattcaagttactaataaataaacaaaataaagtaccttatttcccattgccatgacccagtctttcctggtgcagctaatcctatgtaagcaaattttgcactcgtattg

SEQ ID NO: 253642 - DNA, 593 bp, Cannabis indica
gacttcattgtcctttgttgggctcttcttcagagctcttggctgacatcttctctttcttggctttggatacggccaagttgtaacagtgacgggcagactgttggtctcccctcacacatcctaccccatgcgttgttggaaatgtaaggcataggtagtagatggatgttacagccttcaggtcactgagggttggtcgacctatcatggcgttggaggcagatggaacgtcaattacgacaaactacgccatcagagttctggtggttgtaatttttccaactgtgagaggtaatcagatatacccaaaaggtgcgatgccttggccaaagaagccataaatcacttggttactggatacccatcttttcatatgttaacttgaaaagaatgttggatgaggctccatcgtccaccatacatgtcgctacagtcatgttctcgatttgtgcagtgttgaccaaggggtcattgtgcgggaaactggtctgagaagcgtcttcttctgtgaaggaaatcgtgggctctataagctttggttgcttagagccccaatcttcaatgctaggatgtcacttttaggctcatga

SEQ ID NO: 253643 - DNA, 1004 bp, Cannabis indica
gtgtttgaacaaagagaaaatttttgtattattgaattgaaccaatgaaatgtaatacatattatatatagtacaaaagccaagaaaaaagaataacagaaaaaaatgaattaattaacaaaacttcctaactaatttccctaattaatccttaataggtcccttcaagatggagtgtataggtcttgaacactcatcttggataatatgtctttgaacggagtagggaagagtggctttgttaaaatatttgcaaggttggcttttgagggaacatggttcctctttagggagccattgtttattttttctcgaacaatatggcaatcgatttctacttgtttagtactttcgtggtagacaggattctctgatatgtgtatggctgcattattgtcacaaaatagtattgaaggcaacttgatgttgatgttgaagtctttgaggatagagataagcaaggttgattcacagtagcattcaccattacccgatactctgcttcagctgatgatcttgatatagtaggttgtttcttcaatttccaagatatgaggaaacgacctaagaagacacaatagcttgagattgatcgtatggtgttaaggcataatccccaatcagcatctacaaaggcttgaagttgaataggtgatggtgaagatgcataaaagaatagaccctatcctggggaatttttcaagtaatgtaatattctggttgcggcagtcaagtgtggttatcgaggggattgtaaaaattggcttagtttgtttacggtaaaacttatgtcaggctgtgtgattgtaaggtatagaagttttccaatgaggcttctatattgagtcgggttatggagtatttctcctgaatcattgctgagtttaaggttcggttccgttggggtggaaactggttttgagccaagataaccagaatcgtgaagtaattggagtgtgaatggtctttatgacttagaaataccttaggaacatcgagtaatt

SEQ ID NO: 253644 - DNA, 663 bp, Cannabis indica
tcggttgggattccactgtgatcaatgacggagattgaacgacctggatagtgaaagggagtcgtgggtttagggtgagacgtggcctgagggttaggaatgcggcttgcatggtggcggctgcggtggctggagatgaaaaatgagaggtttttggaaagggaagcgaaatccaagtggaaaatgactgttggtgattttaggattggggttgggggtaagaatttttttgggttgggataatttatatgtggattatttgggttgggatttagatttttttgggttcgatttctggttgattcgtaagggtgggggttatgatttttgggaagaacgaagaaaaaaaaagaaaaattaaggaattcaatttaatactgtactatataatatagtgtatgaaatatacttattagtttattagtacttaggccgtatttaattaaagataataaaatagaaataaaataacttttatttttttttaattatttatattttaaagtattaaaatatcatttaattttttttttaattattttaatgaaataactatttcattttataaaaaataaaataaccattcaagatgataaaaaattaataaattttttactaatttttttatatattttaatttaattttgttctatttcccttttt

SEQ ID NO: 253645 - DNA, 834 bp, Cannabis indica
ctcactatgtttctcaactcaagcccaacaaaggatatggaaaattagaaaagaaccaagcacaaccaagggctaaggaatctcaggaagccaagtgaaagggaaagtttaaagtggacacttatgttgcagctaacgttatcaaagttgacacatttattcttgaattaaagtttagtgtaaagattatcttgaaaaaatattttttatgtttctactttaggagaaatttagcttcgcttcgcttctacttttggttaaacaacgatcactattacaatttagccttttagtgatactctttagtgacccgcacaacaatacaggtcaataaagaattaagagtgatttttggtgaccagcataataagactctaaacttttggtattaatctcctgtaatgtgtaccactaaaaatatgaagggtcactaaagagtaatactcataactttacaattttttttggttgaaaatgttgacctatagagtcatgtcaagagggactgcaaaagtatgtctcgacttgcctggcgcgtcactatatcatagtcttatatttaattatttttaaataaatttagtattatgatatagtgacgcactaggtgggttgggacatgtgtacccaatcatgcctcgcgcgtcactatatatatatatattttttttttttataaataaggcatattagttttttaatttattaatttctttaattttatttatttaaataaataaataaataaataagatataaaagggacattatgaaactcgaagccccaaacttaacctcttccctcagtattcgactctctctctctctctctct

SEQ ID NO: 253646 - DNA, 662 bp, Cannabis indica
ctcgctagaggcttcttccttccggacactcaccatgttggatgggatctcgactggacgagttgctcattcttcacccgaaaggactgacaatttatggattcgacctagttatctcaatcgggcccactgttgggccttaagtattttagttttatttattatgtgaatttcacgtgttcctagccgaaaacacggataacatttaccccccaagcttctaaaatttcgagggttgcggaggcttgctccatactgcacggatggacaggtggagagtaaaggtgaaacctttaaaaattccaatttaccttcatctatggttgacatctttctattttttgaattaatgttcactaaggaggcgcgtggaacgaagtcggtaaattgacggttaattattttggtatgaatctcgaggagaatatcatcatttcaattttctctattcaaaatattgcattaaatgcctggctgatggcgttcccagatcattggatttgtcttgtgttttttaaaacttgatcatggcccttgatcatgtggttttcgtgggcaattgttttatgttagtcagggtgctgacttcgaggttaatcttccttaccgtgacaaactgtcttcggatgctgcttgtaatttgttccaacagtccactgatc

SEQ ID NO: 253647 - DNA, 745 bp, Cannabis indica
aataagtcgggtcaaatctgatctgatctgagcatctgatctaacgggatggggcgggacggatccttacagatttagatcaggtcaaatcatagtcgaatcagatccgacctcatccatttacactcctaattataccttacaagggtatttgacactatgggtgccctttaacattctcaatatagaaatgtaaattttatgccaaataccggtggcaatatgtaaattaatattgagtctcatacattttgatttaataaataatataaaaaaacctctaaccacttacaacaaaccacatcaatatagtgtgttgagtactatacaaaaatttaataacaatgctcgatataatattatatatatatatataactttcattttctaacttaattaatcaaactagcaaaggtctctagggttttatcatactccactccatgtgcatgttctgcctgacaacaaagataatattttgagaaatactaaaagacacgttaattggtgtttagcttttttttagtattatactgctattggtgtaattaagtatcaggtctcatataactatataacttaagaaaataatttttagaaaatatcactaaccaatcataggacactaccttttaaaagtactgaacatcactgatacccaatagcaatgctctaatattttctatcttcaggtaactatatttgccacatgtattattaatatagattaatatacaattattct

SEQ ID NO: 253648 - DNA, 1154 bp, Cannabis indica
aagcaagttggtattggaaaaaggttgtaatggttaaagaacaaatgaagagttttggttccataaacacggcgcaagataaatatttggtagctgctggttatcgagaactacatgtgcaatcgactagagtgttttgggacaagtttgtttggaatcggttcaacatcccaaagcatagtttcattgcgtggttggcgatgcttgggaagttgaagacgaaggaaagactgatgagatttggagtaattgaggaggatatctgcctactgtgtaatgacagcagtgaaaccatagagcacatctttttctgctgccagtattcgaaggaatgtttgatacaaatcaaaggttgactgcaatggaaagccaaggttatttcattgaaagctataagcaggtggctgtcaaaggcaatatgcaatagcttcaaaaaaaaaaagtatttgctgctgccataacagccttgatctacatgatttggtgtacccgaaacaacattttttggaatggagagataggaaattgtgatagagttgtttccaaagttaaagatgtcattaagaatagaataacttgtatatggcctagaaatataactagtagtgaagagagttggttcaactcattgtaaagattatagtttttcttgaggccttctattgagggtgctcttaggttatataaattgtttgtttggtctaatacacttgctgatttactagaaataaataaataaataaataaataacgaattgaaatttaatactataattatctcaacatttaatacctaacttctgtcttctcccgtgtaaccccgacaaaggtgttttcaccaccgcactcaaactacgctcagccactgtcttcagttcaacaattacagttgttaccgtatttgctatcatcgtcaaacaacgcaatcagatcgttcgtaaaacttcctccaatcggtaaggatgttccacatagagcaaataataaataatgattagaaatagactaacctaaaaaatactgacaaagaaagaaaatcctaaacggcttattattccttcattccaatcttaagtaatataagttaataaaatattaaaactaaaaaatatgtgatgagaagtaaaagagataaaataatgaagtgtgaaata

SEQ ID NO: 253649 - DNA, 841 bp, Cannabis indica
catgaatcatgatcatgtagtgttgtgttgttcaaaaaacaaaaaataaatgaaatttgcatcttatatatatatatggctatgggtgacattgatgatttgatttgatattgattttgtgagttgttggctgtatcaacacaaaacaaaacaataaaaatggtcttgcatgaacaaattaataaccaaattgaaacaaaaataagaaaaaaactgatcacctttttataccttgcatgaaccgagaaaacggctcatagaaaaagagaattatatatttacacctcatataattataattgcaatccaaaatttaaaagaccaaaataagtattttttaaattttttttttaataagtgcaacccacaattgtttattgaaatctttcaaataaataaaagaaattactagttaaaatctttaaaaccttaaaatcattatcagtggaacaaagctttgaaatttcatcaagcaatcatctattacaaatgtgtaaatttattatatattagatataatctttatctattcaagaaattacaatacaaattcatacaaacaccactactaccaacaagtatttagtgaaatccatgtctctattcccattactataatatgagtcgttagagactgttttttcaacttattggtgtgataatacttgtttggttagaaattgacatttagagacaattttcttagtaaaaaccgtaattatagaaattaactataccttttagagtcggttgtggattggaaaatttttcagcattattgattatactctatgtcgtcggttattagaaaataaccgacaacataggtgcacacctttat

SEQ ID NO: 253650 - DNA, 797 bp, Cannabis indica
tccttaagcctctagcttaataaatttcaacgaagaattgagattgttctttttatatagaaatgtcccaatctggttcacaagtttattttctggaattcttagaaactgaatatcctaaacaacttgcgctcccatacaaacccagaaatttccaacctcggtccaaattagaaatgaatgatgccagaattagagaccatctaattaagtcgatccaagaagagactgccagtcgttatagtcgattcttgcaagatatttttgagggcaagcgtcgttttttgcgagacgcagcttgccctgaacccacaatagtagcttctattccacttgcgagacaactatttttacccgaagtcacttttacttttgaagtaggagaccttgattttgaaattatgtctcctaaacctcgcaaatcaatgacgccataggatcccaatgtcacttttgaggttgaacttatcgaatccaaggttaggtcgattggggcctatgtaggcggcatcttaagatcttacgacacgaagcagaggaaaggttgtgtcataaggtatgtggcacctggggaattcatctactttcctctagaaagggtaatacgcaaggagtgcagtgggcctagcacgagtaatttctttggacattacagcctaaagcctcgagcacatcaaggctgaggcggtccttccgcttacgaattactttaaagagtactgcaactacctcgagcttgccccgtttcagctgaaccccatcttgtataggatccttgcaagcctgaaggtcctata

SEQ ID NO: 253651 - DNA, 665 bp, Cannabis indica
gagagggtttcaaccctctccctctacatttctcccaacaatagggagccagatgtgagcctagattgcaaggcgatgagcttcatatcatcggttaccttggttttagcagctgcttccaccattcgctgaataaaactttttagggtttctcccacttgctgttagatgttggtgatggaccccatttccaaatcatactcgcatgcagctatgaaatgcttctaaatatggattgtaaatccttttagcaagagtgaatagatctaggagttagcctctaccaccaatcttccacagacctggtgagtgttaatgagaagcacaaaaacttggcatcaccgctcaccctggccacttgcataatctttttatacttggccaagtgagtcttatgatccaagagtctgtcatacagctcaatttgaggcattttgaagttcttcgaagaggagcctccatgatccgccttacacaaggctctgagtcttcatcttccgaatcaatgaaggcccccctctgcttttggaccaactttgttaaggcagctatttggtcttctaattttttttcatcacttttagggagttcctttcgatagaccttcttgctcgagtggttttgaggtcatttccacggtgaaccaactatcgttggagtgttgc

SEQ ID NO: 253652 - DNA, 614 bp, Cannabis indica
ctatcagaaaagtaaaatttttattatttcgattaaaatgattgttagtacttgataactatattttctctcaacgtgaccaatagaaaagtaatgcataatagtctttgcttcctcctcataatatttcatgattttttaagatgtgcatgcatggttagattttaagagaacactaacaaatgttagagtaataaaaaagttgttaaaatttaccttaaaaagaagaacatttttaatttttcaattaggatgtcaatttaaccaaacttaccgtgaaacctatatacatattcacttcttaattagtagtacgaatttattgtgactagtacgaaaaaatatcctaatgtgggttcatgtaacattcacaaaggagtatcactatgagaaatgtgagatatttactattttgataaaaaataatttttagtgcttgaaaactaaattttctctcaatgtgtccaataaaaaagtcatggacagtggttttggcttccttgctgtgaaatttcatgatttttcaagatgtgtagggtgagattttaaaagaacactaacaagtgtaagagtaaggaaaaaacttgttaaaatttatcctgaaaagaagaata

SEQ ID NO: 253653 - DNA, 503 bp, Cannabis indica
tctttttgatattgcagggttaggatttgcctttttaggggctttttgtgatttctcaggagattcaagtggtggtgtgtttgacccctgtttctttgaagggcttgcttctgaaagtctctctcttctcattcttttgagaactcccttagtcttggcttccggtgtaactaatattggactacttgaggccccattggattttctggacaccttttgagtaggaactataggaggaggtgttggtattttatctacagatgattttctaatagacttcctagtataaaccgctgacgagcctatgggagctcttgatgtttctcctgtagaaggcttggcagctggtctaactaatattggactagttgaggccttgttgggttttcttgacactttctcagtaggaactacaggaggaggtggtgatattttatctacaaacgattttctaagagacttcctagtaacaaccgcagaggagcctatgggagctattggtg

SEQ ID NO: 253654 - DNA, 659 bp, Cannabis indica
ttcactataaaaatataaaattattttaatatgtataattttcaattattattaaaaccgcgcgaagcgcggtaccattccctagttcaaaaatataccaaatataatcatatcctcgtacatatcattttatgatacttttcatcatcatcatttactacttcattaaacaaattcataaaataatctaataacaataattaaaaagaaatatttgaatttttcagagaaaaaaataattttgagtttcaacccccgctccatgtttggggtgtgctttacatgaactttttaagcctaagactactcattggcttgggctggcctagcggcataaaaacactaaggttatgtttggtaggaaggagaaagagttagatgaatggagagttgatggaatatattgaatataagagagagagagagagagtaatgatccttttatattgtttggtaggtaggaaggatgaagtgattgaagaatagataattattaatttataaaattactattttatccttataattattttttaataatatttgttgagggtatgcatgtaatttacaataattaaagaagaagagtctcaatccttctattatttgagggattacaaattagagatttaaatagatttgctatcctctcacttctc

SEQ ID NO: 253655 - DNA, 557 bp, Cannabis indica
gatgagtcccctactatttttaatgatggtctcaagcaagacaatagtgatgaagaatctccacctacttccaaagacgactcaagagagggggcagtgacgatgattctccctttgttctaacaattatcaaaaataagggagcaacaataaagatgtgtcttatgagtcttataaagatattgaccaagatatcgacactgaagacttttgagacagagggaccttatgtcgtcacaaaagtgttagaactcaggacaaataggttggaggtcgctatgactagcacttgaatctagtgtcagtaccaaggtactgtggaatggggagcatgtgagatgatatcatctatgaaccaactgtatccttagagagttaacttcatagtgagattcactttaccttgtgcatgtgaatgaatcgcctcttgaaccgaaaaatgtagcgaaggcatctataggtcaagaggtctattgccaagttatggcccccacattggtagtcaaacagagcattagtgtatagtggggatcaacttagcttctttgataaaaata

SEQ ID NO: 253656 - DNA, 544 bp, Cannabis indica
ttttttttttttgaataaaaaagggaatgtattttagtgagagatttggttacaacttaaaacgaattagtactaagtggagtaactcaatctctatattaagttataatattttccataaattcttgtattatttccaatatatttttgtggtgtttttagacataagtctaaaatacatgccatgtggcactctcgggttggacacagttcaaatagtagttttgttagttggttttgtggggaaattttctttatgtatagaaactatataaactctaatcctaaggcaatttgagagagctcaattgtgagagtcaccagatcagagagagagaatagagattgagtggttgggaggatcaggagcttgactcctttgtaatcgatctttctgttgtaagatcaaacacttgtattaatctctggttaatcaataaagaaagtatgctgattgtttcccaaggatgtaggcatagattgcattgatctatgttcgaacctccttaaagaaaatgtgtcattaatctgttcttagtttatt

SEQ ID NO: 253657 - DNA, 1178 bp, Cannabis indica
ataattcttggtgggcttggaaattaaagcccacctaaaaatcgttttttgtctcctcaataatatcattatttatattatctataccatcattcatttgctcttccatactaaccggcccatcagacaagccgaattgagtccttctacattttgtgtcaattaccaccagcatattgcttgtgacagctggcaagtgagaatccccattattatggggtttattaatatccacatgagctggcaagtgagaacccatattaatatgggatttatcaattcccacgtgaggcaatatatgagagtccctattattatgggaattattaatgcccatgtgcgctggcaagtgaagacccatattactatgggaattattaattcccacgtgaagcaatatatgagagtccctattattatgggaattattaatgctcatgtgagctggaaagtgaggacccatattactatgggaattatcaatacccacgtgagacatcatggaaaaatccctattattgtgggatttattgaccaaaacaattgggtcaactcccactttactcgccccaaccaccacgactcgacggtctcccccaccattcgtctccgtggctgacggcgtcaatccctgatcgcagtcgacttcaaccacagggatccccgtcgtgtttctcgcccagtcgtcctcaacccctggtaacagtagctctcgcgggcatcaacaaattccgagcagctgtgcagtgacatcaagtgtgacccttacacgcatataagttctccacattcccatgaaattcttcggactccacaaattttccaatataattacccatattcttgaccaccgccccagacatgaatcctggacggaggtcatgtaattgaacccaaatatccacattagttaagcggacaaccatcggatcctctccatgctgtagtcgctggaacactaatgaagagccattgaacgtccaaggacttttgtcaatcaccctccgtacatcgacttcatgataaaattggaatagataccgattaccacccagttttttaataaacagtccgcagcctggttgccacaacgaggccatcaggtgttgcatggcgtcgaaatcaatacttcattgggtcaagaacaaccccactaaacaccaacgatcgtcaatagt

SEQ ID NO: 253658 - DNA, 519 bp, Cannabis indica
aattttctaaatttaaatttgaacagtaatcattaaactgttaacaaatttaaagtatcatcctaactgtcaacatggctgccaacataggtgtttatgtatacaattttaaacacgtgttgtatttatattggtacacttatttaattatttaaaaaatatagaaagttattttaaaaactaaagttttaaataattaaattaggtgtactaatataaatgcgacacatgtttaaaattgtacatataagcagctatgttggcaatcgtgttggcagttaacaaaagtaaatagatgacatattaaatttactaacagtttaatagtttagtaggttttaccgtcaaaatttaagtttggagagttaaatgtaagtgaaatattaatttagaggatttaaccgcaaaaaactctacagataatcatttaatacttaatttcatcttgttaaaaaaaaagatattggtagtaaaatcacttaattctatattttttaataattaattacttataaatag

SEQ ID NO: 253659 - DNA, 544 bp, Cannabis indica
aattgatgatcaatctcagaagttaatttacactattagatcatcatctactgtaaaaaataggcaacatgtattttttttttctacttttgtgggcctcctttacctgtaaaaggagaaaccccttagtttattttttaaattctaaaaactactcacaaggttagagcttctctctctagtttctgtctctataaattggagctttgacacttagcatttttttgtaataccatctcgtgagaaataaaaattcaaagtagacgtagctctattactgtcgcgatataggaaattaactactataaattgcagttttttttttttttacttaataaatattttattctagttattctactaaggtggtgtggcttggaagttttgttatccaaaaaaactcaaagcaaaaaaagactctttgtagaaaaattaacctaactcaatgatgacttaatttccgtcgaatttaaatttttgtatttggcttgatttccatgtatctttattggagtttctatttttgtgaagagttgatctactc

SEQ ID NO: 253660 - DNA, 1331 bp, Cannabis indica
tatgaactcaatgcatatatactcttatgtagtgagtggaaattgacctgcgggacgggtacccaccccgaatgggatagggattactcgccgttaatggataatggggcggggtgtgatgaaattttatatacccgaagcgagttcgaggcagggttaggggtgatactacccaccccgtattcgacccagatatataattttcaaattttccatataattttctaattattacgtattaaaattattaactatacacttacaaaattgtctattaatcttctctaatttactatgtactaaaagctttttaataggtagagtgtttgtttattttaaagtcaatatctctattttttatttttcattttgaattatattacattattttcttcttcttattattattattattgttttaattgtaatgggtaccatatgggtccccatacccaaagggaatttccttactccaaacttatggatggttctgagttgtgagtttagagaatttgagtcaaggtggagattgttgaagtttgactcgaatttttttttttatttatctatatttgtaaaggtataatttctttttaggtgattattaattgtgtgaaaataaaagtcttggtgaccaatttttgaagagtcttctagatgaagctttagaatgtcttggtccccaagctgtcttggtgctcaagtttatttttcctataaatatgtggttagtgtgtatgtgaggtgtgtgtgagaaaaagagaagtgagtgtgaaaaagtgagtagaagtaaagggtgtattgagatttgggtggagaaattaagatagagagtatatgtaattttgaagtgataagtgaaatatatctatctttgtagatttggtagttttactagactgattaaattgttttgcatttgttttttattattttgctgtgcttgaaattttcatatttcccatcataaacaaagttctcatgcttaatttggaaaatttagtcgggctattgagaaattcagtatgttgaaaagtaagtcaaatcattctatattctataagagatcaattgctcgtatcattttattagttgtgtatgtggatgacactgacatttttggaaatgattctagaggaatctcatctcttaaatccttccttcatacctaatttcacacgaaagatttgggagtaccgaagcatttcttaagagtaagaatcacttggagtaaacaatgtatttttgtatttgaaagaaagtacatacttgatttgttaactaagataggaaaaaatgaattatctaactgtgactcgtccagacattgc

SEQ ID NO: 253661 - DNA, 738 bp, Cannabis indica
gtatctcgccggggcatctcgcttagtactagcaacaataaccctgacagcgagctggaacttttctcatatcttttcgaggttgataatgtaaatcctgtctgcgcgtgaagacataacactccatctgacaaccgcagttcttggtgacaagatgaacttcagtagccaacatcatttgaatgtcagcttctttctcaaagagctgacgtaacggagcagtggagctcattgaaagatgtcttgagctgattagtgaaggtaccaagagtatgccttcttatggcaagatggatgtttcactattcgttatccatgtccttccagctactacacttagttagtatagtgtatattatacgctgtgttctaacagcctattcgactcgtcaacacctttctacacatagcgaggttgatgccttgctatgtattatcgttgtcatccttacggttatgtcctttgacgcgaaatggtttcgcattaatacgtgagtcaatagttcttacatccttgtctcgctagagactatgcagtctacgagttataaatataccatattgactctgcatttaatgagttattccatttaatatcttttaatataattgctattatatttgttgattcgtattccccatggttgacacgtgtcatcttctgaagtaccagccgaatttagggtacaacaattgccccttaaaaagtcattttcagtgaaaagtgctttttaaatg

SEQ ID NO: 253662 - DNA, 908 bp, Cannabis indica
ttcccaaagttctttttgaatttcatgaactttttgtatttcttggaaaagagtgtcatgtcctccatgtcactacacaaactatcctcgtcttcttcactaatggaatgggaggaggaagactagaatacaatagtcttctttttcttctcaacttcctcttcttcttgagtactcataaaaatttcatggttcatgagtaaaccaattagctcttccaagggaagtgttgagagatctttagcttcttggatggcaaccactttttttttataagctttggtgagactcctcaaaatcttggtcatcgtgtctttttagagtaagtaccctaccaagagagttcaaatcattagtaattgtggtaaaatgagtatacatgttagcaatagttttcatccgctttcatcttaaagctctcatattaagtggaataaatttgaattttagttcttttcatagcattagtttcttgatgagtaatttcaagcattttccacatatcaaaggcggtagaggcttgttcaatatttttaaatatatctctatccaaaccacaaacaagtgcatatttagctctagcactcttagaaagtgttttcttatcattctcatcatatgcctcataagtcttaataacttttacaccatttataacatgtgttagtaatgtaagaaccattggacactatatgccacaaatcataatccatagattggaggtaagttttcattctaattttctaataacaaaaatctactccattgaagtatggtgctctatttacgctcaaaccttcaacatgttattttgtgaattacttggaaacgccatgctctagattgtgaaatctaatcaaataatttgagcccttgctctgataccaattgttagcccaagatatgtt

SEQ ID NO: 253663 - DNA, 1109 bp, Cannabis indica
ctaccaatattaaatagtttaggtttagaaaaaaatttggtccaataagtgcataattagtcaaatttccctaccataataacaatatcttaatatcaaattaatacatactatgctcacatacatatatcaacatatcacattgcacattgttcctacgtatgatataatatcatatcacaatataaacttaatgcatgctatgcacacattacatagtatcttatcatacatcgtcctaacatataataatcaactcccactcatgttaatcagacatgaagtgtaacctgccctgccttgtgctgttctcacacttggcatccaactaggcaatcctttatcacaagttgtactaacccatgataagataacctataagtaaacccatacaagcagctgtaagtatatcttgcaagtgctatgctcacacaagcaacaaaaaatcttatcctacaagtgctattctcacacaagcagtcaaaaaatcttattaccattacattctaataatactaacataaacaacaatccataatacaaaatcttataagcacataaacaacaaaccacattaaagtcgtatgtttcaacatacaacctgtgcacaaatgtccaccttattttttttatctcaattgctaagtatttcctttttctctccctcgaatctcttgttagagtttccttgttgagaacaggatcctagacactcaataacacaataacacttaaaacatattcaagcataataataactcaccaatattattatagcatattataatataaattaacacattaataataacaatatttactaatatgaaataaaatgacacaattatttaatatacttaggcattatgcacatgtcaataaaataaataaataaaagtaattttattgtcacttaatctcatactctactaaactcatagatatccaaaatgactaattatcctcaatggcaaatagaaaaactaaagttcaagaaaattacaaaattactcttaaaaaaatggatattacaagtgggatgccttgagatgacttcgtttcttctcgttgttttttgttataactttttttattaataaaacaagaaa

SEQ ID NO: 253664 - DNA, 590 bp, Cannabis indica
tcatgaattaattgaaaaaaaaatactcgatgaatattcaatttgaataaaacagtagataaacccaaaaagcaatcacctccaaagcttttataacaccctgaagatctccagcctttttagaccattcctcggaactttctttatacagctctacaagcttattaacctaaaaagttggcgaaggtaaatgaatcacacacaaagcataataaatgccaacatacacacacactacaatttttctttaccaaattaaagcataaaagtagtaaaacagatcaagtaaagaagatcaatgagacaaaatgtatgcttattaaattaatactgataacgacttgtgtataaactaatataagcattgtaagcaaaacttgttggcctatgatatctcaatatgcagacttttagcagcacttactgttgagagttcagcagatagttgttcctcgtttgctgaagcagcatctttagttgaccgtaattcctacacatgattagaatttaaaatataaaatacccagctaataaggaatgagatgcaacagaatttagtttctcaatattttacctcctccaatgatttt

SEQ ID NO: 253665 - DNA, 7317 bp, Cannabis indica
gtgtttttatgttgtactcttgttaatttgctgttgattttttgttatttgtatgttattttttattgttgttttgatgttatttagatgttatttcatgttacttttatgtaatttttttgttgttttcgtgttgtttttataaaaaattataaaaatgtaagaaaaattttgtaaacgtaaaaaatgtaattttttttacaaaaaaagtgctttatgtaattatttctaaaatttaattcaaatatatattttttataagtattgtacctaaattattttcacacatacacataattaagacataatttcaaacataatagatttatgttctttggagctggatgtggaggtttatgagaaaattgaaacaaaatttcgattttaaaataggaataattatataagacaccatttttttataaaataattacattttttacgtttaaagaatttttttttttttacatttttacggttttccaaaaaataacacggaaacaacataaaatcaacaagaaaactacatgaaaataacattataacaataacaacaaaaaataacatacatataacaaaaaatacaacaataaattaacaagagtacaacataaaaagaccgtattttctgtaaataaaatcaaaaaaatcgtaaaaatatttaaaattccgtaaaaccgtatttttgtaatttttttgttatttttatgtttttgtgaaataatccctttaaaatatactataaaattatatttggtctaattatcatatttgtgctccaatgcacaagatagaaattagctatataaaatataatattatgattaatattcattaaaaatatataaataattaattttatttatattattttaatatcttataaataaaatttgaaaattaatggatagtattaatatatggtaaaaaggtaattagaaaatgtaatatttattgtgggctaaaatttacgtgatgctatcttttataatttatattattattggagttaaaatttaacaaaatgttttaaaaaaaaaaatgacaatataccatatttatagttctccattaaagatgttgtgatgacaacatgttgtgaacattttcccacatacaataaatggtagagaattgagtcacatgagctattccactcattgcccaattaattttgagatggaacccatgattctcaacccaacaaaattacatatttttttccaaaataaacaacataaacgacatgtcgtattgaaaaccattgtattatgggtttgttagtttcgaggcctgtcatctcttcggtttcgtcgttaatgacagtgtagcccccgccatacattattttgccagaattccaccgtttcaaacccacacagagcaccaataaaataggttgttagagatattttccctttttgggtataaaaagataacttaaagaacataatcaagtctttgtgcaattcaaagacaccccagattgaaataaaagttgggtattttcagttttctctgtgagaaccaaaacggttaaaaaggagaaatcttttgacgggtacagtttgaatggctctgaacttgttatccccagctgaagtgaaggctctatcctttttggactccaccaagtccacccgcttccctaagctgtgtccaggttttacttccaatcttgatattctccgtttggttacccagaaagtgggagggagattacataaaatcaaaggagtttttttagtggggaagctttaagttatgagctcagctcaattgggttgagtggttttgttaatgtcttttgaaatatgactgagaaatagtaaaaaggtcaacttttgtgtttttgttagtttagagatatcacttcttgcttatgctaaagaattcttgtcctaacaaattatactgtgtttagtatagattttgattcttatgttgctttaaacacgtaattgagagtcattcataaaatgcttatggaagatgcctataactaattgattattaccagcataattttgggtttcaactccaatgagggtattatttatggtgttctgatgtatttgataccttaagattgtcactttttgtttatgctgctcccagagatctgtgtattgagactgtgaaagcttgagtttatgatattgttttattcgttttctttaggtggaattactttgcatagaaaggattgcagagtaccacttagaagaagagttcattgttcgttgcagcaacctcctccagcttggccaggaagagctattccagagcaagatctttgtaattggaatgtcccaaagcctatatctattattggctctactggctctataggaactcaggtacaaaataaaaccaaaagattaaggaaagaaaaagagagaattttgtctatgttgaaaaagtaatcaccaaaacaatttgtaaagattttcaagttgtaaataaaaaggtgggtcatttccttcccccaatcatattacagagttacttgtgtaaatactttgtaagcgacaaatgaaacaacttttcttagccaggtttctgtaactttggaaactaagatctcgacttcagtcagagctagctattttaaggctagcttagtggtgagggagggatgggataaagagagagggcatgggttcgaacccaagacccttaagttattagttgattgtaataccattacgctacactcatgaaaaaaaaataacaatacatggtttcttgccttcttattattctctcttcatacttcccttgtaactagagtatgttgattttcagacactggacattgtggcagagaatccagataaattcagaatagtgggacttgcagctggttcgaatgtgacacttcttgcagaccaggtattctgttaacctgaactggttcactttataaaatcacagatcataactatgatcgtttttatataaaggtttaaaagttcaaaagctttccattcatacattagttttatcattttgacaggtgaagagattcaagcctcaaatagttgctattagaaatgaatcattaattggtgaactgaaagaggccttaggtgatgtggaagaaatgcccgaaattattcctggggaacaaggagtaattgaggtgaccttgtctttaacttactgtctgatgataaaatatatctcttcttctaaaatttttttattattaattcctttgcatcagaaaagttgaacattaatatttctgtgtttaggttgcccggcacccagatgcagtcacagtggttacaggaatagtaggttgtgctggattacaggtaagcccataaaggttttatatgcacactatttttgtattatgaaactgtatatatgtagaatcaactgaagttttcttcctattagctttataattttttactttttttgaggaggttaattcaaaatgtggcgaaacatatctctggtattactatcagttgaagtatattttctgtttcttttttttccttagcctacagttgctgcaattgaggcaggtaaacacatagctttagccaataaagagaccctgattgctggaggtccattcatccttcctctagctcacaagcataacataaaaattcttcctgccgattcagaacattcggcaatattccaggtacatatacaaacaaatttcaatggatcttgtctatcctattgattatttctatcacatttgttagaccatcttgtcattatgtgaagcattggttaaataccaggaccaatacttttatggcattgtcatcattgtgccacatattttcactatggttcactagaagtgaaggttaaagaaatctgttttcttcagtgtatccagggcttgcctgatggtgcactacggcgtatcattttgacagcatctgggggagctttcaggtgtgaaataagtactttggatcgaattttttagggaatagattgtttaagctcattgataggacatgaactttgtattactgcatcagtatttaatttatttattattttggtactctaatttacattatgaactaaaaagacttgcgtaaattatttctttagaattatgctttgtagattgttggattttctctgaaaaagaaagttaaaatcccatagtttctcctgtataagatctatacgtcttatcctttcaaaattccttggatatgagtagtcactaattactatctatctagtctgactgccaattttggtgttttttttttttcaacccaagctcttttgttaagattctgttatagcattatattaaaactcctttatgacagagattggccggttgaaaagctaaaagatgttaaggttgctgatgctctgaaacatccaaactggagtatgggaaagaaaatcactgttgattctgctacccttttcaataaggtttgatacttggttttttttttttaattgttttctgatgtattttctcatacattttcaactgccagcagtaataaaaatgatgtctttgtttttcctttttcttaattctgaaacagggtttagaagtcattgaagcccattatctatttggagcagactatgacaatattgacattgtaattcatccacaatctataatacattctatgattgaaacacaggtataaagccaaaactagtagtcttggttcttcttttgctagtttgtaataggactgtaaattacaaaatggagagtctataatacaaaattatggtttcttcaatttgtcttccaggattcttctgttctggctcagttggggtggcctgacatgcgaattccgattctctataccatgtcatggccagacagaatatactgttctgaagtaacttggcctcgacttgatctttgcaagtaattcacttttcccataatctttttccacatgttttatcaaatgatatgcctacacaataagccaaacttcagcttttacatgtaatttatgactttcagaaccaatgtgaactcacacgtttcccccctttcttgacatccataaactattcaataaattagcatattttttaggcttttatttatttatttttaaaagataaaaatctaaagtgaaaagtcatgtttattctaggtagatgtctttttcatttttatatatttttagttcttttcctgcttttttttttttggcccgagtgcataagtggaatttgacattgatacaggcttggttcgctgacttttaagagtcctgacaacaagaagtacccatccatgaatcttgcctattctgccggacgtgctgggggcaccatgaccggagttcttagtgcagccaatgagaaagctgtagagatgtttattgatgagaagtaggttttctatttcatcatcatcatcagctttcattgataagattgtgtcacttcaaatcttaactttgcattatctatcactacattttgttatgtgttctaccttcctcattccaaattatattccatccatgttttcaggataagttatcttgaaatcttcaaagttgttgagctaacatgcgacaagcatcgatcagagatggtgacttcaccttctcttgatgaaattatccactatgactcgtgggcacgagagtatgcaactactagtttgaagagttcttccagtccaagacctgttacagcatgagaggagacaactttgccattgttgaccagggtggcaaaattttataggatttgaatttatgctgagatattatggttttcctctaatagtggcaaataaaagtagagggattgtgttggggtttggttgagtaaaaaaaaatgtgtcttcatatgcatgtaaataatattcatccaaaatgttcctcccaatagagaaaaacaaggtagttgaaatgcttaaaagcatatttactggtctcaaaagagaatgaaacaattaatgcaaatcaatttttgtgattgcatgatgtgattccatttccttcttattcaggtttcatattgtggattgcacaagtaaaattgcctcatgtttttgactttgattctagttgggcaatttgcctaatgtttgactgaattttattttatttgtggtatgtttgacttttcattgtggttgggcaatttgcctaatgtttgagtttgacactgatttggattttgggctgtagtgagattcaccctcttctactggattggtccaaaacagttgggcctgcgcataatttattgtaagttggaaccagataggtatttaaagaatttataatagtcaacttacatttatatattgagaaatggtaaaggcaatagtggtgttttacacctttttgtatgtcaatattgttattggttcaactaagtatcaggtactatataatttaatataataacttttagggagtatcgctagtcaattgcaacgcgacatgtcgagaaagtgttagacaccactagtgcctaataagaatgcttttatatatattgggcaagactattataagctattttagccgttgagtggaaacttttttagctgttgagtttggatcatgtggtaattggtaattatgatgttgggtgtacatttttattgtattccattaaagttttattattataataatatttaattatgtaaataacattttatttaaataaaataatattaattaatcaaaaataccaagccttatatctctctcttggttcagaaaaacaaaattagcacaaattaataaaataattacttttgaatatcatttaaacaaaagtaatgaaatattcatctaaagtggtcaacagtcaaaaattactattatgaaatataaattaaaattaatttaatctaatttaatattttcataaaataaatgtaatatatttttatttaaaggtaaatctatagtacactcctaaagtgttgttttggtagatcttctatctgtttcggtatataagagaatttttttagcctatttttttttcttcataatcgtgtatcttatagttactttagacctcttataattttttagaaaattttaaatttaaaatgtcgaaaataaaatttatataatttgttacacacgcaactgtttttcttatacgcgtggtaataaatgagttgtttaaatattatttttgacactgtaaactatttagaattttttaaaaatttacaagtggttttaaatagctacaacgtatacgatcatgaaagaaattagactaaaaaataattttagatgccaaaatagatagaaggcagagtcggccctaggcataggc

SEQ ID NO: 253666 - DNA, 2178 bp, Cannabis indica
gaaagattgcccacaatgacaacaaatatttcaagcatctcttgaaggacccatagggagctatgtagagtctactccttttcatggacagcccaggaccaaccagtctcactcttcatcctacagtttcacacccccaatcaggccagcagtctcagtatcaccatcagtttaggccacaaggttcaggcttcaacatggggttctcacaaggtttccaaactcctactcctagttggagtcaaagagggtaaaatcaaggtggagggtcaggtgcaagtacaagccatcctagtcaaggaaaggaaaagcaaaagaaaagtcatacgcttaagcctacgctcttagggttgatgatgtacaggacggtgcaaaccaaggagttgttgatggtatggttcttatctcacactcttgggctcatgtgttgtttgatactggtgcatcacattcctttatatcattgatgtttgttagtatgttgggtttgtattgggaaactttttgtcctgcgttgcatttgagtgtacctataggaggacacactgaggtatccaccatatgtaggtcaatttgtattgtgtttgagggacaaaagttgtttggaaacttattagtgttgcctatggggcaattagatgtaattcttgatattgattggttgtctaaataccaagccattatggattgttcacgcaaaagggtgactcttttaacccttagtggttatttcattatttatcgagctaacatgagtgttgtgagacaaaatcctatcttaagggcatgcttaggtgaaaagagaaacttagagtgttatgggaatctgtttgcgatcgaggatgagtctacagatttagcccagttcccttagatatctatggttagtggtttttctagatgtgtttccagtaggatttaccaaggttacctacctgatagggagatcgaatttaggattgatgaactatttgatcaacttggttgttcaaagttctttccaaagattgacttgaggtcaggctacaatcaactcaggattagggaagaagatatcactaggactgctttcaggacacattatggacaatttgagtttttagtgatgccatttaggttaacgaatgcacatactgtatttatggatctcatgaatagagtctttagacttttcttggataagtttgtggtgatattcattgatgatatcttggtgtactctaagacatgtgaggatcatgttaaacacttgataatagtattacagacgttgagagatcattgatcatatgctaagaaagagaagtgtgacttctggatgactgaagtcaaattcttgggccatgtaatttcttaagatggtatcactgttgatcctgcgaagatagactctattctacagtggaaacaatactagaaaaataggttttagtgacacacattgagtaactctaaaactgtttagtgacacttcaacgcgaatcactaatgaaggtgactggaaagacagttttagtgacactccacacatgtcactaaaccctttcacattcactttctgcacgtcacaataggcgtataaagtcaagttttgccagactaaaaaaagtaacaacaacaccccatagagtgtcactattatccttttttttattaatatttaaaggtatagtgacccacaaaaagggtcaatatataaatatttttactaaaaaaaatatttaattattttaattttaatttatatattatatattataaataataatttatattattttttaaaacaataattaaatatatatatatgtataattgctaattttatatattatttaatttaattttattgtaaacaggtgtggattggattgataccaaatttcattttattaaaaatgataccaagtttttttttttaaataaaacttaaagtaatttttatggatatcaatgctgtaataactaatcaaattcctatatacttacataaaatactcaaaaggtttttataccaaatgaacaaacgaaaatagaaatccaaaataaattttagtaaaatatttccaacaacaaaaagaatatataattgtttaaaagaaaatacaagatcaatgtaaacccataattacgggtatgagcgtttgaataaaaaaaattagaaaaaataacttagtc

SEQ ID NO: 253667 - DNA, 589 bp, Cannabis indica
cattttaagcttctgggcattaaagatttgtttttacttatgttgtttatttatgcattattgatttttttcttaacaattttgtgggtttaaaggaggtgtttgtggatccttcccgggatgaaagtttgatctttgagatattagaattgaaggaagaagttggtgatgatggaagtgcttcatggtttcttcaagaccttgcctctgaacaagaatctgaaggctgcgtggtaattaattttccctattattgttcacactcattaattgtgtattcatctatcaattgctaacttgatcatattttccttgtcttagattgtttatggttttattttgaaagggttatccaatttgtttcatataaatgggtacatgttaatttagtcctcttcagttcttattctctagtttcaatctatgtaatgtaagatggtaattaaagggaaatttgtggcaaaaccctcttaatatttataattgtgacacgtatgaacataattaaaaaaaaagtggcggcaaaatactttatcttatgatcttgttgtagtcgtaccaactcccttaatatttataattgttatac

SEQ ID NO: 253668 - DNA, 667 bp, Cannabis indica
cgaagactttctcctttctatccagaatctaaacaggctgctcttcatagtataagtctgacaacaattcaagggcttcataactcaagatatgagttgggtttgaaacatatttcctcaacagtgaaatatggaatacatcatcgataaccaatagtgctggtggtaaggctagccgatacgctacctgcccgaccttctcaagtatctgaagtggcccaatgaacctagggctcaacttacccttcttctcaaagcgcctagtacccttcattggtgaaacttgtaggaaaacatgttcttctgcctgaaatgtaacatctctgtgcttcggatcagcatagctcttctacatgctttgggaagcaagcatccgagccttgatcttgtcaatagcttcattggtcctctgaactaactcctgacctaagtacttcctttcgccagtttcatcccagtgaataggggaatgacatttcttaccatatagcatatcatagggagccatccctattgtactctagtagttattgtggtaggagaattcaattagaggcaagtacttacttcatgaaccctcaaagtctatgacacaggctcgcaacaaatcctctagtatttgaattactctttctgattgaccatcagtctgagggtgaaaggctgt

SEQ ID NO: 253669 - DNA, 664 bp, Cannabis indica
aactgtcataaattgcagcagcttttttcagattcatctgataggcaaatagatggacatactgacttgagaggttaagtgagtttaatcccaacacatatgttttggagtacaaaatctatcccaaatgccttcataatgccatctaacaatatttccttgagacaacttggtccacatatcaatatggaaaactgatattttgaaaatcctcatgggagaagagttgttttattattttcatgacttgaacaattcttttccaatattatatagatatatatatatatgttaacatagattttagttaaccaataaatgagcttttatgtaataaataaactctaggataataataataataataataataataataataataataataataataataataataataataataataatagttgtgattaatataaatggcaaaatggttattaacatggttttaaatttaattttttatactacacgagtccatctattttttatccctatttataggagttttaggatgacagttattctcttggagtcttatccctgtaatcgttcacgtttcatatttatatcacatgggagaataataaataactgttggaatttattttaccaggatcttagatctactcacaagtatgttgtttaa

SEQ ID NO: 253670 - DNA, 997 bp, Cannabis indica
tttcaaccttatatggcaatgactttttctttgaattttttttttttgaataaaaaacatggtcatcctccattgcaataggttgagaaacatggtcatcctccattgcaatagcgtttttacctattttagtttgcattttggattttcttaattttttttagtaacatttctaggatctaggattagaagaaaggataaagaagctctagaaatagccatagtcttggtacttttttatttttttttaaaaaaaaaccccatagtgaattgtaaatttatgaactaaaaaaaataatttcacaaataaaaaatagagtggaatgggaaacatatgtagtaaaatcgtagaacaaaaaaaaagagtatttgagtgacgagagagaaaattatgtctaacatagtaaaaattgaaagaaaaaaaatggttaaatgtacattatatcaatattaatgtgtaagtagtcatttttaaatttttaaacttttaaaaatatattaaaaaaacaatcaatggtaaaattatttaaaatgctacccactaataagaaagtaataatgtaatatcccggaaattaatatattatttaattggacatattttattaaatatgtaattattttggtaatgaagtaagattatgatcttacttagggtaattggtgtaaatttattaaatgattaaataaagcataatttattaattacggaggttatatcaaaatatgtgggtatcatggataccatttttgaaataattatttcttgggtctggcaactgtggaactagacggagaggtcagaaatgtcacgacaataaaaggtgaattaaattggaactggatttataccagactagattagaaatttaagttgtcggttaggcgggattggttagaaattaccaaaatacccctaagatttgatattaagctcaagggttataagaagggtaaaatggtcattcggtgtgataagttaatgttatgtcttatt

SEQ ID NO: 253671 - DNA, 732 bp, Cannabis indica
ttgttaaatttaaggacttttgtctaatttcattcaattttactgtttcagtgattgtttatgtacaaaatcatgctccccagactttgtattaggatttattagtttcagttactgttggtgttagttaattccattttatgcgtttattcctcaagttagttaagtggttagttagattattttaggtcggtctgtgacctttttccctatatataagttgtattcttttactcttgtaactcattcagactgttttcaattcaatttcaataaacactttcactctattctgtttcgtgttatggtatcagagcgggaaagaatgctttccctcatctgatctcgatcgcttccgcctctcccatctagtcgtgtcttcttctccggcgaaggtggcgttcatccgtgactgtccttccagtcatcgtctctcttcttcttttcttgcctctgttttttacgaatgtcgaacaaggatcaagaaacacaagctgaaacaggggttgctactcctgtctcatactctgattcacatcaagataaccagaatattcaagttctgggcacaagaaaccctctcgaagatccctctgatccgttatcttcatcatggagataaccccgggaacgttcttgtttcacagccacttacaggtcaggacaattacatctcatggagccgtgcaatgcagcttgcgatttcagtcaagaaaagaagaagagagacga

SEQ ID NO: 253672 - DNA, 613 bp, Cannabis indica
tttttcttttttctttttaaagttagaatcttcatcatttcagaacagaaataatagctgaaatttctcttgagctttcttgttttttaaatattacagaatggtaagctttcgagaggcttgcagtctcttattcccaataacccgagagaaatggagctctccacaatgagactaatctctaatcattccataccccaaatgaaagcaattcttatctatatagtctttggcacaaaaattatcccagtccactaacctagaattacagtagtacccttcataaaaagactcctagaataaaaccttgaggctttttcctgtagtaagtttatcatgaagttcttctggctttctttgaacttcaagaactaacaaaaatgggaaagaagcagttatgtgctttgaccagctgtaaatatggaataaactgtgacaatttacatccttttattcagaaccaagtgcaaaagtctatacaaattaggagcatgttatttgtgtactattggtgtataaagttgaaagaatagctataagttggtatgttctcattgtcaccctctgcataaagttcaatatcatttagattttttatcatgatgcaaattaa

SEQ ID NO: 253673 - DNA, 1431 bp, Cannabis indica
tatatttcaaaatatagtagatctctagcaataacatctctagtaatctactcttcaaagcctctaataaacttgactttcgtgcaacttcaatgaccacttcatcagaagcaaacttggccaatctgtcaaacttggtagtgtattctgtcacaatcatgctaccctgaaccaaccgtataaactcttctactttgacgacacgtatggaatcattatagtatttctcataaaattaatattacctaaaacgtatcccaagtcatggtattcagatcatgaccctgagatacaatctccctccaaatttgagcatcatctctcaacatatatacaacacatcgaactcgattattatcctaaacccacataaaattaaagattttgtttcctgaaccgttcctaaattagttccatacagtcgctcatattttgttgcactacctaatataaggtgccaagggttccagaacaggggcaggacgagcctgttgctctcttaggtctcgaatttgctccccttactacctaattgtatcttgcatagcaacaaacacttgttcccagttatgaagtggtagagaattctttttctcaccacctaccctgagccccagatcgcggttcaatcgacccgatcacagtggttgcatgatctaatgcacttgcgatccataacttccaactatttacaactcagctagatatcaatggtaataagcatatcccacacatataatcatatcactgtcattactatattacttttttagcatgcttggtaataaataggcaagtaataaaataacaaacaattataaaagacttacaataccacgagtcgacatgtccttgcagtaaatgtaaatatccgaccagtttttagaacttttaaaatcatggctgctctgataccaagttataacgccctaattcctagggatgccacgtatgtatttttggaacatagtttagtaatagattaatgatttaatcaaatatgtgataaaagcacaaacttcactaaactaaaaccataggaataataggataacatcgctaaaaatttatttcgaggatcctttgttacaaaaattttacaaaaagggctatatacaaatgtaagttaaaatacacattaggtacaaccaaaacaactcttgtcaactcgaccacacaagtcggataagttgatatgtacatttatcggagaagattgtcgtctcatggttgccctagtttccccctgcccttacctgcaccacaaaacacttgttagtcacgaaactcagcaagaaaagtaattaacatcataattcagatagatactcaatccaagtcaaaaaagaataaatcccatactgattatcataagtataataggaatccatattaaacaagtaattacctcatgaggcaaaccataaacat

SEQ ID NO: 253674 - DNA, 1524 bp, Cannabis indica
tataatatacatagtactagactagtagcatgaatgaattattaattattcgtactatgtaaaataaatttaaaaaaaaacatgaatatgagtatctatgtaagtataattgctgaaatgccaaatggaataaagattcaaaatccctttctgcacattaaaataaatgttaggttacttgataaaagccaaagactctccctttgaattatgcccgctatgtgcaccaaggtaacttattataggccaaaaaaaaagagggggacatactcatatataatattgatgactataccctagagccgcactagcaacactaagaaataattaatatttagtaattctatgtatcaaattataacaagtacagaaattcggtgaaaaacattccaaataaaaaacttaaagcttgtcaaaacaaaaaaaaaaataaaaaaaaaggaaaaaactctaaggcacatgcacaacatgatacataacatgtttagttttttcttttttgtttggcataccatcagtagttaaacgtatatattacctactagtaaatacaaatacctaatgcctaaatgtgcaaattgacacttcaacaatacctaactcacatgttagttcctaaaataatagagtttgttttgtttgtttttgtaagactaagaggagttcaaacatgtttaattgatgagactgtttatgttaaatgtaattattgaacaccatgtaaaagaaataactctggcaaaagtactaaaattattatcaagtaatccttttagcaaggaaatattttttattggtgcatgtgtttgttctaccattaagtttatgtatacttttgccataaaaatttatgtattacttggatactttcgccataaaaatattttttaatcgtgtactttccaagtacttttttttatgagatgctttcacgacaagcaaatttaacagaaggcattttcttttttaaatttttgcaccaggcccctaaaaaacttgggacgaccttggacatgaacacaatctgtcacaaaaaaaaaaaatatgtatttagacacgacacaaaaaaaaatagttcatcatcttcatcgtttttcgctagcggacattcatcataatcaaaataaataatctctcattctaatccagtgtaccgagaaagataaggatcttggtctatgtatgggtcttatgaatcttcaaaagtgcttatcttacggagtaggacccctacaatgtctgtttccttgaatggtaatgaatttttcttctttgtttcagaggcttggtcctaattgtgactattttcatagatttagaattttttttagggactttgttaagcgtcgtgaataatctgaggtaaacattctcatgatgatcatcttctatttttggcctaatttctagtggatagtctggttttctcaaaaataatcttttagagaatcttatactctgaactttctttgtaaaggtattttttgggtagttgtactgtaacgcctttaatattttacctta

SEQ ID NO: 253675 - DNA, 1150 bp, Cannabis indica
tttctatcacaaaaacaataaaccccacaaaacaattattcataaacagaagaaactaaacaagaagattcaaactttaatccaataaaacaacaacataacaaaaacccagttacggtttcagttaaattcactcaaatttcatatcccatttcatttatatcacaaaaacaataaaccccacaaaacaataactcataaacagaacaacctaaacaaaaagattgaagctttaatcccttaaagttgattatacttacagaagataactgcagaggagtggtgagagcttttagggtttaggaagaagatgacaatggaggtggctggtgggttttggataagaaagtgtttgtagtatagtgttgagagagtttttggtgaaaggttaggtttttctttattcgttctagtcacagagagtaagtattacagtgataaataaataaataaataaataaaataaaatggaataaatgttttgaagcattgatcttgaaccttctagaatcagaattaatctgaaccgtccaattgtttctaaggccttctcttattgtcgtttatctattggtttttagaactctctagaattgtttgttttaggatttgaatattgaaatcaaagtcttttatgttggtgggtgtgggttcttgggcctagggtatgggccttatgttgagcccaataaagatatacttactagccttcctttatggtttggtatcaaactctcttggttctcctttacaagaaaaagaagcccaacaaaaatggtccaaatcaataaaaataggccttaataagaaagatctaatgtgcaatattgaaaccaaagccttttatgttggtgggtgtgggttattgggcctatagtatgggcattatattgagcccaataaagacatgtactttactagccttcctttatgatttgaggaaattatactcactttatatatttgttttaattttttatcattattttcatattctttaaaatacacctatttttatagatgatacatttattatagatcttaagtttaatgtaaattatgttctagacttaagtagaggatgaggatatgttgagcaacacactcacaaaagtaggtatattttaatgaaatataatatgaaggtatc

SEQ ID NO: 253676 - DNA, 515 bp, Cannabis indica
caactatttttagggaccaaacgaaactttcaagaggccaaaactaggtgttgggcccagtgtcaggtgtcaacttgaggggtgggtcccagtttctcaaaaaagtgttatgagcattttttcggtcataaaaaataatgaagatataagcaaactcggtgagaaaaccacaaactcgaggacctggaaactgagcccagcgcccaagttgacaatcaacctggtgcgctggttttgatcattcaaatgccaattttcttctggacattctctctagaatggtcaaaagtggagtaaaagacatcgtcctcaagttttggtgttgggcccatcacccaagttgacaatcaaccttggaagtatcaaaacgacatcccagaagctccaaaataagcacccaacgctaagagtgttcgcggtgcgggtagtgtgggttgtagcttttttttcaaatcaaactgcatatacaatttttgtaatttttcaaacccctaaataaatgttaaggaattgaa

SEQ ID NO: 253677 - DNA, 716 bp, Cannabis indica
agacctggacacgaaccgggatccaaacccgatctcagacccagaattagaatctgacacggactgggatgagaaaccagacctgggactgtaacaggacccaaacgtaaacctaaacttagaccaaaagccatatcaggacttggacctggaccggatctgtgacttgggacctaaactgagaccgagacctggacttagaccgtgagccgaagcaagaccaagacctaaataccgtggtgagacccaggaccgaagaacgaactcagacttgggacccaaaacttagacccaggctgggactgggacccgaacttagacccaaacacaaactaggacctggactcggatcaggacctgagacccgaagcaaaaccccagcacaaacttggattgagaccgggacctaagacctgaacatagatgggggacccagacccgggaattgcgcccccaaactgagaccagaacttgggcctcgaaacatgaatcgggattcgggacccgaccccagacccaaacctggacctaagacccacctcgggacttgggatctgagactcaatgcttggattcgacacgtacaccatgacttgaaattggaaccgaaactagaagcggatcgagacccaggaacatgactaggacaaggacccagacccaaaattgtaatcggaccagcacctggattcagacacagacccacactcggattt

SEQ ID NO: 253678 - DNA, 686 bp, Cannabis indica
gttcacaatctcattcataacatgatccaaacaaaaattatgttgaacatcataaagttgaacccataagtttggcttgttaagaactattgttcataaattatcgtccaaccagagatgatggaaaataagtttgtagtattcaaaattttaaagactcccagtaattactctttgaatatcaatctcatggtagaaataaaatggatataaattttttttcttagatctttgacatacagacctttactatgcttcaaagaaaagccatggtatgttgcatttcttgaatgtcaattatccgacacttagaaagctacccactaaacaccatctcacgtcaaaatcatcatcttccatccttaccaacaacgacagtcctcaaatctcctcattctctagaataattccagcacactacacctccaaaccactggaatcactagtcgaatccatcgatagaacaaaatgacaaaactacgattttttgacacaaagaacaaaattaatcatgtcaaagacaagactagctagctatgtattagtcttttaggttggtggtacttcacaattgtagcagtatatatttacatatatggatgaatattcattagttacatcaaatatgtaactatttatgattatattaattttagtcattaaattattaataaataattatgatt

SEQ ID NO: 253679 - DNA, 734 bp, Cannabis indica
actactgaatcccacttgggcacctgcgaagggaaaaaaaaaagacagagagtgagggtgagaagacaggtggcgttcttgattaatgcaaccaattagaacaaataagttgcactaatcataaaatttattctccagcttcacatagtattactcagaatctaaagttagtacaacggttaaaagaaaaaggggcatgtaaaaccagatgttatgtcgttaatctttcacggagataaaaagtaaacatcaggaaatatttttcccgttgcctttctccaacaatagatgccgatcgtttcatttaccaaatatttcttgctctcacaaattgattcttcgggttatgggggcaatctaaaaactataggatcttcataataataagaatcaaactggaaaaataatattttatacacaaatagacataataacgaaggggtttcgatgaattttagactggtcatttttatggcaaacaaattccactggaaaaaagaattcaccttaaaaaagtagtaagaaatcattcttaatactagaagaagtagttagtttggtgcataatgaaaagtaaatcaacatagtgaggcgcatattacggaacctctcgagggccaccgtcgtcgttgggtgtgaagcagaggttagggttgggtttagactgtcggggtgaggatagggtgagtcagtgagctaaggttgtgagagaagctgatagagaagttcatttg

SEQ ID NO: 253680 - DNA, 657 bp, Cannabis indica
tttaaccaatgccctagaaaggacatatcacttatccaagatgcaagtaaactacattgtatattatcctatcagttaaaccctgtgtactgataaatcataagaatacatttaatcacacaatcttgattactttacattgtgttgacaacacaatagacaagaatataagtgtgataagaatttggatgaatttataaatcaaataaataaataaatgatcacatgaaccaaataacatattaaataagtaataaaattaaatatgtttctttattggtaattgaatagaaaagattacattgaaatagagtttaatttagggaacaaagcccaacatccatgacagaactccaccaacaaacataagcacgtaaccaaatattgatttatgtgaatcagtataaccaatgaaatctaaatctgagtatccaactacttctaaattttcagttcgtttgaatataggtttgtaatccttagtaccatgaaggtacctcataccttttttcagctttccagtggtctatccccattttactctgaaatcttcctaacacttcgaaagaataagcaatgtcgggccttttgcacacttgagcatacattaagcttccaacatcagaagcataaggaatgttcttcatttcttctctt

SEQ ID NO: 253681 - DNA, 735 bp, Cannabis indica
tattacattcacacatgctatataaatttctataattaacaaattacgattatttactcacttatagcagaatttaaattttatgctgaaataaattagtaggatcataatcccacttacctgtttaactcataatataaatataaaccctaattatttaccattagacttattgggatattacaccaacattagtaggaagtatctcatagaaaccttcccaaacaaagtttaaaatctttttaggtaaatacatcctccaaaacttcttccaccgaactaaaaacacatctttaaaaggagacaatttagacaaatcaaacgtagaggccacaacataattacttttaacggtgtaagaaccattcgacgtaaaatgtcaaagccatgaataaactttagaaaacttaccaagaggtatagaaccaatacattgttgatttgaaacattaaacaattgtcgtataataggtaaattccacaccctcctcgtatacctatatagagtctcatgttcctactctttttcgaataccttttataagaagagagaaacccagataatactacaccaactataactaggggttcttccaactacaagtatatctaagatagccataactcaaataaagtagtaataaagaaacaaataagttaaattaataaaaataaaataattaaataaactaaataatagtattagttagccacttaggcaaacatttaatccta

SEQ ID NO: 253682 - DNA, 996 bp, Cannabis indica
ctgaattaattttttgtcaaaataaaatttaattataaagataaaaaaaatcacactaaattaatttttgttccattttatttttataatcattctcatttatatattcttatattattattttattctaaagataaattaaagggggaccttattttgctataatgaacatgaaaaggcctacctcaaatacgtgtttttgttatcaaacaattgacccaaatttgaaaaagtctcaactggaccctatttccttgtcattaatttttccttttttttatcttctttgtctttgtctttgttcttctaattaattatttaattaattttactttctattttcaatctatacgcatttcgtttacgtttctagctcataataaatagggaattaattaatactaagccataattcacccaatctaagctatatttcaaaaactcattaacataaaacacgttatgagctttttttttcccttaagagtcaatatgaggagggtttaattcaagatgatcatgactttgtttttatttttaaacttgtaactgtagtatagttagaaaattattggaaacttgaaatgaatgatacgaatatataaaaattcttattgcaactagcgtaaaaaatattatgttcatttcaattatatatatgtagaagatatgaaatatttttttttcatatatattgtagttagagtagagaatattatgtccattttcgataaattttgaataatttaagatgtttatctgttttattttataaacggacttttttaaattttatttaagatattattataaattatttaaaaatatataaaaaaaaatgtatacactgttataaaaaaaaataaagactttttcatttttacacttcaaaacagtttatttttttatatatatattttttacggaattctacatagttactcttattgcaactagcgctgcaacttaaatcgcaacaaaaaaaatcgtatagaa

SEQ ID NO: 253683 - DNA, 996 bp, Cannabis indica
ctggttggtccacgtatattggggaaattaaggggcaacagctatcaatgaaaaaaaaatattaacatcgcttttagccaacgacgctgagtcaattaaaacgatgagaataatagataataattatatgtaattaaccaaataagaacactaagatttatagaagttcgaccctgtgattattgtaacaacctactcctatttttcttgtattactttaaagaattaatataatcacaaggagctggcaaagtggatttattaagaattctcaagaaaacccttacaattcttttataacataagagctctctagaaaatatgattcggatccctaaataatggaatgactctattatttatatgaaaaattacaccaattttatttcccaaaataatgaagaaataaaagggaaaacttgattaatttcatattttacaacaataacctatggaaatcccattgaagtaggaattcaattgaaaaagaaaagcatcttaaaaaatttgcttccgccgcatttaccctgatcggtgtatgcaatcagctgagagaattaagctggttagaccattatatttaccatgtccatatgttccagcttcatcttcaaataaattatttcaacaaagttgaggaccgtattaatcgtcaaggtcttagaatgttctccatatgtcactaatagagtgtcatgtcaccttctggagaatttagaatgacaaataaccaaatatataaaacattagatgttggttattatgtacaaagccaacgctataaacacatacatcgtcgattatttgataataaggatgtcgtaggcaacatttatgaaaataggcatcccctatgccgtcagtgattggggtgtatgccttcggtttattcatccctctttagcgacttttggaataacatcggtcgtgaattttgtcaaaatagacgttgtatgtcccaaataaccgcttctaaagcccagttttcaagtagtg

SEQ ID NO: 253684 - DNA, 1149 bp, Cannabis indica
attgttttcttaattattgtcatattactatttctcttataaaaatgttgaattggtaagtgattaaattgttttgacatatattataatttatagtcttggatgaatcatctttcccccaagctcatcaaatccaccaaataatacaacattaaacatgatatatatagcataatttgaatatttatttaatccatattttcctatctttactataaaattaaattagcatgcatggtatatataaacataatttgaatattttactctttattttctctaaacaatattttgttaattattatatcatattactattttcttttataaaatgttgaataggtaagtgattttttttttaatattagaattattaactttggatgtgctaaatacacttataacacaaatatgattataagtcaattgtattataaatttaaattaatttacttttagaattattctttagtgttgttattcaaacttgatcatgaggagatctagctttgatatacttcatataaacaatcaagggtgacaattctttgtttatgagttatatttgtgtcgtatcgagacccaaatccgttaacttttgtgtgaattttgtagtcgtgctgtcttgtctttattacgttttcttacctctataaacaactcgtgacgaatatgaaaagaagaagagagtacaaaaaagattgaaatgatgagatatatcttcattgatagcaaaaatagtcaatcactgaaacaacaataataaatgtagggagcattaatagtaaataagtaacactaaatttttagaatggtttatccgaattaaaaatatcagagtttagttcgagtcataaatagtaaataagtaacactagatttttagaatggtttatccgaataaaaatatcagagtttagttcaaaataaccatagtgtgaaataataattaagagcttattaatttaactattttataggtttacataaatgggccttgaccatgatcaagttaatcatagatttgatatgcttaattatggttaagttataatttaaatgtaactaataacaaaataacattaataaatatctcaaatgaatatcttcaaaaaacgattctagtaatcttagactcgaaaacacacg

SEQ ID NO: 253685 - DNA, 997 bp, Cannabis indica
aaaccttctgccatagaaagggattccatggtctcccttctttcgtgtaatgaagctctgagaagttgcagagattgaatgtctcagtggaatggactccatagctcaaacaaacaaaccgaattcccaattgttttttttttaaattaaaaattaaaaaaaaaattaataaaaaaaataaaaataaatataataaataaaaataatataataaattacaaaatagtgttttttaaattatgaatagaaaaatgttcaacaaagcgtttgtagtccaacggttaggataattgccttccaagcaatagacccgggttcgactcccggcagacgcattttcacgttttaatacttataataatttacttttttgttttatttatttttttccttaaaatactaattgtatttttttttttttttttttttaaaagtaagtaaacaaattcattaaaaataatgttatacatgtcaaacaaataatatagatgatcatcacaataatactatacaatttataaaaaatgtgaatagtcatctaatcaaataagttattcattcatccaaacaacaaacacaattaattcacttttagaaatttacataacaaacttgcattaacttcttctaacaacgaaaatcatttgaataggaacttattattctttctctaaaaattttaaaaggacaaacatgttttaactgtatataaacaaattatatattagtcaaattaaaaataaaaatattaaataaatattgtcacaaatttttatcaaaatgccaattgaataattcttcattcatatcataaaaattgtgactaatttcactacaaatttcatcactctatataataagttgttatcagagtcaattttaattttagtgggtatagaaaaaaaatatagtattttaaaagggaaaatattttttgggtgagtctattaaacagaggcctaattcgtctatgttcaaaattaaatgtgattattaa

SEQ ID NO: 253686 - DNA, 540 bp, Cannabis indica
aagttcataaaaaatactttttttcctccagttattttcagtgtcgcctctttttcgtttccccggagcacgttcagatagagcattcacttgttctaatatttcagaacaagtaaatcgtcttggcggaggtctcttctcaacatttccatcaaattcacggtcttttctcatacgatgattggatggcaagaaacgtctatgaccaacataagatgtcttaccaatcactcgaatagaagtagtatcctcgttgcatgtaggacaggctttatatccctgtccactccatccggacaagctactacgggcaggaaaatcattaattgtccaaagaagagctgcgcgcatgttgaacattgagttggttgtagcatctcttgtttcaacaccctgagtccacaatgcgttcagctcgtccaccaatggccttaaaaagacatccatgttaccaggtgacttcggtccgggaataaggagactcaacatgaaattgttatccttcatacacatccaaggtggcaaattgtaattcaccaa

SEQ ID NO: 253687 - DNA, 878 bp, Cannabis indica
aaaattcatgatggtgttgaaagagtgttgaaggacattcaactagtacctgatctcaaaagaaatttaatctctgttggtatgttagatgatcaaggatttcttgttaaaattgagaaaggaatcatgaaagtctatagaggtttgatggtagtaatgaaaggaagaaaatcaaatgggatttatcctctggaaggtaccacagtgaaaaacacaaaagcgtgtgtttcaagcaagtatagcattagagacttggccatgttagtgaaagagggctacatgaactgtataagcatggattacttggaaaagtaaagcttgagcagttagatttttgtgagtattgtgtctttggtaaagcttttagagttaagtttggaactagccaaaaggataccgagggaacactagattacgttcacagtgacttatggggacccttgaggacaccatcgtactctaggagcaagtattttctttcagatgattactcaagaaagttatgggtgtttattttgaagaataagacgaaggttcttaaaagatttaagcactgaaagataatgattgagaatcaaactagaaggaaagtgaaacgactaagaatcgacaatggtctagagtactattcagatgagttcgatgtgttctataagaaagaaggaatagcaaggcacaagactgtgaggaagactcctgagcaaaatggactcacagagggattcaatgggactatcttggaaagggtcagatgcatgctattgagtgctggattacccaaagtgttctgggcagaagttgtgtccactgcagcttatttgataaacaaatgtttgtcaacatcactagatttcaagacgtcggatgaggtgtggtca

SEQ ID NO: 253688 - DNA, 1433 bp, Cannabis indica
tcaacctccaactcttcatataaactgttgcacattttttataaggttgtgtcaattttaaccatcaacgtcatacttccttcacttttatacacctaattaaattcctcaacactccaaacaccatcatacaatacaaccagaaacacaggcgatcttgcaattcaatacaaactaaaaataaatgaatcagaataacaaaataacaaaaaaaaatacaataatgggaaatattgtcgacaagcaatcaagaaccaattgagaacttgtcggaaagcaattgataactgttgaaaaataaaaaacaatgattcatcaaaaaacagttgataaccagtcgagaaattaccgataacatgggacaaggaagtttgaaaatacaactatacacaccattcaaaaactatcgataaacaatcgagaacacgtagataacatgtcaataattgttgcaaatacaaaattattaaccatttcgataaataatcgagaacctaccgaaaaattgtcgagaaaggtcttccttgaccttgggtcatttgcatcgagaacccgtcgagaacgtatcgaaaaagcttcgagaaaaatacgaacaaatcaaatgcttaagaaaattagatcttatgatttcagcgaaaaatatgtcaaaagtaaacaaatacaaacatcaaccacatagatctactgaaaatagactatacttttacaatcatttaacaaaatgttttaaaaataaacttacctattaacgagctccgactttcaattaaaatgtggtgtggtggacgtttaggcttctatggaggacaggacatggaggataagagacggaggatgggcgttccatggcgaacgtttgggccttcaatagaggactggacgacgttgaggccgatgactcctttggggcggatgagatggatctagagagagaaatagagggaggaggagggccgcaactcttttggacaggttgatgagagaggtgtagagagagaaataagtttttaggttttttaagtttttgaaataaaataattagaaatgattttttgagtataatgtggaattattagaataaaatggtgtaaatttattaggggatatattttttataataagaattttttgtagggataataaattaaatttccctataaatatcaatgtctttccgaatcgatccccacacaaggaggaagcttcgttgttagatgaatccatgaatagtagacttcaaatttaaactagttatttcgaccgcaatttatttatttatttttgtaagggtccacaaaaattttgttcaagtatagtttaaatatgagaaatgttaaaggcagggacagacccaattgagttattgtgggggctatagcccccactaataaaaatattgtcttttaaaaatattaaatttaattatttttaat

SEQ ID NO: 253689 - DNA, 598 bp, Cannabis indica
ttccgctgcaatcactgtaagatttctaatactcttatgtgtttaatttcatatcgttatagaagttcatatttaggttgttaaatcaacatacttgtgagtaaatctaagttcctggtaaaataacttccaacacaaacatcaccaaatattctaatcaaaatagaccctaaaaagaatgggccacgtcctaagtgattcggaaccatgctaatagctcatgtttggtttcaggtgagccaacatcactccctgtggtaaaatcaaattactactcacagtcgaaactgccccatggaaaacatcactatgactaccttcatagtgattgacaccaagtctccttggaaggtccacacccagtgatctccaagccatctcacctatctaccacctgtttgtcaagttctcaataacagttggtatctaccatctccttggcaacgaaagagtagcatgcaaatgttacaacacatcattgacatttgcccagaagacctcctccattgtgctaatagctgaggggacgaggaagacctcctctactgtgctaacaactgaggggaggtagaagacctccttcgctgtcgagatagcc

SEQ ID NO: 253690 - DNA, 706 bp, Cannabis indica
tgttatagctgtgctagtcatgctgttaaaaaggtttgccatttcctgtttattttgattgtgaatattaaaaagtattagaattagctttagtattagctggcccattattttcagcccactttgtttcatgggcttccttctcctttgccctatacatacatctctttgtaataacctaaagacactttgggatttctgtcgattattgcagcaataaaataagatacttttcatctctatcatcgtatcagatgctcacaaaccctagactattcatcatcttccatggctccaagaacaaggaactcctccattgttgctgcttctgtcagcgagcccatgcctcctctcactgtcatctccagtcaagatatctcctccattgacgccactccttctgatgtcgtagctccgccctgttctcctccgactattccatctttgtcaaaaatgatcggagctcatctttttatgttcaatcctcccacttctggtgtgtttggctccggttacgctgccgatcttcccacttgttgaacgattggacaaacttctacagctctgatcggttccagctctgctctaacatcgtctttcatggcttctctgttggaaatattttaccaggatatagatttactaccaagtatgtttcattaacatccgaatatgaattctaaaacaatgaaataaacacataaga

SEQ ID NO: 253691 - DNA, 1058 bp, Cannabis indica
aaatgtaggatattatattttatgtttaaaacgtataaaaatacaccgacacatataagaaagaagattccttatacactagcttctcatttataatatctattatatatgttacctcctcatttctattacactcatttatgctaattacctctgaacaaaggtagagctaagtataaaaatttaggggatatttattgagtaaataaatgaagtggtaaaatattaaaatgctatactattagaggaaaataaatatcattttaggaatctgtatgaatgttgttattgtaagaatttagacaacaccaaattcatgcgagtattcaaaagaaataagaatacgtagttaaaaacgtgctagaatagcgagtactccaattactctctactaaatagacaaaataaaagtagaaataaagagaaaacaagagaattatagtggttcagctagagttcagtctgcttagttactgttataaaaattttcgcttggttcatttaatttggatcactcaattatatagaaaacaagtgtcctttaagattacataattgattcgttgagaactatttttacattaaataatatttaatcaaagtaaatgtttaaagaataaatgaatgatagtttaatctgttagtgtattaagttcaacaacgtatgcgacttggtaagccgcgagttgcctgttcatattccaacacacgagctcgcaggctttatggtgtttgtattcgcaaggtggccttcaggcctattgtttggatgtctgcgctcacctttgatagaataaatatacatcccatgtgttgacaacatgaaacatgcgagttcctgacgagttatcgaacacattagtcactcggaccacctatgaaaagaatcgatctttactagtcgcaagagaggtctacttggtcatcacatataattggtatatgtgcgaccaatatcaaatcctctcagttctgtttattcttttaactatgtgttacgaaatttctgtttattacgcaagtgaacgtatcaagtagtatctcacgcaagtgaggtc

SEQ ID NO: 253692 - DNA, 911 bp, Cannabis indica
actcaaccaaactttccagacctgcatattataccccaataaaccatttccaagcaataaaataactacccaagctcagaattgaaaacaccattaaagctccaagtttgagttctaaaactcaaaacttgactaaacctactatcaaccactaaatcacacttaattaaacataatctaacataattaaacctcaggaaacaataacaaacaaatacaacaacaacagcagcaaaaactacaaattcatgcaaaattccaaacttgaaactcaagaagctaaagagggagttgcttaaataatttaccttgccttaggttcactacaaccttgctgaattcccttattgagcaacaaaaaccagcaaaccctagctggtctaggggtttggagagagagagaaagagagagttgaaagagagacctttttccttacttttttctaatttttcaaaagttatttaatgaaagaaaaatgattttgttttattgtaaatatcagcctaagaaattaatcaaaatcatattaataacataatatgaacccacaaaaagacaaaataccaaatgggcaaaaagaccattttgccattccacactaaaagtcataaaaggtcacttaggtgtattttgggaaattctaaaatcccgacgattcccgacattcccaatgtctaactatattgtcccgctatactaaaaatactaagatgtgattctaatagccaaacactgcgtttcaatgttgaagacacaaaatatgcaaaatttacgaaatttcaatatatgacatattaaatgcattctaaattcaaataaatcatcataaataaataattcagttttaataaacaagtttcataattaaaccctatatctgctaatttccaaattaaagctaagcggtctt

SEQ ID NO: 253693 - DNA, 511 bp, Cannabis indica
cttcgtgtacctttgacaattaaatttgtgttgtcaagtaatattgcaatatgatacaacaaattggtttgtgcaagagtttttctcattttatggcataatagtttgtgtgccgctagaaaataaaggacaaccgtaaagactatagtcaagttttagttttagggtaaattttgctttagttagtggttgcaactagagaaacctatgtatgcaattgtgatctattccatcatttttgatggactggaaagttaaagagtatttaaggattgttataaaaagggttcataccttttcataaaaataacttttagaccttacatttcgttaaaaaagttaaaaattagacttttggacccaaattttcaccaaaatattctgttggatttggagctcctcgattttttcttgagctaacgaatttcttagatctagttatattagaaaaatattttgaccggaattggctttagtgtcttgatacttttttacaaaatacagagttcaa

SEQ ID NO: 253694 - DNA, 509 bp, Cannabis indica
agaatattttagtaacacaattaggtagaattttttagaatattatagttggttttttagtagtataaatagagaccttgggtcctcaagttgtacatccaacaagagtgtttcaaagtgtgcctaaaagagttagagtgtaaacaaaatgtcccaaaatgtgagttatatacaagtgcattataaaggtgtgtataaataaataaaagtgtgagtgcttggtgtgttgttgtcaagataaagtgttgaagtcatggtgtaattattttctcaataataaagtaattacaattttctcgtattgtccaacaagtggtatcagagccgaattgagtttgttctgaaagagttttttgttgagtttcttagagtgatcgtgtgtggtttagtactatagagcttgcacgatggatgaccttcaagtggttggcagaattaagaaacttaacaactaaattacaacatgtggttgatacttttgcatcattgttcaccaagaagaatgatac

SEQ ID NO: 253695 - DNA, 1367 bp, Cannabis indica
catggcagatgacctctctaagtctggaaaactcgagatcttctcccaagtctgcatggggctcgccaatggctagttcaccaattctcggagccgtttctgtagcatagtactggggacgaggtctagttgttattcctgggggctgctccacgtgggtccttccttcagtgggaggcgctagtggagggtcttcccttggaggtaggggccgattgtttagatccatcgggatatttatgttgacctagccatctctaatggccaaatttgtggtgcctaccgagatggtaggattgaccacatttgcagtgttcgtggaaattccagtcgtgattagaccatggacatcaagatctagaatcaaagggtcttgcgggacacccgatgaggcagaggctgtagtcggagttcatctcatgttaaccatagcgtttgattagattacttgagttcggctcgctctcaatgaaagcaccaaactattaacctcagatttggccaactgacagtggagtcgagtgtaataccgatgctttccatgtgttacacaattagaacaataaagtaaatgaacacaggatttatagaggtttgacccctttagttagcgaataatgacttactccctttttagttgtattgatgccgagagatactcaaatcattatagagatgggtctgaactgaagtagctctctaaaggttacaatgtaggaatcagagttggaaaatctcaagtatgacaagagcagtgggtgtgagagagagagagagattacatatcatacttagagatagggtttttaactagcactctatgacttagagcttacggtactaaggtttggttaaggctctttatataatagagcttagacccttcaaatcccttagaaataggtaaaataactgttatttacatatgaaattagtaaaacacaaagactaaaatgtcccttgaaaatagatattttcccctctgtttttgtggactgttaaggcccaattcgcagtctggcttgttgttcacgtgtcaagttgtgcaccaaagtcttgtcaagccaatgtctggctggccatgcatctgtaggatgcatgctggccaaccttatgatgtacagaacctggctagcctatgttggccataggactggccaggagtggctagccaactcccctcgtggtagttggttggccattcatcgtcccgtttgaatgtttagacttcttattggttgaagcgttaagtagatgacttaactttcttgttggcgagttgtattgccatgtggcattgttgttgccacgtagacatgccacatcagatcagcaaaaattgggataacacataacttatggcttaa

SEQ ID NO: 253696 - DNA, 625 bp, Cannabis indica
gatggtaggttaatatattgaaaagcttttttttttttcaaaaaaaaatgtaataaatttactaaattagattaaggtgatgatttcatccttacaatatgcaagtatctgtatactaatctgttagtacaaatatatcatgtatcaatagattcttcgagaatcatagtatttaattaatctcaaaaccaattaataacgagtgaaacaatattctctaatagttggtaaaggcatatcttaatatttgtaccaacatttcattttatttgacaatatatagaatctgtagcatttcattcttttttccatttatagttgtcaccacttgacttattatattatgtctcttaagtttatttaggcaatacaacatgagtgacgtaaattaattattatatgcatgcctatatgcatgacttgtgtacttgctcccacacaaccaactgataatatgaccataattattacatcacaaccaacactcaaacataattaaatgacacacttggatggccaatacagacagaagatggtcgatgcgcttttcatgtattcacgacgtcagtagaaccatttcgccatttggccggctggaacgccgcatgatgacctggatcgtgtc

SEQ ID NO: 253697 - DNA, 546 bp, Cannabis indica
taaaataatttccaacatgtccaaacacggtgagtgactatagacctattgcctgttgtaatgtcatccacaaggtagcaacaaaggttatttgcactaggctcaaacagatactacctaatctaattactcagaaccagggagggtttgtctctgggagattcattgctcacaatattatatgtcaagccttaatcaggcattttgggaggaaaaccaccaaaccaggatgtgtgattaagcttgacattcagaaggcatatgatacacttgattgcgattacttggaggaaatcttgcaagcttttttgtttcctaatcagttcattaagctcataatgaattgtgtcagaactccaagatattccttgatgttcaatgggacgatgcatggatactttgaggctgccagggggctaaggcaaggagatcctatgtctcctttgcttttcctccttggtatggaatacttatcaagaatcctgaagaaagccgggagcaaggaggagtttaaatactttatgagatgtaaagatctcaacctta

SEQ ID NO: 253698 - DNA, 1577 bp, Cannabis indica
caatacaacatgataccatccaaaaacaaacaaacaatcatttaaacacatataaagtttaggattggttcttggtgggatccttgtatttctaagggtttgtaaggcatgatctgtcagtagtgagtcaccctggtcaaccacgcatctgcgagtctataccaccattctgtgtgtctgctaaaacttaaggcaaagaacaaacttggatttttcctctcaatgaaagcatcaaaatgttgacctggcttttagccaacaatagtgagtcaattaataagtgataagaaatgtaactaagacagagcaaaacgcagtaagtaataaagaacacaagatttgataaaggttcaatcccttttagtttggtaatagcctactttccttagattgtattgacttgagaacaaagaatatagtgtttcctctgtcaaagctctcacaatgaactcgctgagtattttctcttagatctctctaaagtaattatttccaccccttttacagtgaggatggatcactatttatagggctaaatgcatgagggaaggtttcccttttatttacaatatctataatttgtaagaacatacattacatatttagaatacataaaatgggggattcagacagctttccatatccctttgatacaatcccataattgtagggattgttcttgagcttcacgatatcaatcctgaagtagttaagtcttgatgcacggcttagaggaatgacttcatttgttgttcggatcatctgcccttgctttgctcggtcaggcagactttgtccgtgtagatgtattatcgaagtctgtttggaacatttttcctgtcaagcataaggaataacagacacgtgtcactagtacgcattgccacgtcatggtgcaaaaaataggataacaccacaacaacccataatgaattaaaaaaattgacataactttaaataaaaaagattttaacaaaactaatatagatatgccataatctttaagtaatttacttctaattctaaaaaaaatatgaaaaaaaattttgatattttttatgtggcgaaagacaatataaataataaatagtgtaaaagggttatttctctacaagttttcaaatgagaacatttacttacatagtactatgatttgtgatcatttgctataatttctcgtttctattattcattggtcactaattaatgttttatccaataaagattttttttatataaaaataaaataatatgtaatatattatttatattttagaagtaataattttttttaaataatatctacttaaattaaatttatttataaataaatattatttattttcattattatttatatatttatagattaaattctttttaagattattttttctattttatatttctatgtatctttattttcaaaaaattataaacgattgttaaaaactaaattattttaagtatttatataagtatttttctctaaattttatttatccaaaagtggaaaataattttttattttatttataaaaagtaatcagataaaaaaaataattgaatgaatatat

SEQ ID NO: 253699 - DNA, 716 bp, Cannabis indica
ttcattgggatcgtgactttctggggacgtttcacaataggtagagttagacggctattgaccctcttctccaatcgacggttgctaccacctttgtattgcatgagttacagcagctctctcttcaggtagctcccaaatggacccttattggttgtctcaagttaacacaaacactcctattagttctatgggcaattatagtagcttgggcgttgtaattagagacgaggtgggagttgttcgtgcttcagtgagttggtgtttggatggttgtttcatgcctatggtgattgaagcgttggctattagaaaggctttgtctcaatgtctttcttttgggtattaaaaatcattattgagtttgattgcttgaatattgtgtttaaaattgaaaataatctctctattatttcttctttgggtctagtattggatgatattattggtctttataatatgctcaaagttgttatttttatccattgtaataggtcttgtaatggtgttgctcatacagtagtcaaacttgttttgacacaagcagtagtatgttttggtggcaaggagtcttatttatattcaagatttattgtggatttgttgctagaggatgctatctttgaataaattcttgttcctgccatttaaagtacttgttgcttttagtgtttggtgattgaaacttttttccttaaaaaaacataataataata

SEQ ID NO: 253700 - DNA, 582 bp, Cannabis indica
gccattttctaaaagagaaaagggggataaataaaaactaagtctacatggtcggagacttggacaaatcttcttcttcttcttcctcgacttcgccgccatcttcttcctttatcctggtcttctctcaaagagctaaagtctcctcttccttctcctctaagaagctggtgtccatattagggttccaaatcccggcccgatatacagtgcaaaaaaccaactttgtcgcatcattctacggtctcgatttctttctcagcaagcatcttctcaaactcatcggcttgggctttgatggttttctcggcctcttcttttgccttcttagcttcctccttcgccttctcggattcctcttttgccttctcggctctttgccttctcggtttcctcctttgctttctcaacttcttgcttgaggcgggtattatcctgttgagagtcatcccagtgcttactcacaaccttgcattgtgataataacttgtggacctgactctccaagtattcaagccacttagagagtaatcgattagaagcaaaagaagcctggagaattgcaaacagatgaatatgaaa

SEQ ID NO: 253701 - DNA, 575 bp, Cannabis indica
atttttttttgtaaagaaaatccaaaatgtgtgggtatgaaaattcaaggagacatctctcagtcgcataatatttgatgattctactagatctcccctttagattgttgattctttctcgttggcttcatggatatcttctcacggtgatctcgttgccatagcaaaacatctaagcaaaacttcttaccggtgttaatagagatcagcccaaagttcctagtcagcgtttatggagatcgcaaaaagtttctacatcgttggttgttgatgatttcagatctccatctcttaattttctggtgaagtgttgccaatgatagaaagcaactcacttgttttactctgcaagaaggagaagttcttttggagaagaagtctctctatcatatttttgaaaaaagctttaatttttcctaattttatttattttgtcatatggtaataaaaaagtaaattttgaatcaaatataactatacatgaaaaaattcccattttgaatcattgtattgcactaaaaaaaaatcaaaatttgggtgcaaaggcaccctgtccgagcaacaggttgcgtgca

SEQ ID NO: 253702 - DNA, 689 bp, Cannabis indica
catttacagtctatctccatcttgaggggagtagttaaacttgattagtgaattgatttgttagctaagttgttggttgtcggttagttagttagtgtgtttgtttctcttgtaacctcagctggtatataagatgttgaacactttgtatcattttagttttgatgaataaaaattgtgttgattcaattctctctttctttattactctatttcaaactcacttgagccaatactaagtaaatatgtgatcactcaaagggtagtaaaagtacaacaagagaatcatatagtttaatggaaaaagaaaaagaaaaagaacaaaaagcaaattcacttttatagtctaagaatgcttcttccttaaataataaaacaataaaactaacaaaccaatgctactaatagcatttacgatgacattgacaaagagtaagaaatatggaattatggtataaaaagaattctcctatttacacaccatatagatgttggttgaattcataaatacacacattttgtttttaagctttcattataggtcttctattgatatatatataaatcttttattccaattatttctaatagagtgttttttctcggttcagttctcctctggttaatatatatatatatatatattaagttattgttacgtgcattacacattccaggtatatttaatt

SEQ ID NO: 253703 - DNA, 581 bp, Cannabis indica
tcctcctctttcgacactaggctctctttgccgccttcggccctgttgttgctcatcagctgggggttgtccttaaggatgaggctcttttagcctgttgaccatattgatgtccctttttcttagcggtaccacagtattgtcatattccagctgtggcacatcatacgccccgcaaagctcagtgatgacacccgccaaaccaaggccaccacccgtggctccctgaacaatatgttcgatgctccctcagatgacttgtccaatattaatattgtaccccttcatgatggcgtactcatattttagtctatccatttggacatcagagaaatgtttgctcggcaccaaccgagcactcacaaagtataaccaggtttttgctaccgggttgatttcacatcggtgcagaatattgggcgacccgtcttgcccatcattgtcatgaaatctcagccccgaaaatcccacagtttcagccacatcaaccatgtcaaactgttcttcctcctcaataatttggaggcgctgttcttctcttgagtagtctaggacagcgaacatagcgttgaaagcatcag

SEQ ID NO: 253704 - DNA, 553 bp, Cannabis indica
aattgattgaattaaactcgttaaatttgtgtgatttgatttctgttttccatttaatgtttttcattgtcttgattagttagttcattttattgcaccaatagacatctctcttcttaattgttttggaggtgattaaaacacaataaatataaatgctatttttaacttagttttagaatttttggtaaaaacaaaaaaaaaaaacaaacatttgaaccaaaataaaaatggtacaaaatatactttttttaatctaaccaaattaaagatattttctagcacgaatagataaagaaactgtaatcattctcgtcaaaatacctttagattaggttataaatttaagttttacaaatatagtgtttaatttatcatttaataaaacagaaagactaatcagtaacttttacaaaatagagagcataaaatgatatttacgcaaaaaaaaaagaaaaaaaaaaaaaagaataaaacaaagtaataatggttaattagttttagtcacatgcactcaggacaccttggctgacgataaatgcttctacccaaa

SEQ ID NO: 253705 - DNA, 540 bp, Cannabis indica
tcatcaatgtttcatcaactccaatgtactggtacttagcactttcctatatgttagtatcgctattagttcaattaaatattagatcccacataatttaatataataaattttaaaaagtctcgctaaccaatcgcaacataaaaatggtaagaccatcattatatggttagtatttttaggggatataatattattattggtgtgtaatttaatattaatttttaataaaaattataaaaattattaattaattataggatacgactttagtagtactagattagtacactacagcagctcttttattgtgaattttttataatttcattacacatataatattgtgaattttttatttattagttaaatacaaatttcatagtacaggtagtgaaatgcatttattaaattagtaatactaaatgtttcctttgaattataaaatctacagatttacattttattattattttttttttaaaaaaaatttcacttgaactataacaacgatatcaaatatgtctttttattatattt

SEQ ID NO: 253706 - DNA, 423 bp, Cannabis indica
ggggcaggaattactggtatttctggagcaaggactgtaggagcaccctgctgtcttaactgccgaatctcttcaacttgatcaataatcctggtttacatttctgtaaacctatttcccaatcttgggcagcctgggcaacctgaggcgagctagcatcaacccgacctcgtgccctgcctctaaggcccctgctccagccacaaacgtttaggggaatctgaacttcctgaccgccacaggatttaaccgagttacctaactcctggtatttcacccggcgttcacactactggaaaggccttcgtaattccaagagctagtctggtctgatcgcgatcaagaacaacttattaatgccgctgatttagaaattgaaaatatgcgcctattctactatcaggctactaactgttgggtttt

SEQ ID NO: 253707 - DNA, 725 bp, Cannabis indica
atggaggatttagtaaaattgtaaagtgtcaagggctcaatatatatagaacccatgaattcattgtaaggggaatttttttttgggaatgaaagattaatacttctaaagatcgaagattgtgagatttttttaatttcaagcatttttcaatcaaggtctccagactccattttaaatcctttttatttcgttgacgagtttttaccgtcaacaatatctattaatgtattctatatgtcataacacgtcaaaaaaaattatcaattataaaagtttaaatttctaattaaatattataaagtacaaactttaaatgtgaaatagtttaactattaaatatcatttatgtcatatatcatagtcaattttagtaaaaatatgtcaatcaatttatttgagttatttgaacggattagaataatattcaacctccttaatatatttatttgacaatttgatttttttgttaggttatttatgttctattttttgtcaatttatttggtttggtttgtaaatttttttggagtttattgaaaaatacctcttttatttatcaattaaccaaatctacctctaatttatgtttaattgaaacatatatacctcttttttatatatattgtacccaaaataccttgacataagggagtcgcatggatagtatcttgaagtgacagaggaaaaatatgtatagtctttagaaaaagagggtaaaaata

SEQ ID NO: 253708 - DNA, 827 bp, Cannabis indica
atctattgtcgtaacccaaacctagattgcgcaattgtatctttgactcatagtgcgactttggtaattttacctcctctagaaataattcaatcaagatagacaacaacatatcaaaagagtagttactccacctattcaaaaccttacagtgcataagttttacaagcacattgagggccaattttttacaacaaggatgcaactcagactccatctccttaaacaagtcatcatacttgttgttgtcattgatcggggttcattgaaagaatcgttagtgctagtagagtcgtcaaatccaagatctcatcttaacatgtctgccaacacatctgccatttcctcttcgtcgtttttaggaagtttaattgcgggctgagaaaaagtctccccgtggaaatatcaggagttgtacgaaggttggatccagttgagaaataaatgaacccttatagtttcaggtgtgtgaaaattcacattcaaacaccgcatgcaagggcatcgagataatctagcaggatttacgtaattcgttgcaaccgcgacaaactcgtcaacaccacttcaaaactcgactgagtgtcggttcgccttcatccatctgcggtcagtaggcatcttcctctacaaagtaattaacaaaaaagtttaaaatacaacaaaaaaatgtgcaagtgtcctaatccaccttctcactccattactaaaagggtaaagaacctatcccattcaagtttgtattatacatttagtacaatctacgctcttaaaattatttcatttttgtaagaaatttggcatcacctccgcacagttctcataag

SEQ ID NO: 253709 - DNA, 1145 bp, Cannabis indica
ttctcctcttatttctcttcacaatttcagggtctggatttttcttggggggacgacccttccttttcttctcagtaggaggatcctaagacaagtaatttaaataggttatagttacaattcatgaaattacaattcaaatagaagtttagttggaagaaatatacatgggtgactttttggttcttacaaatagttttgatatgccctcgttgtttgcaattggaacactagttggtttgtggcgttttccttaatttagttgcacatgctggaggttcattcacttctccgttccttgatttttttgggccttccaggtaatacagtttcaggtggaggaaggattggatttttgtctttgttttcccattcatcagaactaggcattggtgtaataccctttgcataggtagcttcaaaggcttctttcttatagcaaggatccacaaattcgtaggcatcaagattagaaaaccacaaacaagctaaagcatgaccacatggtatacctgttagatcaaatgatctgcatgtacatgttcttgtctctaaattaacagataatacttgacccgttatgtaggtaacttgaaatgatccatcaattgacttagtacaaatgcattgttgtgctacctttttgttcttctcaatgatgtcaaagatcctctttccaactgaataattccatttagagacactttgtcttttcttgcacatccttcccattaaccaaaaatgtattgattctaaaagagtgatgatcattttgtccctgctatccaagattgttgaattgaagctctcacacagattgttaagaagcatatcacactttactgaagtcttaaaatgtgatttcgaccattctgtgggtgcctttttcatcaaccaattatatgctggttcagaaatctcctttaagtcattcatttttcttttgaactcttcagaggtagtcaatctagcacatgcccatagcgcttgcttcaacagcaacccagggaaatccttcttgaagttttcataaagatgttttcacacagaatcttatatcagaatcttcaaaaattgtacccaaagctttttcaaggccattgtgtctatcagatatgaaagtgaagcttcttgtgtctaccaca

SEQ ID NO: 253710 - DNA, 719 bp, Cannabis indica
gtgggtgtaagggtctaagaatggaggcttgaagtggggacgttacaaatggtatcaaagccttgacccagccggacaaattatatttttattccattgcaattaaagtttaaattttcccgctcttatcttcctagtaatcacgacttaccgggattaggttatattattagttgtcgtagcgtgccatattattagggcgttacatctggacttagtgaaaactcaagaaaaagtcttagctagtcaagctaaagatttctcggtctcaaacaatgaaatgttactttataaaactcgagtttgtgttccaagcaatgttgaactaaaaaagagagatactagatgaaacgcataccactctctattcattacaccctagtaccaccaagatgtatcaagatttaaagcgcttctactggtggtacggtaagaagaaggatatggtggattacatgtccagatgcttgacttgtcagtaggttaaggttgaacatcaaagacttgtggagttgttgcagccattgacacttcttaagtggaaatgggaggatgtcactatggattttatggttggtttacctagaaccacgagtatgtttgattccatatgggtgattgtggtttgatttactaaatcagtgcattttctgctggtgaaaatgacgtacacagtaaatcagtattgttgcgatatttagcacacgcaagtgtacgta

SEQ ID NO: 253711 - DNA, 897 bp, Cannabis indica
acaacttttgacattaaagcttccaaaaacagattccttcacatcatggtagatgaaataacccaaatagtcagaagcatcacttgtttcccgggtcccgaatatttccattttactgtaattagagcacaaaaatgtcacattttaaacacaaatcgatggagacaaaagtacaatgcttttaactgacaaataaacaaagacatatgagtacaaggtttaaacaagccacaaacttcatcaatgtaatacataacccaatgacaatcagaaaaatcaaagagcaatcccaagtcccaacagcttctctactctattctttaaaatacctcaccaaaacttactttttttattttacctcacacatttacattataccatacatcaacttctttataattttctctaaaccatttaaataatatatttataatacacaaattaataaaatattatatattactaatatttattcatttttacagatacaattaaataaaatacattataaaaataataaaaaattatagctaagtactaaactaagataagtattagctacatttagctaagcactattcatgaagtaaatttttgagctattttagctcatcaattgaatgtgcttctttgacctttttttttcaattcttagctattttttaacctttgtagctattttacattagctagtgtgagtgctagtacaaaccatatttgacatctatgtgttaatattcgtagctcttgctttgcttgattctactaatggtgcactgcgcacacaatactaattaagaataactgaacattcaaaggggctaccacacttacttaacttgatgcttattaaacctactaatcccatacaaaattacaaaccattgctgctaagtt

SEQ ID NO: 253712 - DNA, 625 bp, Cannabis indica
atatatatgattaacactcacactcaattataatttatactatcgagttctcaagatgtaagtatgagttataccttaagataagctggtaacgaacaagtcaaagaactcgaatagtacaattagcttaaagtttaatcatgtcagaattcaaatcaaattgatctatgatcgactaagtgatattgatagaaaatagatataatgataagattaaaatatctgcttctctattcaatattcaatatcggtccaatcaaatataaacctacacaattatatttcccataaatttaatgcagtggtttccttctagatttttgaaaattataaaaaaaataataatgaaaatatatataacttagctaaacaacaacaaatatagttaacaaaataattgaagaaaacatagtacacaacatcaaatttatttatttttattccaaagaaaatcaaatttgttttttttttttggttaaagaaacccaaaacgacgtgggtagtgaaatttaaggagatctcctcaatcgttataatcgttgctccaataaatctcccccccgattgttgatcattctcgctggttccatggagatctccccaacggtgatccagttaccatggc

SEQ ID NO: 253713 - DNA, 2217 bp, Cannabis indica
ccataggctgagtacctccacgattgagctcctcatccctagttctgggattctgaccattcccacgctgagttctcctcgagcgtgttgttcgcgtactgggaccaacgttaggttgggtcctccgggaacgtgtggtccgagtgctagttccaccctcaggttgagtccttctggagcgggtggtccgtctagactgtggattggaagacgttcaggagcccatgggctctttcccagaatggtgatgagtttcctcatgtggtgtattaacatcttctgggttttcagccatgaaggagatagtttttcttcaaaagagaggacgattttttctgagctttttcacaaacgctctcaatgaaagcaccaaactgttaacgtagagttttgttaactaaaatttgagcctatcagtgataatttcacacagaaaaataaatacagtagagtaaaaagtatgaactcaagagtttttttacgtggttttgtagttaaaattctgcataatctacgagtcaatcttattagatttctgatagttttttagggcctctttttcttgtgattttttcgtccccttttttgatctaacttgtgactatttataattacatagtaggcagttaattacagagttggctgtaatctttacaatgtttatcccttaaaatcgtggggtttgattacatattatgtagtataaatgcggctattattttaatatcacacaactgtgatttatccgcttttaccggatcaaaatgatcgtgtgtttaaaaatgtcttaaatcatagctttctaggttgtcttgataggaactcagttccaatgactttgatagcgagctaaagctttttcccctatctttccaaggtcgacgatgtatgcctcgttgcttctttgtttgaaggcttaacacttcattttgacaatcgcagttcttattaacaaagagtacttcagcaaatatttgaatgtcagcttctgacttgtcaagactataagtctcactaaaagatgtctgaaattgattggtgaaagtaacaggagcgcgtcttcctatagcgagataggcgcctcgcttattaggtcttgagtccacccaactgttatacttagtttgtatattatacgctaagtgttttcacagtcaatatgcatcactttcgtcttcctaggtgtaacgaagctgatgtctcgccttatgcatccaatgccgcatggtttctcgttaatacatgaggcaatagtttgtatatctttatctcgcataagaccttatagtcagcgagttgcaagtatactctgttacttccgcatttaatgagttattccattaaaagttattaccgttacatgcatcgatccatattttccttaacttgacacgtgtcctccactgaaatggtagccaaattttgggtataacataagggatgtccagatatacaatcaagtacgatcatatgcattcataaattaaaccgaataggcccgaaggcccattatgcgattaaaacaccacagagcatgcgagctcgtgtgtttggaatatgaatagtcaatatgcgactttgcaagttgcaaacaattgggcaattaatcaggaacagatgaaactgttcttacatttattctttaaacgactgtattaattaaattatgtaattaatgtgataaacgatcctatctgatcggttatgtaagatcaaaggacacttgctttctatataaaagagtgatctaaatcaaataaactaagctgaaaactattacaaaagtggactaagcaaatccagttttgactgaaccactatatttctctgtctcctttatttttctgttcttattttgtttattttcgcagtgtaaactttgagtactcactattctaagtgagtactcgcattactgtaagtaagtgttcttactttgttcgaatactcgcatattttggtattgtctaatttcctcgaacaacacaaagtaactagacacaacaaatagtcaaagaaaatggcacataacaaggcaagatatatcaattatatatatatatatatatttaaaatagaagatatttaagtaatagattgtgatgaataaaatgatagggacacgattttatcccgtgatgtacgacagccgttcgatgagggagttatttgatttgagggctgaggttgatctaggggttattagggttaaaaaat

SEQ ID NO: 253714 - DNA, 544 bp, Cannabis indica
ttattattttttaaatatattaattatcatctattatttcatcactttgattgactcagtatcgttgactaaaaatgagttcaacatagttcctctttttagtattttaggatgaataattagcatttttgtccttgaacttttgatactacctgattttactccctaaaatatacaacttgttaaaaatttcccttaaaatataacagttacataattatgctccttctattagattatgtttattttactgttaaaaattagtatttttacccaataaactttgactaacaaattttttttgcctcatttattaaaaaaaaaataattttaaaaattataatgctatattatttctgaaaaaattaataaaaattattaaaaaatctaataaaaaatattaaaattaattttaaaaaaatattaagttcacttaaaaagcctaaattatttcaaaaaaaaatatttttcaaattttattttattttatttataaatacgtatcttaaaaatcaaactaaattattgaaaattcaataaataa

SEQ ID NO: 253715 - DNA, 678 bp, Cannabis indica
aaaaaataatatatagtaccattcccataatttttataaatattttagaaaatatgaatcaagtaattaataaatagaaaataaaatgtgagtaatactttaaagtaggattggacatctgatccaatcatttttctcctaatctgattcaatctaattagtaattaaatttaaaaaattatcatctgatctaatttaattaaacctcaaaattcaatctaatataattggattagatgattagatcaatttttaattagattttgagatatacatttaataactaatccaatctaattaaatcttatttttaacatccaacttaattgtaattagatgtctaacctactttaaagtgttagaagtttaaattaatattgccaaaattaatatttactttaaagtgttagaagtttaaattaatattgccaaaaccaatatttacttgtaatatttatttaagaatggtataatttgttaattctacaaacaaattaactctttcaatttgagtcatgaattttggtcatactaaatataatattataaataatattaattttaactttaaaaggatttgcatgcatttaatggggtactaagcaaataaaataagtgtggtgtgagacttgataaaaaataaaacaatatatatacatttcatttaataaaacaaaa

SEQ ID NO: 253716 - DNA, 598 bp, Cannabis indica
tgtatcaaatcatgcctcttgaattttgttgattgttaaaaatttcccatgaactatgaaaattgttagaattaatgacttttgtccaattgcattcatttttactaattcaatgattgtttatgtactaaattatgctccttagattttgatatctaccaaatcatgtctctcgaactttgacatgcactaaatcatgccccctaaactttcatccatgtcaaacttttcttactaaaattggacaaaagtccttaaattcaacgatctcaataatttaaggaggatttttaacaatcttgaaaattcaagagcataatgtaatacatatcaaaattcgggggacaaaaattctaattataaagctaaattacattagcactgctagatttataattattgtttatataaaaaatgcacacttttcaaacaaaacactatttttgttgcagatacaacaagaaattacaacaacaaaagtacttcagtgattgaacttagttctcttaaacaatggttgaaagtaagggtcttcacccgattcaatctatattattttgctcatattatatttgattcacactaagtacaaatatta

SEQ ID NO: 253717 - DNA, 1089 bp, Cannabis indica
gctgaaaatcggactcaaatttgcaatagacttgtcatgcccgaagcatcagaagggagtttgtatctgggcctcccgaatattgttggtcgaaacaaaaatgcagtactgggattcttgaagaataaagtaattgcaagagttaatagttgggatggtaagcttctttcccgtgctggtaaagagatccttctcaaaacggtggttcaatcccttccaacatacgcaatgagtgtctttcttcttacaaaaagtacatgccttgaaattgagaaggagatggctcggttttggtggaagacatcctcaagtaaaggacgaggcataacttggatgtcttgggaacgtatgtgtgctacaaagtctgatggtggcttgggttttcgtagcttgcacgactttaatcttgctatgcttgctaagcaaggttggcggcttttgtgcaaacccgattccctcgcggggaaaatttacaaagctagatattaccctcattcggacttccttactgccgagttgggtaacaatcctagctttgtttggcgaagcatttggagttctcaagatcttttgcgttctggaattcggagaactattggctctggtacaaatgtcaacattcttcatcatccgtggctccctaatttgaagaatccgtatgtatctgtgcatcaccctgggttagtgaataaatatgttgactccctcttcataacagattctagagtatgggatactgatgttgttagggacatgttttgtgcctcggatgcagctgcaatcctaggaattcctctcagtcataatgctgctagtgattcctggtcctggatgtatgagaacactgaagaattctctgtgaagagtgcctacggtatccttcagcggcaaaaacaaactcagctcactaatgctgaacatagcttctgggataaactttgggggttgtgtatacctcccaaagtcaaaaatttcttgtggcgagctgcaacaaacaaccttcccacttgtgtgaatctggtttttaggcatgtggaagtgcctactgcttgtcccgtgtgcaaagctcagcccgaaaccacatcccat

SEQ ID NO: 253718 - DNA, 583 bp, Cannabis indica
tgatcggttacttactactactagctctagtgcccgccgccctcttttggttggcgttcttgagaccttattctgtcattaaaaatgaattttcattgtacaaacacaaatatgatcgcgcttttttccttgttgtgtttagctaatgttattgattcaattcctcattgttgaacttgaaacttttataaattgataaaataatacaaggacaattttccttacttgatgatgtttcgtgttataatttttaaagttctttgtggttgaagaagttacgtttttgttcatggagatcaaataggagaaattcaattgaagaagacgaagtagagaaaattgatagaaaataacaaaactaggtaaaatattaccacattataaataaatattatttcaattattcttttcaaaaaaatatatatttattatttcttaaaatgatataaaaaagatatacccaatattttgaatagaagtaccatattgatccagtctagccaatgacacatgtgagaaactgaaaaaaaaaatggtgtccttttctgttgcagtacgcaattatttcttatatatatatata

SEQ ID NO: 253719 - DNA, 600 bp, Cannabis indica
acaactcttccattcatctcgaaagtagtgatcctgttctccagcttcctcttcttcatcacagagtgaaaatatctggtattgtcttcaccatttcgaagccacaaaaccttactttgctgcctaagaaagcaggagtagtgtttcacagctgtagcaaattcaggcctttgttattttcgatctgatgcaggctgccattgctaggatttttagccaggttctcttgagccaaaatgtactcggctttgctttgttcataacgctgcacaacatcaccaatctcctcccgattaaatctctttaacacatgtttcaatctcaaaaatttgctaatcaacccagccacagtattagcatctgagtatctgttccagcagctgataacaacctctcgaaatttctcatgtaacgcccaatggttgcagtacctgaacggtcttatgcccacattaccaactctattgcttttaacaatgcagtagctatgatccgagatacagtcccatttaaagcaagcctctgtgtgagggtattgatccatccagtcttcattaatgaggaccctaccaagcttagaataaactctagtacccatat

SEQ ID NO: 253720 - DNA, 531 bp, Cannabis indica
ggaggagtccctagccctgtgcccaggtatactacggaaactccagaatggaagttcaaacttcaataactcatttccaactcattatatttcagtattctgtaccatgaagacatggaacaatcaagttcaggacccaagagctaaaattacatgaacttgcaccctgggagtcaacctgggtacctagggttcccctaggtgcccaggttgacatccttaactagggtttcagtttctgggaccattttagggcaaatgagtcaaactttgtattgggacatgaactagacataccgcagacatatttgaggcatcaaaatcatattcgaagcaagttcatttttaagcactcggtgcccgagcatccagcgcccaagttaaaaatttgtcaatttgggtgcctttcaaatataagattgacaatcggacttttgcatcatcttcatcaaaaacatggcaatatgtacttttggggaagaaacgacacttactgggtactagaagcaaggcctagcacccaggttgaca

SEQ ID NO: 253721 - DNA, 550 bp, Cannabis indica
ttttggaagtttttaatgatcgaagatgatagatgagatatttatgtacttcttttcctcaggtggaaggaagtggaagtctttttcgttatttatttatttatttttaactatattctcatttgggccacgcaataaaattgaaagagaaaaatatttgaaacgtgttgcaattgcaaagagaaattcaacgatatataagggatcattatttggaacatattttaattattgaaagtgaagattttatagccactcatattttcgtctaagatagtattttaattatattaatttaatttgataaatacaatttataataaaagagtgagcagaagggtcaatcacttaattgtaatttttctttaaaaaaataaaatctaagatataggaaaacatgtgggatccattgtatattaacacatgtaattttatttgaccattttttttatatcaggttattgcttttttgtcataaatcaaaacttttcaactgattaacaataataagtagatttatcagtgacaaataattatactatattattgt

SEQ ID NO: 253722 - DNA, 538 bp, Cannabis indica
ttgatgagagtagcccggcccgccttagacaaggttttcgctttccacccctacaacttagctgagaggttgtccagaatgaaattgaaatcagcatccttctgtcttgatctgaacagggggaggcctaagtacttcacatttccttctggggagctaattccgagggcctcctggatctcccgcttcaggccactgggagtatttttattgaaaaagatcgaggtcttaagtttattaacttgttggccagaccgataacagaacctctcaagacactgccagtaacctctggcttcgctcaaattagctttgcccacaagaattaagtcatcagcaaaaaagatatgagacaaaaccaggcctcctctactcagcctaatacctttaataatgttcttgcagagggcatcatgaaggagccttgataaaatttcggcagtccagatgaaaaggtaagggaacagaggatccccttgccgaagaccacatgagaatttaatcatgcccaccgacccccattgagacagatgttgag

SEQ ID NO: 253723 - DNA, 741 bp, Cannabis indica
gaccatttttttgatgaaaacgagtctttagatcattccaaatacccgaggcacattcatcataaagaatacttgatgagatttctttggaaacggatttcaagatccaagagattacaatgttattattacgataccaagcattataaagactttgatcagaaatagaaggtttaggaattgaaccgtcgagaaattcgattttgtttttgactgaaatggcaagctgcatcgccctgctccatgagacatagttgtcttgtccagtaaggggttgagacaccaaagcattccctgggttgtcaccatggtgaagaaagaaaggactggttggatcctccaatggattcttgatggaagtgatttgaagaccttaattagcttgatttgagggatttccaagatctgtgacatcagaaggaattctagtttgattttcatctgtagccattgcgcggaatcaatgtatagagaaggaagaagatcggagaagaagaccgagaaacacacagcaacgccggagaaatgagacacgacatctggtaggatcggacgggaaagcctatctttcccgctttgataccatattgagaaaaaggaattgatgaagttcaaacagaaagtaaaagagattcaattgaattgaaacagaggagaggccagcttgatataccctggacctcattacaaaccgactcaagaaaaaagaacataacagacataactgaataaaccgactaa

SEQ ID NO: 253724 - DNA, 554 bp, Cannabis indica
gttgttatagaagaacttaaaaaccgaggacaagcttctgtccaaatatagtcttctaaactagtagcagaggttgcccggattaatcaccgaagcatccgtcgctagagcaaaggattcaggaggaggtagtattcatcgagtagctcggtttacaattggattcacatgcaaggcccagatccaaatgaaaacctcacctagcatattccttaaactatgtcagatggttattggctaagtctagaataatatccaatcttgaccgcttgttgcaaatcatactgagttcctatcataccacaaccaccaaaggattgtgatcattaattcaaaaacctcacgggatagcctgtcaaagagtaataggagaatttcctgcactggcccatatgcacatcgacggagcatcgaccacacccccaaccgacgccacactagaatcaaaccagaacagaaaaatagaggtacccaaactttccaagagataagttgtgttgctactagctaagccaaacagtacatgcgccaaacaaacactttcacctttggtg

SEQ ID NO: 253725 - DNA, 611 bp, Cannabis indica
caaaaatttatattttttagccaatacccaagtgaaaaaaagtactaacaatacaaaaaggaaggaaaattttcaaataaaaaaagaacaaaaacaacatcatacatagctttaaagtaaaataacaaagaaaatacaaggaaaaaaatatataataaatttgcagaaaactaattgttgggtttccagtaaaaatcgtcttttgactcccttaatgcaaaatgaaataaaggtttccagaaaactaatggttgtttgtgaacttacatttaaaatcagctaaagaagagagagaagagaatagaaataatacttatttgcttttttttatttatgaatatttattttgtgaattatatatttaaaaaatttacttaaaaaaatttggggtcattttagtcatattcaaaaaaagtttgaccataattgtaataagggcacaattatgttctatttataaaaatataacttccaaattattatttaacaaaataaaaaatttaattaataacttttataaatacacagacacaaaataatatttactctaatttttttttttttaataagtgaatggtatataatcacacactttttgtggtcaaatagat

SEQ ID NO: 253726 - DNA, 1265 bp, Cannabis indica
ttggttattggcttctggtgataaaagaccgtgggctgtggcacttcaagcgagatattttccacgagaatccttctggtctgtccagaagaagaatggagattcttttatttggagaggtatccttgatgcaagacaagtcattcttcaagggtcttgcatggtgatagccacaggggagtcaattaatctatggtgtcaaccgtggatcccctggctaagctatgaagactttagagaactcatggagtctatccgatgcaaagctcctagtctcctttcggttgcggacttgatgtatcgaagagaaaagaaatggaactcaaactacctttgcttcttatttggtgaggacttgggtatgcggattagtcagattcagattgctcaggagttgggtaatgacctgttaatttggaaggaagcaaatagaggagtcttttctgtaaaagaggcttatttaatgggtcaaaaaagtcggtttgggagcatagagcctctgtggaagtggatttggaaggagaaccttcatccccggatgaggatgatactttggcgcgcaatagcaggtgctctgcccacgggagacaaatttggagcaatgcaattgtgttgcttttgttcaaaggagatggaatctcctctgcatatttttgtccaatgtccctctgctgtagccatatggtttgggtcccctgttcccattcgatcctccatggtgtcaacagattctcttaagtccttcgttatagagttgtgctctggcctagaacctgaaccaaggtatcgtttccttctttgtctggctgtgatcattgataccttatggttttttcgaaatgaatgtcggcatggcaaagatccaaatccaaacatccatgacttattgaggatagtttggaagaaatatggtgaattcagccagtatgaagataatggagaagtggttcttcaaaaggaaaggatatgttctgaagtggactatatcggctcccaaaaaaggaagctgattatggtggacggatctttctctaaaggaaagattggtgctggtttcctcgcgtggaatcgtgacacaaacgactggttttatgaggcaaagtctgctgttggggagaatgcggtggttgctgaggtttttgcttggttcattgctctgcagtgggccacgaacaacaattgggatgacttggttatcattccagactcctctgtagtcgtggatgcttttatgaaggagaaacatcccaactggcattgtattt

SEQ ID NO: 253727 - DNA, 586 bp, Cannabis indica
aaaataaaatatataaagatataaatgaaagaatattaattttataagaataaaagtaatatgttcaaatatttagaaataaaatttaattataaaatgttgttaggctaattttagccttgttttctagtgtggtggaaagtgttttgagttatttttggagtagttttatgcttgttttgttctgttttaggttcaagcatatgtaatggggatttggagaggattgtggagaaaatatgcaaacctgagtgacggtgataacgtggtgtaagcggaagatcgagatttgtgcttgtgagaaaaatgaattaccgccacgacaccacccactgagtcacaacggttaagcctttaagagtcgcgattgatgaggcaacaactccaaaaagtaggaattttctctagagaatttagggttgcaacacagtatgttgagtcgcaactcctccaagaatcgagaacacgaaaagaattttgtttgaagtagggtcgtgaaacaatcttaaaaggttgtggcacacctatcaatatgcgtgaagaaagtcaaatttggaaggacaattttatcttttcatcaaaaatt

SEQ ID NO: 253728 - DNA, 966 bp, Cannabis indica
gcttttgggttgaggatttacccttttcacagtcaacccaaaggaattcacccccaacatctaacactacattggcttttactgcaggggttctttgggttatttgtgttgtgtattggagagttttggtgtcctttgtaactcgtaggactagggctttgggcaatggagtagtagtggagacagagattagaatggagatgagaaagaaggagaagaggagactggataagaaagccatgttttgaaattgaaggttttgtgagatagttgtgggtgaaaaatgtaatggcagagcatggctatttatagctataaaacgtgtgtaatatgctattcttatatgtatatatatttgtattattattttcttcttatattcggttaagttatagctatttaagaccatctcgaatcggaaatatgtaaaaattgtgaacacaaaatagttttgtggtaaatttataccaaattttagatttatgcttcaatgcccaattgtaaaattttgatgtaaaatttaatatctagttaaaattttattaaaaaaaataaaatctaataattttataattaattttgttattattttaatatgtaagacaataaaaaaataatacaaatatttcataatttaatgttatagttaaatatactaataaaataatagaaataacataaatgtaaataaaaaagtagtgcataaaatttattatgtgccaaatttacattactttttagtacactattagagcacacattttattaaatgagctatattttagttttcaacacttatttacacttttattaaaaatgctctaagaccagttgtaaaatttattaaaagaaaacaaactggtaaaatagtttataatgacgaaaaataaagatttaaacagttactaacctaataaaaaaaaatagtgcgtgtaataaaataatgtaaattttatttttggtatt

SEQ ID NO: 253729 - DNA, 1253 bp, Cannabis indica
gcgctggcataacttatagccacgcaatttaaatttgaccggcaacatttttgcccgtgcatattttctcatataaaactgttacttgttaaattaaattgtgtgagttttaagttatgtcagcgcaaattttcgccaatataagtgtattttattaaaaaaatataaatatttgggtaaattataataaatattataactaatttaataataacctatttaaaattttacaacacatacgatttactaaagcattattggatgttaattttttgcatctaggatacaacttatactcctccttaaattattcatcatatttgatgttgtcattgatcaggggttcattgaaagaatatgtagtgcttgtgcagtcgtcaaactccggatctcctcttaacatgtccgctaacacattttccatttcttcttcgtcattttttgaaaattgaacagcaggttgagaaaaggctccccgtggaaaatctagtgttgtatgaaggttggatcctgctgacaaaaaaatgaacccttatattttttggtgtgtgaaaattcatattcaaacacctcatgcaaggacatcgagataatctgacagaatttatgtggttcctagcaaccgcaacaaattcgtcggtgccacttcaaaactcgactgagtgtcatttcccagtcatccaacttctgtcggtcaacatcttcttctataaagtaatgaacaaataattcaaaatacaacaaaaaatgtgcaagtgtcctaatccccattttcactccattactaaaagggtaaataacctatcccattgaggtttgtaatatacatacagtgcaatttatgctcttaagattgttttatttttgtaaaaattttagcagcacctccccacaattctcataagtaaattaatagtaagtttgtcaatttacgaaaacgtgtaaggagaagatgtatcaaaatctatactaattaaattgtaatattttaaaaaattaattatgtttaataagtcatattttattaaatatgaagtattatgtgtacttagaacatatatgagtaagattataattttactaagctaattatatatgcgtagtatacatgctatttatgagagaaaatatttttgaatttgataacagtggaaactcgattaactggccaaaaatatcatgatgttaataatataagatatgagatttagttatactgggtgttctagtggatattgaattgtcgggttgtc

SEQ ID NO: 253730 - DNA, 1114 bp, Cannabis indica
tgagttttggggaagcgaacaccgaatagaccaggacttgcttcaactcttgcgcgaggatcatccccgtcttcgttctaacccaacttcttcgagtgaaaggcaccttccttaaatcttttatccagccatagaatgatggctcgtactaagaagaaaatgcgtagggttgacacatctgaccctcaagtggcctggcacgcccaggagggggaggatcatgaagaggacgctgaggtccaagagattgaagagcaggacgatgtccgtcctagcaatccctccgaggcggaggaagaggaggaggttgcactcccaaactatgggggatacaatgaggctggggagccagtcgatgctgatggcgacatcctggttgagggcgtggactacgccagtgaggaacttactgctgcggttcctcatagaaggcaaggtaccttgggtgccaggtgggtgagccctccgtccaaggttactgaggcgcgcctgcgggatctcgaccaagatggctacctgggcgaattggactgttacattcccgctcacaataaccgagccacaaaccttgagaggggaatgtgcgcttggtcgggtgctcatgcccagcaaagggcattgttgcctttgcacccgtattttaggaatgtggcagacttcttccgcctctgtccgacccaatttactcccaagggcattaaatatctgtccgccctcttcgttctctatgcctcccagaagtgggatatgccttctccccacgaggttagctgattttttgatttaaagtccacccctaagcaaggcaggtcggggtacttatatttctctcaaccagacttcaagtggttgacgggcaccggggataaggccattagcaaaattgggcattttgttgatgagtacttcatggtggatggcatgggcaccacccatactcggttccagcaaatccccacatatcaccgccctcccttcactcttgctcttagagatagagctcaatggcttgctcaactgccgggggatgaccggaatatcatctagttgacatccgaggacaactttgtgaagtacgggctctatccgaaggatttcattcctaagccagtga

SEQ ID NO: 253731 - DNA, 816 bp, Cannabis indica
tagttttctttcttttcctcttctattgttgtttgtacttagtaccaaaaactttatgagattgtaaagttgggcagcagccatggatgaatattttttagcttggattttattttcatacttgaatatgagctacacttttgatgcttgaatggctaagaacttctaagttgggtatgattaatttttaagcttacttcaacatttttttgcctttgttcattcaagtgagtttcattttgtttgattgttgtttcttggccaagaataacaatttgctaagctaaattttataccgaaagggctagatctagtagttcaacttgaatggagcaagtgaaaacctagatttaggtttttctaagtggaataggaatatttcatttcccttgcataacttataaaattaatgtttgaatagtgttctgcttgctggtttgatatgggaatatattgagctaagtggtagaattaaatttgttagtgttggaaaattctcacaaacttagagaattttttttattatctgtgtgcagaatgctatagtaatgttgaactgatcctgtaacacatgggaaaaacctaactagaaggaattagctattcaagcaatttttaccatattacatttttatcttgcaagaaatttttctagtaacagtaatattaattttagcaagtttaattactgtcattgtaaagcccgcttagttaatttggaaattagcagttgtttatgattaattatgaaattatttatagctatttaaataatttatgatactgttatttatgttattcagtagcttgcatatt

SEQ ID NO: 253732 - DNA, 520 bp, Cannabis indica
agtggtaggtaataataaatttctgcgactaaaagaattattagtagtgcagttatgtatcttacacaataattgagtgctccaagctatgagatttaatgaacctgctgcaacagtttctactgttatagcttccgagcggtagatgaaacataatatatgtattcttaaagttaattgtgatgctgtaacattttttatttgaatttatttgaattatttttattaaacgatcaaagaattaagcacatttgattcgtttttttaattttaatgttaatcgtgtctccaatccagtctcgtttaaattgtaaattattatttagctaattacaattattaaaattttatgatttattaaaaaaaaaattataatacagtagaacctctatgcaagaatacacttgggaccaaataaattatattttaattgagagattataactaaatagagttacactaaaaaaaaaattaaaaaccaaaaatatcaatgtaacaataataacaataaataaacatt

SEQ ID NO: 253733 - DNA, 2111 bp, Cannabis indica
aattggatatcctattaaaaaattaatccaattaataattggatcagattggattagattttgaggtctaattggatcagatcagatgataagttttcaaatccaattactaattggactggatcagatgaggagaaaaatgttgcattgaattggatgcccaaccctagtcttgctgccacattctgaagtacctaaaaggtttcctgcccatgcttatctagggtaaagcgtaagaatgcctgggctgtggttaaacattccttcaaccatgaagcacacttctgcatttgggaacttgtcaagccacttttgataagctaagactatccatctttggatagattctagtttccaagtcctatttgttgctccaagtgaagaagttgtccgagaactttatatcctccatttgaaacttctcaacgcattcttgcaataaaaaagaaggttgttattttttattacctcctatccattcttccatactcaagatctcattgaagtcacccaaaattatccaaggaagacttgtattcctagtaatatcaatcaaattctcccataatagccttctttgaatttcatcatttacagcattgttatctcaatttttgtcctcatcatgtgacatgcttacgtggacagaacatgtaccacgtgacaatacagctcactaaaaggaaggctaagtgagcatatgaggaaacaaagacctcgacactcaaacaggaatcaagtgacagaccagctcactctcaagagatggctgaaggagctggctggcagccggccagcccagggatagcatcatggccaacaagcttggctagcacaagggctcggccaaccaaaggattacactgtaggccccataagacactcctacacgtggataacaaagatgggatgcaaattcagccccaaaagcccaacacaatagctgaataatatctagaatcaaaggtattttggtcttttttaaatatctaactaactatacgatgtccaagggatttgaattgtaaatctggggtttatataaaggccttaacctctggctaaaaatctaagtgtcctaagatgcctttgagctagaaatctgatctcaagagtctgataaactgtggtagcaataccaaaccaactacgacaagtagtggggtcccgagctaagcctttcctcattctctcccacaagcgaccttaaggctgtctaacaccctaaggctgtccaacaccttagactacccaacacttgagttttgccgggcattgattgtaatcctaagggtactatagcagatcccacctatagtgatctggatagtaattctcttggtataatacaactaaaaagggagtaggtcattacccgctatcacaaggaggtcgaacctctataacaaatcctattgtctattgcttttcattcttatttgtgcacatacgaggcaagcatcaaatctgcaggaccccgctatcggttgatcacttttcaaggtcaatagtttggtactttcattgagagcgtggatatcgtgatctgatcaaatgccatggtgaatacaagaagaactcctgtcacaccatctgtatctttgggtctccctcaagacccacagattgcagatctagacactcgggttccagtcataactggaatccccatgaatactacatatgtggtgaatcttatcaccacaacaggtgcaacaagtctggccaccacagctggctaacctgacgcaagcatccaggtggatccaagtggtagaaccacgcctccaagagcagatccaccattggtgcctcccactaaaggaaggacccaggggcaatagcctcctaaaaccacaagtagacctcaactccagttctatgctgaggagacaggcctgggagtgggcgagacagctattggcaagcctcacctggaccttggagaagaccttgagttggccagactcaggaaagctgtaggtcgtgcaggcctaactaaagaaccaagcactgctgattgcgatgtattcgctcagtaaaagatgcaaaattccggagatggatagatgactaggagtacatcctttgatctcaccaagcagaattag

SEQ ID NO: 253734 - DNA, 1385 bp, Cannabis indica
taacaacctttaagtcatacaaagctggtcagcctaacatgacgttaaaggctgatggaacatccaataccaaaaattgtaccattatagttatgctcgtcggagcttgcccaacagtgagcggtaggtgaatttgccctagaggtgtgactccttggccggagaaaccatacatgggctggagacagagggttaaatctttgagctggagccccatcttttcatacgttgtcttgcataagatgttggaagaggctccattgtttatcatggttcgggccaccatcttgttggctaatgggacttccacgaccaatcggtcgttgtgcaaaaatctgatcttgacagcatcttcatcattaaatgttatggtgggctcccctgcccgtgggatcttcggcttcctttcttctacggctagtactacttcttcttgctcgtgctgtattgttcgggcatacctctcccgggcttttcctgaatatctagctatgtgcggacctccaataatgacttgcagatttcaatctacaagtggtggtaacaagtcttggttgttatcgcccctctgattctaatcgaccttgacatacttctgcacgtgcgaattatttttccttatcaagaatttgatttaacgcttcaaattgttgcattcattgatgtcatggcaatagtccccatgaaaatgacaaaacttggtcatatatctcttactgacatctttttttcatgggtgcagacttcttgtacgggactaatgactgagtagccatctacacacttttttatatcttctgtcaagaaggtaaatgcagtaaacttggcaggattctcccagggagcttgttggtcttgccagcgaactttccctttttctcattcccttgcctattattgttgttcgaccgtttaccacctgagcttgaattgcttgggtaatgggggagctggacggatttcccagtagaaggagcatttgactggctaggtttttgttcaccctctgctcgttgtaatggcttcttcaagcttaataaaaccttatatgcggtcaagaaagtcactcatcgagtctactggtccgttcttccttatgtccttccaaagttcaccaaggacttcaatgccccctgcatcgcatacaactttccgtcttcggttacccgtgaaaccttagtcgcctttgtcatgaatctgctgatgtaggctcggagagtctcccctggtctttcctttacttcgaccagatctcctaggtgcaatggaagttggcgagaggaggagaattatgcatggaactgtgaggagaaagccttccatgagttgaactttctgggtgccaacttgaaatcctatgttgggcggcttctgagagggtggca

SEQ ID NO: 253735 - DNA, 754 bp, Cannabis indica
catatggagcaagccaacgggtagtaagatcatgataaatgttgacgatgctatttttgaagctcagcaaaggtttggttttggttgtgtggctcgtaatcatgttgggcatctcttggaagcaatttctgattctagaattggcatggtgttgcctgaaattgctgaaatcattggcatgaaggaagcatttagttggattaaaaggaaagggtgggaggatgtgatcattgagactgattcattgatggttgttcaagcactcaatagctctgttcatatgtcttcctactttagtttgttggtggaggattgtcgtttgattttatctaccttaaagaatgttttaatctcttttgtttatcgatctgctaacaaggctgcccattgtcttgctcggaagtcttgctatttgtcaggttgcttgtttaatgagctaaatgctcctacttttttgaagaacattgtaatagctgaggctgtttcttaataaacttcttttcaaaaaaatatatatatttttagtcacaataattattgtgactaaaactaaattagtgacaacttgtaactaaaaactatattttagtcacaagtaatattttattgaaactaaaagtcacatttagttacaaaaaaagggatattggcagctaaactacctgaactttacggtttgtaacacttaaccacaaaaactgaaattttgacggctaaactacctaaacactagttccgttttgctctgcacacc

SEQ ID NO: 253736 - DNA, 942 bp, Cannabis indica
aagagctggtcatgtacaagccaagtttcgtactctagattaagctccataccagatcgaggagcatcttcaactattggaccagttcgaatgaactctgcaggtgctggccgtgtcccgtttatgaatccttccaatcgatgcccacggatgatagtattcaccatagttttccacaagggaaaattgttacggtcgagtttcaaggagaaaggttggctcagtgtgttactaaaaggagtagcaacaggtgctgggtttgaggaaaatggtgtagtagccaatactgaagcagacccaatagtctgtccaacaggagtctgatcaccttgatttactgcacttgtctaatcttgaggagtcgacatagcgttggcaaaggtgctctgataccaagttaaatttcaaaggatgcagttgtaaaatgatcagctcaaatgagactgatgcagggcaaatccatttatagaaatcagaaagattacagaggtgaggatgatacaatctcaaccttacacgtggagtaagttgttgcaattattacatagaaaaggaatcaaaagattctatcctaacggaaataaagggcaattgtaatgattgcctagggattggaaaagttccaacaacctgggagtacacctcattggagtaatgacaaaagtaccctgcataatttaccctgcataattttcctctgtaacattgtcatgttgcacaacccaaggtttgctgtagcggactgtattgtgaaggcgaatggttttggggtgagaatcgatattgtgcccctatccaaggttgtatcaaaactggtagtaggttgcaattttttatcaaacccttattgctacccggcaatatgcagatctgtctcggacaagggggcgatgtcaagtctttggtaaagcctttagatgatgttcaacacagtgcttcatt

SEQ ID NO: 253737 - DNA, 743 bp, Cannabis indica
cttcagccagtccttcactccctatagacaaagacctacaattttacaaacaaagaagaggtgctagcagttttcgggtagatgttcacacagacagcagatgccattaacctgaatgccaaatctgagcagcctatcttgagttttgagcctattgagcatggccaaccagattattacactgtgttttggggtatttagtctagcccaaacttcactactacattttaccctgttggttgaggttagaaacatgttgtcgccagcagctatggtatatttttgcctctgaaaagttgcagcatcagttaacattcgaatttgatccttaagggctattatctttttccaataccaactagcatgtattgaagctgagcaactccaccactcttgatccctgatatacacactatgaacccaccatagccacacactttcttgcttgttggagatggcccatatgtacttgcccatggccgctttgttctaatgctctaggttcttgattcccaaacctctagcagatttaggttgacatatgttgctccaagcaatgaatcatgccccatgaaaaatagcctgccatttccaaagaaaatccctacaaatggcttctatggatctcagaacctttcttggtaatatcatcatttggctccagtaagataatattatattcttaatcttataatttaataatttaaatattacaaaaataaataatttaaaaaataagatat

SEQ ID NO: 253738 - DNA, 661 bp, Cannabis indica
aaatattttccaaatgtaagcttctgagttctgagattatatttacatgttttataaaatatatattttaactattgctcatttaataataatttgactggttttgtaccttaataaaatagatacattaataaaatccctaaatatttcggcatctgtaataattttttagttcaaaattttttataggagttatttaagacaaattctctaaaattttgaaaaatttaaaataatttacaatatagaaatcaatgttcaaattagagatgtcaattatatactcgcgggtttcgggtacctacgggtatccgccctaatagggcggggacgggggttgactttcgggggcggggacgggtatgggtttaaatatttatacccgagtcgaaaatggggcggggacgggggaatagatacccgccctaaatcctccctgatatgatatatgtataaataatttaataagttttaaatttcatcactactacaattaaaataacttcatgctttaggttttttattaattatgctccttattttttttttactatacacactattccacttaagtttattgttttactgattttttatgattatttttttaattctctttgagacatttttttttaaaaaaatatatatgtaatgggtaccc

SEQ ID NO: 253739 - DNA, 758 bp, Cannabis indica
tgttactttagtctacaacatgttcctaaaattctctagtgataccagaagcattggaacgattaggtgtaaataaaaaagttccaggatcttttacaatgtctcgactagaactgtcttaattgtgtgagtaaaaaacctagctaaatcaagaacatccactcaaccagcacatggggtactccaggaagaagatgagttagactcggttgtaatggtggaataataagtacgcatcaacaatgaaggtcccaccaaagtcattaaagtgggagagaatctacctccaactgttagagagaaagtcatctctacagtaagagaaaatagtgatgtgtgagtatggagccattcttacatgactggaatcatccctcatatgaattttcatgctctaaatacagatcccatggtgaagctagtttgtgtgaagagaagattgttcgatcaaggtttcacggaagtagtgaagacagaagtagacaagctaactaatatagagctcctttgagaagctttatatccagtttggcatgccaatccagtgttggttccaaatccaaatgaaacttggaagatgtacatgcacttcataaatctaacataaagcttgcccagaagattacttcccacttccttaaataaataagatagttaatacaacttcaagatatgaacttttaagcttcatagattcatactcccactacaataagattgagatgcatgcagctaatcaagaacacactagtttccaa

SEQ ID NO: 253740 - DNA, 1381 bp, Cannabis indica
ttttacatataaaaatattgtataaaatacaattcaatataatacaatacaatacaatacgacctaatacgacattccaaacgagccttgactacattacaatatgcaaatcaatatcgattcttcagcttgtttctatactactaattttctttattaagttttgtcaatttgattcttttttccttactatgttattttttttaatattatttattacaacttcatacttttacgttttttttttcatttctaaaattagtgatagctgacattataacttgtattttgggaacaaaataaatgagtacattaataatacaaataataatatattataatatcaaaatgagtaatgggtaatagataattaaggaaaaaaaactagacaacaatccaattttaatattttaatatctattaatgcatattgtgtcaatttaaaacaagaaatataaaaaaaaataaattatcattatattttaaaaagtgtgtcaaaaaataaactaaatgtatccacaacgcactaaagctgtacattcgggtggcccagcctggcccaacccgtttttataaaagcccacttttttacgtgagcctggcccgacccgttttataaaacggactgggttgggcatggctcgtattttcaaagtaagcctaattcggtccataagtacaaattatttgtgttgggttggacccgtagtgggcctaaaccagccaactcattttttataaaatggccgacccatatttatcaaatagggctatgaaaaattgctattttttttgtacttttcaaattaatttctgtattttaaaataaaaatagattgtttcaattaaaattagcttcaaatcacaataaagaaactacaattttatgtttaataatcaaattaatatcactataattgtggtccattactaaatttctacataaagttgtattgtacattgtcaatataatctcgataagaaaaattatgttcgtgtcatatcttgatatgaaagagtagataaattactaaataaaaaattattttatggatttgaatttgtgttttatgtcgtgcttatttgtcgtgctttcgtgctaagaaatttatgttttcgtgtcttgctttcatgcttttcatgtcgtgtcatgcttatgtttacattattcatgtcatgcttgtcatatttattcgtgtcgtactaggcccaagcccatattctttcgtatcgtgccgtactcgtgtcacccgtgctcgtgccggttttgtaccgtgtcaaaaagtctcgctcaaatgtacagctttacaaagcaccacatacaacaattttttttttttcaaaaataaacaaaaatatatagtgtttttttttttaaaaa

SEQ ID NO: 253741 - DNA, 1276 bp, Cannabis indica
cccaaattaaaatctagctacatacattcatagatgtgtaaattaaatgagtattgatctatcaagtttcctgtcctaacttttacaggtttataccctctcatacaccgatgtacattccatctaaactttttgggtaattctccaacctaattaatccaatttcaatattaacagactctacacagaccctctatccttcactaatttcttaattatctattaactaatttttcattgagtagccaatggctacaagttagtataaaaaaagaagaagaagaaaagaaatacctaatttgagaattaagtaaaaataaagcattaaaaaagaaaaattgcagaaatcaactcatatatgaaatcttgattattgccaaatttttaccatcacaaccacattttctaaagataatttctcagtgcccacaatcataatcaacaatcaaataatccaaataaccaattacaactaaatttacatgcctatgagtaaacatttattgatccaaagtctaaactcaatataattctgaaaatgaaggtttccaaaacacagaaagaatttgatcctaaagtgagacttaacaaagaaaataaataaaacccagttcaactaatttcccaaaaacataaaacagatagttaagtaagatcaatggcataaagaaaagagccttaatcagctaagctaccttcagttcttttgaatttgaatattatttatctagggaaattatcttatttcacttatatataaacagggtatcaattttaacacctcttctaacttcataaactcaattcaattatgtaaacagtagaaaataaacaaaaaacccttaaaattaaaatactataaatctttctactaaaaaatgggtcatatagaacccctaaagtcagagattaatgtaaaatggccactaattttaatgaaggaaactcaaaagaaattgaacttaccacaaaaccctaactttttgatgcagagatgaagctgggaggcggcgttgatgatggtcgacaaagctggaagaatagggagggacagaagagcgtggaagaagaagaaaaaaagaaaaagaaaaacacagaaatgagatcctagtaaaattaaaaaatatttttatttaagaaaaaaaaaagaaaaagaaattattttaataatataaagtggaaaagttgaattaaaaaatttaaaggtaaatattattttggatccgtgttttgtaaaagttatggattttatagttttgttaaatgataaaatgaa

SEQ ID NO: 253742 - DNA, 596 bp, Cannabis indica
atttttaccatcacaaccacattttccaaagataatttctcagtgcccacaatcataatcaacaatcaaataatccaaataaccaattacaactaaatttacatgcctatgagtaaacatttattgatccaaagtctaaactcaatataattctgaaaatgaaggtttccaaaatacagaaagaatttgatcctaaattgagacttaacaaagaaaataaataaaacccagttcaactaatttcccaaaaacataaaacagatagttaagtaggatcaatggcattaagaaaagaaccttaatcagctaagctaccttcagttcttttgaatttaaatattatttatttaggaaaattatcttattttcacttatttataacaggatatcaattttaacacaacttctaacttcataaactcaattcaattatgtaaatagtagaaaataaacaacaaacccttaaaatcaaaacccacttcaaattgaccattgttagagaattaactaagcaatcatcacagttttttttccttcttcttatcctgtttctttttaaatttttaagtaagctgtgtaaataaacaaattaaaat

SEQ ID NO: 253743 - DNA, 1137 bp, Cannabis indica
atctcaacagattacaagtagctcctatcacacatacatacctcaatcataatcaacaggatcagttgttctgtggattattaggatgttagccttaaaatttgacatttggtatgtgactaatcttggtccagtactcctcattcccacttcgggtcgtactttttctttacaagaggacaacattttatggttaaagaggtgagggaggttgaaaaaatacagttgtctttctttagtaactacattttcttgcatatatgatataagtttctagtcttatatttttgtttacattattaatttaatgttgttaatcttttagctcttattattgttatattattttaaatataatataatatatagattaaatatgtgtaatatactaataagtagtgagtgtatgacaagttgtcatacttttgtaacaaaggttacaaatttgaaatgaatttataacctatgattcacatttgataaagattcaattaagttagtaaccgtatatgggagttagaaaaccaaatggaaatgtttccaagagtttgaaactagtaaaatattcatttacatcagataaatgagttttggaacattgagtgctgaattgtctagaagtggagtattgaaactcaaaattggtcctgcaattaaaccattaagtacataggaagagaagagaagagatgagtccatgatgagtgaggtgttgccaagtttattatgtgacagccctcacttaattaaatacaatacaatagaagatacaagtgtaattacacaactcaacaaccatataatataaagaaagaaaacatgtgaaacatcatatataataaacaataataacagaaaaaccagatgaatactaacaccaacacaacactgcttgtgtcatgccatggaagctacctccttccttcctgcataagaagagatttggcagaaagtaattagtcaggaacagcttctcagttctcttctcacacatacatgttttcattattattctctaacatttaaaagaaaaacagcaaatatatatttacaaattgcaaactgtcatgaatagaccataataaaacaggggattctttcttctaattattaacaaattcaccaatgaattattaa

SEQ ID NO: 253744 - DNA, 965 bp, Cannabis indica
tgagctattgtacagattggattagatctaaaatccgcacttaatgcgaatcagatgtactataagcaaaataatgcggattgaattatatgaaataagaaatgcacaagaaatatagaaactgatcaaataaatatgacatgaacataagataacatgttttgtctcatctaaatcatttcttatgttttggaaagaataagtttttggcaactaaatatgtctaacttaaattatgtaaatcgatcggtttgcttgagttataatatatttttacgaacctaatataaatatcgagttattaatatttaattgtaacccgtaaaaaaaaaataactcgttcaatgaatttgacgggtttggttggattaacccaattaaaccaatttttatttttatttttattttttcattattgttagtttttagtgttcaaataattgatttgaaaaaataaatttataatatatgtctaagggttatagtttaaataaatgttaaaaaataaatataaattgaataaacattaacttgataaaaaatatttttcaaaaaatagaatagaaaaaatatattcatatataaatttttactaatgctctgaaaaagacattccacttaattaggtgtaagtaaactttatcgatgattatcacgtcaatgtaaatctggtgcactaataaatcgtgggactaaattatttgaagcatataatcacaattacatacaattacattttaatgtgatgacataattgtaattgtgaacaactatacatttggtataattatgtataaaatatctgaacaaagcatatgataaggtagatatgatttttgatctttattaaaagtaaataggattactattatcctaaatcttggtcggatgacatggcgtattcttagggtgacacgtaatgtattttcaaaacctggacggaaggaatgattttcaatatatct

SEQ ID NO: 253745 - DNA, 545 bp, Cannabis indica
atggacatatggggcccctttcatatgattagtacagaaggatataaattctttcttaccattgttgatgaaaaatcaagatttacttggacttatattctcaaagaaaaatccgaggttcaacatatcataccatcattttataacatggtttgtacacaatattcacataatattaaagttgtacggtccgataatgccaaagaactaaatatgcatttcttctttgcttctaaaggaatcatacactatcactcttgtgttgaaagacctcaacaaaacttagtggtagaacgcaaacatcaacatattctcaatgttgcaagagccttgggttttcaatcccatcttcccttagtctactggccttatcttgttcaaacagccacttatctccttaatagaaccccatctgctcttttcaaaggcaccacttcctttgaattactacacaataaaccacctctatatgaccatctaaggtcctttggatgccttgcccatggctctactctcacatcaaaacgacacaagttctcccctcg

SEQ ID NO: 253746 - DNA, 1499 bp, Cannabis indica
ttattgggagcttgtttacatagaaccatagtccccacactaattgcaataatattgttttataatatcaattaattaattttaattaatcaataagaattctaaataagcctgtcttgtttgtgaatttttcactaaacaagggcttatttgagaagaaaagaggatctagtgtttgtttattaattaagggactttgtaaggtctaattaataaataagttaaatgacagttttatttaataattaattatgggctcgtttggaacgtcgtattaggtcgtattgtattgtattatattaaattggattatattatatttttatataatactatattaaactttaatttatactaaaatattatatatttaggtgtctatgaaaattcttatcacatatagttttacataaaaatattgcataaaatacaatacaatacaatacggtgtaatacgacgttccaaacgaattctataattattaaatagatagaattgacatttatagagttaatattaaaatatggtatttatgaaaaaaaagatgagttaaataaaatgtcaaaattaaaatccataaggctcattaagggtttcgcctaggtggattaataaagccattctttttttttttaaaaaaaaatctatttaaattctatacctaaccctagtatctccctataaatagaaaagtatagctcttattttcagaagactcagtctccttcgtcagataattagaaaataaggagagcttctatttttgaaattccttcttcttcctcaaaatttcgaagttcatggtgaattgagagtatgcccactcatgttaaagcaatacctatcatagtgaggaagactatgtataacaaaattgaaggagagaagatctaggttcagatcttgataatgctctgctacaaacaagaatcaagggctagagatctgaatggaaggagtcattattattccgctaccatcaatgtaaagatttcttaatctcttatgtgtttaattcattgttttaggaaattcatattttggatgttagattatagattataatcaaacatacatgttagtaaatctaaatcttggtaaaacaagttccaacaactgacctcaaagctatggtaatgatttattttcatgaaatatggatttaaaatagttattggttaatttggatgtgttcatgttggtttatttgtttcattgatgattgaatgtgaattacaatttttttttgaaaaaataaatttatttttgtgctagaaataatttattccttagtctaaaactcaagtgtgcgggccgaactgagtggaaaacaagctgagcaattccggtcctatgtcacgacaaccaaaacttagtaaaaatctttatcaaaattcttggggataaaccctaattctcataaccgaacaaccccatttcctcttggattaaactaacttaaatatctctaaaataccctgaatttcactccgaaaga

SEQ ID NO: 253747 - DNA, 546 bp, Cannabis indica
gttgagttttgatacatttgcttgtagctatgataatccatggtcccaagttgattagaaaattagtacagcttatgttctgtgacagacctatctttttagaggaaactaattattcttgttgtttctatacaatgattctgaaatatgattctcaggtattgggattataattttaaaaacagatacaaaaagtttcactgttgagaatttgagatattcatttgttcttttgtagggaacagattgtctggttcatttctaaaaggtctaaccaatattaccactctcttgagtccttatgttaaaattttatgttgttaatagtttataaagagttgtagatttacaatttacaaatgatgtcaaaaagaaagaaaaaagaaacatccaattcaataggaagtgagaacttaaattgaacaggaaaaagatatctcacagattctattacttggttttggttacaacaaggatgcacccaattaacagttaacacatgaaaatacacattagttgaacagtacaaaaatgaaaaatctctaa

SEQ ID NO: 253748 - DNA, 845 bp, Cannabis indica
aataaaattgattatttgctaaaggtaaattgcggcattaatagctaatgttttaaatttatgcacttaaatactttatttttatttttggagacaaaaatactcaatattacaattcccttataccgttactactacttctgttaacttatgaatatggacacatggaaagttcagatgcattacatttatttattttagggatatctgcaacataaatatcaaatattttcaattttatacacttaaataccacatcttttatttcaacggattaaatacccaaagttcagttttacacactaccgttactactttttgttaaatataattgagaatatttctatgccacgtattacttaggtattggtccactacataatttctttgaaaaataaaaaactaaataatattaaaagttctctctcctccgttttttcttcttctgataactgttgtatgtcttcttttttttttccgcatactgtaattgtattaatagggatgttcattcaatctaatccgcacttttttggtcaaacaacatctaatccgcactaagtgtagattgttagtttttatgtcataaataaaactctatttcaatgtaatctctatcatttaaatatcaataaagaaacagaagtattttcatcacttatttaatgtgtcatttgattcatattatcatttatttgtttatttgatttataaattcatccaaatccttatcacatttatgttcttatttattgtgtcgtcagcacagtggaaagtaatcaagattgtgtgattaaatatatattcttagatttatcagtacacggggtttaactgatatgata

SEQ ID NO: 253749 - DNA, 547 bp, Cannabis indica
taaattttttaaaatgacaaaaataatgttttctatttacacttttgaagacacaattttgaaaacatttagcttcataacttaaaaagtgttttcaatttttaaaaatagaaaacagcttttaaaaactaacagagaatgtttggctaaattttttaaaagcagttttttgaaaactcaattttaaaaaactagaaaacattaaaatgttgttttctattttcaaaaataatttttttttgtctaatattgtatattttacatttattctcacatactcggaccttggacccgaaccccgacctggacccgagtctgaacctgaacctcacccggacccaaaccccggcactaacccggacctcaaacctagatcccagaatgacgaatcacttggaccccaggctcggaccctggaccccggacctcagaccacattggatccgggttcggggtttgaggtctgcagttagggtccgggtctaggttctgaccgaggtccagggtctgggtccgagataggatggtgtaggatattaaatttttt

SEQ ID NO: 253750 - DNA, 1462 bp, Cannabis indica
aatattaatgcccttaggagtgattagggtcggccagagaccaaagaagtctgccacatccttgaagtacttgtgcaagggcatcagcactcattgctgactatgggccaccgactaggcgcacatccccttggcagggtttgtggcacgattagtgtgagccggaatgtagcagtccagctcgcccaggtacccgtcctggtcaagagtttgaaggcgcacctctgtaatcttggacggaggacttacccacctagcgcccaaggcaccctgccttctatgaggaatcgtcgcagcaagcgcctcactaacgtagtctacgtccttgaccaggacgtcaccgtcagcatcgagtggctgcccagtctcattgtactccacgaaatttgggggttcaacctcttcctatccctccgcctcggaaggactgcccgaacgcacatcatcaaactcttaaaactcctggacttcagggtccccctcacgagcctcctccatcgggacggccgaatcctgtttggcactgggcagagtggcaagccgagccacttgaagatcagtagcgtcagcccagatgcgtagttttctttgtacgagacatcatcctatggctgagtacaaggtcagaagaatatcctttactggaaggaggactagaacgaagacgagggtgaccctcgtgtagaagttgaagcaaatcctagacaatctgatgtccgagttcccaagactcaactgagttcatctacaaaagacaacacatgagatgagtgttggacggaatatcaaacgataaacaagaaaatatgcagaccaggagtactcaacatattaaagaacgactatgtctaaagaaaagtcagaactcaagaagtcaaaaagttttcttgagttagggcaaaaaagttcatgaagcttagaataagcaagatgaaaggcggacgcaatgcagttcagagacaagctctatggctgtaaacccatattaattgtcaaagcatttattagctgaaaaccgaagagaagctcagtcagcttcacatcgagtctcaaacggtcacgctcgccacgtatccccatccaaggtagaaccagctcagaagaattctattcgcaacctcaaaggtcccgtacagacttgggggcaaatgttatcccaaattttgcactctaacgtggcatcacgagaatggtgacacgtggagtccacttgaagcatcttctcgcgaagataggccgagtaggatgcctcgctggcatgtcttgagtaagatattcagggatccgtgcagagcaatcaacagttagcgaattcagctttcgcatcatgatcaatttacgtggatacgtcatacacacgatcccactatcagcatactcagcctcaatcccacgatccttgcattcaacattgattccaccatctttttgtttgtgcgcattgtaacgagagaggaaactc

SEQ ID NO: 253751 - DNA, 3849 bp, Cannabis indica
aattacaattttttattataatagttattttaacttcggcgtttgaagttgaaatatttttttcaacagtttaccaagtgtgtgtaaaaaatttcaaatatattttcagcactgtaaactattaaaaaattttacagaaattatgttgtaataattataatgaacatcgccatgaaaaaaaatattttaacatgtaattttagacgcaaagattgagaaataaattgtaacaggatgatataattagcacttctcttttcgattttaataaataaatagttgatttgtcgaatttcaagtgacgaaaaaaagaaaaacgtgtaatttagatattattcgtttattttgctaatttttttaatatgattgtgtgaaaatgctacagatagcggtgaaaaaattgaaagcgatgaattcaaaggcagaaatggagtttgcggttgaggtggaagttctcgggagagttaggcacaagaatttgttagggttaagaggttattgcgtcgggactgatcaaagactaattgtgtatgattacatgcctaatctcagcttactttctcatttacatggtcaatactctaaagaagttcaacttgattggaagaggagaatgaaggttgctattggctcagctgaaggcctcttgtaagtttaattaatctaacatgtaattatatgttaatcactcattgtcattcctactattagtcttaattaagtaaggatatcaatcgttgactttatttattattcaaacaatgtttgacttatgaaaaccaaatatgttcataaggaaagaaaattgaaaatccacaaacaatttgccttaatagtaagactctaaaagggtcctaatatgttttttttcccccttttaaatatcattattctacataagaagattttaaattttgaaaattaccatttcataagtaacaattacaaaaatgctatactttctaatttttagacttgaaaatcaggctcacaactaggaatatgttcacaagaaaagaatttgtaaatctacaaacaattgccttaatagcactgtctttttgtgtaaattaaacaaatataggctagactcaaaaaagggtctcaaattttttataaataccatctttctacaatagaaaaaaaaataatttagataagtaacaattgtaaaaatgctatattttctaatgaaagacctctattgtgttttatgttttattttaggtacttacaccatgaagtaacacccataatccacagagacataaaggcaagcaatgtgttattagattcagattttgagccattagtggctgattttgggtttgcaaaattgatcccagaaggggttagtcacatgaccacacgtgtgaagggtactttagggtatttagccccagaatatgccatgtggggtaaagtttcccaaagttgtgatgtttatagctatggaattcttttgttagagcttgtaactggtagaaagcccattgagaagcttcaaggtggagttaaggtcacaataactgaatgggctgagccttatataaccaaaggtaggtttagggatcttgtggactcaaaactaagaggtaattttgatgaggcccaagttaaacaggctgttaatatcgcggccctttgtgttcaaagtgaccctgatagaaggcctgatatgaaggaagttgttgggcttttgaaaggttgtgagcccaagcccaataaagtgaggcaaactaggatggagagcattaagtataaggatgaattggtagccattgatcaagccactgatgatgatgatgatgatgatgaagatagagaaagtaatgggtatggtggttttagtgctttggatgttcaaagaatgaaagatccttacaaacatggagttagaaaaactactaataagttttgagatcattttttagtgttgtgttattgttattattttggttttatgttttttttaaatttgttagtcatgaacaacaattacattacaatttttgttatgatgaatgggatgaatgaacaatggtttttggtaactattaaggtacacaagtttccttattgatatatggtcaatgaaaatgtgaaggtgtattttctttttaattttcttaacttgagaggtagaaagtaatagaaaaaggtaattaatcaaaatagtaagtaatattaggtctactagaaataaagatcatgagaatagtcactccaaatcttattacaataagaggaactacaaatgatgctaacttataggctaccatttttcaaattttaaaaacatttgtcctattgaaattctagtaaaaagttttgaagccaattagatagctctaatgcctcattcaacacatcataaactatatttaaatttgaaatattttaatttttaagtaattactaaactatgtttatgaccataacacaactatactcattgtataagtgacaaaacatgacacttcaactcgcgtttccaaaattaaacagaattgtatattttaataacatgtatggtttagaaaaataattgtcatgaaagttttatatttcagtatgaataaataagatcttacctatttgaattaaaatcttaaaaaaaaaaaatctttggaattataaaaattgttgcagatatttctatttagttacatttgatcaattttttaataatttgtgttgtggaagagaggaagaacataatgaaaataaatgaaatgaattgttgaactgcattaattacaaagaaatgaaatgaatatcatgcatctgccaattgtaaggagatactaacaggtatgaggtgaatgtcatggttcttaatcttatctctgatcaagtgacagtcgagttcaatatgcttggtcctttcatgaaaaatgagattgtctgtaatatgaatagtcgactggttatcacattaaataaaagttgctataggctgagggatgtgaaggcctatgacaaaatattgtaactaggtaatctcgctagttgtggcagcgagagcatgatattcagcttttaccaaactttcggagatggttggatgtaaaatctagtggtggaacgtcttgtaatgtaggagacccaattggaatttgaaaaacctctcagatgagttgatgaagaggctaaatataggagcccttggccaagactactttctaagtatagtagaagatgatgaacttcctgtatgtgtgttatcctaggggttcaacataaattgacttagacaattaataacaaagatgatgtcaggtcgtgtaataccctaaagtttcataactacattagcaaccctaactaagttaattaaatgttaatgagaaattatattatgatatgatttaatatgtagaattattgtgatttattgtattttaagaccccgttggtatgttagaggatttttgtaattttggcccgagaagggtaaaatcataattttataatatattgtatttatggactttattattatatagtatgtttattctgtttttttacaagttatttctgacaagtcggcacagtataatcacgactaagtattttggaccgaactgggttcagagctcaaaatacatttttcaagatttagttatggctttgatgtgttaaatgagaaaaatgtgaactatgttatatatgtgtgtgagtagaaatgacaaaattgtccttttatgtgtgtgtgcttatatgtgtgctttaggggcaatttagtcattgaccaaataatctattttcaacaaaacgacatttcagccaaagtaaaaaatcattttttgggtttttgaaaccccaaaccgcctacccccccccccc

SEQ ID NO: 253752 - DNA, 1379 bp, Cannabis indica
taattgtattacatacaacgtactatgcaatacaatatacttttcttacctttaatccaggttcatacattttggccaacccaagtggagaactatccccaatgatctcgaccctatgtcacaacaacaataaaacaataagtgtttatcccaaaacactgcttaatattcacataagacaacttagggttttctaccaaaacccgcagtataaatacactaaaataaaacttacattttgggtctaaaacatacgccatattgtagagctcgttgcaagcttagaaacagtatatagaatgtccaaaacggacactcgagtcaaaagttatgacaaaaatatgatttctgatctcttaggaatttctaaaaactataaaactcaaaaatcccaattttcgctaccaaaacctatccaaatcactccaaacttcatagggcgcatatacaccataaatattaccatccttacgtgagagaaataaaaatcaacctcttaaatgaaaaatggcaataacgttcggactaagctttaaaaagttccaaactcgatttctaactcaaaatcacctaaaattcaacaagtaaacatataaactagtcccatagttaccaaagaacaattctacgaagtcagaagctctataacctttttaaatcataaagcccctatataaaacaaattgtttttagcttaaaacgtaattgaaccataccttaagcttttcctcttcaaagatttgctatcctgctactaccggagcttagattgctaagttttaagttgaaaatcgaagggaatgaatatagagggagaaggttttatcgaaagagggagaacgagggtttcattcgtcgttcgttcttttattgttatatcttaaaacttaatatatatatatattaaacgaacgaaactaataaatttcgttttatgtatatataatattaataataatattaataaaaaattttattattaatagttatcttattattttttagccactaagaaatctctatttttaggttatttggccaacttcgagtatcctaaaataccccaatatttctaaaatcaacttatcacaataatcatatcaatatttctaactaaaactgttgtgacatttttagcctccaatcgggtctccagggtcgccaaacctaaaaatatttttatttcacaaataactcatattatatccacgtatttcaaataaatttccgtaattaacaaattacatttatatatatatatccacttattgagtctccaggatcaccgaacctgaaaatatttttattccacatatagctcatattatattcacacattctatataaattttcgtaattaacaaattacgattatttac

SEQ ID NO: 253753 - DNA, 823 bp, Cannabis indica
agcaggctccccgagcctggttcaagaaattgcagacctacttactgtcttttggatttgtttcttcaaagtctgatcatattttgttcattttacacacttccaggtctatgattcttctattggtgtatgtagatgatataatcatcactgggagtgatgctgaacaagtttcttctctcattcaagctcttgacaacaaattctccctcaaaaatcttggcactttacattattttcttggtatcgaggttcaacatacagattctggtatgcatctttctcaaggaaaatacattcaggatttgttaaacaaagctcaaatgtcagatgtcaaaccagcccctaccccaatgacaagtggcttgaaactttcagcatatcaaggagatcccattgacaaccctcaacactataggtctattgttggagctctccaataccttactattactagaccagagatttcatatagtgtcaacaaggtgtgtcaatttatggctaatcctcttcatcatcactggaatgcagtgaagagaattcttagatacttgagtggtactgtttctcatggcctaactctgcagaaaccaactgaacttgatgtcactgccttttgtgacgctgactgggccagtgatcctgacgatcgaagatcgacttctggtttctccattttccttggttccaatctggtggcatggcaatgtaagaagcaacatacagtttctcgctcgagtaccgaagctgaatatagaagtcttgctcaagttgtctctgaacttacatggatgcattccctgtttactgaacttcacattca

SEQ ID NO: 253754 - DNA, 1368 bp, Cannabis indica
ataaattctattaagtccaaaacatatgtatttgttcatgattatagtgtcgtcagcacagtggaatataatcatgattatatgttcaaaagtttaattccttgatttgtcagttcactagatttagactggcatgataatcagcgataaggtatacttacaccttggataagtgttatgtcctttccagggcattagcaaagtttaccagtatcggatgtatggagtatacattggaagggaccgatattgatcttggataagatatcataaacttactgttatatctttctaagtcaatatcaatggttgatcttaggtctatggatcttaatcctgacatggttaggttcgatctcaagagtgttatttgtgttctttgatttgttagttaaagcctaccatttggtccgggtcgatacatacatcttgagaacatgacagtacaattgagtgggcacactaatcatagatacagaatttatagcttctataatgacatagaagtgaaataatgatttcctttcagcttggcataacagtgataaatggaagagcacttatttcagtaataatagtagtttactaaaatatcatttataggaagctaagtgttataaagatggatttgattatttggattataaaaatggataattaatagcgtatctatatttagaacatatagagcattctatgtaatcaggagtgcgatttcgaatctacagtggagtcagaaagaattaataagttagagaatttacttggtaaattctagaactacttattgggagcttgattatataggtccatggtccccgcactagttgagataatattggatcatatactcagttgattggttttaattaaccaattaaattctaaattagactatgtctcatttatgaattttcactaagcaacgacttaattgggaaaaaagaagttttaaggtttatttgttaattaggagactttataaggtctaattataagttaaatagtaattttatttgataattaattataattattaaataaataaatttaatatttataggattaaaattaaaatgtggcatttgtgaaagaaaaagagaatgtgccatttggcaaacatatgttttttaatttttttaattcacaaaaagaaaagaaaaattttgttttaaaaaaatttatttttgaaaaataaaattgcgttctgtaaccacttttatttttcaattttaaaaacagacaacaaaagtgtgttctataaagtttattttattttattttttgtattttatttaagtcgggtctaggtccgaggtcggattcgggttcaagtcagaagccgggttcagcgccaaggccgtgggg

SEQ ID NO: 253755 - DNA, 644 bp, Cannabis indica
taattataagagagacgcaataatatagtagtttactccttgtattgcaatactaatagagctgcgtctacttcaagtttttatttctcacgagatgataattacagaaaaacactaagtgtccaaaacttcaatttttagagagagaaactagagagagaagctctgaccttgtgagtagttttgtgaacttgaaaaatgagcttatggagctctcctttaataggtgaaggaggctaacaaaaatatgagaaaaatacaaataagaaatttttgaccgttgatgatgaactaatggtgaaaattatctcttgctggtgatggccattttttgatgcccggcaggtcctgttgcggttaactcaaagcttatttttgtaactcccttagggataaaatttgagaatgatggctttagaattacgtctggagtatgagacatgactcgatagagcattgaatgagcttcgaaaaccaaattaaatcgcatcaatcgaatcaaaattgaatgagttatgactattttactgaagacaattcatgacccagcgcccaggttgatatctagcgcccaagttgtcatccagcgcccaagttctcattcatcgcccaagttgacatcccagcgcccaagttgacatatg

SEQ ID NO: 253756 - DNA, 824 bp, Cannabis indica
atgaacgaagatgagagggacaccgacgggaggtggtggtggtccgacgtatgcgacgaagagtagagagagaccgacgggaggaggggtgggtcgagattgatggacgagagagacaagaagaaaaggagatcgagagagggaggaagacggcgagagaggagggcgatggtgcggaggcgtgggtggggttttcgagagttaagattttttttttacggtgtgggaaatggagaagaaataggtgagaagatataggtgggcatgtgggaaatagaaaaaaagtaggtgggcacgtgggaaatgtggcaagaagtaggtgatgatttttcaatggacccttataggcgacggttttaaaccgtcgcctataaaggtccattaaaaaattgcattttattaaaaaacgtcgcctattttgtttactacaattttaaaccgtcgggaatactaaatttttcccaaaggttttaaatagttacttaatttttttagcgacggtccccggaaaagttcgtttttaggaccgtcgcgaactctgatatttgaagtactgtagcaatggtcattagaaatgaatggggagacattcaatccatcaaaaccacaaagagcataacaacttatccaaaacttagcgaagtgcatgccctctgccttgtagcggaactatcggtggagtttggctataggtatgtgatgtttcaatacgaaaacatagtggtcacaaatgcatttgttatcaacatggaccacggggtagcctatactatctccacaactagaaggtgtttgatcagattatgcagccaactgagggactg

SEQ ID NO: 253757 - DNA, 1106 bp, Cannabis indica
catagtaaaattaatgagaacacgatgtattttgggctgggggccaaggccaccttagactatcacttacctctgcccctagcaacatgcatgtacttatagcatattcaaatgataaatagtatgttttattttcttaaaaaaatacatatacatataattactattttttaatccaaacttttcatttgcttagaaaaaaaaaagaactccacatttctagtaaacagagttttatctaagctgcttcaagatgacaatgcaaattaaagtctttactaattcattgaaattattccatttaccacacaacaaaaaaaaaagtactattatacaaaaaaaaaaaaaatactctctcaatattgttcattttcctttttcttattaattattctgtgtggagttttccttcattagtagtgtatagaacacctttacgatatggttcacactctagctaataacttcacaagtaaattttacacctacatttattttgcatgcaatttttttccatctcataatagctttaagaattgattactccaaagtaattggacaaccaaagtaattgtagttgaaaaattgctccacgccgcgccaatccaaaaattctgtcaaatatcagaatttgcttttaattgatccataggtaaaaataattaatatatttttattttagttaatgcctattaatatttattgacctatattatatatataattttgatagagaaaccatatggaaacaactatttatcaagctgatattcaagccttgcatagacattgcacatgacaaaagcatatgcaatttctaatgctaatgttaaagattgcaaactggactacaaaagaaatagagatctccaatgggttataactggaaaaactaaaattaaagaactccaagaaaattatgatgatcagttgatgtctacttacaactttgtgcctctctcagtaatatacaacaatatattgatcttccatctgaagaaattagtaagtttccacattatatatagcttccctttttttttttttataatattacatacacttttattaattataatttttgttcttcttagatttgatggctg

SEQ ID NO: 253758 - DNA, 517 bp, Cannabis indica
cattagttaaattcattgatgaatatgatgaaagaagaaggaggtagttaggtcttagaaaattagttggtcgttgggagtacttcattatcatacaagcaagtagtttttagttagtaggggtttgagtttattgaatagtcaatagtgtaatagaacccttatatatagtatgggttgcatgttcatattatattattatattttaccatttaaatttaagtaatgatatatacatttaaaattatgcactatcacacactaacgagacagttttttttatcaattatataatttaataattctgatgaaattaatatatttattgttttataataagcattatatatacaccatgttagtaaagttttggtgcataatattataaatagagtaatcattacatatatttataatataataatgtataattaatttctaatttatttataaaaagtgtaaaaatttggtgtgtttccgacattcatcttataaatcataagtctagtacactctc

SEQ ID NO: 253759 - DNA, 652 bp, Cannabis indica
catcaacatcggaatgatgaacaatccgttgtctgggggtagaacaccacctgtggatgtcatcaatggcagagtaggttgaggtaatgtcatacccctcaacctattccctgaaactactggcccaaaagccggagaaacatctacaccagcagccacaacggggcactttccacccttcactccaacggcggtgtccgagggtatcgtccagctaaccaccgatcagtataccacaattcaggacaagttgtgcgccctgtaggccgaggtggatggacagaacagggcccgatgtcctcctcgagcacccactgctcgcacagaaattcctcaggtaaccaactctagacgtcgtaataaccgtactcgcagggaacggaggaccaaccccgaaggactcgacctaaatcaactaacctcgagagaccaatctgcaaggtatcccaaccaggagacacagattgaggaagaccgcgaacgacgcaatcctcgcagcagaccttcacgagacaatgacgtagaatctgcctcctcgtcctcgcatggtcgcacacctagcaggtacacgaggtccggttctgtggagacactgcagggaggacaatataaggttcacaggggtgatctgcgtgatcaccttaacgctgtt

SEQ ID NO: 253760 - DNA, 767 bp, Cannabis indica
actcatttggacatgttcaaacatataactcatatactagccacacatagcaaaaatttacatatacacttgttaaaaaagtatatccgaagttcaccgaaaattttgcataatgacctataatctgaatttttcagcatgtatagttcaagaatgtcaatactcaactaatcaaaactttaattcatagaaatagtatgtgacgtaccaattaagcatgtatgcataagagaatgaacaagaaggatcaaaagtaagtgaattagcaaaacacttcatattccacttttttccatctatgcatattagtctcatcaaaataagtagaatgaataagaatgatattaccggttcccaaatttgttcatttaggttgtgttcaagaattgacacattatttttctatactttttgagacttgtgggtaatgtaggaactcgacattcttctttaagcatcaacacctaagagccaactttggttcctctttattgatacctacaaaacaaaattagatctttctttttggtacccacataactttgggtcctttgatgttagtctttaaagtctttggtatccaaatagccttaccaaaataggcattcttttttcacatggccataggatttagtgtgaccatcttggttacaataagtgcaagttaagttcaaattacaagatgatttgacaatgaatttcctaaaaaacttttgtttcacacaagtgttgtatcctatacaattttttgaaaaagcacatttttg

SEQ ID NO: 253761 - DNA, 1486 bp, Cannabis indica
cctggaaccaacgcccagaggaccatcggagatgctactgagttacaaaatctctgtgacgctcttggactcatgcagaatcataacaataccctgcatcatgatcaggacgaactacgcactgtggtaaatctcgcgttcgaagaagaaagacgtatgtaatggaggaatagagagatggaggtgttaagggctcaccatgcagagattgaaaatcgtagtcggcaagctaccgttctgatacgaaaagcctaccaaactgtaggtcagcaacctccaaatgtcattcccctgggtgagacggacgaagatccagcgatgaatacctcccagactgcaaatggtcagccgcccaatccccggtcatgagttccactcgtgggcctagcggtaggcaagcagaccttgtctggtaattcatcaagagaaatcatacctgacggttccaaccagatcaatggtgccattccgcccgacaaccaagcgaatcaatcgctaacgcagccaggcacttctgtattcgaaagattggggcgacccatgacctaaggagtgatctgaacagaaggagggaagtagacaaacagaatgtcgcaagaatcgtgcagcccggaacccgtactcaaattcccgctcaggaagatgctgacgtattaaaattgaccagaatgccgagtaggttagcccagccgtataggcacagctagacgaactgaaaaatatgtttcacggcatggctggacaaagaaacaatgatcttgagctggaccgagcacgcagaactcctttctcatctgagatcaatctcctgctgttgccccacaagtttaaaatgctaacgaggaagatgtacactgggaaggaggatcccctttcccatctcaagtactttgagatgcaaatggatttgaaaggggtaggaggagatgtatgttgtagaatcttccctgctaccctgtcggaagccgcttagcaatggtatttcaagttggctcctggaaagtttagttcatggaaaaccttctcttcagaattccatgcacaattctcctcctcacgcaacctttcattgcatttgggagacttggtcgatgttaagcaatgactaggtgaaccactccgggcatacattagcagattcataacgtagccaaccaaagtttcacgggtaaccgaagatggaaagttatccgcgacactaggaggcatcgaagtcctcagtgaactctggaaggatataaggaagaacgggccagtagactcaatgagtgattttcttgaccgagtcgaaggcttcatcaagctcgaagaagctattcaatgagcggaaggtgaacaaaagcctggcaagtcaaaggctccttccactggaacatccgcccaacttccccattatccaagtaattcaagctcaagtggtaaaacgttccaacaacaaccaaaagcaagggaatgggaagaaaggaaagttcactggcaagttcga

SEQ ID NO: 253762 - DNA, 733 bp, Cannabis indica
ggtccaataagtgaatgtccaacacaaaggtcactaattattgtattgtagaaacttaattttttttttcaagccttatggtatttttgataagtgttgatcaaactttgttgtatttgtgatagtttaattatttggtgatagtccaaatcgcaaaaaccgcaccgcatcgcaccactttttgtggtgcagtttttgcggtgcgggtacggtttggaaaattttaaaaactgcatgtgcggattgatttgaaaaaatagtcaaaaactgcaccacccgcaccgcaaacacccctaatattacatatacttattcttatatgaaaaaaaaaaagaataaaaattatattaaaaaattaagatgtttgtaatatatagtgcggtgtggtttgaactgtaataattaaatttaaaattacaaaccgcaccatactacgcggtttagaaaaaatacaaattacaattgcatgataaagaattttaaaccgtatttttttatgtagttgtgcgatataaacagtttgtgtggtatgtgcagtttgatgagcacccttaatttatactaccctaattatcttattcggcggttacactgctacatttcaatggccctacagaaaatctaaaaggtcttatgaaaaaaaaaaaaaaaataatccaatatagattttaatatctactaattttggcttttcttttattttctctttgttgtgttattagttttttttttt

SEQ ID NO: 253763 - DNA, 519 bp, Cannabis indica
tttgatttgaacatattttgcatggtgaaatatttaggtcaaatatgccccttaatgccacaaaagtgacaaattggaatgacccatcttacctgagaacttacccttttcgattttaccagagcttttgcttctgcagatgacacatttgcagcagcgaaccttgtatttgcagcaacaggaaaattcggtggaacactggatgtcatgaattttatttttccaaaactttcactaccattagaacctaggccagcagagcctttttaacctgtattctaaactttctcaaaaatagaagatccatggttaagcatttaaacatttttcttgagattttcaagttcgttctttcccaaattaatttcttcatttattaaacaaactacagtctcatattaattatcaattcaatagatacaatttaatgagacaatttttaatttattttagatattgatctattttcagaagtaacctgtatccacttttcacacataaccttgtaagactcagcca

SEQ ID NO: 253764 - DNA, 1458 bp, Cannabis indica
ttcgctattgtttatttcccctttcatggaagatgcttgttttggaaaaggaggtctgaaacttctattctatctgggtctgcaagtttggcaggcaaggaggacaaagctgtgaggtctacaagacttatagagagacggtctaagaagcgaaatgtgcctaagtcgaaaattctgtctggtgagaaccacagttttagaagtgcagatgttcggaaaaactcaagctttgattctgatgacccccttcgattgttcttggcgagctctgaaacaaaacagcttttgacttttgaagaagagttcgaattgattgctcgagtacaggttaatcttctaatgaaaactatttctgaatgatggtatgtgtagtgtgttatataattctaaaataaataatgcaacaggatttaatgaaattagagcaagtcaaggacagacttcaatcagagtttggccgtgagccaactttggttgaatgggcagaagcagttgggattcattataggatcttgcgaacacaaatttgctctggtaccagcagccgggagaaacttatctgttcaaatttacgtatggttgttcacattgctaaacagtatcaagggcgtggggttggccttcaagacttgatgcaggtaatgtcaacacattatgggggtatttgttttgtggggtttgggttcttgggaatggaaatataaaaccaaactttagtatgattttaatggaaggcgtcccatttttagtttatttttggagtagtctcaaactctataaaaactttagtttgagattgtgttaatttcaatcccttctcaactaaagcccaccaactaaaaccttaagtttggagtatgttttcagtctgagtgggtacataaacactcaaattcattggaaagactaggaaagcttcaaaaacctctctatttgattggttaattatattttgacagttcataatctccctatctttactgctgattaacaacctgtgagaacaaacatgccttgtttgtttgtatgcaatatataagggtactatgtagaatctgctaaaaaggtgctaatatgttttcataattatattcttacaggaaggaagtaagggccttatgaagagtgttgagaaattcaaaccgcaagctggttgtcgatttgctagttatgcatattggtggataaggcaatcaattaggaaggccatatttcaacattccaggactattcgtctaccagtaatgaaaacttccttcatttagcttatttcttttgatcagatatctgtggttgatgaatttttacgtttcagctcattgattatatttttctacaaattacctgttcctaaatggaaaagggaaagatatgaagtttctgcatgattatttgagttttaatgctcattaatgtttgtacaatttgttactgtggtagagtaaaactgcttgtgag

SEQ ID NO: 253765 - DNA, 533 bp, Cannabis indica
caaacagggaggtaggtttgggagtgtcgttatacacttttgggcaagtattaaaattcattaatggctaacctaagtctaaattgaaccgtaattggggtaatttagtatcggttgagtttcatttttagattgcatagggcaagatggagaagaaaaaaagtatactgtttttccttggtgccaccgtcgaaaattttatcttggggctttgtttcccctgagctgctactaatgtttctggcattaattgctacacttttcagaagagcggaatgactaatggcaaaagaaagggttcacggaaaaaacatacagagagctcttgtgaagacaatctgtatgagtgtaaatataatttaagatccctcaatttcgtacaatgttgacgacagactattgctcttcgatgatggagattcacttccacctctgccagagctcataagcagagaagaagaagaaggaggaggaggaggagggggcggcgggtagggcaatgaaagagagagagagagagagagagagagaga

SEQ ID NO: 253766 - DNA, 1208 bp, Cannabis indica
aaataacatcacgagattgaaaaatcttgtgagactcaagatcaagtaatgtataagctttcatacttgtggggtatccaataaacacacaagctcgagaccaggggctaaacttacgtcgagtgctatccaaggtggaagcatagccaagacaaccgaagacccgtagatgatcataagagggcaacctattatataacaactcaaaagaagattttaaatgtagtggaacagaaggtgtgcgattcattagatatactgttgtatgaagaaaataactccaataagtgagtgacaagcgagattgaaaaagcaagtgctcttgtaatgtttaaaatgtgttaatgcttacgctcaactaaagagttttgttgaggcctctcaacgcatgaatgatatggtaagatacatatgtaagtgcaaagaaagattggaggtggagcttctaagcattatcacataaaatacctttgatggaggtaaaaaaattgattcaatatgagggtaaaaatctgtgggataatagttcgagcatcggccttgcttttgagcatatacacccaagtaaacctggtataatcatcaataatagtgagaaaatatttataaacctaaatgctaatagtgtgaaagggtccccatatgtctaaatgtgctatattgataacctggcatgtgctatattgttagatgaattaaaagggagtttcttttgcttagctaagtgacaaacatgataaggagaaataaaagaatctgaattagaaaaatgtaatattttgtaattcaaacagaggggtgtcctaggcgtaaatgtcatttttggacagcagtacaagaattagaaatgacatttgaattacaagtatgattattgaacacgaaattagtagagactgagacttgctagaggagaagaaaatgcccaatgcgattagtagtccaaattcgagcgtttcgagctatgtacctaaaaaaaaacaagcatcatgagtgaacaaaacattgtatttatggtcttctataacagctgaaacagagagaaaattgttatggaaatctggaacaaaaagtacattggagatttgtaagttgtcatttgtgtgtacaatgccagatttatccacaggtattttaagtccattaggcagtgtgatataggatgtaataaggattttatgaaaagatgaaaaacatgttatatcaaa

SEQ ID NO: 253767 - DNA, 852 bp, Cannabis indica
aagaatcatagttcggatgatataaatcttattttgaagtaatgttttccactcttctaccataattatttattttaagaaaacaaagaattagagaaatcttcacaagaaaattgtaattagtgaatataatcagttttgttttgtagaatttcttcaaataaatacgtaactgattgtttttattcaatcattatcttttagaacatgtgaaaaagaagatggaaacaaattatcaaatcagagactactttgtttcattcaataggaaaatgaagagaaaggaggagagacaaagtgagaacatataattgaaaagaaaagaaaaaagttgaaacgtataacatatttaggcgttacaagactttctttctttgttttgttgtttttttttttttccttataggaaattaattaaatggattataaagaagaaaggtactgtaacataaagacattaaagaaaagaaagaaagatccatgactaaaagaatccactatcttatattcatgaggttgtaggaggaggggggttgggattgattttgacatattccaaataagcccacctcttttttctttttttttttttttaaatttataattgatatttaaaaatcctgatattcacgctggaaaagggaaatatatcataacctcatatttttttggttttgaataatatgtaacattaagataaaccatttatttatcggttcctaacgtaacattaggagccaaaacattagaattgttagggacatagtacatggagacattaagaaaacaagacaaaaggaatcattcttctgaactagatcctgaaagacatgatttatccctctattttgc

SEQ ID NO: 253768 - DNA, 567 bp, Cannabis indica
cttttaattgggagaccaaactgttttttcacgaaacttttgaacctaataaacatgtcaaaagcttgagatttaagtattagagagtatatctatgaaaacctgtcgaagtcatccataaagagtatgtattacttgaatccatctatagaggctatatgagatggtccccataaatcagtgtgaatcaattcaaggggttggctgccatggctggcgtgattgtatgataatggaaaaagtaatttgtgactcttccctaatcgacaagcattgcagaagtttagtatttttaatgaactggatggggttattgattgtatgataatggaaaaggtaatttgtgacatccataaaatgtataaaaataataattaaatatatgtaacatgaaaataaatacctacattaaaatgtgtgtattaagctaacaaaattatataccattattatacatagcaaaataaaaaataaataacatctaagaataataatataccatacaacaaaacagaaatatattgtacaataaaatctatataccaacaacccacaacaacccataaa

SEQ ID NO: 253769 - DNA, 936 bp, Cannabis indica
gatcatgtcagacatcgctcgggtcaagcttgtgggggtttttctgtcactcatggctgcctcactttccgtggacgattagtattgtcggccgcctccccatctatcccactcttactgcaagagtaccacagcaggaaaatggggggccattctggggttttcaaaacattctagcgtcttgctgctgatttttattggcgaggaatgcgcaaaagatgttcaaaacttcgttgttgagtgctcggtttgttagcaaaataaatacttagctcaatcgccgccgggtttgcttcaaccccttcccattcccaagcaagtgtgggaagacatccatggattttatcgagggccttccgacgtctaacgactttgattttattttggtggttgtggatcgtctcactaagtatggacacttcattcctctccgtcatcccttttcagccgtcactgtggcagcggtgtttgtcaaagaagtaatcaaactacatggctttcctcgctctattgtgtctgaccgggataaaaaaattttgagcttgttttggaaagaactatttcgtttacgaggcatagtaccacctatcaccctcaatcggatggccaaacggaggtggtcaatcgctgtctcgaaacttatctctgttgctttgtcagtttcaaacccactcagtgggtcaaatggttgctttgggccgaatattggtacagcacttcccatcacacctccaccgggatgacccccttccatgctttgtatcatcgtgatccaccacccatcatccggttcgagcctactagctctcgtgtttctgcagtcgaagaggtcctcactgatcgggatgccattttagccctgctgaagcaaaatcttctccgcgcccaacaacggatgaagtcccaagccgagcgtaagcgtagggatgtccattt

SEQ ID NO: 253770 - DNA, 650 bp, Cannabis indica
ttgttatttattttttttttgttttttttttttaaaattaagatcaaaagatttattaattaagaattttgttcaaaacaatagagcgtacttcagcggaacaatcttccaactgaagcacagaacctgtagagaaacaagactctctggccaagtaataaaccaacttatttgcagatcgtttaataaaatacaactcaatatatggaaaaacaaaaagcaaattacggacatcgatcttgaacaagtaaaccaaattgacaaaccatagaaaaattactttggatagtgattaagactcaaatttgtacattttaagctcttatttatgtacatattattaatataaattaaatatttcttatttctaatggtaaaatttatttaaatggaaatatttaatttactttaatttttgtgttattttttagatttaagcatagtggtgtacataaaaattaaatgagaagttcaagatacaataattaaaagagcaaagcatcacacatgatgtaataacttgcgtggagttaaattgatcgacaggaagtttttttcttatactagctttggctttacttttattttactctttctatgtatgatattcactgagccgagattttatttcaaaggctcaatagatcatt

SEQ ID NO: 253771 - DNA, 738 bp, Cannabis indica
ttacttgcaccaaagaatgggcatcaatgaaccatactagcaaccattgattaaagattccataactttaatatgttgctgattgttttattcatagctaagtggtcttaattctttgtacatctacaagccacaacctcatatatgaataaggaattttccgatattgaatataaattattcaataaaataacttaatattcacacatatatcaaatgattaactatttttttaataatcagaagagtctttacaggcttttcagggcataaaccctaacaccttcatattttgttcatccaaggaaccatcaccacccctgccaagattggaagtaagcagagctgtaaccccaccaacaattaaagtccctcaggactcttgaacaaactctgtagtgctcgcgactcaaggggtgttcatcacatctagatttcccaaaacggccaaaggtccttgcatgcaatatttcccatacaatggtcccatttggttacaaacagtaaattgttttgttggcaactctggagctaaagtaactagtacttgaggtgaaggcacaacaaaagatccatgttgcctcaacctcttctcctcctacataagttgttgaattctaattttcatttccatgaacctttgttccacaactggcgaagcctgtggtggattttcataaccacctccataagtcctttcttggctctaactcggcctttggaataaggggaatccca

SEQ ID NO: 253772 - DNA, 1272 bp, Cannabis indica
tttttcgaatgtagtaagtactttaagtttttattttactatattttttttttttttttaatgtgattttatttttgtttatggaaccagttattttctttatcatgttcttgttgttgttgtcactggctaaaccttattttatatctggttatttttacaagatgtttacttgaagatgaaaccagagcaccgttttgcaagtaagctttagatttggaataaaccgtgggttatcgaggagcttaatggaaatcttactccttctcaaaaggcgttatttttgacgacgccttttttgcaatttctgaagatgggcaatattaagtggaacattgccctgcctcaccttgctttagtgagggaggttcatcaagggagggaggatttagagaagtggttcttgatccgggacagagttgtccgttttggtttggaggagtttgtcttgatcacggggttaagtccggaagggtcatctgacttgaacgagtttaaacaaaagatgtcgttcaagaagaagatgtttcctgacttgactattaaagtcattcaagagcaagttagggcaaggtttttgtctggagaattcgatgatgacgttgacgctgtgaagatggcgattgtttttctgttttgtcattatttgtatgggtatgagaatggtaagagagtcgacaatgagttgtttggttttgtcgatggcgatttgtcagagctgaggaatatcacatttggtaaactgctgtgggataggactttccactacatgaatttggcctttaaggacggcgacaatactattataagattgagaaggccaaagaagaaaaggataagctctattcttttaaatttcaagggtttccatttgctttcctcatttggttgttcgagatactcccaagcctgtctcctaactactgcaagaggattgcgaatacatatcctcgaatgctaaattgggagagtacttacaagaaaaaaccaggggttattcagaacttgtttctgaggtttttaacaatgctgaggtaccttttactttttataattggtttcctttttttttttaatagtgtatctataactggtttttaatatttttgatttctttctgatttttcaggccactgttgtaacgccctaaataattaggcacgctacccaagatacttatgaaaccctaatcccctaaacaggattactaatgaaatcagcgcgaaatttaaactttaatcataaacgtaataaaaataaaacttgtaataa

SEQ ID NO: 253773 - DNA, 666 bp, Cannabis indica
ggagaaaaatataatttggcaagagagtgggcggtttcccttttgttcatgggctggcggttatttttcaaaaattcaaaattggtttcctttttgctacatcctttcatgtttatttaaaccaatttccttgtcttttattcttacctctaacccgatccctattttctagtattctttttccttgtttttcattcctctttcagaaatccatggcgaagactaagaatctcgggcatccaagaacaatggtggaatctgaacaaccccctcgaatgctcctcctgctgttccaatcttgctccctgctgctgcaactgcgtcaaatccaggagattcatcgcttcctcaacgtgaatctcagcccgtgaagcccaagccaaaacgaattcctaaacaactggttcgaaaatctgtgcaaccctacaaatgctggacctcattgtcttcatcttcaaagggatctcctccacctgctgctggttcacctcctgctgcaacagtgaaggaggttgctgcttcaaccccaactggtccttcctctcgcactcatgcctagcaagcatctatcgagaaggaacttcgctcgaaatgtagccatgacaaaccagcacctccagccaagaagcttaagacaaatcccccttcggtttcttcaagttcaga

SEQ ID NO: 253774 - DNA, 984 bp, Cannabis indica
aagaaattacaaacttgaaagtttttagagacattaacgattgagtaaaaaatagcagctattttccaatccggaacttcaacagaaattaaagattggactgcaatattggagtctgacaaaatatgaacctggtgccatccaagttcgattgccctgttcagagcaagaaaaattgcataaaaattctgcctccagcgccgattgagcttggatcttctgagctttgacgaaccatgtaccattgtggatgtccacacttactgctgctataccggcagctcctttaacccaagaagcatctgaaaaaattacattacaggctcttgctaaaggcatcaggggagatacaattccaggcaaactcctggcgggatttgtggctgagttcgatttagaggacactgtctggaattccctaatctgcattttaattctgttcaaagctaacttgctaggtatttgcagtatgtactccgaatgcatactccattcctttgttgtcaaatctcagagcagatacaaccaataaagttcaaaagctcactactactcatactgtggcccttaaaaagttcaatcaaggaatccattaagtttataaagtcatctgcagggatatcttcaattcttaagggtaagatacccccaaaccaaatggcccttgtgaaactacacttccaaaataaatgtagcacattttcttcctcagcaccacacaaggaacaagctttatcctgcaaaaaaggtagccgactcttaataggaattgcatcgttaagaatcctccaaagaagaactgagactctaggatgaattccgacatcccaaatccttttccaaatcagttttacttgatcaaagttctgagaattctccactagataagcgcccttcacagagaaagatccttttttattgttcttccaaaaaatctggtctaaatggggtgaaggaattctggggatattgatgatacgattc

SEQ ID NO: 253775 - DNA, 695 bp, Cannabis indica
taatggttttgtattaccgaatatttgtatactgatgtttattcatggcagatgccaatagtgatttggattcatcttataaacaatgtgtgatggtttgattctgattgtgtataaatgacaatattagaataataaactaaatgattattattattacttttcttactaagtctttgtgactcactggtgatatatggtatacgtaaaggcaaagaaaagctagatcaaccatgaggtgataaacttcacgagcaatgtacatattgacatcgacggcatgcgtgctggattgtcaggacttgttttgggctatatctattgtatattttggttttatatttttgaggcatcatcgtatatagcttttttgtaaaactttttataaatactagggtattttggggtactcaaagttagccaaataccctagaagtagagatttcttagtggctaaaaaacaataatataactattaataataaaatttttattaagattattattattattatattattataatattattttatatataaaaagttatcgttaaatatatatatatattataagttacagtaaacataaacaaaaatgaacaagagaactcttgttcttcctccttcgacaaaaccttctccccctatatttattttcttcgattttcaacccaaaacctagcgatctaagct

SEQ ID NO: 253776 - DNA, 1275 bp, Cannabis indica
gttggctaaagagatgtctcaggatcaccttcattcttatggacagatttttgttactctgtaaatgaaaacatataccattcagtagacaaactacattatatcttaagcttctgaagatgactattctaattaatacctggttcagtccttgtccgctgcatataaaccgagatacaaaagttggcttttctggtgaataaaattcagcactgtcatctgaagagatgcctgaatcatcgtcaaaggaatctaattctgcgaattggttctcctctttcattgccaatatatagtcgtatgttcttattccctgtaccaacaatccaaggacactacttatattaatcatcgtcgagagcaagagcttttctaaagcaaaaagaaagagcaagcagattcatttggttcaaatctatgttgcctaaacacaagaaaaacaatgcaattagatttaccttccttatgagaaccacatgaaagaaaaagagttgtcctaatgctgctgaaccgtaagctgtcatcaatagcaacaaaatctgtagcatttcaatggttaagttaggaaatttgcattcaaaatgacgatcatgagaagctgactgcatgcgggtatccgaacttaactgatatggtggcaagaacctctcttggaaacttcacatagagcttctgctctagttccttctccagtccatgtttgtctgtaaaacatctaacaaatatggcaacagcagttcctccttccatgattagctgtagttttagaaacaagagtattttaacaatctaatagtatgcatatttcgttgtgtaaagtggccattcatttccacttttcacttagagaatttgagagattacaaagcaactgaccattaacaagacaaaaaccattagaagaataaatgttgtataattccttttgccaacgcagttgtttaaccactggaagagaagaaaacaaaagaagtttgggattggtgataagtcataaattaaaaaaaaaaaaaaaaaggcacgacaaagaaagtttttaagggatgcaacagaccctgcaatggtgatcaaagccttccacacatcggttgcaggtgcggcagtgcttgctacgttttttgacctgaaaagacaaaggtgaaatgaattagaaaccagtgatcaatgggagcataagatattaagttggtatgaaacatactataactatacctccatatcacagagctggcaaaaggagatgtcgtcttggtttggattgggagtgttgacagc

SEQ ID NO: 253777 - DNA, 605 bp, Cannabis indica
tgttctactggtgttttataaaacccagtatttttgaaaacttttctgacatttttagaaaaaattaacccaaatttcagtatttttttaaatttttcccttataatattaatatcaatataactactgtaagtagtttcaagtttcttattaaataaaaagtccccactcttacccttttctatttaccattagattatatagaaagcaaattcaacaatcaaaataggccgaggtatgcaatctctcaaaatgagaatgaagtgaggaaactacatagaatcccttcatataatacataataattttctcatggtataacgccaactacagtatggattcgctgaaaataaggggggtgacgcaaacacaaaaaagaaagtactatactcgctaattattttacgtacgcgcgctgtatcaatacaaattaatatattaatctatttatacatgggtatgtaaagccattgactttttcgtcacgtacgtaccgctatttcttaagaggaattccttaagtaataaattaatgtagcatgattaatttttagtctgtgagttaatatataatagagataaagtgtaacttatatatatatata

SEQ ID NO: 253778 - DNA, 774 bp, Cannabis indica
aatagagactcatgaacacttatcttagttgtagtgagaaaattgtttatgcttgagtggattggtttgggtacctattaggcattgcaaagacaataaggttaaaagtaaagtctttaaggtttttaattaatgcctctgtttattcagtttggagggagaagaatagagccttacgggtggctgaaattaaaactatttggaatattgtaaataatacgaaaaaaaaagagaataattacatgagacaccattttttgttaaaaaaattatatttttacgtttaaagaattttttattttttacgttttttcataataacacgaaaataacgtgaagaaaactacataaaagtaatataaaaataatatctaaataacatcaaaacaacaacaaaaaataacttacaaataataaaaaatcaacaacaaattaacaagtaaacataaaaagatcatattttttgtaagtaaaataaaaaaaaaactacgtaaaaataatctaaaattttagtaaaactgtatttttgtaatttttttattgtttttgtgaaataattccaaaaaaaaaaaagtgaataagattcaaagtcgactaaatcatagcaatatagctagggaggaaagatagagattggttaagcaaaatttgcaatgtaattagtttctaaaaagattgttcagggttggaaattgtttttttttgaaagtaatatacaatgacttacttatcaaaaaaaaaaacacttgatggaatggaatggaaaggaaacaa

SEQ ID NO: 253779 - DNA, 551 bp, Cannabis indica
aaagtaaactagccaaatcagctaagaaagtgatcaaatcattacatcaaacaaaatgcttagaaaaagctgagatcaaaactaaacaatcagaccctagaaatgaatagaaagctccaacaaataagagagaccaatctaacccttccatcaaaataattgttctctgcttgaatgactgaaaatttccctacaataataacaaaacaaaaaatgagttcgtacgaaatatcttgtgagatgaagtaaacgaactataagaaacaatcataaaataaacaaaggaaaataaaacttatctcatgtaagtaactccaaaagtgaccttgaaaacctccataaataagcaccaagtaaaataaacaaaacaaaacaaaaagtaccatactataacataacatacacaaacataaaaaataatcttaataaacttaaattaccaataattagtatatactataattaattaatttaacagtaataaaaacttctaaaaattttgaaattcgtattaacaccataaaaaataactaactttaagatttgaaaaa

SEQ ID NO: 253780 - DNA, 1720 bp, Cannabis indica
ccgcaccatatccgaccccgatatagatatatataattttttttgttttttttcaaactttgagacatatttagtttttattttctactaggttatgctttttttaagtaggtttatcttttatcttctatgaattatgaatgcataataaatatttgtgagaatattggtttaatttatttttttcaattattttaaattaatgtattttttcattttaccttaatggatacccgatgggttccccataaccgatgggtattcccctaccccgaatccgttggttattagacggggatggggcggggatgggggtataaataggtagtggggatgggggtggggattgcattccccgtacattaaccgaccaatttccatctctagaaacaacaacaacattaatttaaaaagttgaacaaacaaggtatcaatgaggaccgagggtgtatgggtcttggggcggtggtgacaaaccgtgaagggatggttttgtactctttggggactcagcggcaacctcattttatcctcatgtggcagaggcagcaactcttcttaaatggattgctgctatgtcgttatttggggtacaactccattattgttttctcatattgtctccacctcgtctaaactattaataggaaggataagtgtcatattgagtttggtattatagttcatgatattttacatttttagccttctttctcttctatttttcttattcattgtaaaatggcttgtaacgctatggctcattctcttacacatttggctttctcccttgactcttctcgagtttggtggcctgatttaatgccttgcctctaatccttgaatattttttattgagttttggctttgttggctttatgtcttttaatggaatttttctttgtaggagatttcagtaacttgattaactgttattgctagtttcatctagtgactagttaaatggagcaggtttgtgctgtcaactcccaaggtaattaatttcagttaactaactcgggaacccctcatattgagtttcctatataagcttttatgtattacttctttaggtgacgatatagagagaaatttagatgattattacgtttgtaatgagtgaggagggttgttaaagaggatgtgtgtgtttgatcacatctctctcaagtgaggtgatttgtaaggggtaagacacaattattgatgagcttaactcatgtattctcctttgtattcctccattattaaaaatagaataaagcttggctaaagggcagttcctcttggggattagtcaccacaaaaagggtgataaacctcgttatatcttgtctatatttcatttaatttattctacacttatttctggtttgtgtcattgtttgattcaaccattctagttcttcagttcttgctttattttgattcttgataggttttagttcaccataaatggtattcaagcttcacagttaaatcaaggattatagaattaagttttgaagtttcaagaactcatcatgaatggctactaccaaattaccaaatatgaagtagacaaatttatgagtcttaatgaattttttatggaggattagatgaaagcactccttgtgcatcaaagacttgtggatgcgaacatgttaactagttctaaggaagaagaagatgtcaacatagtttctcaagagattgaggtgaaagcacatagtgctat

SEQ ID NO: 253781 - DNA, 503 bp, Cannabis indica
tctattactaaacaaaatattaaccctatttttttttacagacacaatatttacattattacgttatagagctcactaattcaacaaacagtacctaaacattaacccaatttcttttttttttttaaaagaagtatataatattatagtaaatatatatgaagaaatgaaacccttagcctagcctcgatgcttgccaccacatttcttcatgacagatcttacaaacaataaacaaacaattaaaatacccaaagctgtaaccactccaacaacaatggctacagtcctctctatgtgattttgccctatccctccttcattggtggttgttgaggatattccatttccattcccattaacccaattttttttttttcacaaacacaatatttagaataggaaatataacccagaaatagaccattagaacaaaaaaaaaacctaaaacaaatcagtttcacggcaggcttccaacgcaccatgggccgagatccacagcg

SEQ ID NO: 253782 - DNA, 511 bp, Cannabis indica
ttaaatttatgggtaataatattttacccacataaatcatacacaaattttacacacacttatcattattactttatgcatatattgtgaatttgactaaaattttatcactctaactcttttaattagtatgactttctcaacctacatatagcaaaccacattactttgggaaaaaaagaagttaaacgagtaaattaactactgtcaagatattattatctatagttaatttaattaatcaatcatatatatatatatatatatataaacaatgatgtgtaaattaggtagaaaatatagaactcgaattgaaaaagctgaaagttagatatgcatgagacaaatgatgaagaaattataattaattagtgagacataaataaattaataacagaaagatcatcatattgaattgagaaagaacattgttcttttctcagataacaatatagagtatatgacaaaatatggtatccaaaaatgctaatatatatacatatattagtac

SEQ ID NO: 253783 - DNA, 709 bp, Cannabis indica
gatgtcagtatggaagatgtataccagacgagaggacccactagcatacatcaagtacttcgagatgcaacttgatcttcaaaagattactcgtgatgtgctgtgttggatcttcccataaaccctgtcataaacaactcagttatggtacttcaagctggctttatgaagattatattctttgaatgaattttcttgggaattttacactaaattctcatcctcgacaatgataccatcgcagctggaagaaattttcgagctcaaacaatgacaaggggaacctttttaaaggattatatccaaaggttcatggttgaggccaccatggtcaaaggcctaataaaagaaggtcggtataaaaccctactaacgagtatccttcatttgattgagttctagaaagatatctgaagagtgtcaaccaaaaacgtaaaaaagttccttgatagagcagatgatttatcaagttggaagaagctgtctgacaggcccaaaaagggcaagtcaacaataggcattctcaaggcactctgcatccccaagccaggtgcacatacaggcactaacaatgccacgaaaaactctagtggcaagaacactgggggaaagcgcaacaacaatagatctcgaagaaacaatggaaaaaagggaaagtacagcacttctttcatgacacaaaatagaaaagataaggaggagaagtaca

SEQ ID NO: 253784 - DNA, 758 bp, Cannabis indica
ctcttccataatcaaggttaagcttgctaattccgtctttcatgctcttaccaaatacattgaaatagagatcttttcgtttgtgatcaaattatagctcatgagcttgatgttcgttttgtactatctatagactaagtagatgatgttcttactaaaaagcattgctttgcctacttgaagtccaagctcaaactgtgttccacaccatttcgcttgagtggggatgataatgaaaaatgtccaagtattgtggcttgacaacatcttgttttttctttgcatttggtgttttgtattacctcacattcaatcttgattaataatattaaagaatcttttctaattaaaattatgttgaatgaaaatgcatagtaatgtttaattaaagaagagaagagaagaagaagtaggtagaagaatacaagagtttttttctttctatttttcatagaaacaagcttatcactacttttgtatcaaaattggcaagaagaggcaactagacaaaatctagtagatcattaccctattgtccctatctatcaccaataattcattttccattctctctcctataaaattgaatcactttttttaagtaaattttttatcaaatttttctccttgtcattttacatcaactctatttttacacacatacgtatatagaatagatataaatgttatttttttcttttaaaaaaaaaaactagaaattagtgtagcatataccaaacactataatttgagtaaca

SEQ ID NO: 253785 - DNA, 764 bp, Cannabis indica
ggcagcgattttgtaaaagcatcggcaagtttgagggaactgttgacagggatgagtcatatggaggaattcttgattttgtcacggatgaagtggcaatcaagttctatgtgtttggtgcattcatggaacgttgggttgttggcgatgtgaatggcagagcggttgtcacagtagataaaagcaggaccattttgttgtatgtggaagtctcgaagtagaaattgaagccatgtaatttcactaccacttgcagcgagagcacgatattcagcttcggcggagcttttggatatagcaggctgcttcttggtgcgccaagagattaggcaatcacctaagaagacacaaaaacccgttgtagagcgtctagttgttaggcaagaggcccagtccgaatctgaaaaagctctgagatgtaaggtggagtttgtgctatataggagtccctggcctgaactgccttttagataccaaattaaatgatgaacagcctgtagatgtggtgtgcgaggcttggacatgaattggcttaggttgttgacggcgtaggtagtgtcgggtcttgatagagttaagtagagcagcctaccaattagttgcctataaggagagggatcggctaggggctctccttgttcatcatcaagtttgagacgtggatccatgggagtcttggtgggcttgctgcctatatacccggtgtcctcaagtaattggatagtgtattttctttgagacaagaagaggccttctttagagcg

SEQ ID NO: 253786 - DNA, 517 bp, Cannabis indica
cccaaataaaaagtctaacaggataattatttttaatctgtctgatgcaattatctttgggagcatgtaacagaatttgaagaacaaaaggaggataaggtggcggtaaattagtgctaccgtgaccgacaaccgaaattaaatgaccactaccaaaaacaatgtaatgatttttagtgcttgaattgaaataagacgagagaatatctgcatctgctgtaatgtgagatgttgggacggtatccatgtagtagttttaatcgggttgagagaaagatagagcatgcatagcgacctccaccatttagtctaatagtttgggttatttgccaaagtcggacttgggcgtaaccattattatgtaatttagcttagaaactagtgacaagattaagcttatgtatattgctgtttatctaaatatgtgcatctaagttttagttaatgttttcttttattttatgtgactacatgacaagtatttttttactgagtttagtaactcacccttatcaaa

SEQ ID NO: 253787 - DNA, 1033 bp, Cannabis indica
tttataaaaaataaaactaaacattaagataacttactatagtaggtaattgttatttttttttaataattaataataagaatgggaatcaaaattagcttattagaatagttgtctaaaatttttatggtgactcaaattaagtattactaatatacaatataatataatacaatactttataatgtgttattccacatttcaaaattttttaatttatgtcctcacatatactcatctgtaatctatctattattcatattaactattaaaaaaatagacaattcatgtggcaaatttccttaaaatgttacaatggtagacatcactactacaaaaataattttttccaacatttttaaacagtcgtttaaagtatttccgtcaatttctataaccgtcgattatacgatcatcgcaaaacgagcagaataggcgatggttcaaaaccgtcactaatgtggacttcctaacggtttaaatcatgccttatactataggcgacggtgccttataggtttgttacgtttctagtttttttcagtgactgtttttttttttcagtcgttacattagaaatataggaaaaaaaatggattttttgtaattttttcctctgcattaatttttaaattttttacaaatctgtatagtcataataattagactaacgctagtatcatctaaatatatttaaaattctgtttaatcataataattaaactaacactaatatcatctaaatatatttaaaaatctataattaagttaacgctaattataataatctaaatatatttacaaatctatatagaataaatcgagatatatacacacttattaacacaacaactattgtcgctccacttctactttcacgtaatgaatccaccgatcacacataacatttatctcattatttgtgtatgcagtggagaacctatcatgtcgggtcaatacattgtattggatcttctacggtcataaaactttcaatgaatttcatgtcgtagtatccacactatttgtctgt

SEQ ID NO: 253788 - DNA, 720 bp, Cannabis indica
taatcccgatgctagtaggtatttcaaaaaattaagtaagctcagagattgtattggcaaacaagctatgcttgatgcttgtaagttcgaaagatataaggtgaaatacttttatctctctcttatttgtaaggacaaaattatatatcataagttggtttgatgcagattcatagttttgaaacagaggtttatcttttagcaagcaataaactgtcatcttttaactcgagacttgattgagaaatttatattcattgactccctaatgtgtcatgtttgtgagctggaagaagagtcccattcccatttgttcttcaagtgtatcttcacaaggaaagtgttagctgagatcacttgctggtttggtcttgttgaaggcccctaaaggtgtcgaagagctaaccatgtttattttggctgctgtaatttacatggtgtggtgtaaaaggaattgttgttttttagaggttttgtggctcagttgaaatcattagtcatcaggtgaagatggtagttaagactagagtttattgttttaatttaatcaagttgtcaaaacaagatgtaatgatgttaattaacaatcattaaattgtttgattgctgcttatggtgatttaaattaaaaaatttatatgatcaaaaaaaaaaaatttctttacgtctccaaaataatatatatattttttcaaacaaatatatatttaatatatagct

SEQ ID NO: 253789 - DNA, 611 bp, Cannabis indica
aaacagaaacccgactatgcctttctcaaaacctttggatgctcttgttaccctttacttcggccataccagcaacacaaacttgcttttcgcactgctcattgcttatttcttggttatagtctaagccacaaaggatacaagtgtatgcatccctcgggcagagtctatatagctagaacggtcaagtttgatgaacaaaccttcccttataataccctctttcccaaaccaactgctgctccactaataccatcagcaaatcagtctcatgccttccatgtacctataccaccagcccctgtaccaactcctattaccccaacatcaaatgcaaatactcaatccaacactcccatgcctactaccaacaacccgaaccaatcaccatcaccaaatgaccatgaacccgaaccaatcattcaagcaagtaacaacatacacactcaaccctctattatctctcaacctgtcaataaccatgccatgatcacaagagccaaagccggcatacataagcccaaagctcttacagcatcctccaatatcagtcttgaacctaagacactcaaagctgccctccaagatcctttatggtttggtgctatgca

SEQ ID NO: 253790 - DNA, 653 bp, Cannabis indica
atttttgcagtagaattttcatatatatgttaaaaataatatgtgagtcctaatcaatatcatgttgtgcttttgggattttatcaatattcattactacacatgttgaaagttttcattataataatgactaggtaacaaggtaacaaaagggcctttcacatggttattatattaattgaaagaaaaaatttatttataattattttaatttttaaaatatttttaaagtgaaaatttcatatctatgtagttattaatatttttatttagtaacatataaattaggatctcatttataatttcaaaattatttttaataataattgaataatcttttatttctatttcattattttaattaatcaatttatataaaacttgactacctattctataatttaactacatttacattatgaatatattttatatttatttatattttattgttgtacataatatatttttgtaagtaaatctaagttcacttaaagagaatgaagacgaggtcttcctttatgcgtctcgacatgatttggagggtgcggagtgacaaagttcataaaatagaatagataaagtgaaccagtgtattaattatgtttctcactcttatgtaaattataaagattcccttatcccctccccat

SEQ ID NO: 253791 - DNA, 611 bp, Cannabis indica
gattcattcaataagatttcataagttttacaacttgtgtttggttgattactctgtttttctggttttggttactgagttagagttctgtccaagaactcaggttgcatgaggcaacaattcgaagctgcattcctaacagatacagcatgggttggaacttgcttcaaggaatcagaacagtgagtgaagcaagaaacagggtgaattcgttggttgttaaattgaaatctcattgtcttttgttggatggttggagttggagtgaaagtagagtgaagatgcacgatgtcattcgagatgtttgcctaaacattgcaaaggaagaacatgggcataggatgatgagtaacattgttatgtatgaagatgaaagacttaaagcatctaaagcaatttcctttcttgattatgacgattttgataatcttccttcagaattggaatgtcctagtttagaattgcttcttttatccagtgggtttactttggaatctattccagatgaattttttaagcaaactgggctgcttaaagttttggttatgaatggtacacgccagagatcattaccttcgtcttttgcttctcttcaaaatctccaaacatta

SEQ ID NO: 253792 - DNA, 588 bp, Cannabis indica
attatctaagtactactctacttctcttttatctcctcttactacccttactcacgaccctaccccccccctctctctcattcacttaatttctcttaaagtttgtttctttcttatgtgtgtgtgtgttaaagagttctttctagggttttaagcttcaaagtcagcaatggtgaaaaccaagagtgcctgaggtggtttgaggtgccttgcccgtagttccctcaaagttgctccagcatctttgctttctactcctgtcattgagccttcttctgttacagtttctctattttttctttggcttctttgatagaaaaaagagggggagaaatgattattttctttgttgtcaactactcagggggagtagttgtgagggtgagttgtttatttagggtttacttgaacttttctgtttaaaaaaaattactttaatttatatgttaacgagtttttatgtaggagagtatttttatactcttatattatttccaactttttgtgcaagttttttccatgtttgttttattataaaatattttgtcaatcaaagtgccaaaatgagagattgttaatttaattttt

SEQ ID NO: 253793 - DNA, 1332 bp, Cannabis indica
tttgctttctactcctgtcattgagccttcttctgttacagtttctctattttttctttggcttctttgatagaaaaaagagggggagaaatgattattttctttgttgtcaactactcagggggagtagttgtgagggtgagttgtttatttagggtttacttgaacttttctgtttaaaaaaaattactttaatttatatgttaacgagtttttatgtaggagagtatttttatactcttatattatttccaactttttgtgcaagttttttccatgtttgttttattataaaatattttgtcaatcaaagtgccaaaatgagagattgttaatttaattttttgcatatttaattgataaaaaatattctataatctttatatatatctctagtgggttgtatctaattttccatatatatatatatatatattttttatttaatttattcatttagaaaataattggtgtctagtttttctagtttggaaaagtaagggtgtgtttggaagtaactgtgtaattactaggtagggtaattactagggtggtaattacacagtttagtaattacactatattttaaaatgcaaggtgtgtttggatatgaggtggtaattacatatgaattcctaatatcttgtttggcaaaatagttagtaattacatgggaaaataatattttttagtagctaatgtttaatatggaaagtttttagtaattacacagtgtaattacatccaattctcatggggggccatgagaattggagagtgtaattggaacccctcaattacttccaattacacagttacagtgtaattacatggtcagacaaacatgtcaaattgtgtaattacctccaattacacacaaatccaattacattgtggctttccaaacgcaccctaagacaaatatgatattgaatggagaaattcgaaaaggaagtttccttttctataaaaagaaatttttcacttactactcacgattttgtaatctgtaggtacaaaacatgaaatttttagaaagattgaagatttcttttaagaaagtttcctatgggctatggatgtgtttactctgtgtataacctgtctaatatgagtatattatctataaatactcatattggtcgttggattttctatctctttcatctctttatattttcattcttattttataagaaagagtgtttttattgtgtagaggacagggtgttcatcacttcctttgagtttatgtattgtgtattgtcttgagtctgtaattagatctaaggaagttcaagctttccgaggaaagtttttcaagtgttgcct

SEQ ID NO: 253794 - DNA, 889 bp, Cannabis indica
aatgagttttatttaaggcacaaaacccaacagcttgctgctaaaaaaattgtgtcaagtgttcatattagtattttggccataacttcttcaatacaactcaaaattagacgattcaagatgttccaaaaagttgagaacatgatctacaactttaatgttgaactccaagtctagttctacctttaaagtcattaaaatgtgtaattaatttctgccttatcaaattgagctcaccatcttccactattttctaccaaaatatgctaaagtctttctaaatgactccaaatgtatgataagtattcaaaatagtccaaaaaattataatcacactaatcaataatttaaagaattaatttaaatattaatacataaattggttacatttataagacaaaatatcaacttatcgccaacatggatgacacctatatcatcatacctccagatgtgaatcttgccagaaaataataatgaagcaaaaaatgaaaataaaagttactcggtatctaatcttggatggggttatgtacagacgtgattttttaatgccattattaagatatgttaccgtagaggtaaatgaagccttctgcgacaatcatgccagtgggcaaaacctatccaaaaagatactcagacaaggtaatttttggcctactatgactaagaaataaaccacaccttgctgacagaatcccttgacgaaatagaaaaaagatcaagaggctaagccaacttaaagatgcatgcctaccagcaaaaatttttccaggtacttcaataaacaagtcaatgaaaggaaattctcagtaggagacttagtgcttcgaagagtattccttaataccaaagatcatacaagaggagtgtttgtaccaaacta

SEQ ID NO: 253795 - DNA, 534 bp, Cannabis indica
acccaaactagcaacatggctattgaagaaaaaaaatataactacaactgatcaaatgactcttctaactccttcaagtgatccgtacattaaggcaaagacttaacaaattaataagagtcggtgttacaggaaaggtatagggactaattagtataaatatgtaaagtcatttcacaaatagagacaaaaaaaaaaaaaactgagagaaaattaggagtattcctattggaatttggtaagagtacatttgatattgttttttttctttaacctataaaattgtctttattattgaattgcccaactcatggagtctcaaggtaatacaatatcaaacccactcttcaagtcagtgccaaactccaatagcaatactcttaattttcattcatttcattcattcattctctatttataaaatgattttacatatttatactaactagacaatttactagttgccccgacaaacaaatataatactaaaacaatcccaaaacatctaaataactcaagctaaaatccacattc

SEQ ID NO: 253796 - DNA, 619 bp, Cannabis indica
gatgagaatagggccttggctaaatttttctaggcctaagaaacttttttacaagaactaaaattttttggagagttggacttacatgaaatcaaagctattgggagtgatattggggtccaacctacttcggaaaaaaatgagagaaccaccccacaaaagaaataaaaatgcttgatggctctttcttacatttctcacgtcctaagaaaatttttcgtcaatacctgggagtcgtctgtgatttttcttgggataatagtgagccgaaagtaactgtgggagtggatggatcacatgagcgcgtggatgaggtagatggatccggtaataatgtgtcctttggtgagcgtaaccaatgttcagtggagattatacttagaaaaagcctcaatgatttacattctcaaagggtcggtttgacccaggtggatgatgatggttcatgtgtttttgctcagtctgatacccctgtggaggaggatgtctcctctcctccacaggagtcatgagagccttggcatgaaactgtagagggttgggacagacctctatagttctcgagttgaagtcccttgtttggccgtgctctctggattctcaaaggccttcattttta

SEQ ID NO: 253797 - DNA, 632 bp, Cannabis indica
gctagagttgattggttaagggcaggtgataagaataccaagtttttccatcacaaagccacctctaggagaagaaacaaaaccatcagaagcataacctctgatgatggaacaattactgataatgatgatgctattagaaattgttttgtcgacttttatgttaagcttttctcttctaaaggctccaatgaggatgccatcgccgaaattctcaaagaggtccacaaccatctcagtctctctcaatatcatatccttgacaattcctttgtacctgatgaaattaagcctgctctgttccaactctcaggtgacaaggctcctgggccagatggccttaatgcctttttctatcagaagcattggtttgatttagggaaagatttatgtgttgttgttcttgatattttgaatagaaattttgatatctctttagtcagtcaaaccactattgtcctgatcccaaagaaaaagaatgcatcccatgttcgagattataagaccattagcttgtgctccactatgtataaaattgttgccaaagtcttatccaacaaaatcagggttgtcttgggctctttaatttcaaacaatcaaagtgattttctttctaataaacttatttttga

SEQ ID NO: 253798 - DNA, 1014 bp, Cannabis indica
acgtgaagttgttgtgaggcaatagaatgaatctcaaacagagattgctcgagtaatgaatgaagctgaggaacagaagaaaagccataagactaagctcgaaggtgctaaaaaaaggctaaggatctccatgaagctcataagaaaattcgtaaagagcttgacaaggcgaaccaaaagcttaatgaggctaacaagaaacttgaagggtctgaggagaatgccatagccagagttaattcgatggataaatggtctatatatcgtgcttggatggccaatccaaacatggatctaagcttttttggagaaagagtcagagagatcctggctttatttgagcaaaccaaaaaagacaaggctacggatgccaatgatgaagaagaagaagaagaacccaccatgtctccaaccatgtagacttggttatttttatttaattttctaaacaatggccttttggccgagacattcgttgccccttgtggcattttgtaaaaacttttgctttgttggatgaccaatgttacttatttatataattttactttttatgcctcttaccttgcttttcttgagttatttatgtttgtttattgcgttataatttacaattaaacactttttctccctcaattcaacttaagatatttttgaggttatatgcattccaaatgtcatcgtcttgatttatacgagtagttaatagtctaccacatttttcgcgagtagtttacaatctactatgttatacacgagtagtttataatatgctatgtttttaaagaaaacttcaaatattttgaataattcactttaagaactactttgaatatctttcgattgctcatatgaatagttaatcctctattaatatttttagcttaagtattatttctcaaggcacatttgtgtgtaataatacattctacaataatgcgagccgtcacttactcagcatgcatatagctttctgttgttttatgagaacaaatctcacttacaactgctatc

SEQ ID NO: 253799 - DNA, 572 bp, Cannabis indica
gtggagtaataatgaaattaataaatctgattaatttctatgagacataaatttgaattgataaataaatagagaaagaattaatttatataagacataattcttaagaccaaaatagtaatttcatataaattattattttgattaattatatcaattatgaattgaataattaaatttaactatttaattttatttgatgaaattatattaattagttaagtataatattattcttaaataatatttgacagagagagaaattattattttagtgtaaaataatatttattttaatcctaataaaaaatacattaatgagaattagttaattattatttgttacaaaataaataataaatcttatttttagcaatattaaaatatggcccacacgtccatcagggccgaccctgaaacaaagtgggccacaggaatttttttttttgggcccttatgttagaaaaaatgtggtatttttcaaaatcagtaaaaaaatgtatattttaaaagaggaaaaaaaatttcgggcccctgggctgggtgggccctaggcacatgcctagcccgcc

SEQ ID NO: 253800 - DNA, 1299 bp, Cannabis indica
atccataaaagcattaaaccccccttcaaacctaaccttgggacttcaagtccattactaaatctaagagaagaccaaaaacgatcaataacattacattgcaactttgtttccataagaaataacatatccgggcactgctctttgataagcagctttaagtgtctgaatgcagaggggtttcccaagcccctagcattccaactgatgagtttcatggttgagggcgggactgcaaagatgcaacctccgctgaacaggatgataaaccttcagcgtaatccgaatgcatatcagaaacatactgagaagaattatcatcagcacttgactcttccttcttgttattacggcacctctttaatacactcctaaggttgtcaaggtcgacttgcctcttataggtcttactgaatattgtagcttcatctaccagatcatcaataatcacaactttcccttttaacttagcagttgccgaaggatcagtggattgtggactaagatgagatttagcttcagagggagtgagtgaagtggggggattgtatggtggttttgaagttgttatgggagaggtattagcaatagggaaactgctagggacataggatgggaatggtaaaggtaactctgggcatttaaccttagtgctactttcaggttgatttttgtgggctaactcagcagaggttaaagatcttggttggggcaaactgcccaaagtcaaatttttgttgttgaaggcagtgggtatagaggaagtaatagtctttctggccaatctagtaaggaaagggtaggcattggctttggagaaatcggtacgatatcggtcatatcctgaaattggaagtttatctccaatcatttggggtccatataacaagtccggatcgactcccatgtccacaagttccataaaagcaatacacttatcaaatggagaccaatcttgccacaataaaaataaaaaactaggagattttcatatctgaattccagccagtgttcatccatcacccgaggcagagacaccatctttccacacatcagaggttgagaaacatcaagatgaactcgaatccgcagaagagaaccccatccttcatgaaacgagtcttcgtaaacctcaataaactcccccacccattcacccactttcttggctaaagcacgggacttgctaagaaaagggaggcgatgagtttgaacccaaaattcagcaaattgaaaatcctctttggaaatattctgtaaggaagttgggaaatgtaataggataagttgattgaagaa

SEQ ID NO: 253801 - DNA, 644 bp, Cannabis indica
ttttctcaaaaaaaaaaatatatgttaatattgatgttggtctaactaagtattaagtctcgtatagtttaatataattaattttaggcggcgtttggttgacagaaatgaaaatatagaaataggaatgagaatagaaaataaaatagaatgaaataaaatttaaaatgcataaaaaaaattgttaaattttttaaatcttacattagaataatctttatttctgttttaaaatagaatagtcattttactaaaatgatagaaagatcattctattgggatgatattctaatactttaaaatgcaatcaaataaaagaattgaatgaaaattatttctttttcattctatctacttcattacctccaaccaaatgacaacttaggaagtattactaatcaatcacaaggtaacatgtctaaaggtgctaggcactattagtgtccaatagcaatactctttataaggattgtattatgtattatggagaaatgttagaaggtactagtggtgcctaatattttatgtgtcaatattattattggtgtaattaaatattgggtttcatataatttaatataatagcttttagtgagtattgctaacaaattgcaatatgacacgtctaaaaggtactaggcacc

SEQ ID NO: 253802 - DNA, 895 bp, Cannabis indica
aatagtctcataatccaactaattactctaaatctagtttacatcttgtcagacaactagagagtttgagactttcttcttcttctcttctaatttttgaatccttaagagtgttattcacaaacaatttcgagccttaatgattgagtgcctacccacccatagcaagtaagtcatcaatcatagtgtgtaaggctgtgaagaatccatacaactgaaggagttttgagctcagatattgattatactctatgacaaaaaggaacaagggttagacatctgagcggaaggagtcatttaattctgctgcaatcaatgtaaggtttctcatactttatgtgtttaagtttcattgttttttaaattcatatttaggatgttaaaaacatatttgttagtaatctaagtcctagtaaaatatatttcaacaattggcctcagagtcatggtaatgatttactttcaagaaatatggatttaaaacgatgtatgtgtgatttggatgtgattcatgttgatctatgtgtttattaatgattgattaatgtttacaaaatttttacataaaataattggaatctcattctagaattatttttcttggatactatgaaaaaaattaagcaattcatttttttatagaacttgatttcaattttatttgaattaattatgaatttatgaaaattataaaaatatcaggggtgggatcaccccacgtgcgcgtgcggagcacccgtgacactcgggtgtcacgcgtgttcggacaacacgtgtctgacacaacacgctaaaggggctgtctgaaaccccattccacgcgcagaaaggctactggcagcctcatctgccgaggtttctcggctatgcacccatgcatgcgcgcgcggatggt

SEQ ID NO: 253803 - DNA, 1928 bp, Cannabis indica
ataagacattattatacaagcttccttcataatattttcatctagattgaccacctactggcctagtgtaaaattgcatatatcactaataaaagcatcaaggtaattgtcagaagatccacccttagcaatggcttgttgacacaaatctctaagttctccagctcttttcctcatctctttccccacatcactttcgaaatccatgaaatttcccacaagctcagcaatctcatctcttgttattatcacattttcatcactacccacctctaccttcaccctcaacccaaccttccactcctcaacaatttccctactattgggaacttggtctaaaaacagaggaaaagtaagcataggaacaccaccaaagacagcttccaaagtagagttccacccacaatgagtccaaaaccccccaatagaaggatgatacaacaccttcaattggtcacaccaaggcaatattaaccccaactcgcctgacctctccttcaaacgaagagcttcagatcgagcaatccacaaaaatctaacaccagcagtccttaacccagcagcgatttcgtccatttgggtactcgaaaccgaaagaaaactgcccaaggagatgtataaaacagacccgtttggctgtgaatccagccattgaatataactttgagaagaggaagagttgttgtgttgatcatgaagatctaagtatggaatagctgggccaagggggtaaactgggaaagaaaattctgatctaagagtgtttattgattgaggttcaagttcatagaatgaagtgaagagaagaaattgagcttttgagacctgagaaatacaatccaatgctagtttcaaaaccttttggtcattttcatggagtactattttcagatcttctatgtcaaaggatgagagttctggtatgctctccaaattcttgtcatcatcactacattctatatcacaaaagaagaatattcagcaaaatagaaaagaataaagcaaaatttacattgttgtataaagatttcacttactggataaaaggtcaggtgggctattactatcttcagagaatttattgaaaaaatgtaacattctgaaaaaagaggcagacatggtccaagacaaggcgacaggaatattccttcgtttcccaacattgactccccaaagtacttctatatcagctatgataagactcaacggcgtcgtttcaaggagacgatccaggagctgatcaaaaggagcttccattttagtcatgacagcttcatgaaggttgggaagtcagcggcttttagccgctccggaggtacgacgttgggtatggcagcatagcgaatattgggcggcttgtcatcggagccgatgtagccgagccactcctgggtgacaacaaaggtgatgaggatgtcgtgtttttttgaagctagcaacttgcagaggttcatcatgggattgatgtggcctctgcccggaaagggcatcgccaccacgtggcaactggtggcctgttttggttcgatgccgccgtctgaggtcatcttctttctctaccaattataggtataaactataaaggttcaatttcagattcatatagaagaaaaaaaggttggatttcagattatgcttggagagacattaaaatgaaaaaactaataaatttatttagtttttgtcgtgccatattacatgataattttcttttttctaaagattaacgcactcaatataatatatacaatattcaatcactttatccatagtgaattctgaaaagtatatgggaccactagtaaattaaattatatgggattgtatattcacttggacaatattaacatgtaggaggggtcttcataaaatagccgatccaattcaatccgtacgatccaatctaatccaatccgcaaagtgcagat

SEQ ID NO: 253804 - DNA, 610 bp, Cannabis indica
aaggtgcttaaataatgatgtatttttcgaagtgttatacctattacctacatagacattgattcaattgcaatgtgtatctaaatcttggaacaacttgaaagctggtcgttctcttatccaatcttaattacaaaggacaaaactctatatctcataattcatctttcaagacaagttcccatggctcaacaaagatatcaaaattgtcacatacattcttgatgatgaagaaggcttttaattcaaacagacaatcttcgattttcaccctaaggatgttgtggtatcgtcatcgtgtcagggtctcattttttgcagtagttgcttccctactcaagacctaacaatctacatttgtaatccattaaacaagggaaagaccaaactgagttgggattcacttggaaatgatagcattatatcttttgcttttgatccttctcagaatctcatacacatttctacaaaattcaagttagtgaaagttgaggcaattgatattggagaagaagaagagaagtgcttcacattcaaaatatactcttcaagaacaaaagaatggttgaaatcaagagagatttgaaatcaaagaacaaattatgttctt

SEQ ID NO: 253805 - DNA, 448 bp, Cannabis indica
ctatattgataacttttccaaagaaatagaagttagatggtgtgaagtcgattttaagtccatatggactaatcctaaagattcagatctttagtaggtacttggacttgatggtgactctcgagtttccaaacttcgtaagggctaacaaagtcttttgctcacatgaatgtattgatgttgttaatgatcaattcaatatattgattagactcaaatcaattacaaaacaaaaatcataaggtgtttgatgtatcaaagaaaattataataaaaatatatacatctaaaaaaatttgataaattaagtaaatgtattaagctctatattttttgtaaatcaattatttttttcttagtgggctacttttgcttctttttctaggctacaaagtgttaaatgtatcgaaaaaattacaacaaaaatatatataaatcaattcaattc

SEQ ID NO: 253806 - DNA, 686 bp, Cannabis indica
atgtcattttttgcagaagggagttccatttctcgtccactgcttttcaatgattataattatccttattggaaggttagtgtaacgccgtaaaacctggacgcggtacagtgattttctaattgatgtgccacctttgctaattaaagggttttccttaaaaattgtgccaaatcaaaacatttgattaaattactaaactttataaccttttaaataattatttacaaaaatcgggatcccgtatttaaaatttacattctcaaaatatattaaaatctggtcgcacagcgactaaaaaatacaaccccagatgtcacgagaccgaacactccaggttgcgtcgcctcgacgtgtataaacaccatcctagctcggagttcactcctattcaactttttcctttcctttacctacacatggaagtagcaactgtgagtctacaaactcagtaagaaaaacatataacaaataatataatatcgacttgtatctaggcgcccatacacctatttataaggcttaacaaatgagtaagaacattctttactaaggtacagccattgtaccacatacactatgtaccattactgtacgagtattggtaacgtttatctcataccctgtgtaccattaagtgttgtaccatacacaccctgtacctttccgtacttgtattggtaaca

SEQ ID NO: 253807 - DNA, 1392 bp, Cannabis indica
attaaaattattatttagaccaataacaaataaaaaattgacgtggcactttatttaggttttccgaatccgttagaaaaaaaaccaacgaacaaacaaaaattgacaccttaagcattttcactgccaatttttgaggttgaggattaatcggcatcatactcaaatttttggaacttttgccgcaattatctcaaaataatttaactaattgagaagtcaaaaaaattattaaaatctgcaatgccaaatatgaattgaaactgaagacaataaacacacatttttatttatttacttactaaactagcagtaatagaataatcttagggtggatgatgaatataaccaccgtcgacggcaagattatggccagtgataaactcagactcatctgaagccaaaaacgacaccgcatcagccacgttctccaccgacggagtccttccattcttcagcgataacgaagcctcaatcatcttatcctgctcctcctcactcctatctataaacgctttcagcaaaggcgtcctcaacggccccggcgaaaccgcgttcacgcgaattccacgcgcccccagctgaagactcgctgacctcaccaaccccaaaacggcgtgcttcgacatagtgtagtccgtgtacttctcagttcctatactcgccagattgctcgccgtgcatatcacgctccccctcactccaccctccaccatcgccctcgccgcgtgcttcacacacgccgccatccccctcgcgtttaccgcaaacaccttatcgtacgccaccagatccaaatccagaatcgtctgatccgactcgcaaggcaccccggcgttgctgaacatcacgtcgacttgaccgtacttttggaccgttgagtcgatgagggctgcgacttgagcctcgtcggtcacgtcgcagtggacgtaggtggagcgttccaggccgattgatgcggccacgttttggcctttctcgtcttggatgtctgcaatcacaacggcacgtgctccatcagcagcgaactttcgagccgtggcttctccgatgccgctggctccaccggtgacgacagccaccttgccatgaagcttggttttgggggttagtggtgagtgttccgtcataggtttttgtataatgattctgtattaattgagttgataattgatatagacatatgggtagggcttttatagagctatgttactgatcatcatcaatataaggctttatgggagaaagaaaggaagtatgggattaaactcccttcagtcttctctgctctctcacattatttaattattttttattttaagatatttttaattaacggcgaatgaaaatttcatttgttgttgtggtaaaaaaaaacatagaatattgaat

SEQ ID NO: 253808 - DNA, 1024 bp, Cannabis indica
ctgcactttttttgcaatatacaagaacgatggatatacatggaaaaatttttattcataaaatttcataacactttacaaatcattcaaacttttaatacttcatttgtcgcctacattgtagatggcgacaatcgataagtcttggactcaaatcagaaatcgtggttgtcatgaattttggaatggtctacaagcttttttagcaatggcatccgaacataaggattgtgatggaagaattcgatgtccttgtgtgagatgtttaaataataggtttgaaaaaatagatagggttagagcacacgtatttgatcgaggttttatgaaaggatatgagaagtggatctatcacggggagccggaggatgttgttaatgatgtagcagttggcgatgttgaatcagaggatgaaatgattcctattctagaagacttctttccttcgacaacagaggatgtacatggagaagatgaacaaccaaccacaaacccacattttgatgacttatttgaggaaattgaagctgaattgtatcccggttgtgattggatttcgtctctcaactttttagcaaagttattgcatttaaaagttagaggaaaaatccctaataacatctttgaagaattgttgaagctgttaaagttttcatttccgaaggaaaataatattccaacaacgtactacgaggcaaaaaagagattgaagaaattaggcttgggttatgactctatccatgtctgtttgtataattgttgcttattttataaggagaatgcatccaaggaggcttgtccagtttgcagaactagtcgttgggttacttccgagaacggtaaaggaaaaaaagttccttgcaaagttatgcgatactttccgttgacacctcgactgaaaagattatatagttcgaggattacagcgaagagcatgacatggcatcatactggtaaatcaaaagatgatggggtgatgcgacacccggtcgatggtctcgcttggaaagactttgatgcaaaa

SEQ ID NO: 253809 - DNA, 583 bp, Cannabis indica
aaaaaaagttagaaaaaaaaatccagaaaataataatgttggaaaaaaatgaagactataaattcccaagaaacctaatcctaatcaattaagaagaaaagcagctgccacttgagaaaattttaattaggtgagagtggaaaccccctaatttatctaagaaacataatccaacccaaaccaaaagtagaatctactacccaaattttccaaacaaaagaactgaattcaaacataaaaccagtaattggggtggccggtgagcttgtgaataatacacagagcatggccatgaacaacaaaggagaatcaacctcataaagtgaatgaactgagtaaaggatgggttatgaacaattcccacttatcttactccagttggagagaggagctaggaggttagccttgatcatttttctataattaaggaaatacaaaaaggatgatgaaaggagggtcctgcttacactacagatttgtcaattgaaagaggaataagaacacctactgcactttggcttttaatatgatcctagggacgtaaaatgagactcatcggcagggtaaacaaagtaaaagagtg

SEQ ID NO: 253810 - DNA, 493 bp, Cannabis indica
taacagccaaaaatggatggaaatggctaactgctaacggactagtggtttaggtagttttaccaccaaaattttagattagggggttagttgcaaaaacctgtccactttaggaggttttgccgcaaataaccctttattaaatacagaaatgttcaaagtggaattattaagctaggagacaatagagcttgtgcaattgcaggcattgggacagtcaagctagaattggaagatggcaaggttgtcgagttgaaacaggtcaggcatgtactagatatgaagagaaatttaatttctatgtccatgttagatcaagatggtttcaatgtcaagattgaaaatggcattttgaaggctatgaaaggttcttcaattattatgaaaggcaagattgttaatcataagggaccataatgaaaaatcaacctaatgtggtcgctacagatggagaagatcaaaccatagtctggcatagaaggcttggtcatgt

SEQ ID NO: 253811 - DNA, 732 bp, Cannabis indica
tcagtggccaggagagtaatgtttcgaacagcgtccagtagttgaataattctttgtgccctctccctgtgccccaatgtgaagggagagcggcagtacaagggaatctgctggaactgagtgtggacggtgtccattccttggacgaagtagtacttatccatgaagttccatatctttctcacctcggagtctacggtgaccatcaaccacttctcctcgatttgagaaaagtagagatagctcgacctgctttatttaggagttgatttcagatcaaagagccagttggtgtcatgcgaagatggctcgccccatccttgtgaagcgtagagaatatacagggcagataaatacttgatgccctttggggtaaattgggccggacagagatggtagtaatccgcaattctcttgaagtacagaagcaagggaaacatagcaccctgcttagtgtgagcacctgaccaagcacagtaaccctcccttggactggtcgccaactggtttggggagggaaggaagcatttgacatcccccaagtaaccatccttttgcaaattcttcatctttaccctggttactatggatggaggagaacccccccaacctcctagtgcgccttctcttctctaaagaacggccttggtgtattcctcagtgacatagtcttcaccgacctcagacacaagttttccatcttcattgaagccaccaaagggcaacctccga

SEQ ID NO: 253812 - DNA, 861 bp, Cannabis indica
tggaatgatacctaattctctttgaaattcacatttctatactttcaaaaagggtagttcatagaaactgtcaaattgcgatttaaatttggactgcgacattctgaactgctgtagatcataactggcgggaccgttttggatggtctaattaatccagactgtttctcacttaatgatttggttatggttcgtaataaatagcttacgattaaaccgaatcggactgtttaaaataaataatagatgtatatatagggtaaataccattttggaccctgtattttgtaaaaattaccaattagatcatctattttgttaaatgacgaaatagaccctatattttccaaaatagtataaataggaccgtgagctcaatttttaaaacttttattttttttaatataaccaactttaagataatttttaacacaaacagatacaaaaaatgtaaccagttttgtcataacatctctagatcaaattattattaagttttattttgacaaaaaaatcagttcagggtcttatttgtataattttagaaaatacagagtcaattttgtcatttaacaaaacagagagttcaattggtaacttttgcaaaacacagagtccaaaatagtatttacccttatatatatgactatatgtatgtaataaaaaaaatgtaaataattacccaattttaccattaattacccaattagattaaatgagtttagaggactaaagaattgaactttttatatgtgtcataatttttatttaaatgaattttagtatttttattgttacgttttatttttattattgtttattaattagagatttattactttatctatgtcaaatatatac

SEQ ID NO: 253813 - DNA, 679 bp, Cannabis indica
agtggagaaccccacctgaagggccgtaagttgcatgctatcatccaactttctaacactagcagcaaccgtgctaaaatgacttaattccttaagtgtttcgtcatgctactgctttatattggttagcgggccacttcgggtcacctatccctagcaacttgaaattgcttcttgaaatcccttgacagctgctccgagaaaattattgaacgacgagtgaacttgttaaaccagctactcgttgctccaacaagcgaggtgggaaacataatacagcgtaaattgttcgtcacgttactcgctcgcattattgtattaaagttattcaaatgcgagaccgaatctgtggttccataataggacgagacatgcaggtttttgaatcaagaaggaaaaggggtatttaaaatatctgggtgatacggctcaagctcctcgtcagagtcgtatctagatgatttccctaattcccccacttaatatctcctgaacttgtcctccagcttgtttaaccagaattggattggatcctcttgctttggaccaagatattggcgaaggtcaggtttcttccgattcaagtgctatcgtagatctggttaggagtaatagctggcagatcacatcttactcatagaccgcgtcctactcatagactttgtctttaagtggcttg

SEQ ID NO: 253814 - DNA, 581 bp, Cannabis indica
ttgaaaaaattatataaaaaatattagtttaaactacatttagacaaaaaaatctacaaaaagtaagatgttattttttgttcaatgatcaagatctcaatatttatagaaattataaaaatataaagtgtatttttgtagttataacatacattacaattttttttgagaggtacattacaaatttgcatacatcggtttttgggaataatttagtgtatatgattgatttctaaacacaccctaattgtgaaatgttttaacatttattcaagtaaaagttgttggtgagaatgatattgcgtgtagagttttatagtttttatttatttacttattttacaagtaatagacatagttagttggatatatatatttgatcaattagtcaatggtgttttcttgccaaagatgccaaaatgcttctttaggttttagctatgagatttttaataatataatgtagtgtttgattcattgtcaaaacaaaagataatagaatgtaataggaattgggaaaataaccagctttttttttttttttttttgtttgaaatgattatatttttacgtttaaagtt

SEQ ID NO: 253815 - DNA, 785 bp, Cannabis indica
atttcaatctaaaaaatcatacaacttgattctaattaactacaaaacaaatatggtataattacaaaattagtgcaataagcatgaatattatcatcactaaaaagatgaaaagtataatgttgctcaagaaatagctacaaatgtaactcgactgaattccaattacaaaataactatcatataatcacataatattacaataagcatggacattatcatcgctaaagagatgaacagtgtgatcatcgacagtctcgtagacttggtcgggaaaataaccacgaacatagctctcattgtagccatgtcggtagtaattgtacgacgttgcgtatgtggagtcatccaaatactgagaggcaaaaggataatactcactgtcgtatgggaatggccaaaactcagctcttcttcctgttcttctaaccctttttaacacctttctttggtcaacatatccacttactgtcacttttgcttatccatgtctatttccaaactatcaactcctacatattttatatatataaaaaaataataataaaatttgttttaagttacaacattaattatgactaaaattaaaagtttatgattaaaaaatatattattatcacaaacaaaaaaattcgttaatgattaattatatttagttatgaatatataatattacaaaataactattatatagttataaattttttttaatctaacaattttaataatttcgtgaaattttttaatgatcatacaaagttgaaatgaaatttttaacaatttca

SEQ ID NO: 253816 - DNA, 1119 bp, Cannabis indica
ggttaaaaagtagaaacgtactctaacactcatttaatgtaccctgagacccatctaatgtaccacggaatacattccgtgaaagtacatcacgggacaaaatcgtatccctaaatatatatatcctagtcctacccactaaactaaatttagagtctttgaggctatttgacttcataacttgaaaattattttcggttttttaaaattgaaaacagtttttgaaaaccaataagggtcgtttggtaaaaaaatttaaaaacagtttttaaaaaattgagttaatgtcatggtatggtgttaaaatattaattttttttagtaagaaaaaatctaaaaattattttaaaaaatttgtgccacaccattattaaatgtttaaaataataaaaaaattattttctattcttacttttaataatacaattctaaaaaacacaaccatacaaacaagatcctttatttcttcattaaatactttatacaatatcttcgttttcgctttggtaattagtttatttttaagtaattatttttcttataaaatatcatattatgatagtttaatttaatatatgttttgttaaaagttatagtgaataacaaattcggaaataattaagtgctgctagacgctattagagaagtttgtaagtatatgaaaatgaaaatataaagaatattatgacgtatatatctatccatatttatccatcaatatatatgaatttattttgtaagtttttgttaaagttggtatccaaagttaaggaatttccttcgtgagtatgatggtgtaaaatttgaagcagagtgttgcataaagcctagtttggaagatagctttgagtaggcatatataggtaggtaaattccaaaacatgtgtcacgggttacaacaaaagaacaaacatacattagagcctcgatccaaactccattggtttctgtaactggaatagttttcacatgcctaagatctaacctcttcatcatatcttaccgtggtcccaccccagccatagcctatctcaatatatatatatataaatattttaccctccagtacacaagtagatagaatacaatttttactttcaatattcaccaagattgtcg

SEQ ID NO: 253817 - DNA, 672 bp, Cannabis indica
cctagctgttgtgtgcccatatcaactagatgtcaaccagggcgcccattagggcttcaaagttctcgggtgtcatttcttgtagacttatctccaaagtctgaaacttttcttgggcatatctctcatgtatcaaagggaaatggctaatcatatcgcccataagaagttgctaagaaccaaaactgatgcgagatggtgcacattatgtcaacctgggcacctagcactagcactggacctaggttaagctctagtatttccacgtgacatcctcaaattcatggcttatcaaaatcgtggcttatcagaaacaacttcgctagatgttggtggctacctaggaaccccctgatgtcaaccagggcgtaccgacacagtttcatttagccaagttgaccatcctagtattaggaggtaaggccccagggttgtttccttcgtgccacatgtgaaaagtggtttttatgtaaccgggccaaatttacgagtaaacatttgccacccccccaagttagtaaaacacaagtgtcatgctgactttccaacacaaacaaaactcgtttcatgcaaaaccaccattttggcatcactttttcacacgagaccttcattttttccttctcgttgagattttctatgatctgggagttttccaaaaaaaaaaaaaaa

SEQ ID NO: 253818 - DNA, 1595 bp, Cannabis indica
tttctttttttttttttggttttgaaagtgttaaacatttatgtcagatctatgaaatggaaaaatttgagaagagagaggcccgatgggtccgatgctagtccgatatgggtccgatgggcccttcaattgatttaaatatgtgtaggtccgatgggtccgatgcccagtccgataggtccgatgcccagtctgatgggtctgatgcccagtctgatgggtcggatgcccagtccgatgggtccgatgcccagtccgataggatccaatttaaatcgggtgggaagaagaagagagaatgggaagagagagaaagttgatgtaaatggggaggatattttgggaataacactaaaattgtcatatgctaaaaatattggtaagtattaatttaggagaaaaattttaagataatataagcatatttaatcaaatttccctgagaaaataagtagagtgggaaataattaggagtagcattcgatctaatttaatttttttctcttcatccgatctaatctaattggtaattagatttaaaaaatcatcatttgattcaatttaattagacttcaaaattcaatccaatttaattactaagtggattggatcaattttttacttaaatatcaaattacacacctaaattttaatattaactcaaaaatataaagaaaaatatgtttaaattaaatatcaccatttatttaaattaaatacttcataaacatacaatcgtcacaagtataatacaactaaaaatttgaaataattaaaataatagcattgccaagtaataaaaacagaataaaacatcatgaaaataaatacacaaacaatcaagtgttacaaaccaacaaaaatacaattaatatatattatattttttaatacttttttattatataaattatttgttaacatatataaaggaataattacacaaggcaccattttttgtaaaatatttacatttttacgtttaaagaatgttttttttttttttacatttttacggttttctaaaaaataacacaaaaacaacataaaatcaacaagaaaataacataaaagtaacatgaaaataacatcaaaacaacaacaaaaaataacgtacagataacaaaaaattaacaaaaaatggacaaaatttcaacataaaagaccgtattttatgtaaataaaatcaaaaaattctaaaaaatgtttaaaattacgtgaaaccgtatttttgtttttttttttgttgttgtttttgtgcatttgtgaaattatccctaatcaaaacatatataaatataattagattagatcaattttcaattgacatctaataatcgatccaatctaattagaatcaaacttttagcatccaatccaatgtaattataattggatgtccaatttttcgtaattagattggatcggttcggtttaattgaatttgattggatgttgtccacccctaaaaataactacaccaaccctctcccgatatatattaaatatttttgtattgattatatatttaattttttttaaactaattatctatttaatttattttatttatatgttatcatatcatatttttt

SEQ ID NO: 253819 - DNA, 880 bp, Cannabis indica
ctggtaaaataattttcaacagatattatcttgtagactcaactaattgatttaataagtcaattagaatttgaaatagactaagtcttatttgagaattttcaccaaatttgggcatatttgagataaaaattgagatatgagtttatttgttaattagcacactttgtgtgtctaattaataaatataaatttattttatttgataattatttataattattaaaataaaattggtatttaaataattagatgagaaaagtgctaaaattagaaaagatacttttgtttcattagttgaaataaagtcagaagaatctaactctaaatcccatatgtatattcggccctaagagtaagatttagctcaagtctttattccaagcccatctcatttaaacctaaccctatgtgaatacttatataaagaaagaattaaaaaatctaatgtcacttcttcctcttctcttgattttcaaattcaccatgaaatctctctcaaaaatattgctccataggtgtttgagtatcaacccacactattcaaagtgatactcaggcctttgtggaagactgtgatgaacacaatcgaaggaggagaagatccaaggttagatcttgataatagtttgctacagacagaaatcatgggctagagatctgaacggaatgagtcatattattctgctgtcatcaatgtaagattttttataactcttatgtgtttatttatcgttttaggaatttcatatttagggtgttagattatagaattataatcaatatacatgttagtaaatttagatactagtaaaataagtctccaacactttagatatgactctttcttggaagccagtcagggtcattcaccttcctt

SEQ ID NO: 253820 - DNA, 591 bp, Cannabis indica
tatccttatttgctagtactattgaagtaaaatttagaggtacatacaataattgtagtaggcagttccactccacagatcttttgttgtggctaattcttattttctggctttttattttttattttttatggtatgggttcttcttatcaaataaattcataatacaaaatttcaacataatttaatttacaatagataataattaagtaaacgtatttgattgatacatcataattactataatttaaaagtgcaatattatcaattaagttttttttcttatgtctttaaatcagaagccgtttttatttatctaattatcaaaagtctaaaaccaatatgtatatatagagttaggaaagggatttagttatataatcttagttagactcgacctgcttcagtaaacgtgaaaaatctgcacttttgcttcaactaaactttacgcacacaatgctaaacccattaattatagatcactaacaatatagactaacacaataatagtgggaacaacaaagaaaaagtgtattgtttgtgtatttgcttggattttgctaaaaaaaaaacagttgaaattcaatttgc

SEQ ID NO: 253821 - DNA, 564 bp, Cannabis indica
tcctttacatatctcttttgggtgttgttactttctccagcgagatgtggtcctcccgtgataaccagaatgttctctccttcgagaggaggagtttgtaatctctggttgcctaggttataaggcggattaggctggttttgtccatcaccttgtcttttcacatactgctagaagtgatctcgcgagataatgctttctatctcgtcttttagttgatgatattcttctgtcgtatgcccaatgtctttgtgatatttaaaaaattttgttgcatctctattacgtctcgcattcctcatgagctacggtttacggaatgcgaccctgtgctcatgtgcaagatagatattttctcgagtttcattaagctcggtataattagtgtagattggcacgtacttgtcatgcttcttccattttttcttctccttagctgattccttagagtcatcttttctcttagatcctcctagattttcagccttcgtcgagacggtacttatcgagacagtgctgggtttacatcccgagtcaatccttaacaacttcatctcttttctt

SEQ ID NO: 253822 - DNA, 709 bp, Cannabis indica
taataagatttgaacaaaattaactactttactccaaataacatacatatcgatccatctacttcaaagagcctaaaaaaagaatattgttatttagtattttaaggtatggtacatatatttatgtatggtgcactacaattagttagtaatttcttatattatttattaaattaaaatttatagaatttgatatttaaattcaccaataccagtttgtcacattttgtgatatttggtactttaaggtgccccttaacatttctccttaaaaaaaaatataagcctagctcaattggtgaaaaaatgcctacttacatatatagtgaaaaataagagaaagattacaaaaatattgtgatacggagaattttatatttctgttgttctaggttatttttttttcttttctatagtgactaggctaaaacgagtgaaacctcatcactctctctctttcttccttcttcttcctctttcttctttttgttctactatgttcttatgtcaaagaggaacaattgatctcatatggtatcaaagccatttctactattatcggtgaacatggcaagcactgccattggtaattctagttctggccttcgtactcctcaaccaggatctggaactcaaaacagagatgcacagatggatacatagtctacttcactcacacagtttcgatcgagctaaatgatcacaattt

SEQ ID NO: 253823 - DNA, 768 bp, Cannabis indica
tttcccattcactgtatgaaaaaaagtttgttcagatggcagtttgatatttatatagggttgaatataatatgttaggtatacacatttatttgatctatattgtttttgttgggacatgataaagtcggtattaaattatttttcaatgttgtgtagggtataggttttgactagttagcatgtgagcatctttgcacatagttttaggctttatgtcatcaactttattgtaaatttttgttggtttgttgctggcaagtttgtattttagtgtgaatatgcaccataggggttcttggtgcactaaaaatgggttgaaacactgtgtgggtggcactataaccgagtttgataagtgccatacagatatgttcaacatgatggaacttgaagggaagcttttgcaagttcagtggtttcatggttcccctctttatttctggtttaaggctaaagacaaagaactcaatgatggatttgagcttaagactgacaagaatttgttggctatgttcgaggacacgagacaaaagagatataggaaggtggatgtttatgctgatttatctggaacttttggaggaaacaatgctgaattagcagttgtgactgttgatgcaaatgtgattgttgataatacaccacctgctagaactaagctgagaagatgcataatagaggagctactaaatgatgcaaatgtgactgttgatgctcgagtaagtgccagaccagatgactatgttatgtgttgggttttatgcc

SEQ ID NO: 253824 - DNA, 1133 bp, Cannabis indica
atataatttgattaataatttttaaagagtatcactaactaattatagggcttacacatctagatagtgataagcaccactaatgcctaataccaatgctctataacaaaatgtaagcagaaaataaataaaatataaaattaatatttactacttaatatatgttttctatctgatagacattaaatgcagtgacatcattgtatataagataatgtgatatacagtgcggtgtcacagttatatacgcagatgtgtaatgtatgaaatatgattattataattgttcatatgctattttattgttctgtcttattggacattggctcacgggtgctctattgtgtaagcaaggataaaatagtatcgaatcagccatgagttcgagagttttaaagatgaattgtacatgttctggccaagctagatgagagttgggtcgaaccagaaattgtataaaaattctatttttccacttaggtcggcttgtatgaaataacttgtaatattttgaaaataattttacgggatcccagacatgtaactttaatattttattttaaagtaatgtaagtttttattacaagttatttgtttaattaagtgaaatttattttaaatcacttggcttatggaccccggttaacgagattagcatattttaatcttggcacgtggtggttctctagacgttacaatatttatttctcctaaatacattttatttttgaactctcgtccacgtgttgtgaccatatttgttgctcgaaatatatgcataataactttttatgatttttttggcacataaataataagatagcctattaaaatatatataaattttaaataaaaaaattattttaaagttactagtttttaactaaaaattttaagaaaaacaactacaccattagtcctcaaaataatttgacaaaaagaaaaaatattaaataaccgtttacaactttttatttttattttttatgttatgtgcgtaaataaatatattttctgtattatttttatcaaataaaaataattataatattaaattattcgggatcaaaattttattgcacctatacaataacaagggtcattaacaataaatttatgactctactgtaatg

SEQ ID NO: 253825 - DNA, 699 bp, Cannabis indica
aggatgccccccacttggtggggtgatcatgcaaaggcgttttatttttccaacttaggccattttctaggccgatcccggatggggtccggacctcctgcacctattcccctgtatcattcagcttatctgtcttccagctggtttctcccctcagacagctttcttggggatgatgaagccaatattgtagtgcaagactttgctagggctgagttagatagtcagggtaggactagttttaccgctttgttttcgtgtgcatattttctcatggccattctgacacttagtttatttgtctttttgaagcagccaagccaatggaggatcttttggcgactcttgcccagacctacagccctaactctgctcttcctccggcgcctgaccaattggtgaccccgggaaggtcttcttctagtgcccctctaggccaaatcgtcttgatcgacgaagacggagaggtctaggaggaggaggaagagggtgagatcctggcccccttggaccgaaaaagcaagggaaaaatggtggaggcagagtcttccaaaaaggctaagagggtgaacactccggccgtcagctctgactcggggatttcgccagaagtggaggaatacactgtacctcccagcatcatccttacccccggttcccacagacgtaggagagacagcagctctggatgccaagcat

SEQ ID NO: 253826 - DNA, 568 bp, Cannabis indica
tttcaaactgaattttttgtgcagtgtggtatagtatagacaatttgtgcggtgtggggagtttgatgaatactcttcctaacaccaagtgtggggtttctcttgcagatggtctagaccaatggcgatattgtgcttctgatggcttgttgtatgttcaaacgatgtttgttttgcttggggtgtgatggctccatggaggttgatgcatattttgttagttttgggtactaaattaggtatacatcaaaaacattttaatatgattatcattgttccactcaaggatccctcatatgtatatatattaaatcagcaaacgaaaaagataaaagagaaaaatacttcttgatgaactattaagattctttgctttcttttcatacgttatatccaagaatggtcacactgtaatcttccaaatctaccaccacaaataaggatcagcgtgaattgatagaatacacaaaataatagagttcagcaaataagcaaaaactaatttcaggagagtaaataaaatatacaaattaggtttttaaatctatgtatgggtgcactcttaatg

SEQ ID NO: 253827 - DNA, 777 bp, Cannabis indica
aactgaaataagaaaaggttcggacccaattccttgacgaacaagcctttgcccggtttccataaccccgccaacgtgtgtttcatagcttcaaaatctatcgatcgcgcattcaaaaacctccccaccaaacaccaacgatcatccaccagaaccgcttcctcaacgtcatcctcaatctcaaaaccacattcttcctcatcatccaattctatatgcccatattgaaactccatgtcatccatggctgtgcttgtcgaagccatcaaaaccagagaactccaactatcccaatcgcaagaacccgagtaaaacaaacccaacccgcaatcctcgtcgcagaacacaatccaaccactcccagtcacaagaaacagtgaataagggaacctacgcacggactcaaacccaacaaacactcctcggttcaacccgcataaaccagtcgccgacgcaatccaagcagccccagaacaactatgatccttttgaaacccaggaagatcggtgagggaccctacacacacgacgccgtgcgcctctgatgaaaacgcaacacccagaacctgagaaaaccagtcgcaggaaaccagtcactgccgtagaagaacccagaacccgtgagaaaattcttcaaaacgcaaccctgagatgctgaaaatctatgatcgtacgagaaaagaaactatacgaacagatactattttaaataaatacataaatactattttaaatcgtgtattatgtaaaaattattaattagagtttttattttgt

SEQ ID NO: 253828 - DNA, 1401 bp, Cannabis indica
accagaaggttatgtggaaaaggaaaaagaagactatgtttgcttgctaaaaaggtcatgtatggcctaaaacagtctcctaggcatttgtacagaagatttgatgctttcatcactaaatcaggtttcaagaagagtgcatatgactgttgtgtgtatgtcaaatcatccaatactaagagtattgttttcttactcttatatgtggatgatatgctaatagcaagcaaacacatgagtgagataagaaaagtaaaagacatgctaagctctaaatttgaaatgaaggatctcgggcatgccaagaagattctaggcattgagatactcagagatagacagggaagaaggctgatgctatctcagaaggactacatttcaagggtgctgcagaagtttggtttctcggaagttaaaccagtgagcacacctatgacacacatgacaaagttatctcactcacaagctccaactatcgaatctgaactcaactacatgaaaaacataccctactccaacctggtgggaagtctgatgtacatcatggtgtgcaccacctgatttgagtcaagcagtaagtgtgatcagcaggtttatgggaaacccagggatagaacattggaaggcagcaaagtgggtggtaaggtacttgaagggcacatctaacatgggattaatgtatggttcaaactctcaagcaccagaggtcaaaggctatgtggattctgattatgcaggtgatatggacactaggagatcacaatctggttgggtgtttcaattgggaaactgcacagtgagctggaaagcaaacctccaaaacattgtagctctatccactactgaggcagagtacattgcctgtacagaagcagtgaaagaagccatatggctcaaaggaattatcagagaacttaacctagaccaaaggtgcatcgagatactctgtgacagccaaagtgctctgcacttatctaaaaaccagatgtatcacgagagaaccaagcatattgatgtgcggctccacttcattagagatgtcatagcagaaggaaaagtgaagctcaagaaggtttcaacagaggacaatgcctcagacatcctcaccaagccactcaccactgccaaattcagacattgtctgaatttactcaagatcactaacacttgtgatctgtaatgttttagtttaatgttgatttctaaatttctgtattttgtttgatgtttacactgaataaatcaaccaaggtggaaattgttaatgtaatggtcggtttattcagttagcagttaagggaagttagttagttattgttagttagctttcctatttcttaggcaagctatatatactgtacaaacacatttcagtaagcaacttgtattcattcattgata

SEQ ID NO: 253829 - DNA, 633 bp, Cannabis indica
atgatgaagaagtttatggtaatagcgttggtagtgggtgtgatggttgtggggtgctttggtcgactacaatcggatgttcatctgaatttggtacctaacaggtgtatggtacctggtgaatattgtcattgggcacaacacaagacatgctgtgaaggactgcattgtgaaggtgagtggggatggggtgagaatcggaaatgtgtctatgtaacaaagtgtttacaagctggctattcttgtgctgctttatcacctccctgttgctacccgatgcgttgcacatctatccagcgggggggacattgtgctacccctggtttggagctagatgttcaacaaaacgcctcataagatataattaataaaaagtgccattagcgctgagtctcacgaagcatgtagtagcttggtgtggtgcggtttgttttagtaataatagaaagtgtccttggcgcttagtctcacaaagcatgtagtagcttggtgtggtgtggtttgtttcagtaataatgaaaagtgccattgggcattttttgttgtgtgtttggtttagctttgagattaattagcattccctgtgtatgtaaggcattttcttgtgacggtttgttttatttgtttatgagt

SEQ ID NO: 253830 - DNA, 987 bp, Cannabis indica
aatcattagcaacaaaccccataccagatagatcaaaaacagattcttcgtcctcagttaaattcattggttctttcatcttgttagtgaaaggatccatggaagcaaaaccagatcgtagaaaaagagatcagatgaagcaggattaggagcagttattacttacgatttatggagaaacaggggaaaacagaggaaacctgggactacacaaagagaaaaagaaaaaacttccttaactgaaaaaaactgccgcagagcacaaaagggtgggcacacaggctagttatgaatactatacatcatatgttcgtcaaataaatactattcttgggaggataatcaaaataatactatacacccaaaaaaatatggatattcatatctagccaaacaagttatttattcatccgaaaagcatgcataactaatttgtgtgcaacaaacttgtaaatctgaataacaaacttgtaaaaacttctaataatgatctaaaaaatcatttgagcgggaactctgatagtaaaagcaatcatagttgtaaaatctttgtaacagactgcaatccattgtcatcatcaacggcatgcaatttgttctgaaaactcgctatcatttctctcaaaacttgaaaggacaataatgttttaactgcacataaccaaacaatatattagtgggatgaaaattaaaataatgagtaattaaatattattacaaatttatattttattttactacaaataaacaaaataagcattaaaaaaaatactaacaataatcactataaagaaaatatttcaaacaaaaaattataaagaaataggaaataactcatcttgtcaaatgtaattagtgtctgaagtagatccacgagcactaattcaatcattaaaataactatcataatttaaaaaacattaataactttataactcaataaccgataacttaaaattaaattttaaattatattgtaataatcta

SEQ ID NO: 253831 - DNA, 656 bp, Cannabis indica
tggggcacgtatcaacgactagtgaatgaaatatttgaaaagcaaataggaaggaacatggaggtctacgtcgatgatatgttggtgaagttgataaaaagtggagatcacacgaaagacctcgcgaagtgctttgaggtactgaaaaagtacaatataaagctcaaccaaaagaaatgttcctttggagtttcctcaggaaagtttctgggattcatagtcaatgcaaggggcatttaagcaaatccagagaaaattaaggccttgatagaaatgtcgtcgccaaagaaaccaaaggaagtctaggccttaacgggaagaatggaagctctcaacagacaaatgctactgttatcccaaattttgcactctgacgtggcatcacgagaatggtgacacgtggaatccacttggagcatctgttcgggaagatagaccgagcaggatgccttgctggcacatcctaattaagatattcagcgatcgtgcagagcactaaacacttagcgaattcagctttcgcatcatgagtcatcagctcaatccctataactcagtgatcattttacgtgaatacggcatacacacgatcccactatcagtgttactcagcctcaatcccacgatccttgcattcagcattgatcacacgatct

SEQ ID NO: 253832 - DNA, 606 bp, Cannabis indica
gaaaactctatcacgaagaagcttcattgatccaagaacaagtcaagactgagagataaatggaagtctacctcgccttatcttagcttctcagacacagaatacgtattaccactctggaacccggagtggtccaaactcaaagcctgcccaaatgatacctagatggatacttgaagggcctatcacggacgctgactgtccaagagtatcgcggacgtctaccttggatgcaacccgaattccccaacgacggttatgctttttctaacacaaaattagattttgtcccttttgctagaacatggtagttcgtacacctcacacacttttttaccagatggttattccaagcatctacttttaaaggttgaaccttttggcggcacgtgtccaccaagtacaatggtctcctattgtccagctggtgcaacacacgagcataattcttttctaagagtccaatagtcagctttctttttacatgtattttgtcccattagtgggctttttgtaaaaatcctacgcgggtcatgggcgtgtccatacttgaccttatagcctataaatacctttctatttccatacgaatggggggatcagaac

SEQ ID NO: 253833 - DNA, 1039 bp, Cannabis indica
tcacaacgccgaacaaagtcaaccacttgttgtttcatccctgtccaaaacacatccgcccgaatgcgctggtaagtgcgtgattccccggaatgccccccaatgggagtctcgtggtattccttcaaaaactggggtaaaagagaagaagtggcagcaagcactattctacccttgtatctcaactgtccatgatcaaaggagaacccgggaacctccttatgttgctccaagtcagcacaaatcttagccaaaagaggatcggctagcacttcacgctggaccacatcccaatcaagccaagaagatgtagtaagtacggcacaagccgcaggaagaactctggacaaggcatcggcagcctagttagcaatgcccgggcggtattgtatctcaaaatcaaatcccaataacttcaccaaccacttttgatgttccggggacaccaaacgttgttccaaaagaaatttcaagctttgttggtcggtcctcaccaaaaactgccgacccaacaaatatggccgccatttgagaatagccaacactatggccatgagttccttctcgtaaatggacttgagttgagcccgtggcttcaagacttggctgaaatacgcaaggggccgaccttcttgcatgagaactgcacctaacgcatatcccgaggcatccgcctcaatcacgaattgcttagagaaatccggaagggctaaaaccggaactgtgaccatggcctgtttaagagcttcaaaagcggccgtggcatcttcattccaacaaaatcgatccttttttagttgctccgtaagaggtcttgcaatggacccataccccttgacaaacttctgatagtaccccgtaagacccaagaacccgcgaagacttttcaaattggtaggcagcggccaatccaacattgcctggaccttattggagtccaccgagaccccagaagcagagataatgtgacccaagtattccaattgctgttgggaaaaacaacatttcttcttgttagcataaaattggtatttagcca

SEQ ID NO: 253834 - DNA, 776 bp, Cannabis indica
ccctgagggtcagggcattacattgaacctagaatcgagtgtggagatgaatgaattgagagcagttatatcatttgttgctacaattatgtcatcaacataaataagtaaggctaagaagacactagattggcttcttataaagagtgaatggtcattttgagcatgtttgaagttgtgttgtaataatgttttgctgagtgttgcataccattggcgcaaggcttgtttaagaccatacaagcttttagttagtttgtaaactgcattggttgttaggtctccttttggacagtaaccttgagggagtttcatatagacatcctcatttgattctccatgcaataaagcattgtttatgtccatgtgatgtaaatgccaattattgatggcagcaagagcaaagagaagttttaaggtattaaattttgctacaggagcataagttttgaaacagtcaattcttggtttttgagcatatcctttagcaactaatcgttctttatatctatctactaatccatcaggattatattgatcctatatacccctttgtttccagttacatgttgatttggaggtacgggtacaacaatccatgtatgattttttttcgagggcacttatctctacatccatggctttgttccaaattttgtgtttggaagcttgtttataagatgttggtgtggatagtagattaagggcaagtatagcagctcgaaaagatggagaaaatctgtcataggatatgaagttggttaaaaggtgttggg

SEQ ID NO: 253835 - DNA, 1094 bp, Cannabis indica
tatatatatatatatttacaatgaataaatatatattttaaatataatattttattgatatagaaaaaaagaaaaaactaatgtatggtgtaatgtaaaagtttaaaataaaataaagaaaaagtagagttttagtcatgtattttaaaggaataagttgagaagctatataatgtgaatgctcttgcattctaacccttaatttaatttattttaaaaaataatttacattttagtcattaaatcaaaatttattataaaaataagaaatgattcaaaacactaacgtatcgaaaaatataaaataacaataacaaaaatactaataaatataaaataaaaaaatatactaagttttaaaacctaaaaagacatcattgttaaattaatcatatgtgaaaatactataataatttaaaaaatcaaattatgttggtgtaattttatatatatatttttttaaaaaaatatattgtgtaatgttaaattaatttatttatttattttatgaatcaaatcattatattgcttcaacttcatcctaacatcctaacagcaccaaaattggtctgagtaatctattgtacatattccttccttcagggcttgttaaaccactatatgtcagattgtttcatttaattttttaggcataatagttgaaattatacactttacatcttgttttatccagtatacccaagttgttgggagtttttgagaccaataaactgtaatgttcaattcatttaataaatattttattttattcaaaaaaacataaatataataggtgagatcttttaaagaaaaatatttatttggtagaatattttatgttatatttaatgtgaattattgaagttgttacactaaattagtaaaagctcctacacactaaattagtataaccatttaaagatagtcttattagacattgaagatagtcttattagacattgatctttatatttttgcaagttcgtcacaaacttttaatttgtagaaaccttaaaattttcacttttaaatagttttgttgatttttcactttttaaatagttttgtttgcttttttttttttttgttaattt

SEQ ID NO: 253836 - DNA, 1701 bp, Cannabis indica
ttttgatttaccgctgtcaaaatgaaagccttcccaaattttcttctctctcattaacacctctgtcaaaatgggatgagattgaaaaagttgctgtagcgatttcatctctaccatcagatttgaagtccagaaaaacacctggaaaatattcttctgccatggatgaaccgaagaagaagtgatgacattcaagaagcacggtagtgtgtaggaaaagctcacgtgagggttctcttcaagtaatacttgcttttgttttgtactgtccagccccaaaagaatagataaatgagtttctcctgggtcccatgtcaccagcccattacgtgggtattctttgcttaagtgggcccaatcaataatgtaattaaatgaattgggcttgtggtttatctgatgtgatattattgctctagtgaaagaagaaaacattaaggccagatttaaaaagtaacccaatggattgggcctaacctgatagggttggaaggaacaatttgataattttgaattctccaatcgtcttctacagtacgccgtcatcaaacaactcgcaccaggtacgggttccttggtgatcagcaagctagactcctccttgaccatcgtcggccaacgaaagttatccgctgtatagcgtgtcttctccggcaccggtggactgcttacactctcaaacgaaatatgctggagctccatgtcgtggtgtatggctggtagcatgcgcgacaccacacccaaatcagaaattgtcgttgctttgttagtaacgacttcgctagcttgctggtcgtgctttccgcgatcaaagagtttgtaagccaccaatgacagtagcggtggagtgcttcttgtccacgacgcatcaccaagccgaccttgatgaattttgggtgggaggatctggctcgagttctcattgtaccacactggtatcgtccccagtttcggcagattgctcttcatctccggcaatataagcttggtcgttggaatgaattgatagcttggtgtattctctgcttctttttcacagagcatctccgattggaagccatgatgtgatcttctgatttccaccgttttcgttggagaaatgagtagatcaattggttgttcgttgcctctccgtacgatatcgtcttcgtcttcatctccatcttcaccatcgaccccaaccatatcttcagaaattattgttggttgttcgacaaacagattgtttccgttcttcaactccttcagtgtgctactttgattttgaaacctcacttgtccttcaacgaagaatgctttggctatgacttcagggagtgttcttagcttacattcacacaccttcctcttcacggcaatgttcttcgcagcttcgaatagctcgggcgatgctacagaaggcagagaatcttcatttacgagctccgattgtataactgcctgccgtttgtgttttagaagctgtcgagtctagcaaaggctcgtttgtgttctaatattgctatttctatctttccatcaccttcaacctccgtttctattgctgaaggagatcccgaagttaggttcgacgcgtggcaatttcggattccttcttggttgcgaacccgaacagattgcacagcttggtggatccactgagatcgttgtcctctgatcttgttgtgacatgacttcggagatcgcgggagaggcgaagta

SEQ ID NO: 253837 - DNA, 950 bp, Cannabis indica
atgatccttaattgattactgctaactttcttggagttttataagaatttactatgtaccaaaatggaaaaatagaagattagctgaggctgggattttggcaagagggcctgttgtgacctaagaataggctaatgtgttctaccaagataactgggaaattattgttgatgacatttctaatgatgtgacatcattcttggagccaggtaaaattctcaaaaaaattaactcaacaataattactttagttccaaagattaagtgccctaacacagtcaaggattttggaccaattgcttgttgcaatgttatctataagattgcaaccaagcttttgagctctagaatcaggaaaatcttacttgagagaatatctcactcacaaggtggatttaacaaagggtagacttattggtcacaacaaaatgatttgtcaagacttggtgagacattatggaaggaaatctaacaaacctagttgcatgattaaattaaatcttcaaaaagcttatgatactattgagtgggacttcattgaaaagattctgataggtttaaagttccctaatgccttcattaagctcattatgaattgtatcaaaacctctaaattctctctcatgttcaattgaaacttgcatggtttttttgaatctaagagaggacttaggcagggggatcctatgtcccctctactgtttgtgttgggcatggaatacctatcaagactaatgaggaagataggtgagaaggatgtttttcactatcatgatagatgtttggatctcaagctaaatcatttggcatttactgatgatgttcttcttttttgcaaaggggactttagatgtataatctacatattgacagccttaaaattgttttccttaacatttggtttataccttaattcaaataaggctgcaatatactgcagtattatgcag

SEQ ID NO: 253838 - DNA, 510 bp, Cannabis indica
tggatctctaatccagtcctcgtaccaaaaccaaatggcacaaggagaacttgtatagattactcattatttgaataaggcatgtcctaagaatttatttacactaccaaggattaaccgattggtagatgcaatagcagagcatgaattgatgactttcatggatgcgcattctggatataactagattaaaattcacatcccagaccaggaacatacaagcttcgtggcaaatatgaggctctactgttacaaagtaatgccatttggattgaaaaatgttggagcaacataccaacatcttgtaaatggtatgtttgaaaactagattggatgaaacatggaagtctacgtcgacgacatgttagtgaagtcagtaaaatgcaaggatcatacaaaggacctcgcagagtgttttgctatacttagaaagtatgatatgaagtttatcctaaaaaatattctttaggggtgtcctcgggaaaaattttaggcttcattgtgaatgca

SEQ ID NO: 253839 - DNA, 1575 bp, Cannabis indica
tatatctctctaactcaaattagattttcataatctctcttggcaagatagaacaatcttaataatataatgcaaaaatgaaagatttcttttaattagatagcaagatagcataaaattttaaattttcctaataatacctattaaaagtgtacctatataaatggattaacataatgagtaattgaaatgtttatcttttgaatagtaattgtaagtaattgaaatgtttatcttggaatagtaaatgtcccaattaattttcaaataatgcactttttaatccacattatatttcttcatttttagtgttttattagacaaaaatatatagaagccatttgcacaagatccacttaagttgccttgttaatgtagatatgaaaagagttatatttgttaaatctcaagcttaattaacacacaaattgaatactattaattgcattttgaccctcttaaattaatcaaagctttttcattaattaaccaccaaaaataacattatatataaagttggtcttcttgttttgtaactaattttgtctcccatcttcaataaaagtaaaattatataaaaatattatactttttcccacatatatttttattcaaattattaaaaaggaaaagggattttacaatcactttcactagaaaaaccaattctttgagccatattccataatatgtgtgtacatttatatacactatccctttcatgaaacagtctctcttttcaataatgacaattttttttttcactttaattttctgtggaaattactttaatttttagtgctaaaattaatcaagtaaactaaaaagtttcctactagtacttactactacatatggaattagtcaagttggtattttcttctttgcaaaaattacattatttacataagtttcatttaattttaactacaatatattccaaggatttattaattaaaaaaatctactataaccatatagtactaataatcataatttatttgttgaaaatgatacaaaatttgacaaagtacaattccgtacattttcatatatatctatatttataagatatgattgcatatactattcttctactaatatataattaataatttaatcaattaattaattaaagatgatgaaagaaaatcatgaaggtaattatttaacattccatagatttttcttcttttcttttatttatttttgtaaaggcaaataaaaaaagttaaaccaggtcaaataataaaagataacataattattataaaacatgtctattattaattcctatcatgatgatgtgggttatgaatagtaatgaaggacaagaatatgaactttgaaacatctttatacagaaacctatatcaaagaaaagataaccttttctttttttttttttatcgaaataagcggattacatgttattagtttttttttttttggatttaagttttacactgtatactgtattaaattttcataattgttttacggttgtttttttagttgttctggttttaattattttgttatgttgttttacagttattttaagttgttttataa

SEQ ID NO: 253840 - DNA, 646 bp, Cannabis indica
aataaaacatctcaacatgcacagaatcaaaaccaccatgtgagagcacagtttgagctcataagcttaaaccttgaacgaacctcataaaccaccaccaaacaagctctaaaaatcaattctaaccattatttaacttcagaaacaacatcaaacaataacagcaacttcagagttcaaaaacctaaattcatgcaaaaccactatactttcctacttaacttccaaaaggaagaagaaaaaggtccttaccttagcaaaatacttgagtcaagattgctgaattcctcaagaaatgatctacttagaagagcaaatttgatttttcttcttgggtccctggtggccgactcaaagcaaagagagagagaattgttttcttcaattttctaattttagaaaatgatgtaaaatggtttaagtattctaatatcagccaaaaaagatttaattaaaaattaattaaattttcaataaaagacaaaatcccttaaggcaaaaaagaccataatgcccttgcccacacaaaaccattatagaaactacttaggggtatttttgtaacttctaaaatctcaactattcccgacattcccaatgtctaactatatcgccccgctatactaaaaatactaagatgtaattc

SEQ ID NO: 253841 - DNA, 703 bp, Cannabis indica
ccaagagacaaaactccaacaccgatgccttagcaaactggcctcgtagacgacttggatgaattgaactatgttccagtggagatgctaagcaagccaattatatgtgaaacggaagacgtcaagatgatagacagttactcctacatggatgactcctattatcagttacttactcgatgggcaacttccaatgacaaaaacgagggcaaaaaaactattgatttcaatgcctcgctacacaataattgaaggcaaaactatatagaagagggtattcgatgcccctacttcggtgtgttctccctacagaagcgaatggaatcatcaaagaaattcatgaaggcttttatggggatcatgcaagttgtcaaagtctatctaaaaagatcattagaaaaggatattactggccaatgatcaataaggacacccacgagtttctcaagaaatgtgataagtgccagaggttttcacatatacctcgcatgccgccaacagaactaagaatgatgacctcaccctacccatttgttatatggggaattgacttaattagggcatcacccattaggcgaggaggtgccaagtatgcggtagtagcagttgacttcatcactaaatggacagaggccaagccccttgtttccataacttgcaagaaagtcctcgactttgtcgtcaagaacattgtctgtgggtt

SEQ ID NO: 253842 - DNA, 697 bp, Cannabis indica
ctcgtctcaaggagaccaacaagccttacttttgttttccaatcaattgcttaactgaaagttgcttttgttaactattgatccctcagacattccagctcattattctatccattggcatgaaagggagctccccttctcttgtgttaacatcttcaacttgttttaccatacacaaatcatttgtcctttctatcaaagaatcagtttccaatatctcattcaatgcttggaatgaatttttggttttggcaggcaggggaacattagattccttatgtttccatcccgttgaagttgattagaaaccatccccatctactacaaatattctttttccctcttctcagtcttttttcctgcatgtttcacagcccggacttattcttctccatttttttcttgcaatcaatagttgtgtgtcccatattagaatagtggccacataaaatcggactccacccatatgaaacttataccatagtgttgaaaccattatcatcatcaaaatccatagcctgagagaattgttgattcattgcaacttttatcagaactcaaggataggtaagtttatcccttctcttagtagattcgtccaccatgataggcttgcctacttgcccaattttgttgaataggatttttcaccccatatttcaagtcaaggtcatcaagatggacccaaatttgaccc

SEQ ID NO: 253843 - DNA, 742 bp, Cannabis indica
ccaataataatgaatgattcacacctaatcaatttaagaatatgaagtattattgaatgaagaatccatagttagtcaagactaataggaagggtagctcaaacggtcatagtttgttttgctcccacatagtttgagattgtgttaggcaagaagtctccagttcttattttcaaatacctagtcagtactatagaaaagtagttttcttcttcattgcactgaggcagaaaatgaacccactgcttttcttcttttctttctacatggttctccattttgctttggatctttttatgaaaaaggctattgttatatattttgtatttgtttgtgctcatctatcttttttaagggctttgtagatatgtctcagtatgtgctactctcctatctaaacataaaacttgattcaatgaaatataccagagacaatgggcgcaaagttgaggatcctgatatgttagagatgattcgacttactgtcatcaataatctgttgaagtatcatcctgtaagtacactaaatatttttcgttttccccttgaacttggaaatcttttatgatgcaaattgagataccttttcgcttaactttcttattttctttgtgcaaatgatgtagaactagagagagaagagcggagtgagaagaggaagaacagaaaaataaaggattttagacaaaaataggagaatatagaaagaagagagaacaatataaaaaggaatttagagata

SEQ ID NO: 253844 - DNA, 3110 bp, Cannabis indica
cacacctaattgccctgctctcttttagtgataaatatacttttgttattcatttatactgaatattttttaataattttcaatataaaataaataaaaagaaaatataaattgaacaaaaaaaaaatcaacgttccatatcatatgtctcataacacatagaaagaaattcaaatagaccacaggaaatggaaaaaaaaaacaatagatgaatttttcagtagagagatagaaaactcattctgaaaaataaataaaataaaaaaaataaatttgcagcattaatacttaaatttaagaagttttttgcgattaaactcactaaactattattttacttgcacttaactctcaaagtttaaattttagtggtaaaacactccaaactaatgatccattagcaaatttaaagtgtcatccatttatctcggttacatgccgtgtatacactcgtatacacgtggcacatttatattggtccacctaacataacaatttaaaaattatataaaattcattttaattgaaaaaataataattttataaactaaaaaaaatattaagtttttttttttggaataaaaaagttaattgagttattaattagtcaaaattaattaaaagacccttatctcttcattatgtctctccatacctcttcatcttctcccacaaagcttagccgccatagagttactgtcttctccaacatgacctagcctgacgaagatggctttgcaatgaatgcttgctcaacgacatggataactttgcaacaacggagagatccacatcgacaacgatttgggaaaccaacgaaggtcctgtatggcaggtcaggtagtcttctgtcagatttagtgtcgtagactcgcggctgacgaaaatgtctctgtctaaaagtgtgttgatttggtgctagctccggtgacgaggcgtgcatgagatttggtgttagctttagtgtcttattatgatacgtgtaatgtatgatgatcatatttcatttaagtatctttaattgagattttgaagaatggttggatttttaggttttctaaattgtggaagatgagaattagttatgtaatattaaaattattatcatatttttattttttatttaacaattaatttaaatatactaataaaaaaataacacgtaaataatgacttgatatttattatcgtcaaaaattaaacttaattatttatataactaaaaattaattatgtatttatctgtagttaaataaaaaattctcaacactctagagtgattgataacttagttttatatatatacacaaccagagaagtaacttagttacagtagaatacataggttagttagataatagataatagagctataaactaactaacaaaagaaaaagttataactaacactaacggaataacagcccacattttacacctgggtaattagtcttcaacttttacatttaaattctccatgttattttttttttaaaaaaaaaatggcatccttgatacctttcatcctatcatccaaaaaaaattgttaaaaaactgaggttttattgaacgtgtccaattttaaactcgatattattatttcttatttaaatttcaattaaacgatcagaataacaataaaagctcttgtattatttttgttacgactacaactagctagtgaaattaataatcaaagtgaaactatattgtagttatcactatttctttgtgtttacagcttaaaaagtaaaagcaaattaccataataataataataataataataatataatgcttttgatcaaagaaattaaatgcaattaggaaaaaaaaatcgtgatgtccattacttcattacgcgtttacattaaaaaaatgcaaaatttcaaaataaaattataattcaaacctcaaaatattaattaataatagaggaagaagaagaaaatacagccccccactactgatcctgaagacaccatttccgggcggcggaggtggagcgtagttgaggtctggcagaaagccatcgccattgccaacctggatctgaaaggccataccgcgttgacattggactttgtcgccggtgttggagaagtagtacgttgaaccctggatggtcaatggtacttcgatagtcaacgcctcccccaatttaccacctccgccatcgtactggatcgtattgtcatcgtcattggtggagtttttgtaagtgcagctctggtatattgttttgttgtaagtctcgattacaatctgctttgatttggtattgaaaactggaaaggggaaatcacaattaaacaaaagatagatatttatagacacaaagttcttatcaataaacagaaaattcaattaagtaattaaataaaacttactgagtaagtcgccgagggagaaggtttgtttggcagcccaagaagtgtaattagtggcggaggaattggtggtggcgttgaagaaccaacctgcgttgccgccgacggtgtgattggtgctggccaacgctgttgaaatgataaggaccgaaaataagatcagatttctggcgatgatcaatgtgttgatccccatactcactcgactcagctctcttagtggtgtgagttggcttggttggatctcttgaagtctttatcaaaatataaaactcaattgtcttctacttcctagtttgacgtgttttggattcacatggtgtcggcagaatttgctattaaacaattttttttttaatgtaactattaaatgctaaccataaattgttgtgacaaacagattcctatgttttcacagaaaaaaatagttaacttaaacaaataattttacttaccaaataaataaataaactttgcacactctacggtttgaggcaacccttttacaatacagatgcactcattcacactaacataagcttatttacccaacgaactttaaacgaggtaagttcttacaatacagatgcaacctttacaatagcataagacacccttcattgtaatcagaaataatcgtcaacgtaagtatctgatttgaacttaaaatgaaccaaaggtgtaaaattgatttatttatttagttacttagattagtaa

SEQ ID NO: 253845 - DNA, 765 bp, Cannabis indica
tcattccgagatgcaacaataccggatttttcttaaagttgggaatttgtactatttcgaagtgattttttcttttgcattattacactagaaaatataaaacattcatctaatgtttggtgttggtaccagaaggtacctcgaattcacctcataatgttaggaaaaggttcctcagattttttttttgtcattcttttcagtggacaagtttatgtttcatgtttttgaaatttgtaagtatatgtgtttatatgcatgctcataaaattgttttctttgctcagttaatagacccagtggacaaaacagttgatagagatctgtctcttattcaagaattgaggctaaaccttttgtatgcaatgaacactcatgtacatgctgatcatgttactggaactggccttattaaggtttgtcaacctactttcatttcactgggactggccttatttggtctgaagttccaccataatctctcagttcttttttctgattgtttatgaattgcaattggttcctgcagagtaaagttccaagtgtaaaatctgttatttcaaaagcaagtggttcaaaagccgatcttctgattgaatccggtgataaaatacttttcggaaatcttttccttgaggtaggtagggatgcaaatgcaattgtcctcacccaactagtatttcattcagaaaattgaattgcacccagagatttatgctctgagccctctgttcattctaaaattgtgagctttaagcctcttaa

SEQ ID NO: 253846 - DNA, 531 bp, Cannabis indica
tttcagcccatgtcttccctctccgtgactacttggaagggagtctcttgaaggtgtaatcaaccatttctcggcttccatgagaaaaagtgatggggttgttggtggaaacccaattgtatggatgaccccaaatgattcctctgtgatatggatcgtgtgggggaaagtataggctcttgggacatagcaggcttttggttcacggagggaagctggggttgcatcctttcgcatacagttttccctacacagaggtctgttttgataagcaagagtcatgctaaattttgtactggcaaacttttggctttcactaggaaaggctaaaagtgcaaaaaattcagacaccgccttcacttgcaagagctggagggtgaaacattttagggcgtgcgagagtcatgttgaatttttatgaagcaagcttcggcttccgtgaaggaaagctaaagttgcataaaattcgagcttagacttcacttgaaaagatcaataggagaaaactccacagggagtaaggcagacttc

SEQ ID NO: 253847 - DNA, 1404 bp, Cannabis indica
aggccaacattgtagctgatgccctgagtagaaaaggacaaagtcaaataaatatagtgaagcagatctccaagcagttagcagatgaaatgacacgagctaatattacctagcaatctactcttttggagcaaatcaaggaaacgcaattgcaagatccacagttagggaaatctcgagataagattttagctgggaagactacagattttacaatggattacatggaaatgctacaatttatgaatcgtgtttgtttgcctatggatgacgatattaaaagagagatcttggatgagtctcatacgactccttacttagttcatccaggatcaacgaagatgtatcaagatcttaaggtcatgttctagtggccaggtttgaaaaatgatattgttgaatatgttgcaaggtgtctaacttgtcaacaagtgaaagatgaaatttccatggacttcgtagttggatttcctaggaccacaggacaatatgactctttatgggtcatagttgataggtttacaatgttagcgcactttttacctgttcagacgaacttctccattgatcagtatgccgaactgtacgttagagaaatagtccgtctccatggtgtcccaaagtccattgttttttatagggatccgaagttcacatcaagattttgggagagtctatatcgagccatgggaactcaatttaaatttagcacaacttttcatccttagacggatggacagtctgagaggaccattcagattttagaggacatgctatgggcatgtgtattagatttgagggatcatcggtaaagtaccttcccttcatcgagttctcgtacaaccacatctactaggcaataattgggaaggctccttatgaacttttatatggaagaaaatgcagatcaccaattcattgggatgaagtgggtgaaagaaagttcttaggtcccgaagctgttcagagaacaagtgaggcagttgataaaatcagagcgcaaatgctcatagctcagagcagacagaagagttatgcaaatctaaagcgtcgggatattgatttttagatcagggatatgatacttctccaagtatcacctatgaagggcattaaacgctttggtcagaaaggaaaacttagcctgaggttcatttgaccttttaagatccttgagaggatagggcaagtagcatataggttggctatgcccacgttttaatgcttcggaaatatgtctcagacccgtcccatattttaagttatgaagcattggaacttcagcctgatctatcatatgaggaacaaccagtgcaagtacttgacagaagagaaaaagtcttgagaaacaagacaattgcactaatcaaagtattatggaggaacagtaaagtagaagaggca

SEQ ID NO: 253848 - DNA, 896 bp, Cannabis indica
gaaaaattattttgtcatttaatatttgaaagttactaaaatgtatgctttgagacaatattgataaatttctaaaatatacttagttaacaatcaaactaaaacaaaatttaatataacaataaattttattggttaataaaagttaagttactagaatcttattttttatataagagaagcatataatatattaaaatttaatacaataaccaagattgtaaattatttcataatttttattattttatatttaaaagttaccaaataatatatttagaacaagtctgcttatatcttttttaaaaaaacttataaagttaccaaatagtattttaaatattacagaattagttacattataaaaattattatacagtatttaataactttactaataagagatatctgattaatacttattatttatcgtatcttattaaatttttgaatagaaaggcaagaaaatgttactaaaaaataaatgtaaaagaaacaataagatagcatattgttacttaaataaattttttataatgtaattaatctttatgatgtttaagatattatttagcttgttaaaaaaaatattatttagtttctttaaataactaaaaattatatgaaataatataattgtaaagtaacacttattaaaaaaaaatagtgtatcttagtagcttattttcttatagcatatagtatataaaagaaactaaaaagtttaatgaaataatatatagagatattcatatttataaagggaagaaatataagacattaataaaacaattggtttgtatattatcttgtctttttgtgttttgttaaaaaaaaaaaacaattaagttggctaggctgtagagaaagagaaatgaaaaaaaaaaaacgtaaaa

SEQ ID NO: 253849 - DNA, 1290 bp, Cannabis indica
aaagccaaattgaggccttgtatagtaaatctttacggcttcactggtgatagtattgccagtctgggcataatcgagctcacattaaccttgggcgaggcaaccctatctgccaaagttatgcaagactttgtagtcgtcgacatgccatcgacttacaacatattgttaggtcgtccaacattgatcggactaggggcaattagttagatcaagcacttatccttgaagttccaaacaccagaaggtgtaggagttgtgcggggcgaccagatgctagctcgcgatttctatcgcatagagctgcagcacaaaatagccggtcatcagtttatggcgatcttcgcagaagaaagtgaaaagaaggaaaaagatcttgacccccagattcaagatgaaagaaacttattaaaacaattgaagagttggaagaagttattctcgacccaggaaatctcacaaagtgtgtttacattgggaagaaccagaacgagcaactaaaataacagctaataagtttcttaagggcgaaccagaatcagttcacctggagccatggagtccttaaatccaacaatctcaatagttcaggggacatttttaacgaccttaaaagttcagggggtatgatttagtacaatttgttgtgactgattgtatttttcgtcacaatatttattgtgactaaaactaaattagtgacaattgtatctaaatactatgttttagtcgtaagtaatattttattgtgactaaaagttatatttagtcacaaaataattatgttgtaattaaaaacttgtcactaaaggtaatagttttttgtagtgtaattttagttttattataatttttttgtaatatataattttactactatagttcattgattttcagtgctaatatctataatatattattatatatatatttaatgatataatatatttatttgttgtagttacaatatattaatatgcaatactagtaaatttatataacttaattttattattatataatttttcttataaaattgatataattaaagtatgttcgtaatttttattaactaatttattatatttagctattttgttaatttttttaaaaaataaacatactacaaaaaattttatttttagtcagaacaaaacttgtgactaagagtgaaaatgttgtgattaattgtaaatcatcattcttatgttgtgattaaaaggtctgtgactaaaattattagtcacagaaattttaatttgttgtgactaaatgtatttttagtcacaa

SEQ ID NO: 253850 - DNA, 1187 bp, Cannabis indica
aaacaaacaaacaaaataaaacaaaagttatttttaaagcaagattatgtaacatgaatggctcttgatctaaggttcttcgtcttatatttttagacctatttatatccaatttaattatatattagatgttaaattttatcaactaatctgatttaacatttattaaatatttaattggattgggatctatcaattaaatatatttcatgtatatttattgaattgattcagatttatccaatattttagacttatatttactagattgaatcagatattccatttaatattttaaatctagtatttattggatttgatccatccaataaaaaatataaaatttttattctaatttcatatatacaaatatattttttaaacataacaacataaagttcaattatattttcaaattaaataagatactaacttgttcgattagatattaaatgtattagattttcgaacactccatttaaaatctgatcgatccaattgaatattgaaaaatggaatcagatacaattatacttgaatatctaatatttggtcgttagttgtaattggattagatcgatttgtgcacacccttataatctaacaacttaatttaaatttaagaggaatttgctataattgtactatagggaaaagaaaaactctagaaaaagaaattaattaattagtgtttggtaaatataaattttaaagtgttgcaactaaaaagaaaataaaaagtgttgagtaaatatgacaatttaaaggaaaggttttgttaaatattcaagtaacaaaataaataccatatttatttaattttactctgtaataaaataaaggaaattgcttatgtgcaatcacaataaatgtctacacatatacaaatagtttttttttacaagtgtcatcttattattctaatcatgtattcaattaattgtgtatttttcttttgtctattctatataaagtgtgcctatataactgaattcttagtttatgagaaattcatgggtgactttttatttatatttaataaaataataaaatattatttatatataataaaataataaaataaaaataaaacaaatctcattaatatttgaactgatatttgatgctaatcatttatctgttttattttttaaaaaatacttaagcttaccaaaatctataagaac

SEQ ID NO: 253851 - DNA, 717 bp, Cannabis indica
agagagagagagagagagtacggtgtatacgatatattaaaaattttttcgttcttggagtggattgcaacctgggtgaaagtggatgtttgagaccacttatgtgcgacctacggaagccttttaacattatataagggtcagaggtcactgttttgagtttcaccattgttgaagcttcgaaggtacgacttgaaacggacgcaaattcaaacgtgtttaagcttgttcttgggtcaagggaggttagatatgagtttaagggaccgtaggattgtttttgacataagaaaacgaagctttaacgtccaaaacaaaggaccaagattttgactgcattaaagatggtgtaccgtcaacgaaggagacaactccgatctaccaacttgggcctcttttctttgaggtcctgagcactgtggagagcttccccaatcgaaatgacgcgtcaagagaaatcagtgacaaagttacaccttgtgtgcgacgaagccgatgtgaacgctggtgaccacgttctgagctgttctaaggatcttgttctcaacaaggaaacaaattgaggtgctcgaggtatcaagtgtggtcttagcaactgaggtaagtagagtggggatttgtgcgcagggtgtatgtttatgcatacaactcggtttggtttgttatttaatttgattatgagttgtgatgatttccttacataattagcatcgttag

SEQ ID NO: 253852 - DNA, 898 bp, Cannabis indica
gtgattcggggatagtgagaccaaaaagaactactaaaaagtccaaaaataccaattcaaaaaagtagagcaaaaaagagaccaaaaagttacttgtgattcgagatagtgagccaaaaaaaaattcgcttgtgatcgagttgttcaagatggtaagcaaaaaaaaaaaaaggctatcatcttaaagaataatgttagggagtctcgtattattaatgtgtgaaaaaattatagcatatataagattcatggactacttctctcattgtcttttaggatgtaacctcatgcattttatcaaattctaacagaaaacacaagtgagttcatcaaagacaaagaacacaaataatcaagatgagaaacaaagttatacacaagcaatccataacactcaagacaattctaaactaaactttgataaaacttagatcatacccaaatgcgaaatacaagactacaacaaccaaatgaaccacaatgacccaagaaactccactgaccataaaccccaaagcttcttatatactattttttttctttattatcaaaaaaacagagcttacaattcaagaaattggtcaaattccattctagaatcatgtacttccttccacattgaaaataaagagtcgtatcataaaaaagttacctttttttttaccaaattgaagatccccggagctcccaatcatcaaaagcttgcaggagaagaagaagagtcgcacacactcttagagcatctccaatgcaaataattctaaaaagttactacaaaattccacattattctaaaatataatattttattttctctctcattcacatcatttttggccatttactactaaaaatactccaacacttaataactctaaaagttactcctatggtccca

SEQ ID NO: 253853 - DNA, 682 bp, Cannabis indica
cttgaagcattgatttgtattgagcatgaggggccttatcagccttgggatgacgaggaactaggcttcataaagaattcctttgcaagaataaaacttagctaaaccataagcatttgagggcatcacaagaaatataaagcttttaggacaagagagatcaagaacacgtcaaggcaaggacgagtcggtaggtactaccatgacgcctataaaagttgggagagtatatagttgacgtacgaggacgtacattatttgatatgaggtagtgggtgtgatatcaagtgtcatacgacctgacactcgagcactactacctgaattccactactttaagcattgtcccctgccatacgcagcatagtatatggtccctctaagggaccacttagagtatcaaagcttgtaaaaaaattccattaggataaatacattcaatataaaagggggttttagaaaccatgtatatcgggaggttatcattttaatacaaagcttactaagcacttcagactttctctctaaattcaattaatctcactccatagtccatacttcataattttctcaattcataactcaaggtttcagagcataatatcattgacaagtttttatggttaatagtttggtaccgtctatgagaaagacgaagtcctagctatgtttttctcttaga

SEQ ID NO: 253854 - DNA, 514 bp, Cannabis indica
tttattaaaaaaattattaattaatactttataagtttagttataaaaaaatgtttcataaattctaaaataagcaagaatttaaaaatcatgtatattgagaccacaagattttattattattttttttttgtaagtacatatttgttcttatgaacattaattatatagactatatatcaaaaaaatatttattatattatatataaaaagagataataaaaataaattttttaatataaaagaacttctgcaatagtctaatatcgaatacttaagggctgcctaaattctgtattagtgtatcgagaggacaatctacgtcgaatttagaagttgtctttggttgttggaaaccacgtgtgggccacgtaagtacatctagaaactcttggaggtaatccactccagtagtggatttatgtattgttagaatttggggataagatgaatgaggttccatctcaaaaccaattggcaatgggaggagtagctcattcatcttatatatcac

SEQ ID NO: 253855 - DNA, 709 bp, Cannabis indica
taaagtaaaagaaaaaaaatatgagaatggttgagaaatgattcaagtttaaaaggactgtaattaaacttgcttaaataatactactattaccataaaattgctttcaagaaatgtaatatattaaaaagtggcttgagtaactaatcccccaggattttcccagttgttacagcataacttcagcattttcgcacaaagataacataaattcttccatgtttatgagaattttccaaaactcacaaattcaattctaccacctagatcaacatattcctatatcaaactagattgcagaaaaacatttaaacatcaattcttaggttatgcaagttaaatgaaatattcctattccatttacaaggaaaacctaaatttaggtattcacttgcttcactcaagttgaactactagatctagcttttccaaaccaaatctagcttagtaaattgttagtcatggccaaaaaataacaattaataatagcaagcttacttgaatgaacaatggcaaagatgctaaaataggcttaaaattaatcatacaaaacataggagttcataaccaatcaagcctcaaaaagtttagctcatattcaaatcaaaaattaaaattgaaactaagagttgctcatcaatggctgctaccttctttttcttttacaatttaaaaataaaacttcaagtatttaaaggaatgaagaaaa

SEQ ID NO: 253856 - DNA, 1440 bp, Cannabis indica
atgcacaccacggtgcatgctaccaccacattattatgaacgtcaactacaagttcaagactgacgtcttcacgaatcatatttacgaatgtgcctacacgtattcaaaaagagagtttcacagagaatttaagaatattcgggcaataaatgttgcggttgcacaatatcttaaggaaattggatttgagaaatgggtttggtcgtacttcccaggggtatgttacaatgtaatgacgagtaactgggttgagagcttaaacaacacaactaaggatgcaagaggctttcaatcactgctgctatagcattcctaaggtccaaagtccaacagtggtttgctacgcgaaaagaaaaagctgacaattggacgaagaccctagcacaaaaaatggaggaggacttggcattgtagtttgagaaatctcggtatttgaacattgacacatgtagaccttacatgttggttcaccctgaggatcagttgagactggtgacgtagtggacttgcaagaacatacttgcacttgcggcttgttccaaatcatgaagtttccttatcctcatgcatgtgctgcagctcagcaacgaagtattagcatgtacgcactatgctcactatattacacagcagaatattggagaaccacatatgaaggcaaaattatgccagtttgtgatgaggatgattgggaattgcctgatgacgtaaagaacatgagagttggagtgcctattgagaaacaaccagtagggcgaccccataagcaaaaagttggaagaattaagtcaaatcgaactgcttgtaatggtgaaaggattgtgatatcacgaaattgtggcaagtgtggtgccaaggggcacaacaaaagcacttacacctaccaaggttaaaaatgaatgttgaattcagttgtattatgatgtgttgtactattatcaattgttattgaatttatgttggactttgttaaacattaaaatttgtggtgttttattaattgataattattattatttgtagcatgaaacaggctattttactaattgcaaaaattcctttgtaaaaaaaccactagtccgatgcaggtccgatgctagtccgatgggggctcgatgctggtatgatgtatatatttagcagaacaaacagtgatgacccgatgggttccgatgttatctgatgccaccatcagacacaatcgagtactatcggaccccaccgaatccaatagtcccatacagagacctaaactaatacaccaccatcggaaactatcaacccatgtattgtccactatcgtccttttacagaaacatatgtttaaaacaaaagaattcaaaaaatttaagctaaattgttatgaacataatcataccaataaaaaaaactagttacattgttatctccataaatacatatgtgtagataaatatata

SEQ ID NO: 253857 - DNA, 1105 bp, Cannabis indica
tcaaacaagtcaaattcacaacttcatattttcactttttaggcaaagtgacttactcacaaatcaggaattttgagtcttcagattctacaaaacaacatctttgaaaactggtgaacaacttcactagaacataaaaaatagctaagtgatgttaaaatatcacttgggcatcaaaaaaaatatatccccagcatgtttcccactcacccagcgtctaggttgatgtcatatgttaacttgggtactggatgtcaacctcggcgcttgtcccagaacaatctttattaaaataaccatagctcactcaatattgatttgattgatgccattcaacttgagtttcaaatctatttaaatgctctattaaataatgtctcacacttcaatcacaataatgaagttattgactccaaatttcaccctcaagaaagttacaaatttaagttgctttgatgcctatttgacacaaacactaagttctcaaccaccccaattgctaccctcaacttccgtaagaaatacgtccaagagtcgttattctcactataaacgatagcataagcaattgaaaacaattggttgttcgcatcgtatgccacaacaactaacattataccgccatacttcgtcttcaagaaggtgccattgatactcaaaataggacgaaagaaagtaaatccccttctacatgcatctagtgatataaaacagtacttaaatcactcatcctataaatacaagtcagtaacggtacctgaattcttctgttctagcatgtacaagtatccaggtagcttcatgtatgaaaactctggcgtacccctagcatacgtaagtcccatctccccacaactccacgccttcacataattcatctggataccatatgtgtcaaacatacccatctgtatgtctttatccttgtacttagttccatcttgggtgtacttccccttaataaggtggccaaccacccatggtgctgcttgacggtgatctgaatgtctcgcattcaggttacatgtgtgttcgttgtgaaatacagttacctcaaagttgtcagaatacatcttctttctccccctcaatctccatttacaat

SEQ ID NO: 253858 - DNA, 1652 bp, Cannabis indica
  modified_base (35)..(35): a, c, t, g, unknown or other
aataatgaagattcaagccaactaggagaaaaccncaaacccgagcccttgggaaaagggcacagcgcccaggttgacatgtattggacaatcaatctggtgcactgcttatgaattctcaaatgccaaatttgatttgaccaatgaatcctaaatggtcaaaaatagggtaggagacccgcctcaagttcaagaacattggaagtatcaaaacgagatccagagagctagggaattagtacccagcgcccaggttgacaaatggcctagtgcgctggactctacttatctgattctgattttgtttcgaccttccatctagtttttcaaaataactaagatccatgaagtttgaaaaatcaaattcacaacttcctatttctcatttccaacatgggaaactcactgggaaaggaagagttttgagtctctcatttccgcaagaactggtgaccagcttcgccaaaacacaaaaattgactaagtaatgtcaaaatatcacttaggcatctcaaagtacatcccttggacgttttcacacttacccagtgtccaggttaatgtcatatgtcaacctgtgtgttggatggcactcagtcatgaactaccttcagtaaaacaaccataactcactcaatattgatctgattgatgcgatttaagttgagttttgaagctatttcaatactctatcatgtcatgtgtcacacttaaatcacaattctaaagctatcgacacaaaattttaccctaagatagttacaaaaataagctccgaattacctgcagcgagtcctaccgagctccgaaaaatgactatcaccatcataagctaattttcactgttggatcatcatataaggtcaaaaacatctaatttttatccttcccctatttttgtgagtcgcattcacctataatagctcattttttatattcaaaaaactatccacaaggttagagtttctctctagaaatcgaaatttttgacacagcctttttctgtaataccatctcgtgagaaataaaaactcgaagtagacgtagctctagtcctgtcgcaatacagagagtaaactactataaatttgttatgtatctcttacaattacttaacaactatatcattctcgtcaatctagtaattaagcgggtgtggcttagaagtttagtttatatttctgagtcaacaccttttttattcttctttaaggtgtttttacattttaactggatgtgaccgaatctctcacataccctgtactaaatactctagtttgaaatggtataagaggagaagagttaccttttaatgccttgccattaaatttcttattttcaattttcttaatatatttttgaaaattctttgcaagcattaccatttcattatcaccattttcatcatctgatgcttcttttttcagtacttttgaaagcaatggtcttctctttttctttggaagcactcagtttctccttttgactaatcttttgattcaattcaaaggtatgaagagagcccatcaattcttctactttcgtagaactgaaatcatttgcctctttcatagcagtgagcttagtgttaaacctgtcaagaagcactcaaataattttctaaccagaacataatcatcaagtttctcact

SEQ ID NO: 253859 - DNA, 685 bp, Cannabis indica
ttttagaatgtgaaaaatgagctaagggagctctccttttatagatgaaggaggcccacaaaactagggatgaaatacaaatatattttttgaccatagatgagtatccaacagtgaaaattagcttctgatggtcatagtcattttttggagccagacgggacccgctgtgagtaactcaaaatatattttttgtaactccattgggggtgacatttgaggtctatagcttcataattgtaattaaagtttcaaatatgaattaatagaatattgaatttgtttcgaaatgcaagttgaattgcatcaatcggataattattgagtgagttatgactattttactaaaggcagttcataactaagtggccaggaagacatgcgagcacccatgttgtcatatgtcgtcaaccttaatgctgggtaagtgtaaaaacatccaagagatgtactttaagatgcctaagtaatattttgtaatcacttaccgtgcatttatttattttaagttgtagatatccaaatgtggatatatatatatatatatatgaataataagatatgatctttgaatctgaatgttaaaatatttatactggttgtatttttttcacatgtgaatgtattattttatatttttaattatataattataaaaaaataattaaattatatttttaataaa

SEQ ID NO: 253860 - DNA, 1152 bp, Cannabis indica
caaaccctaacaaccctaaatcatcaatttgcatattcaaccaaaaaaacaaagcttcaacaaaacaagattaagagtcctagggcttacctaccccaattactccttgaatctaagctaaatttccaggaaggagggatgaatttgctggttcttcttggctttgtgaaggtcgagcagagagagagggaaagaaaaatggaaattctcttaatttttccttatttctcaaatgaataacttaattgattaaaattaatcttttggctgaaaacaactaaatggccagctaccattcacacatacaaccacctaataccccctttaaaaatgactaaaatgccctttaatcttagacttaagctaacttaagcctaggggtcaaatggtcaaaaatcataaccccgctcaaactcagtattctatttatctccaatataaaaaccccctaagaaaaaggttctaaaaaataccaatgtgattcaaatggccatccatcgcattttccatcgttgtcgaacaaaaattataaaaataacataattcatatataactcaaataacacccttagactttaataaaatctccgaaatcgagaattcatatcttaatgcccacttttaataatgggacccacaattaaataaattcataaataactatgaaaataccaataattattgctaattgtctttactaatccatattataaaataccgtcatttcaattatttgttgggattttatgcactaaataaaatccattacaatctaatcagatttgttatcaataagagattagaagtgatttatgttaacatgtagttttcatgtttatggtttaatatatgtacaaaatctgttaagtccagaacatatagtcagtcacaattatagtgatgtcaacacagtggaatgtgattgtgattatatgatttgaaagacaaagtccctgtttcatcagtgcattagatttacactgatgtgataatcagcaatgaagtgtacttacattttccataagtgttatgttcgttccagaatattggcaaagtatactagtttcgaatgtatggagtatacattagactggaccgatattgatcttggttaagatattataatacttaccattgtatctttccaagtca

SEQ ID NO: 253861 - DNA, 1142 bp, Cannabis indica
tattgagaactcccggactgtgacggctgaagcggtgttgccttgctcttcttcctccacacagaagttccattcccttgaccccttaatctccattttcttttcttttgtgttgagtggtagtgcacgcaaaagagattgttttttgtttattgagtgcaacagctgcatatgaatagattcttttttacggaaagaaactcaatgacttaattctattggctgtatattaataataatttaatagttgaggaattagtttatattggaactatgctagaattcaaaaaaaaatatcaaaagagtgtaaaagaacgtgtaatataaagagtctttagcattcctcttatatcaaatggcaccatttttgttttttagtgtgtgtcaaaaaccaccctttgaagattctttcccttttctgttcatcaaaaattatcatttgtggatcataacaagttccaaatgcttaatcataaaaagtttcaaatgcttaagacctctcaactcattacttaagagcattctttgccaatacacttgagatatttattaaactaaatgacacaattatatagtttatagtttttgtaacatttgtaggaaaagtgtaagatatggccatcacccaagtgaggtaaagtgaaatgttactaaatgggtcacattagtggcatttgaactacaataataatttgaggtttttgttttataaatataaaaaaatgtagtagagtttacttctatatggcataaataaataatataaaaaatatgagattaaaaaataattaaaatttaaaatataaggaaaaaaaaataataaatgaatttaataaagtcacacttcgccgccggaaaagtcactagaaaagttattataaaaatcaccaaaaaagtttttgaaaaaatcactgttgccgaaaaatttgtcatcaccgaaaaagtcactatcactagaaaagtcactaaaagtagatgtctcaaatataaataaaaatagaaccgattttataacatattgaataaagggattatttcacaaatacacaaaaataacaaaaaaaattacaaaaatacagtttcacggaattttaaacatttttacgaatttttaattttatttacagaaaatacggtctttt

SEQ ID NO: 253862 - DNA, 799 bp, Cannabis indica
ttaaaggatttgtaactcctattttgtgatcattcttaacggttactggttggagaatctgcatcgactacaaaaagctcaataaggcaaccaggaaggacaattttcctttgcccttcattgatcagatgttagacctgttggctgggaaagagtattactgtttcttagatggctattctgggtaactatcaaatagccatataacctaaagatcaagagaagacgacatttacatgtccatatggaacttttgctttcaggagaatgccctttggactatgtaatgctccagcaacatttcagaggtgtatgatgctatcttttcatatttgattgaaacatgtatagagatctttatggatgatttctcagttttcggttcttcctttgatccttgtttggaaaactaggagaaagtgctaatcagatgtgaggagtcaaacttaattcttaattgggaaaagtgccacttcatggtaaaagaggggatagttctggggcataagatttcaaaggcaggcattgaggtcgataaagccaaggtgtcgacaatagaggatttaccccctcccgtttctataaaaggatataggagtttttctgggccatgttggattctatcgacgattcatcaaagacttctcgaagatctcaaaaccgttatccaatctgcttgttactggggttccttttgagtttggggaagcatgtttgaaggctttccaagttcttaaggagaaattgatatcagcgccgatagtcacttcaccaaattgggagttaccattcgagttga

SEQ ID NO: 253863 - DNA, 573 bp, Cannabis indica
tttttttgtttttggtaattttacaaacctttaaaccagctacaaacaatcgactcaactccggtgacagctacaaacggaaaagaaacatcttgattccttaacaaaatctacttccgaccatggaaacaaaacgggttattatgcggaaaactggacgaccctgacgccattaaagcctgtacatgatcttgctggacgattaaaggtggagagacatcggacgatgaccaatcgccggggcttgagctgttgagggttgtgcgtggagcctagtcggatggaggtaatttttggttatgcgtggagcctggtggtgaagcttcagatgttgaacgatgatggtgggactgagctgttgtggtcggagtagaggtgggaatggttgcagagaatggtgatggtgaatggtgggggcggctagggttgacttgttgaaggtaatggttgatttgggggtcttcttctggataggggatggaggttctgtcgagaagaaagagaaagaaaaagaggaaaaaaaaaaagataaaaaaaagaataaaaaaaaaggtaaaaaaaagtaaaaaaaaa

SEQ ID NO: 253864 - DNA, 637 bp, Cannabis indica
cttccccattcccatgattgatgagctccgtgttggctacatagggctaaggttctttttcgaaactggatcttaaggtcgggataccaccagatcagaatggcggcacaagatgtagagaagatcgccttttcgtatccatgaaggacactatgagttcctcgtaatgccattgataagccttttatattgataggctacctattacctttgtgtactcccgaaggtctaggaaatgggctgcgagtcatgctggagagaattagtgctgatgtggcaagtaagtattggtgaggtgttttttgctttgtgcgtgtttatttgaataaaagttaggaagttagcgtttgggggaattatgatatttctgagtaattgtaaccatttgggagagaatcaggctctcgaagtcgtggaaatttaatacaaaggcactgccaattttcatccaaagtcctctcggttatatttgttctttcttttctgtaattagcttcaatttgatagggagatcctatcatatagattgtggatataatagaaggacacataagctaggatagagggcttttatttgttttgtcttattcttatcatggtatccaaggacgttaaagaaaatgggttcgataatgaa

SEQ ID NO: 253865 - DNA, 2367 bp, Cannabis indica
ttagctctttaaggaactaagcaagtacaaagtttgccttgcttaccaaggcattgctggccagtcgagcgagtgcatcggccattgcatcttttttgcggacttgtctttaagtacaacctttgagcaaacttaacaagtcttgaatctagctcaaataggccataatcttttttcctttaagttgtgtattcacctaagacattacctacgactagttgagagtcgtggtgtatgtcttggtgttcatcccgcgcttcgtgtgttagcctaaggctagcaatcggagcttcacatttccccttattattagaagctttgaaattaacctttattgcctcatgtagccattgcccacaggtgccctaagggagatgcctacactgggtagttggtaattgcaccttctaggttgagtagtcttgctcttgctctcgcttcttctttctctctggcttttctactgaatcatgagagatttggggagatatgctttatatttagcttgaagctagtgagatcttggtctttttatggccatgctagattgacatgttaccttatattggctgagcacgatggctcaggtgcttcaggtattggtggcacgtattgccatggccggttggcatgcattgctttgggaatttcggtaggagagtgaagtatgcgcacttctcctccttctcccttatatttcatggcataagggaattgtggaattttgcttttttgtcattattctggctagagtcatcattgttgcgcttgccaccaatattcccattttcggagaattggcagagattttctacactggccggcatgtcaaataatacttggcgtagtatgatgccctatgtctattcaacattgatctaccctcttgtttgggcttgccggaaagcttcttccaacttgatgaagccatctgatcgcttaaggaactttgtcatgtttctcgttgagatccttttgatgtctttctagaattcactcaacgggaagatgcctctgagtatggttgtatatcagccttcctctatgaggcctttgacctttgtggcctcagccatgaacctttgaatgtagtcttttaaaggctcatcttatctttgctttatttcaacaaaatcctccagtcgcgaaggtatttatcttgaggtagaaaatttaatataaaactcttaggagaattattcccaagaattaaatcttcttagggccagcttgaaatatcactgttgggctatttagctagggttgctgagaagatttggcattgcacatctctaggtacttgttggatatctgttcagatcttaaagtattttaggtgtgctaggggatcttctcgtgcagtatttattttccataccggaattttgaacttgggcaagggcaaggcattgatgtatgcaaagaatggtgagccccttgacctatccaatttaaggtctgatggtttcgggccagctaagcccttgatcatgtcttttatttgatccaactgtgctttcacaaaaggatttgatgttgcagaggcctggttgattagcccttcttgattggtcagcaaccctaaatttgttaaagcctggctggccataccctagaagagggtattcaaggccggctagccctaagcctgatagctggccgtggtcggccacctctgtataagggaactagccctggtcgaccatcctacactgggaaactattcatggcaagccaatcctatgctaggtagggcctggcttcccgttgttccttgattggctagtgtagcatgtgtgttagtagggggtatatcatacaagttgttggaattaggtggatctaagtatctaaagtgatatgtctcatttctggagttgtcattatcttggttgtttccacccgtttcagacctagcaagttaaagattagcctttgggtgacttgctcttgcattttctgagatcgaagttcaccttgttggtcggccagaggtgcaccactaaggggctggctggccaaaggttggccaagcgagggtgttgtcaggccagagatccctacccgatcccccaaactggtggttttcaaagtttggttgttctcaccactagatccttgtggcaagacttttccatcattgggcaagggaaggtctgtcctggttccaaaagacctagttggatcgtttgtctgtagaccctactcaatctgtcaactagtctctcttggtagaggagtctatgatgagatcctgacctctcccacgtagttctttcattaaactggcgttattaggtcacttgctttctattataacgcctagctcttcttgatgagatcgaaaaatagtactcctagtcatcc

SEQ ID NO: 253866 - DNA, 688 bp, Cannabis indica
aaaaattcctagaagccaaccggaattcctgttccgacaggcctccctgaaccggaattctggttcattgcaggaaagactaaaaatttcataactcgaccaaatcaaccccaattcaaaataataaactacaaagctcgctcaaacaaaataacaacctctaaatgaagcataaataaacataataaaccataattaaacctctgaacacaacaacaaacaagtacagcaaccacagcaaacaaacttcaagcatgcaaaactattctcttccttacaactcaagaaatcaaaaagggaagttacaagaagcttaccaaggacttgagatcactaaatccttgagagaaaatcttgaaatccagagaaaaacaatccaaccctatctactctaagtgggctgaaagagagagagacttgagagtgaaaatgaagttattttctaacttttctaatttttcataaaatgagtaaatgaatgattttccttaatttattacattgcttcagccaaactaagcttcaaaaatcagatttaaaacataatattaaaccctcactaaaagacaaaactcaataggcaaaaagactataatgcccttgcctatactaaagagtcacataaatcactaagggtattttgggaaaactctaaattcccgactatactcgacattcccaatgtcta

SEQ ID NO: 253867 - DNA, 586 bp, Cannabis indica
taattaaataaaaaaattaaacataaaatctcaaattttcttaatactacttattcatacccatcaaatagtcatgcaatattttgaaactgtggatttcagtttagataaatgtgattggttaaaaaaagtattaagttactgtgtgtaatgttttgatatatattttgagtgcacatattattactcgtatataatataccatatgcatcttatatatcatgctttaagcaataattaaatgtggtatttttgaatcacaaaacaaacatagagattataatgatatttatgatatgatatgattatgcagggaggatctggttatggagaaaacatagtgttccaaaacatagcaatgcacaatgtgaccaaccccattatcatagaccaatactattgtgatcagaaggacccttgtccagaacaggtgatacatatgaataatgaggtgtttgacaaaatactcaattttgttttgtttttcggagtaatgatatgtgcatctgaaatatgaaccgaaacattacacttagtaataagaaaatgacacataaatattgacttatagaaattttaaaaatat

SEQ ID NO: 253868 - DNA, 1004 bp, Cannabis indica
ggccaacgaaatttgtgattcacacagatcacgaatcccttaaacatttgaaggggcaacacaagctcaataggagacatgcacgatgggttgagtacattgagacatttccatatgtcggtataaacatggtaaggagaatgtggttgttgatgccctttctcgcaggtatgccatgatctctactcttaaagctaaattacttggttttgaacatattaaggaactttatcctgttgaccatgatttttgggagatttatggtgcttgtgaaaaatccggtgagggtgagttttatagacataagggtttcttatttagggagcataggttgtgtgtgcctaattgttctttacgagacttgttagtttgggaatcccatgtagaagggcttatgggacattttggagttgctaagaccttagttatattacaagagcacttcttttggccacatatgaaaagagatgttgagcaaacttgtggtagatgtgtcacttgtaagcaagctaaatcgagggttcaaccaattggtctttacacaccactacttatccctagttcaccatgggttgatatctcaatggattttgtgttgggtttaccttgcagtaaacatgggagggactcaatttttgtggtggtagatagattttctaaaatcgctcattttatcccttgtcataaaactgatgatgcttctaatgttggagatttatttttcaaggagattttgagattacatggtatgcctagaacaattgtatctgattagggatgttaacttcttaagttacttttggataacattatggggaatactttggacaaaacatttattttctactacttgtcatcttcaaaccgatggtcaaacagaagtacttaatagaactttatccactttattgagggctatcataagtaaaaaaattaagacttgtgaggattgtttaacacatgtagaatttgcttataatcgttctatgcattctgctactaaa

SEQ ID NO: 253869 - DNA, 537 bp, Cannabis indica
tccccactcttgttgcacgttagattgagtggtttgggaaaatggaagtaggatgttgtagccgtcagcaatcggatatatcataccccccaaatgagctgagaattctggggctcaaattctcgatcatttgctttgactctgacttgtgtctctttccaattttcgaagagtagtgtcgagcatacccttgcctcatatcttcctctctaagaagtgtgcagttaccttctaacttttaggaaggaaaaccaggagctctgggggagaactcaattgtacgtttcagcgtcccttttcatggtgaaaaccctataagggagattttaggctatttatgttgtggggcccgttagtttcctgtggggaaagctaggcctgcgcccttagaccattgtccttgcgtaggggtttgtttcagcaaaaatcatgttaaatcttatggcaacaagcttttggctttcactaggaaaggcagaaagtgcgcacgagctgggacagtgaattttcttggaaacaccaaagggtgaagtactg

SEQ ID NO: 253870 - DNA, 585 bp, Cannabis indica
atcttcctctctaagaagtgtgcagttaccttctaacttttaggaaggaaaaccaggagctctgggggagaactcaattgtacgtttcagcgtcccttttcatggtgaaaaccctataagggagattttaggctatttatgttgtggggcccgttagttttcctgtggggaaagctaggcctgcgcccttagaccattgtccttgcgtaggggtttgtttcagcaaaaatcatgttaaatcttatggcaacaagcttttggctttcactaggaaaggcagaaagtgcgcacgagctgggacaatgaatttgcttgtaaacaccaaagggtgaagtactgttgggctcacaggagtcatgcttgacttttgtaaaggcaagctttggatctagggaggaaggctaaagctgtctgcaagttcaagcctagactctacctgagaaggtcacaaggggaaggataggctttaagcagtcctttcaatctggaaaggagggttgaagacgtatcgtacccccaatgatctttcctgcacaaacatacatgcgagtcatgttgaatttttatataacaagctttggcttc

SEQ ID NO: 253871 - DNA, 2144 bp, Cannabis indica
tgcttgttctccatgacacacactaaaaacagtcaacttctcatttttttcaattacaaatgggttgttgtctttattttggtccaaggcccactaaatgtggtggacctaacaaatctccccttctgccttaattagtgggctcaactatgcccactcttggcctacacgttttaagcttctccttagacaaagtctttgccaacatatcgaaaccattctcattggtatgcacctttcctaagtgcaactctttcatatcaaggacatcaaaaatccaatgacatctaacatcaatatacttgaatcttgaatggaatgttgaattcttgtagaggtgaataaaactctgactatcacaataaataatgaaatcatcattagaaaacttttttgtagacacacaatgatcaaaagtagttcgggtatatccatggatcgacatgaaggaatcaaacttcttgtaccactgtttaggtacctatttgagtccatataagcttttttctaagcttgcacacaagattctctttcccttaaatttgaaaccctttggctgccccatgtaaattttttcttccaagtcaccatgaagaaatacaattttcacatcaagttgttctacttctaaattcaagcgagcagctaaactaagaacaactcttatagaagatattttcacaataggaaaaaatatttcttcagagtaggagaaaggatttcaaaatcaatacctttcttctaattgaacccttcacaaccaaccgtgccttgtatcattgtgattcattgtttacagtcttatccatgtaaacccatttatttttttagagctttcttctctttaggcaacttcaccatgtcatatgtgtgattctcatgcaaagaactcaattcctcttgcatggctccatcccactcattattatatgcttatgttaggataatttcttggtaagttttttagctctccctcatcagtgagcattatattcatgagaattgtattttgaagttggtttacgcatgtaaattgtgaataagatttatttggtaaataaaataataaaaaaaaagtataaatattaaccatactttatataagtaaaattataataaaagtaatttttttatatttttaatgtaattcttttttttattatttttaatatctaaatttgagtagttagatacaacttaaatttaggtcatatcttttttttattaatttgtgatctcaccttcgaaccaaatattagattgataatatcagtacaagttagtgtaacctcttttttcaatttttattttggaggagttaggtgtaacttttataaaataatgatttttaaaagtgtcccatgtgccactagttttctattggcatgtattataaccacctaagtttttgtttttttttttttttggaagaacaaaattcaataattaacaagatagatgggaatcatagggaaaattctcttccttggactgtacccgctcattaactagcaactctagcacttttacccccttagaacttagaagattctcaaaattttaatggctaggatttttactcctaaattgttacgatttccagatggtcttctcatattttttttttgtttgttaaattttttttcaaactatttataatgtattaaatttttgtttaaattttatctcatatagctattgatattgatgtagttgatgtgttattatcatattagcaccttatgtgcaatttatatttttttttattaattatcaataaataaaatttatataatttcaattttcttattaattgttgataagaaaatgaattttttaaattttaaattaatttttatttaattatatacgtaacgcttacatgataatgatatatcgactacattaacactaagacacgtgaataaatcttaacaaacgttctatattttagcattgtaaatagttctgaagattaatcgagcaaaaacgtttaaagaatacaatttaatagtagtatttatttgggaacagaaattctaaattttatattctccctttagtaaaagataattctaattcatctaataatttcaaaatgagagagagagcgagattagctcgtttgaattacaaaatgatct

SEQ ID NO: 253872 - DNA, 895 bp, Cannabis indica
cattgtttttttccttactgtaagaatcaaaaagaaaacgccaaagagcatcaaaactactaaaattgttaggtaacaatttcgaatcgatgtcattctcctataagctaaattaacaaagattaaataatcttttccatagccaaaaacaaaggaagctttattagctttcgattttcccgctttttctcagccacacaagaaaaagaaactcaaattttttagaagaggacacaattgcagatctaacaatactcaatcacacaaaatcaacaatacaatcattacagagagagagtaagaactgaacctggatactcttcctcttcttctgagcttcggaacgcttaacgagatcagcgacgtgtcgaaaccttcggcgagggtttctgacaagagcaacggcggatctccatttgcgctgagcctcaggcgatggatgcttggactcgacagaaaaatctttgagaaaatagttctccataataccttattatatatatatattagaattctatacaaatctgaagagattgaatgatgtagttaggtttatgtattgagttttggagtctgaaaaaaggtttcctccattacagagaagagaagagaagaggagaatcagtagagaagaagaagattatattaggaagaactcttcgcattgaataccatttatttatttgcttttgttctcaaaagataaataaataataatcatacatttattgcatatatatttttttatataaataagtaaagtatccacctcccaacaataatttttaaaagtagaatcgataaaagatatatatatactaggtggtgaatgtacttgcctctagccacgtattgttagtttattatttttaaagtattactaaattttttgttt

SEQ ID NO: 253873 - DNA, 720 bp, Cannabis indica
aaattccaatttcgttctcttagttaaatgaattgtgatttagaaagtcaatcaaaaaaatttttgaaccatcgggtgagaaaacttttcgtacaagtagtgagtgggccaaaatttgtacttataaactctagtgtgctatgcaaatcactttaacaagactaaagtaaatttataccatttgatttagtgtagtcttgatgtagattagcttcctagcttgatttgcatgttttgaagtgtgggtgtgccccaagtgagcacgcagacctaagctatcttggtcactagcaattcaccaagtttcatagacctttcttgagaattttctaagggttcttccgagtgtaaagatgtagaactgaaaaaagaataactttaagaagttaatcttgctagaaagtgattttgacacaatatatttgaactaaaacactgtttttattcatcaattggtctttatttttgtgcaacctacataagttgattctacaagtttaaaaaataaaaaagtcctcttctagaagtcaagttgctaccctcacctaacatgccaattagaggccattaaagagagataagagaccatgctaaaaggacatgagtactagctcttttaaactaactcttactaatgagttaatagaactactactggagagtatcattcatatgatctggtcatttgtagtacttcttgaggtcctcctgtcacgcccg

SEQ ID NO: 253874 - DNA, 589 bp, Cannabis indica
ttttttccacatcaagatggacaagaagaataacttgggttaagcgagatacaattgtccaaatcagtattaaccatcgaaaaggatgacaaaaagcagttaagtaattatcaaatattatcctacatgcaattaaatgaaacatgagaattgttcacgtttcatgaacgattatattttaaactgatcccaaacctatattcctataaataagggtagattttatatataaaaaaaaaaggctagagaattttgggaaaaaatattttcaattaaatattgtattttgtattaaaaaaacatcataaataagataggctcgtggagtattaactgcaaaactacgtaaaaatatctggagttatttaatcgtttataattatttcttatttcaaaaaaatatttattattgaaaaacttattaattttggttaacgaaaatctgtgttatgattatttattttaaatatatataaatataaatattatttgttttaagttaatttaacttatactaattttaaattacttttaatatttataaatattaatatattatttgtattattattatttcttattattattt

SEQ ID NO: 253875 - DNA, 900 bp, Cannabis indica
cttcatgtaaatttttttgccctaactcaagaaaatttcaagcttcttgagttttgacttttctttgaaaattcttgttctttaatctgttgagtactcctagtcggcatatttgcttgtttgtcgctcgatattctgaccaaacactcatcttgtgtgttttcttttatagatgaacccaggtgagttttgggagagcgaacatcggatcgactaggacctgcttcaacttttgcacgaggatcatcctcgtcttcgttctagcccaccttcttctagtgaaggacattctccaaattttatacccagccataaaatgatggctcgtacaaagaaaacaacatgtttggttgacgcatccgatccccaagtggctcggcacgccacttgcccagcggcgaacaggatccagccgtctaggtggagggggatcatgaaggggatgctaaggtccaggagattgaggagcagggcgatgtacatcctagcagttcctccaaggcggaggaagagacagaggttgaacccccaaactacggggagtacaatgaggctggggagccagtcgatactgacggagacgtcctggttgagggcatggactacgtcagtgaggagcttactgttgcggttcctcacagaaggaaaggtgccttgggcgccaggtgggtaagccatccgtccaaggttactgaggtgtgccttcggactctcgacgagggcggatacctgggcgaattggattgctacattcccgcccacaacaatcgtgacacaaaccctgaaagggggatgtgcgccttgtcgggtgcccatgcccagcaaggggcattgatgtctttgcatcaatatttcaagaatgtggcagacttcttcggcctttgcccggcctagttcact

SEQ ID NO: 253876 - DNA, 789 bp, Cannabis indica
gtcataaagagctcgagaccgactgtcctcaaaggcatcggactttctcgtcgcacgcctccgccacctcacgccgtaagcctcctcctccttagacttcttctcctcttctagctgacgaaggacaacttgaagggatgtcctttcatcttgaaggctattcacttctgcagataaggtctcgatggtctcttcaagtcggtcagaagcctcgagatccatagtcaacttggttattttcttctgagcagtaaaaagcttcttgttaacttcacccagctcaatccgaacagctccaagttccaccctggcgtcatcagcgtccttcctggccaagtccacctccgccctcatggtgttggacagagcccgcattcttggaagcagcaaacttagctcgagagtatgtgtaagccaacttcagacgagcttgcgcagagaaaaaactttagaatctgagccaaataaagaggattaaaggaaaatgtcaagaaagacttgcccttgtaaattcctttaagactcctcccatcagcagctccaaacaagagtcgttgtcaacaccggccagttgctcactaacctcaagaacccaccgggtcatgtagtaggcaagcatctccttgcctttcttggcctttggaagcactggcaaaggaggagtaggagcccgcatctgctcagatccaccttttggttgctcgggtctgtctgaacttcctcctcgagaatccttggacttaacaacttttggactggaggggttcgcaacagttagttcctcggaaa

SEQ ID NO: 253877 - DNA, 632 bp, Cannabis indica
tgaaagatggattgtggccaattagggcttggagaaagtcagtggacttaaagtaacgggcctttaggagagaatgaagaagggaatccggattagaccatatcctccaagcctgtttagccagaagagcttgattgtgggaagtaagggatcgaaatcctagacccccaaagaacttagacgcagagatggcagaccagcttttccagtgtattttcctgtggttagtatttgaaccccaccagaattttgcagttaaactttgaatggatgcacaagtggatttagggattctaaaacaggacatagcaaaagaaggaattgcttgaataaccgatttgatgagggtttctttgcccgccctggagaaaagcttttcattccaaacattgagcttagaggaaaccttttgaatgaggtagtgaaaaatagaatttttaaccctgcctatgcaatgaggaaccccaaggtatttgctaatgaagccttcaccattgagcaaaagggaatttctgaattgggattgtgaatcaggagaggtatttggagagaagagaattgaggatttatccctattgacagattggcctgaagcttggaagtaaaggtgcaaaattctgtttatggcttca

SEQ ID NO: 253878 - DNA, 767 bp, Cannabis indica
atcacatattaaaactgggtaaaccacacctcaaaacccgaacctacaacttaaggttttgatattactaaatggaaccccaataccctaggaaagaggaaataacccaaccaagggactaaaatggaaacaaatcgaggaaatgtgttgttcggagaatctgccaaaaccgattaaccaagtttataggtcctgacaaaccagttaactggtttgcaccagatttccctaaacatttcacaacctattcaaagcatttccaattgccaccaaactttccagaacacctataatgagcttacacaatcatttctaatcaaaagaacccataaaaacacacaaactcaaaatatgccaaggatgaaccaagcttgagttttccaactcaaacttgtgcatccacgctaccaaacctccaaacagtaataaaacaaccaaaccaactctaattaagcttcaaattcaaaccaaacataaaccaaactttaataacccctaaatctcctatatgcataactaaccaaaaataaagctttaaaaacacatgattaagggttctagggttaccttagcttgattcctacttgaatcattgctgaattttccagaataaaggttaaagttgctggtttttctcgggtttgggttggccaaacaaggagagagagaaaggaggatgagtttttccaatttcttgattttttttctctataagaatgaagattaatgaattaatcttttactgaaaatagtaatggctaggtttc

SEQ ID NO: 253879 - DNA, 752 bp, Cannabis indica
aatgatgctgacatctctcccttcaattccactctgattaccttgatccccaaggtcaaaaagcctgtctccctgaaagactatcgtcctattagcctttgcacaactatctacaaaatcatttcgaaagtcttggcaaataggctaaaggttattctcgggccattgatttccccaaaccaaagtgctttcctcaaaggccgccttatctcggataacattcttatggcgcaggaaatcctgcattccattaataataaaaagcaagggcgtgaaagttggatggcggttaagctcgacatggccaaggcttttgaccgagtggaatggaaatttctccataaaatgatgcagaaatttcagtttcctagcagattcatcaagctggtcatggcatgcattaccactgccactttcaaattcaacatcaatggccaggccctggggcttgtcaccccatcgcgaggaatcaggcaaggggatccactctccccatatctctttctcatctgtgctgagggtctctcaaccatttttaaacgagtggaacgacaagacgaagcttttggcataaagataacccgctcagcccctaagatttcccatctcctgtttgcggatgacagcattctattttgcaaatcaaacatccaagcttgtaatgctataaaagaagccctcgaccaataccaaaacatctctggccaacaagtcaatttccagaaatcctcactgtttttctccccaaatac

SEQ ID NO: 253880 - DNA, 966 bp, Cannabis indica
caaacatacacgtaattgtaaaaatatttatcaaattaacgttagtaatttaatgacttctaaatagtactaacaagcaatttaatagcgccacttttactaccaatgtacgccattgctgcttattataatatgctgtcggtgcggtacagtttaaaccgcatattaataatttaaaactgcaaaccacactgcactgcgcgtttaagaaaaattcaaactgtgaccgcaccgcaaagaattataaattgtattttttttttgtaatgcagacaatttgagcggtttgataaacacccctagctaaagtaggaagtagaataaaatatttcatttagaaatctcggtatagaggggattgaaatcctctgtcccaattgcatgtcccattgtctgtcccaataataaaaaactgacacttgtcttcttagttaattttcaactaagacttgttttgtataatcaaagagtaaaacatattaaatcatttattactctgtttaaaatatttatatatatagagagagataatagaaaaatgaagacaagtgttttttctttttttggaggtggatgaaataaatctgatgataatctatagaactaatcatacttgcccatattttttttttaatcagccataaattaaattaatataaggaattcattcacttgaatcatagttatttttcacatatatatatatatatataaatatatatattgggggtttcttttacaagtgcatctatttccttaggcatatagattaaaacatgttgctttaggtaattttaattgaacatcattcacaacattgcagaatccaaacctgaatatgaaaatttacagaattatatgtattttttatatatatatgtatatatgagatgtggaaataatactaagtatatatattgcattgagatcctattatttgatttatttattggtattaagttatgt

SEQ ID NO: 253881 - DNA, 720 bp, Cannabis indica
tgattgactccagaagacccgaaatatttgggcctgaggtagtcaaagttgttaaagattttctttacatttttcttgaggagttgttgggattactgccacaacgagaaatagactttgtgattaatttggcacctggagccgaacctgtttctaaagctccatacagaattgctctagcagattgatctaggggatgctggatattgggtttacccgacccagtgtattgtcctagggagctccagttctgttcgtgaaaaagaaatatggttcccttagaatgtgtattgattatcgagaactaaataagctgacaattaagaacaagtatgcgttgcccagaattgatgatttattcgatcaactttaggggaagactgtattttcaaagattgatctacgatccagttttcaccagcttataatttcggaagaagatataccaaagactatgttttgaaccagatatagacaatatgagtttttggtaatgtcattcggattgaaaaatgctcctgcggcctttatggatttcatgaatagagtattgaaggagttcctcgacaaatgcatcatagtgtttatcgatgacatccttgtgtacccccagtcagaagaggagcatgagcataatcttcgaatggtattacaacgacttagggatcacaagttgtatggaaagttcaaaaagtgtgaattctggttgtcagaggtatc

SEQ ID NO: 253882 - DNA, 708 bp, Cannabis indica
ttttttagggtttaaattattggtttagaaatcaaattttttgattttctaagtatagaaaatcaaatttccctatataaattataattattgtgtgtgactagtcacgcaatttagactgtgcgtgactccattcatgacctatatatacatatgacatgtgtcgaagtgatggtgtcaaattatacaagtatgagaagtggtgaacaaggtgttgggacttctaaaaaaataatttaaagggccaaagggcctgaggtccaggtgccatgatcgccaagtgcaccccaccttgacccagaccaaactgtctcgccatcgccacactacaccatctcggcaccatgtgaatcccatcatctcagccctatgccaaggtgcaccatcacaatggccccatgctgaggtgcactaccacattggcagccatggccgaactacctcggctaggtatggcatctcaacctagagaccgagccacatctgctcaaaaatcattgttgctggtcgtgtttagtgaagaagaagtaaataaaaaaaaaaatcttttttcggtatttattttttatttttacatttacttatttgtatgggcattttacaattttgtatacagtattttaatttattacaaaatatgtccaaaaaaaaacttattaccatattctcatacattttttatatattttttgaaatgaaattcaaaac

SEQ ID NO: 253883 - DNA, 834 bp, Cannabis indica
caagtgtagtagggagtttgatgtatgttcaattttgcacttgacctaacattgcttttatagtcaatgttattaagagatatttatctgatcctagacatgatcattgggttacagtcaagaaagtcatgagatattttcaaagaacatagaattttatgcttgtttataagtatgtcgacaatctccatgttgttggttagtcatatttagattttggtagttgtgtagatgatttaaagtcaacttctagctatcttttcacattggttggtgctgctatttcttggaaaagtgttaaacaaactttaatcacatcttctactatgtatactgagtttttcccatgttatgagatatctttacaagcttcgtggttaaagaatttgattttagagatacaagtggttgattctattttctcttctatactaatctattgtaataatattgttattttatttttaaggaataaaaagattagtagtgcttccgtagatatgaaaacaaagtatctcacagttagagacttggtcaggaaaagagatattgtaatagaatatctcaagaccaagtcgatattagcagatcctctaaccaaatgattcagtgccatgttgtttaataaacatgttgatatgagaattttataatctttcgttcctttaagttagtgagagtttcttattctattatttgagattatatttatatataatttttttattgatgttatgaactacttaatttattttgtgggccaataattttttaattattagatgtttatgcttttaattatgttttttttatattctcgagaataattgaatt

SEQ ID NO: 253884 - DNA, 878 bp, Cannabis indica
cagcaagtatatctctgctcttataatatcgacaacattgtggcccgagcgtattcgtacgagcatgaggataaaatcactgttcactgcacggtcttccccatcgttttgacgaacgaggtgtgcccaacttgcctgaggagagatcaactctgcaagggaggggctcaatttcttcaggaagggtcggggatggcgatgttgggaggatgagagtcgacgactcaccagaaacttgttcaattctttcttgaggaccgttaagttgggacatgagttacgggccttaaaagaagggcaaaaggccaaaccatccaaggctttttgttttcgccgcccatgaagatgctcctcaactctaaagtcttcaatgtctaaaaccgggttgaacaaagttggttctctaaagaatttatccacagtgagggagcccatgagaagctcgcgggcttgaggctcagtccaacattgagttgagggccaatccatcaaatgggcctgggtgccaagaatgtaacaggagtaaggaatggagttatcctttgggtctacacttggctcagaacttggcccacagatagccttggacttagaagtacaaagcagagggtccccccagttgtctgtttcccacccaatttatcgttttgcaggggtacaatcccaagtaccttatttgcctctccaaaagaggcatttccatcagtggtctctatcccaaaatggctatccttgatgctatcaaagccctcagcagcacggctaacacggctaacagttggctgtggcatttgttaggctatttttagcctaagttttgggtcacattttatagtcgtttcgcttctttattattatttttggaatagaattacgct

SEQ ID NO: 253885 - DNA, 472 bp, Cannabis indica
ttgagtatgaggaattgaaaaaaaaaagacatgtttgttgttgtcagccagcaacagattcttataaaatcttttgctgaaatgaataagaagctggacattcttattgaggtgtttcttttatttttctttgtggttttttattgttttaatagttttttaatattctcttaagtccgttatgaattttaactttggtattttttcagtcctctcattctgctcatactcacaatagaacttagtctgatgatgctctccgcacttctgaaaatgatgatgatgaagagtctattttaaaggaagatgatgatgctaaagatgaggatgacaaatgagatgatattgttgatgatgattatagggatggtagtgatgatgatgatgatctcgatgaagctggagttggtattcgggcagggtgaggctacaattggagatgtgagtgttggaatttattttaccaggatct

SEQ ID NO: 253886 - DNA, 1641 bp, Cannabis indica
atctcttattcacataatggatttggcttataaaattttacactaacttcaaacttaataagagaaaatgcaatgggtagttgtttcaaaaagccaagtcattgctttattagcagcttcttagttgacttgcctcattaattacatcactgcagtatgtggcctacagtatttaggctatgtttgataggaaagaatgagggattatgtatgatagggaacaacgataaaatgatgggaagcttaaggctatttaggagggatgatgaggaagttaattattaaaattacaatattactattattatttttttcttcgggtcaatgaacaaattcatttaaaatgaaggaaaatttgcaacataaataccttatgttttacagttttatacacataccacatttttaatgatggattaaatacctaaggttatatttccgtgttacttccgtcactactagtccgttaaatcctattcaaatataagagtatttgcgacataaatacttaatattttttggtttcacacttatataccatttttattattttttttgacatttaataacctaaagttatatttatgttacttacagcctgttaaaacttattaaaattcactaagttggcatgtgttaatatatcaatggtccactcatatatttaataaacttacttattaaataattttaaaataaaaaaactaaaaattatttatttaattaataaaaataatcgaaagcaaaaatactatttatagatagatatatttctccctgtttctttttcttctcttaaaatgtaagtgtccttttttaattttaggtttttaatccaccgtgaaaaagaaaaacaagtggtatataaatgtataaaactataaagattaagtatttatgctgcaaaaaattcccatgtttgaatagaaattaacgaactgatagtattggaaatgtaactttaggtatttaatttgtcaaaagaaacatgtggtatataacttataagtgtataaaattgaaaatataaggtatttatgttacaaatatccttaaatagaaataatattgtcatacagcctgatagaatgagaatccctgaaaagagaagggatcttatctagctaaccacacacaagtttttttatccagttgaggagcatgccgaactaattcatgtacaactataatggctgaccaatgaacatgaatcagggacactactgaaaaattcaacatcaaacttgctaaatccgctaacaatgacccatagatcattgtaaaaggaaggttgttaagaaatagtatcaatacctgaaaaaaatcctccgactcaataaaaagtaaagtaaaaccaattgtgagagcccaatacaaagctacaaataaagccacaagttctacttgtatcaccgaaagatgttctcccataagagcccaatctagtgctaccatcaattctattgcttctacttgatcgagtgtgaaacttcttacaatgacaacaaagctaataatgagtacttataaaagtaatgttcaccataaaaaccataaaagtattaattattaaaatgacaatattaccatttgtaacatatacaatgattaatttttgcagggaaaattttcacatttatt

SEQ ID NO: 253887 - DNA, 623 bp, Cannabis indica
atttaagtcaaagttcaacttttttttttatcacttttcttgtcgaaaagctttttctttattaatttttttttcaactgatgaattaatcccaatcccaacccatataatgtaaaaatgaaaaaaaaaaatctaattaaatagaaaacttaattataaaaactcaattttttttaatattaccgattcataggtaatacccattaagagtgcactcatgtgaagaatacactccatatatagtacaaatgttcctaaatatttgcattatttaagcattttaattcagacttttttcataatggtatttgttgctcctgattttgcccaaaatacgtggcccaaccggatgacgacacgtggataagaaagggttagcatttaaataaattagccaagtcttctttgagcaaaggatcatcctggacatgcctcccggagaaggcatgtaaggtctcatatgctcccggggagcatgatggcatcaaagcatctccgggtggtgtcaggtttcctctaaacagtcatctcgcctttaatgccgcatgggaggaagcgtattggaacttccacacgcaataaagtctgacgacacaacccccgatctgtacctactaggctat

SEQ ID NO: 253888 - DNA, 598 bp, Cannabis indica
caacttccaagtattcgcatctctccaaacaagtggattttcatctgaagttatcccttctatcaggaaatttgccaaagtttggcccttgatggatgttcttgggtgataagttatgtcaaactcgcccagttcaattgaccattttatcaatcttccagaagcatctggtattgacaaaacttttctcaggggttgatcagttaacacctttatcggatgtgcttggaagtagggccttaattttcgagatgcatgaattaggcatagggaaagtttttcaagaggtggatatctcaattgttcccccaataaccttttactaacatagtaaaccggttgctggtgcttcccctcttctcgcactaatgctgcacttatcgcattcttcgagatagctaagtaaataagtaaagtctccccagctattggtttagccaagactagaggggttgacagatgtttcttaatgtgtgtgaaggcttcctcgcactcgactgttcattcaaactttttgttgccttgcagtatattgaagaaaggcaggcacttattagttgatttcgaggtgaatctgttaagggcttccattctcctg

SEQ ID NO: 253889 - DNA, 726 bp, Cannabis indica
cattttacccctaggtttgaaattacaaagttaaggttatagagggcattttaataattttaacgatgggttaggtggctgatttttggggatgacacctagcagtaaaatactccagccaaggttaatgtaattaacatttatttcatttgagggaaattaaaaagaaaaatcaagaaaagacaaatttatgaacaacttctctttcccttactctctctcttcgaaccagccaaaaccagggggttttgttgttgatctttggtgatttcaacaagggattcaaggaggatcaagctaaggtaaccctagaaccgtagtcttatgttttgaagctttttctttagtttgagtatgtgattttgtgaattgatggcttttagggttagaattttaaggttcatttgagttggtttaagcttcttgcagctcgttttagtgtatggggttggatttatgcaaattttatttttgaactcaaagctttgttgtttaatggtaagttgagtttcattgggttattatgtgattttctggttggaatatgttgtgtatacattatttaggtactctggaaagtttggtggcaattcgacaatttttgagcaaattggtgagtttttggggagactggtataaaaactgatttaccagttttaccagtacctgtcaaaccggtaaactggttttggcaacgttctccaaaaaaaccacttttctcaattc

SEQ ID NO: 253890 - DNA, 700 bp, Cannabis indica
agattcttcagatgatgatgccctttcattcttagtccgggaaggtgctcctctggagatctagggtagagttttaatagtatttttttttgcttcttattatgtatttttttttaataaatattaaccaagtttttttatctgtacaaccatgtcttctaagctcgaagccatgctaaagagaaaggctagaagctcttctgggcaagaaagtccacccaaagtgtagaggaaggaggagaaaacttcttctaataagaatcttccccaaattctacctccacctccttcaaccaatgaagataacatggtgataattgatgtcactcatcttgtagtaaatactctggtccaagccaagaagaacacttgacctcctcctgcccctccaagcaagaaatcaaaagacaaggcgcttgctccagtttcccctaagatgaaaaaggcaaaggaggcgatcacttattattaccagaaccgtgttcagcccaagttgaacgagaagttgaaagggtcagacataatgcacattgagttcttagttgctgaccttctgaaggatcacaccaaagtaattttttttcctttcttatttttagtttggattatgttgtgttggttttctaacttgtctgttatgctttaaatgaatcttcagctcggatatttgtacttccgcactaaggccatagccatccaa

SEQ ID NO: 253891 - DNA, 547 bp, Cannabis indica
gggacttggcaagctttggactctgctgcctctggggcttcatcttctagaacttctacctctggtattctttcctctggtgttcagctagagaattttttattttcttatgcggctcaaccatggaaaagaattctaccaatgattttggtcttcaagcctgcaactcttttcgaaaatcagttcttcgcaagacacttgtaatcaacatacaaactaacaaagactcgaaggccttttcgaccttggttacttcaacattaaaacgtttaaaataatcctataaggactcactgacttcctgcttgatgttagccagggttgtataaggcgatttatacgtgatcgtggcttggaagtgtgttaagaatgaatccacaaaagtctcccaagtcgatatgaatgccttaggcaactggctgaaccaatcatgagcgttcacctcaaaggttgctgccaagatgtgacacttcgctagttgatgtacctggtctacttccataattgtattgaatttttttaagtaatcaatgggattagtagtacc

SEQ ID NO: 253892 - DNA, 945 bp, Cannabis indica
aaaagttctgttatcattaattggaagcatcatttacaacaacagaaaaaatggtaggaggaaaatcctcataccaactacaatcattatccaacactaatgcttactttgccaagccatgagcagtttgatttgcatctcttcgaacatgaaacacacaaacattagagaaataggacaattgatttctaacataaaaaatgagatcagagaaacctaaatttctagatgctaaactttttaaactagtaactaacagtaagcaatctgattccacaaaatcaagattaacatgtaaagagtgagcccattggagaccataatagagagctttagcctccatttcatgtggtttcaaatttccaggcattggcttggatagagcaactttaacatgcccactagaatcccttataattgctccaaaccccattgtattgttggccgaatcaacagtcagcatcaacattctttttaactttgtttgaggaggagctatccatggatgatgactcgcaacatgggagggttgctggacaggtctattagcacgtgaagcctgctgaaaattgcagaaatgagctaaggctttagcagcaattttctctggttttttgtggttctttaagaaacacaattttttaaaataatatttgcagcagaaatattgaatgtttaaataatgtaacacttcaatatcaaaaaaataaaaaaaattataagaaaaatactataaacataacaatcaaatatccaaaaagaaaaagaaaattgcaacaaaaatatccaaggtgctaaaacattacacattggctacccaaggtggctttcaatgtacaatacaatgatataataagaatattttacaaccaaaaagaaaatgaatgaaggttttttcttttggcaggactcgggaggcttttacatacatagctttactgcaat

SEQ ID NO: 253893 - DNA, 556 bp, Cannabis indica
tgtttaaacaacatacttgtgagtagatttaagatcctggtgaaataaatattccaacataatcatgggaaatttgcagcattataatatatgttatgcaacaatttccaagtagcatgcttttggtgagtaataggggatctgtagaaacaagtaaaatgccaaatagtattactagagaaactcattgtacaatctatatggttagtagagtaatttagaatattaataaaaacaccaccccccacaaaagaagaagtcccccaccaaaatatttccttgggacatcaaaccatgagtaaaatctagagcccttttaaacctatctacagagttgggcttcaatctagtttccatcaaaaaaagaagagcagacctatgggtcttgacaaggagggagagtcatttgaatgctcaagggttccccaaaccccgagcattccagcttatcaaactcagcatcacccgcttgttcagaagcatcagggaacaacgactcaacaaacttagcatctccagctctagcatgcttgagcataaacctcatagagccccc

SEQ ID NO: 253894 - DNA, 500 bp, Cannabis indica
ttgacatcccctctcaaatgaaaaggtgagtttctcacgccgagttgtcaacaggaaggcaaaacgagaaggagataagcctttagtcaagcagtcggcaatctgatcatgtgaggggaatgtatcgaatctcaagttgtttctgcagtactttatcacgaacatagtgcgcgtcaatttcgatgtgtttagttcgagcatggaagacgggattcgctgcaagagcactggcactgaggttgtcacaccatgtcacaaatggacttgggaaaggaaactgaagttcattcagcaatgactcaacccatgatatttcagcagctacatgagctaaggcacgatattctgattcagtgctcgatcttgaaacaatggcttgcttcttggatgaccattacacaagagtgtcacccaaataaacacaataagctgcaatagaccttctgtcatcaggacagcaggcccagtcggcatctaaaaaaccagtgatgctaagtctg

SEQ ID NO: 253895 - DNA, 945 bp, Cannabis indica
tgagtagcagtggtagaaattgggattgtgagtatcttgtcgatgtcaacaacagagaaatcacgttgaagcaattgtaagttccattcgtggctatctgtgatatagtctgctacaacagcatgtgtcaaaccagaaaaaaactgctggtgtaaatgtggacagcccagggatccaagggtcagaacatttgatttgcaaaccagttccaacttgcattctcaaccctttaattagtaaatcacgaccccaaacaatgccttgccaagtgagtgaagaattgtatcccttgtttgctgagagaaaatcagtatttaaaaaatatctagcttttaggatacgtgacagcaaggaagttggattgaggaagattcgccaagcttgtttagccaataaagcttggttaaaatggacataagatcgaaaccccagacctccttccatttttgtttggcaaagaaacttccactttttccaatgagtctttttcttatcatctgttgaaccccaccaaaactgtgccatcatagtatccaactgatggcaaaaacttttggagagtttaaaacaactcatggcgtaagtgggaattgattggacaaccgctttgagaagtatttctttcccaccaatggagaacagtttatcattccaagcatgaaggagcttccatatcctttctttaatacttgcaaagagatgtttcttgtcatgctcagaatatgcaggaagacccaaatatgtttcatgacactcactaacaggcatgcccaaaatattgctaaaagaattcttgatagcatccgaagtgtttggtgagaaggacataactgacttgtcctcatttagaagttgaccagaagcacgatggtaaatgtctaatgctcttttaatagctccacaggaacgatcattagcacggcaaaagagcaaactgtcatctgc

SEQ ID NO: 253896 - DNA, 707 bp, Cannabis indica
  modified_base (662)..(662): a, c, t, g, unknown or other
aaaaaaaaaaaactaaagaatagtattaccttgttttagaactccggcgccggcggagaaattggtgttccacgggctagaaaaatatttaggggaataaagattttggggttgaggttgatgattttgggaatggggatgtcgattttgggggttgaggttgatgattttgggaatggggatgtcaattttacgattcgagacctcgatttcggggtctggggtcgattctcacggttggaggcggaggaattggtttcgtggtgtgagcggagatcaaaaactgggtttctattatacagaactattgggggacgactatgtattagatacgactatttatcgttcccaaaagatcgtttctaaattgtgcaaacggagaagaggttgttttattgatttctctcttttctagcttcatatcatgtaattgatattgatcagtctcaaaatttggtgacaacttttgtagtgtatcgagtacgaatgtggatataagtcaaaaaaataattggtgattaatttatatgtgctggtaaaacaaagaatgttgttgctggtgattactgttaacattttcaacacgcattttcttgagcttgcgcttgtaattgattagtgatagtccttataatttgtttgttgagattagtttgacgaanatttttttttttagtagcaatttagtcagcgaaacccctttaacc

SEQ ID NO: 253897 - DNA, 589 bp, Cannabis indica
ccgtaaattgctttttctttgtcaacacctccttcataaacttaacataatttggcatctactctagtgcatcaatgaaagaaatgttgatgttgatttttctaaaaaattccaagaacttagtaaactcctcatcaagtttcttcttcatgaatccttgaggataatgtcatacataagcatgtattaaatagtacattccccaatttaaaaaaaaaatagtaattattaagtcaatgaccaatacacgaaacttaagggatgtttggcttcataacttaaaaactgttttcagtttttaaaaacaaaaaacaacttttaaaaattaatatgagtcatttggccaatttttttaaaaactaagttttaaaatactagaaaatagaaaacatcaaaatgtaatttttaattttcaaaaaaaaaaatttgtctaacatattatattttatctttttttgttctacatacccatatcctggatcttggatcccgaccacaaactcggactcggactcggccacggtcccagacctagacctcggaccacgaccccggaccctgaaccatggactcggacctcgaacctgga

SEQ ID NO: 253898 - DNA, 800 bp, Cannabis indica
taaagagttcatcacatcttggaattgtcctttccaattggttccaatttcctacaaaatccttacaagtctaaatgctatgtataagattttaggatgggagtgtcccacaccccaaaacattgtttatctttattctgttaaggtagtttctgcgaggaaacgttgtgcaggaggtttctactatcttgggactcacacaaacaatcgcaggatcattgtaggattaccaaacaaaatgccttttaaggaagatttcttctggacaagtggcctttccccaatcaacacaaccgcatttcgcataatacgtaagtaaatttttatctcaaacttggttttgaattactccatgtttataatcttggcctcactgatttatcttatttattctgttgatagtggtctcaaaaagaccaactctaactcctgagatggccgagcggcgtaaacttttgttgggtcttccattcggactgtgatcggccaaatttcttctaaacgaggccaatttgagttctgttggccttctcacttcaaacaagtatacttgtgattacaagtttcccaagtatacatggtgggagaacgtgccaattctagctgatgaggagagtcaagattatgtggctcaggtgcattatctccacaatgtagcccctagggaagctgaagaaggggcatcccgatggtaatcaatgtggatggtctcccactgttcatagggcaagacgcactttgttgcatggttcacatgatataaatggtggagtactcatttcacttaagctgaaatatca

SEQ ID NO: 253899 - DNA, 908 bp, Cannabis indica
taagatgaaaaatttctcattagtaaatttcttgatgtagacacactaaatctgcagctaatctcttatagcttcgatccacaatgaatgaatgaaacttcttgtaccactatcgtggatcctattttataccatacaaactcttacgtagtctacagacagcatgctcttttcctttcacctcaaaactttccggttgatgcatataaatttcttcttctaaatctccatgaagaaatacagtctttacatccatcttctcaatctcaagatctagactcgctgctagtccaaagattattctaattgatgacattttcaccactggagaaaatatttcatcgaaattgatccctttcttttgaccaaaacccttgacaactaatcgggctttgtactttaccaagtttccatgtccatcatcctttaatctaaagacccatttattccctagggccttcctgccttttggaagtttcaccaactcataggtgttgttcttcgtaagggaattcatctcctcatccatggaatctatccacttgtctttgtctttgtgagccaatggttcctggtagtcctctggctcccctttttcagttaaaaggatatactctgactgtggatatcttttagatggaattagtcctttagctgaccttctgcgagattgctcattttctggttactggtacttctccccatgattgatatcttcttgtgccagtacatcttcttcagcatcactgtcatcaccatgggtcatctcagcaacttcttgcaattcatcgtctgaccattgttgttctggaggaaacaactcaatttcagccttttttggttgacatttttcttctcttgcgccttcaatttttaattgtttgatcttcattaaagaccacatctct

SEQ ID NO: 253900 - DNA, 709 bp, Cannabis indica
tacgataaaatttgacaattgacttttacaattctataaaaagtctagggactattgttaatgagttgaaaagttgaggagcacaaggttatttattagattacattcaatatctagctattcaaatctgattcaattatatattggttacattttaccatgcaatctgatctaattcatttcaatcattcactagatctattggattggttgtatccattggatgtattgaatgtatatctattgaattaattcattgttatctaatattttagacctattatttttttaaaatcatatttaattaatatatttaaatcttattagattgaattaaatcaatccaattgaaaaatatatattaattttttttatatgtatatatatatatatatttgtttttacataaaatcaaattaatcatttaaattaaatgaaatattaattattttaattaaacgtcggatgtattaaatttttgtacattctatttaacatttaatccgatttaattggatatttaaattttaattcaatataataataattaaacattcaatatttagcaataaattataattagatcgattaattattattaaataggatgatttatcggatccataaatcaggacaaagccgagggtggcatgggctttagaaatttgagagattttaaccttgccatgttaggaaagcaaggttggag

SEQ ID NO: 253901 - DNA, 591 bp, Cannabis indica
aaactaagacatgcgagtctgtactttatcaaggttgttgggtcaactggaccagctcgcataacaaaggatcgatctctatgattcacatgaggatctcggggatactcgcatatatcctggtacatgcgagtcttaaactgttcattggtcctacattatgtgagccatacgaatgcgactagactcgggcatggtcgaatcatctcgttgaatctggttcaggcgaggttcatattcgaggggtctctcatcgacacctcaactctcctcgaggagagtgaatacacgtgtctttttaataggagttcggtctcgagtgtctaggtgagaaaatctcactataacacttaaaaccgagtctacattattataggggacttggctagaccttcttgctctgcttcaacctcctcttcctcgcctgattcttccttctcggtcttctcacaaaaggcaagcatatcctagaccttgtcacccaaaaagtcgaagtccaactcggggttgaatgaccaaatttgataaatagtcctcctaccaatattgttgaccctctctttggtttcaccctccaactctttgagcttt

SEQ ID NO: 253902 - DNA, 1095 bp, Cannabis indica
aagcgcggtaacgtctcctagttattattaatttaaaaagcatgaaaattactggtcctccaatttcataacaaggctgggcaccaaaaagtggtttttgtagtcataataatgaaaaagatacaatttgaagtctagcgtttatctccttcctgtcccactcttgtccgtactctaccccactcattgaaaaaaataaataaataaacatttttatgagtttcattttattaaaaaaatgtattatatttggtcagttgagtagttgagaaatgatgggaatgcattttttcttttaaatttgttcattattattttatttaaaaaaaaggaaatttgttcaattattgaaattaaaaaaaatgtttgagaagaaaaaaaaataataacttgataattatttggggtaaaatagacaggtagttagaggaagaaggacccatgtttagctcctgcccacaaaagaggaagtgtcccccaagcttcttcaatggctggtgtggcgttgtcgtttgttacattgcacacattttttattacttcaagcacagcgaaataacaatcttaatctttatctcaatctcaatctctctaccaaaatcccaatatacattttgcttcttcctcactctcaccacataacaaaactcacacacttctcttttcacaactcactatttttttcctacactcatacctctctctctcacacaaaacacatatttataaagttacaaaacttgggcatcaagacaacttggagaacaagacattccaaatcttccttaagaagacttatcaaaacttggtcaccaagacttttcttttttccacaattaataattacctaaaaagaaattgcaacttcacatatatagataaataaataaagaaataaataatttgagtcaaactccaacaatttccactttgactcaaattctctaaactcacacacaacaaattaatttattaggggcgacaaaagtcgcccctaaaataactataaatcgctcttaatgtattttagaggcgacatgtcgcccctaataagtcgcccctaaaagttcgcgcctaaaagtaccattaggggcg

SEQ ID NO: 253903 - DNA, 632 bp, Cannabis indica
atgttaaactcctaatttgccttatgtggagcatttgaaatgacaaaaataaagtatttcatggtgggacaaaacgtgttgcctttgctcttgcaacacaagctataagttatttggataaatatcgataagtaaattaaagatgcaagaagaaccacaatcctcatttgtcacaccagcaacgcacgcgcagcacctgcaacattgcaccagcagcaatcatcatgacatgtgatgcaccagcaagatcacccacgacatgctgtgtcaattgaacaaggctcaccacaccagtaaggcagtccctgcaacattgcaccagcagcacccattaggatatgtgttggatcagtaagttcacccacctatgtcaatcgaacaaggcttaccacaacatgctactactggttacaacataaggccaatgaatggtataccgtggaagtcttcgaacatcaattgtcttaaaaatgaatgtagatgcggctgttaaccctaacgataggtattgggaattggagcagtgattcaaaactacaagggaaagttgttgctgcattatcaaaccagtccaagattattttagtaagtgatgaaatggaaagcaaaggcactttttcatagtctaattg

SEQ ID NO: 253904 - DNA, 1106 bp, Cannabis indica
tctctctctctcaagtccaaacacacactttcagtttcagagcaacaatggcgtctactattactgaaaacctaagcagagagcagtacgtgtacctagccaagctagctgagcaagccgagcgttacgaggagatggttcagttcatgcagaagcttgtgttgggttgcactcctgcctctgagcttactgtggaggagcgaaacctcctctctgtggcttacaagaacgtcatcggctcactccgagccgcctggcgcatcatctcctccatcgagcagaaggaggagggtcgcaagaacgaggaccatgtcgtcctagtcaaggattacagatctaaggtcgagtctgagctttctgatgtctgcgccagtatcctcaagctcatggactccaatctaattccctccgcctcttccagtgagtcgaaggtcttctatttgaagatgaagggcgattatcaccgttacttggctgagttcaaggtcggtgatgagaggaaaaccgccgctgaggacaccatgatctcttacaaggctgctcaggtacaataatttctctttgattttagggtttttaactaattaattatttcgaaccgagatcgaatcgaatcgaattaaaattcaactcatacttaatgatatcgacaatccgattagaaatttcacaattgcgtttcgattttgtgtgaggtttttctttttgccttgtttcattggcgtttacggattagggaaagtgggtttgtgttctaataataataactcagttgttgtttttgtgatcgaaggatatagcggctgccgatcttgcatctacacatccaatcaggttggggctagcgctcaatttctcagtgttctactatgagattctcaatcaatctgataaagcttgcaccttggccaaacaggtactttctttcaactcaaatcatagtttcacatgtttgcttcgttgggccactgcgtagaaatgttatgtgattatttatataatattattattattatttattgtttattgttttaaaaaaaactaaatatagtggtctaagttcagtgtttttaataatgtatgtcgactcggctacagtcaagatt

SEQ ID NO: 253905 - DNA, 915 bp, Cannabis indica
aaaggacatttattaacttaattgttagatttatggccattttgcatcttggcccttttaatattcagaattttcaaaggaataacattgtttaacatcctaaagctcaataaccaatcaaattgagccattaataattctaattgtttgtaatctgtccttgatcctcaaaaaaaattttgttatgccaataccaaaactaatcaaaataatccttataattttagtatttgttagttttgactaagatgcatgaacaaaaatatataaatgaatatgaatcaagggaaaattacacaaacaaattttagatacccatgtaatatccaaattaaaatagtatttaatttttttcttgggatattaagtgtgagagaataattatcttatttatttgtattgttagtgagtagagattattgcttagagtagttgtaccaattttctaaagagagttaaagttgtactaactacgaaagtaaaaaaatattatgatattttcataagtaggtaatcgttgaattaaaatccaatatgaaggtccattagagttttataatatatttattagatttaattaattgtataagtggtattaaataacattattgttgtgataaatccaacacgcaagtatacgtatcgttttaacaagtaatactcagataagtaagatcgttcccacgagaactgtagttaaataccaattaattaaattcttttttctatttgacaactgaataaataaattttgaactaaataaactaagcaaaattaaacaaaacaaaaaaataaaaagtttaataatggatgtgaaattagggatatgatttcaattaccttgattacacaattgttaacactaattaaccattcttcttcctcctatgtgatgacagattataaattaatct

SEQ ID NO: 253906 - DNA, 668 bp, Cannabis indica
cccaccataccgcactggaaacatgttttagtccagcactcacttggacagtgcttcttacattttggacactctgtgtaagatcagaatgtagacgcgcaatcttgacagccacctctatttccctgaaactttctctcactaccacccacactagggctcgatgtcgtgacgacatccttagctgcctgctcttttattacatgttgttctacctctttagcaatcaatgctaactcgatcactttctagtataatgtgtcgtgattggtggtaatttttaagtcccgactgatagtggcattcagtccccttacatatttttgtttctggttgaagtttgttggtactagatcaccaacaaactttgataagcgatcaaattctagggtataatcggccactattctcttcccttgagtcaacctcacaaaatcttccatatgcgatgtgtttgatggaaatgttataaatttttcttcaaacaggctcttgaattcttccaaggacataatgctgacatcttgggtctgtcccataatatcccacgagatgcaagcgtgctcttgaaacatcaatgcagcacaattagctcattcagttcccatcactccccatgttatccagaatgtgggtaacaatgcccatccacttctctaactcaataa

SEQ ID NO: 253907 - DNA, 837 bp, Cannabis indica
taatggatcacattagaaaatcactgagctcaaataaaattttaaaatcgcctaatattactaatatactacaaaatttaaaattttttacatttcttgaactcaataagagtacaacgaataaatttttcggtgtagaattaaaaatttttgccaaataaagtttattaatagaaatacaataaaaaaagaatatattgtacactaaactctttatattaattatttatatttgttttattaggtgtacttttattttttattaagaaattgatctccacatatacagtaattatacatatatattattgatccccaaaaaaaaactttgaaaagtcaacacaaacaatatataaaaatacaataattttttttgcaagatgagggggccatggcccctgtggagctcaatatagctccgcccctgatatcaatcaacatttaatctacacaagtatagattttgaattttctaatctaatccaatccgcataaatgtagatattcccactttgcggattggattggattggatcgggtattttgtaaatactcttacttaactccaatagtgatgtaaaatgtgtacaaatttgaccaaagctaaaaattatgccaaatttggcacaaaagatagcatgaaccaaattttagcatataataaataccatacttttcaggaaaaagttgaagaatactaatttttataaatcaatcatatttacctccaaataaaattcaattcaaatataaactctttttatgagtattgtactcagacactcacataactaatacataattttaaatataatttgtagatggatgtataacagg

SEQ ID NO: 253908 - DNA, 515 bp, Cannabis indica
ttttcttttgagagaatgtgacaattagagtttcgtaatccgttggtaagatgtgcaattttatatcgtctagaaaagatcaagtgcgatgattttaagattttgtatgtacgagactacctacatcaataagatgccttttcttttaggtaatccatcactaaggaactcaaaaattaagcatacttgacttggaataatctcaatatgagaacaacctcaactaaggatctaataaactaccacgaatcagtcatcaaataaatataatgtgtaataagttttcaaacccgttgaacatttgatagagtttacccactagtaatatcttccaataaaagcgaggtttctttatttattcttttaaattcaatatttatgtaattatttatttatttatttttgataacgtgatctaaatcacattaaaacatttttaagaatgcatcagcaatcggtgtaaggacctcttcaaaccagcattattcattatttagccttatagcatgttaaat

SEQ ID NO: 253909 - DNA, 996 bp, Cannabis indica
tgtactttaagatcaaaatatgggatgattcttaattgaggagtattaccgttaatttcctattataattttttataacagtattcgttataattatgtatcatccatgtaattttttaaaaaattctaaataatttatagtaccgaaaatagagtttctgatattccagtttaccacgcgtgtttaaaaaactttaaacgtattttcgacattataaactattcaaaaaaatttaaaaatttacaaggatgatgtataacgaataccgctataaaaaaatttgaaaaaaaataatatttcagcatatgatttcgaatgtagaaattgactaaaatggtataatataaagatttaattagcacttctcttcttaatttatttacaattttcacgagtaagtggtcagtcactaattactatactaaagaagcggctattttttttaggctaattagattttttgccccttgaattttcacatgtaccaaattatgctcctgaacttttttggtcgttaaaaatcgcccctgaattattgagtttgttgaatttaaagacttttgtccaattttgtaaaatgaaggatcgattacatgctttgatgtttatctcaaaaaaaagaaaaattacatgttttgatgttaccatatccaataattaatatgtgataatttgtttctttcttttacaaaaataaaataaaaaaaaaggtaaatatcccattaaaaaaaaaggttaattaggatttttaccccttaaactttgatatatatcaaattatgtccgttgaattttttttgccgttaattattctcccgaactattgagattatcaaatttaatgacttttgtccaattttattcaattttactaatttagtgattgtttatgtactaaatcatgctcttcggactttaatatctaccaaatcacactcctcaaactttgacatgtgacaaatcatgccccctgaactttcatccatagtttgacc

SEQ ID NO: 253910 - DNA, 588 bp, Cannabis indica
tagtttaacctaattaaattgattggcaacataattaattttcaaaatatatgaaattattttttcatcaaattattttcatatttgatagcacataatctctcaggctatagtcaggtggattacgaccattagccttgtcttttgcggaacctccattgttgccaacattggcattgtcagccatgactacttcttgttcaacccccactacactcctttctagcctcttgtttcttctatttttctaaaggtcttctaaattttaggatcagcaggcactattacactttctccctgacgtcgcataaactaccaatacttgaaatagaataagaaaaattgaaaaaaaaatcagttagcaacaagcagaaagaataacaaaagtagaatttaatctaattattgtaaaatcaatatttattcatttctccagcaatggtgctaaaaatacttattgcttaatttttataatctacgcaagtgtatgtaatctattgcaaataatactcgcacatgtgagatcgatccacaagaaattgatactgagtacctctaaattaggtttattatttttggtaaaattga

SEQ ID NO: 253911 - DNA, 967 bp, Cannabis indica
gtttaggggattagggttttgtaaatatcttgggtagcgtgcctaattatcaaggacgttacagaacaactatatatattatatctctttacttatattgctcatctcttatttcgctaatctagcaaaaaacagtattagctaagtttttgcatcaattttatacatgtgtctcgttacataaaaagaaatgtaaaaaagagatttttatttattattttgaaagagaaattgcataggtagtagtgtgatatacagctgccgttgtggcagctatgaccttttccatttttcctttctcttgttgtttgaaaatcgttacaaacaaaaaacaactcttatttatacattacaaaataaagtttttgaattggatatcacctcaacattttctttttgctcctaagatatccttagttttgtaacacgagttacttatgaaagttcaacttgtgtgagtttcattttttatgtgatgtgggactaataatataaatattcacttttagtggttaacatcttttgccctctaataatgagctcataagtcataaattacaagagtcttctgggttagagagaattagatgaacggagagatgataaatgatggagaatataagagaggaaaaagagattaatgatcttttttatattgtttggtaagaaggatagagtgattgaaggatagataattattaatttataaaattactattttatccttatattattatttttaataatatttgttaagagcatttatgtactttacaataattgaagagggagagttctaatctttctattattggagggattataaattagagatttgagtggattcgctatcctctcacctctcctttctctccttcactttctcttgtgaaacaaagagatttgttatctcctcctacctctacctcctctcctctccatccctccatttctctctcttaccaaa

SEQ ID NO: 253912 - DNA, 1003 bp, Cannabis indica
tcactcaagtataaacctcgcctgaaccggactcagcgagatgatgtgaccctaacagagtatagtcgcattattacactcgcatataccaagaaagttgggtttaacactcgcatataccaagatatatgcgatgtccataaaggtttctcatgggaattggtaaagatcgattctttatttagcgagctggtccggatgacctaatgtgctcgatgacccgataaggactcgcacatcctaggttaacgaattttacaagataccgtatacacggcttggatagaacgtagatatcttaacacaaagacttgttagtctttcaggcatcctaggcccgcgagcttatgcaagaatatgaacagaaaacttgcaccattaaggtcacgtacgttgttgtatttagtaaattgagtcgaaactattcttcatttattctatttaagtttttcttgatttaatgttgatattcaatgtaaaatggtttgataattaatttagttttgtgtaatcaaaggacacttgctttatatataaaggagtgatccaacatgaaatggaacaagacagatatccttgcaacagtggactaagcagaccgtgatctgactgaaccactataattcccttgtgttcattatattttccagtacgtctgagtgtctgttctttgaatactcgccattctaggtggagtactcgcgcattttaattgataactatattttaattttttttcggtgttgtcaaaattcctccaacaacatttggcgtcgtctgtgggaaagatttttactattgattttggaggagaatcaaaatggctggaaatcagacgaacggaattaacaacacaagttctttcaatgtcggaacaatgaatgttccactcttgggcaacggagcgaatctcgttgatgtaatcaatggaggtgtgggatgtaccactgttactctcctcaacttgtttctagaagtcgccggtcatgacagagaaacttca

SEQ ID NO: 253913 - DNA, 2442 bp, Cannabis indica
ccggtagtttctactgtaagttgactataccaaaatcttatagcaactcgacatagaaacaaccagataaacccaatagtaaatttaaaagaaaaaggttaaaaaatagttatggagtaatttcccttggccttccctttgttcatgcattttccgagaaaaagtcagttaggctataggtgagtaagaaattagagaaggtatgcaatgtatcgagtaaatctctattcgcaattttgcatcaaagggtcctaacggcttccataagttagttgtaactagctttactcaagtcattatgaagttatgaacaaaacaacataagagtttaaggattgcttacaggaagtatgcccacttggaaagcttttgtgtccttccttgatgatagccttgtctccagtacacataacattctttgtaacaggatcaaacacctgaacaagccaaggaaacatcataaggcttagactgcatttcgaaaaaagcatgagcaattggttctgtttgtacccctttgccattaggaaaacaacgccaaaagaaatcaggacgcggtcgcccaacgccatctttgattgcgtcggttaaaaccgcagttataaacaccgaaaatagaagacctgaaaatgcatacaaacttcagtaaagctgttaaggatctcacacacaacacatcaaatcaaaaacaatcacagctataaaaaccaggtgatgatctaggttggggtgtcatcataatacatcatattatacatagattaagctgattaagatttttttctcttgaactttgacatgtaccaaatcgtgcccctgagctattgaaatttgttgaattcaacttccgttcaattttactaacaaattcatgccccttaaactttgacattaaccaaatcatgtctcccgatctttcatccacgtcaggcacttgttagtaaaattgaacaacatttgacagaatctcttgaatacaacaatctcaatagtttaagagattaaagaaacaaatatttttgaaaaggaagagtacctaatatagcatggtgcaaatcataaacatctcttctgataaaatagtatactgtgatcacaataagtggcaacaaaacagcaattatctgcagaaacaaaaaccagaaagttaagagataaacaaaatgatttttctttttctttctttctttctttctatccaaacaaacaatattgaattttctcagaaagaaaataaaaaaaacaatacaggaacaccccagaaaggaactgtattatcttgcaaagggtatttaagatcagtcatcatatcttccccaacaaatcgatgaaaaggttcaattaaattcagaccaagatccaaagcagcaagaagaaagagtatcaaccaatcatgcatataacttctcaaaactttagctccatgagatcttatggtatgagcacctaattgaatatctggcattttctctctaaacaaacacaaaaaacacaagtcagtaaaaaaagaaaaagaaagattcaaactttaaaagcttatcatatctttattcttttctctgttcagtataagaaaaaggaaagcaaagaatattatttattaatacctaaaaaatcaaaccctgacaaattttctcaggaaccaaacagaaaaacccagatggtggaagacataaacttacattatcaatgattatatataataataagaccaaaataaacctacccaagatgatttttttggactaaaagacacattacgcgtaaagctaaagtttttatctttttttttttcaattctaagacatataatcgattatggaaggatcatagaaagagaaaattgttaatacaaagcttgcaaatttggtattttctatctcaatgggagaaaatgtcatgccttgcctttgagtttgagtttttctctccgaataaaccttactgagagactgttagagaaagacgaggaggaaaaggcgcgtgtgttgcacgctcggagagaatgcgcgttaaattatgaaaccgccaaaaaccatttgaaggaaagatttttggtatttaaatttcagctgagaaaaatttttggatttcgattacagaaatcaaagtgggtttgctttaaagtttggatttttttttttttgtaaaaaaaaaaaattaggacagtgacaaaaagagaagaaatttaaagcaaagggattttctttaatattatataaattgatttagcttttactctaattttaatatttattaattctaatacagtgtaattggataagatttttttttttccttttttatattaccaatttcactactttcctaattggaaataattgtaaaacttgaagtaatctctccattttttttaagttcaaaagttcaactcaagtaactagtttttctactcaacaaaaaaggaaaataataataata

SEQ ID NO: 253914 - DNA, 624 bp, Cannabis indica
aagtttgagatttttgcatgattttgagttattagttactggtgtggctattgttgtttgttaatgttttcagaagttaaaatatgtttagataggttgatttaagcttgaattgttggatgttagtagatttaaccaagttttgagtttagaactcaaacttggagctttaatggtggattttgtttctgagcttgtagaagtgttttactgctttgatattgttctatggggtataaatagcaggtctggaagtttttgtggtgtttggagttgatttgaggttgtggtgaatttttgaaggtttcctgcactgaactggaatttcggttcagagggacctataggaacccgtttgccggttggggcaattttgggaaccctagtttttcctatttttgtaatgtttagggtattgccatgttgtttatcgatagggaaacttttagtttcaagtttaagtccccagaaagtgatttagcgtgtcacttacctatgttatgattgatgtgatttaggagcctataattcgacgagcagttgttccactcaggttggctggcacacctagacttggaaacgaggtaagattagtataaccatatgcatatgtatttacatgtt

SEQ ID NO: 253915 - DNA, 868 bp, Cannabis indica
ggcattgaaccttgacccaaaactcctgctgtcgaacccaaacctaaaaccacaaccacatgccctcgtcgtcgtctactctgatggtctctctctatctaagtcttctcgtctccaccccaaatcctcaaattcgagctcaaccaccccaaactctcgaaatccccacccatcactagagttctcaatccatcgcccattttttgcatttttttcttctagttttccaatttttacgatatttagcgatgtatttacaatgatataccaaatatgaggttatggatgaagtttagcgatgttttgcgtatttagtgatgtagtcacgatatgagactaaagatgaaaagcacatcactaatatcgtgaaaacttgagtatgttttagcgacatttaacgatgaatttagtgatgtgatttagcaacatttagtggtgtttagccacatcgtgaaaacaaaaaaaaaaatgctaaaaatgagtgatggattgagtactctggcaattttgaagattttggggtggttgagcttgtgaatttcaagactttagggtggagatagcgaaacttagagagagaggccgttagaaaagacgccgactggggcttgtgattgaggttctaggtctgggtacaatgacaggggttttgggtcgaggttcaatgacagagagtgtgagagttagagagagaagcttttttgaaatgtaagggtgtttttaggaggaaaagatactaaaaagtataaatactctattttaattgagtggtatattaaaagaccatgcttcatattaatttaagcatagtaaaccaatttttctaaaagaaaaagtacacacttatatactaactatgtaaattcta

SEQ ID NO: 253916 - DNA, 505 bp, Cannabis indica
gtaatgaaactacttactgtttgtgttttctcaaagttcagcgaattggacgatgaggatatgcatgcatagagtcgcgttgatatgatatgcaactcactaggttgaatgagtatgtatgtttcgatcccttttccccatatatatgtattgaataatattattatatgatcaagatccaaagcaatattctacttaattggtttattattaactactcccatgcacatcatacgtgcctgatatgttatgttaattatagaaacgttccaggcatagattgtaaaaaattgtgctttccaattccatatactatagatttttcttgatttcagtttatacacttgttggtacaaggaatgcaaagagaaattgctaaaacactacaagaaattgtattaataccggcggtattatttccggcggaacagatccgcctcgaaaaatgagagcgggaattttaccgcccatttatttgaaaacattattgccggcggattaatac

SEQ ID NO: 253917 - DNA, 842 bp, Cannabis indica
cataatgttagttgctatggcatgcgatgcagaaaaccaattgtttttattgctttatgtatgagatgatagtaacacacatattatattaattagtataattttatacatgagagttatatatattgttggtataaaataatatatgtataattaatcatatttagtgtatatgataataataataatagagataatgatagaaaagatgtattcatcattttttgaatggagttttggaattgattttccattagtggtttttatctcattttataagatgagaaagtgaactatgagagttacacttatgagatttgtcttgtcatagcaagaacaaatatatcagaagtggatctaaacttgtaaaatgagtcataattggaagaacaactttagactcaaatcaaagtgaatcatggtggattcaaaaattgtgaaaagataacaaagttggagaagcaattttgaatcttaaataaccaaagtggtgaacaaaattgataaaaattttgttaattttggtataatatttgagttaatctcactgaggagataactttcaaattatgggtaaaaataatcacattattttttaaattggtgatatgagtttgatattttagttttgttgagaaaactaaaaatatcaaatggtattattcaaagtgaccttaaaaagtcatttcataagaaaaatacacaaacgtgatattttatatacacttgatagtgaaatgttaaagtgtgggggtgtactccaacgtgaaaaatttaagacatgcttggtgtcttaaaataaagtgtaatttaaacatgtttggtgtctaaattagtgttta

SEQ ID NO: 253918 - DNA, 1469 bp, Cannabis indica
ctagcaaaatccacatccagaattaataagggaaaaaaaaaagtgggttaaacttacagtttgggttttgctagagaatgtgatcagaattattcaaattattctctgaacctttttctgttcttcttcttctaaagatgtcactttttgaacaaaggaaaatagaaaaagagactgattacaaattcctgaacttgaaagatatgagaaaggttttgccaaattcaaaactgacatgaccttaaagggtatcatggtaaattcatcagatgctagtcaagtcaactgctctatgttatgtgtggtggtgttgctaaggaaaagtctttagacacggtttggggtgtggccaaagccaaacttaacttacccaaaaatcaatgtttcaatctaattcacaaaatatagatattcacatttatacaaattggattcaattgaaaattttaaaattcgtatttgtacaaattgaatattaattaacatataaaagtaatcgatccaatctaatttacacatattaaaacatatattttttgaaaaatatatacatacaaatatttcaatgtaaaatgtagtaatttaaaaaaaatctttttttattgaaataaaatgttattatatgaaaaccagattcataatacaataaacattaggggaggaagcatttcctccaaccaagagcaaatagagtccactgaacgggaattagacgagtttcgagagatgatcttgagagagaggttcagagaaaagagagtgattgaatttgagttttgtatgaagaatcttctatagataaaaaaaattcttaggtaagagtgtaagagataaacattttgagagaatttatcagagaatcaatctcgactgtattgtaccctgttcttgctcaaacaataaagaagattttggtggtgttccaaaactagagtagagccataaatcacatcgatctataggacttgaaccagtatatatcccggtgttgttttttttattgttttactgctttatcgttttggttttaatattctgttcatccatgtttaaatcttcaattattgtgtgtattagagaatcccacattgataatgtgttgaaactaaataccatttataagatgcatgagctactattctcattgccaattgattttgaaatggaacctcatgcaccttaccatacactcacctattctactaccttcaccatacacttccgcattctaacatgctatcagagccaaactaactctaataagtaatcgatccagtccaaaaagacgagccaaaaagagctgcttgtgattcgaagatactgagccgtcgtgcaagattggtgagcaaaaaaaaaagccaccatcttgagggagaatgttagagagtctcacattgataatgcgttgaaactaaatatcatatataagatgcatgggttactcctctcattgccaattgattttgaga

SEQ ID NO: 253919 - DNA, 636 bp, Cannabis indica
tcttcgtgcactagaaaaggagccgtggcatttccaaaaccaccacatcgttcttcttcaacctaccttgctgcagaatgttacaccagagatcatgatttattctcctttctgggttcaagcatacagactgtcgttcttgagtaaatcaagatcccttgcaaaagctttggcctccattcttggtgaattcttggttgtgcatgatgactccttaaacaaaggctggggtccttttctgagattcagaattaaaatggacataacaaaacctcttctccgtggaaggatgattactcttcctagaatcaaggatgagttctgggtggaacttcgttatgagcgattgcctgattactgtatggagtgtggagttattggacatctttatcaaaagtgccctgtttttttggaaaaagtggatcatggaatagaaccagaccttgcttacagcctagaactgaaaggatcaagactgcctacgtcttcctatgaccggtatcgtactgattttcctaaaggcaatgcgtggccactactcacaagattagctcgtacatcaatcactcatgccctccccaagcttcaatcgattccccaacctcaaccataccctttattagtgggtgaatcctc

SEQ ID NO: 253920 - DNA, 849 bp, Cannabis indica
tccgctgctattaatagtattagcggcggaccccttttttggccgctaatactactaatagcggccaagcaatagcggcgggccaatagcggccgaggtccgccgctattgccctttagcggccagaaatgacactaatagcggcggagaggtccgccgctattagtgttcaatgttgtagtacacatatatgttatatttcattaaaatatactcacttttatcagtgagttgcttaatacactctcaccatccacttaaatctagtacataattaattaaaaccaatttttttaatacctaaacaattaatataatctaaactaaatattttttattacctaacaacaaataataaaaatattttttttattatataacaacaaataatctaatttaaatatttttcaaaatgtctaaatcaaaaactaaataattaatctaaactaaatatttttttaatacctaatctaaaactaattaaatattttataattatgtataaattaaataaataggtaaaaatatacatacggtagaatcttatatatacaataaattaatattatatatatcatatatacgtataatataaatagaaatatatatataaattaatattaattaataaatatatatacgtatatactttgagagaaaggcgtcgacagtttgccagtggaagaagaggaggtggccgtttatggggacgagagaaaacaagagacgaagggagacgagagagagggagatcgaaagagaaagggtgatgatatgtgggtttttgtgggtgggtggagagagagaaagagagagagagagagagagagagagagagagagagagaga

SEQ ID NO: 253921 - DNA, 672 bp, Cannabis indica
cactaaagaatgagagaaagagatccagcttcagatcttgataatactaaaataatttccaacatttcttcgataccttctctccagttgcaaaaatggtgaccttcaaattacttcttgccatttccactatcaaacaatggcatacattacaactcgatgtcaacaacgcttttttgaatggggatcttcatgaagaggtgtatatgcaaatccccaagggccttgatttacccactgaactcgctggccaaacagatatcgtttgcaaattaaataaatctatttacgggctcaaacaatcttcaagacaatggtatcgcaaactttcggatgccctaatccaagaaggcttcgttcaatctcaagctgactatacattgttcaccaaaggatttgacaacaatttcattgctctattagtatatgttgacgacattatcatcatggggccaaatctatccttgctgcatcaacttcaatccactttgcgtagcaagttctctttcaaaattcttggtactctcaaatattttcttggttttgaaattgctcgtgctacagaaggattggtcctctctcaaagaaaatatactatgcaactccttaaagaaactgggtattctggcagcaagccaacaaagactcccatggacccacgactaaagttag

SEQ ID NO: 253922 - DNA, 1036 bp, Cannabis indica
aaatctgtttctttattgataaaagaatatttaagattacaataaaatagaattttatttagggcataaaacccaactctatagcatcggttgtttattattaagtttaagaaaagtacatctaaagacttgttttgtagaccataaggtgtaaataaactacattgtaggttatcctttcagtaaaattctgtgtattgataaatcataggaattttatttaatcacacaatcttaattattttttattgtgtcgacatcacaataatcaagaatatcaatgtgataaagatttggatgaatttataaatcaaacaaatgatcatgaaataacatgcgaaccaaataacacattaaacaagtaatgaaataaatctgtttctttattgataacagaatattcaagattacactaaaatagaattttatttagggcataaaacccaacagtctcgtgggtcgcttgggtcgagtggttgagaggttgccttaggtctcctgggtcgtcgtaggttaagtgggtttgaatggtcgattggtgggttcagttcttaagggggtgggtttgagtaggcgtgggttcgagggggagggggcgatggttcatctggtatggtgtggtgagaagaaagaggagagagaaagggagttagagagaatcaagggaattgaaaatagaggaataattttggaagaaaattgaaagattagaatatctttactatgtgtaatcttttagtttaactacacaccataactaattttttaacatgatttatcaaatttctcaaaagaaatacatgtttcaatctttataagactattttttttttttttgtttataatagaaaaaaaaaaaaaagacaatttgaatgtatactttagtagtaaccttttttttattatttgaatacatgcacattaatggccggccaccccacttcggctttatggagtgtgaatttcaaaattgtaacactaaaagtgaatttgtaacctcaaatgtctccgggtctatatatgcttatatgtatat

SEQ ID NO: 253923 - DNA, 624 bp, Cannabis indica
aagtgatgattagggtggaccatcctatggtcattaagataagaaagtttgtttctacaaatactactttttaaaaatatgactaaatttgattataaagtagcaaagtagatgagatactatttctttattccaaagtgttttaccatcttattctatataagatggtcccattgcctctgttatattgatacaaccgatgacgacaataccacttatattcttagatagaaagtcacgatacattgtcgtagtgagagaatttcaaggaactcaccctgttatgacttggaagacacttgtggtaaaaacccattattagtttaaacatgtaatagatagtcagaataaggaactaagaagcaaagccaacagaactatagttaaaaccattcatatgaagtaacaaaaaattttgtattacaaggacaagaagggaaattttaataataagtctattcaatagacttaacaagacttcccaatcctaatatcataggtttgagattatctaaaccttctgcttctgatatgtctggtaatttatactctaatacaagcaacataatttaataagatgttagtatttttctaatgctacctctatagaaaatcttttaactc

SEQ ID NO: 253924 - DNA, 546 bp, Cannabis indica
gaatctctcaattgactctttatacttgttattaacttaaatataaccaatttcgttcacttgtctccatattcgatctaggtgagctcttgctttcttagaccttagtgagtatgacataactatatatttctcgtgtgccattaacaacacatgctctctcctcataattacccccatgcattgattaattttattcatatcctctattattcacctaaatttacttctcttgttagatgtcggcaagcgtctcaagcccttaattgccttaactacgtttggattcattattaactctgcacaacccagaataaatactagattgaaattaaccaaacttaacatacaagacataacacaaataaaacatacttacttgatgacaagttgatcctttgcaccgatggtgtgtatgtcgtgtgaattcaagatcaatataactatgataccattttgtaacgtccttatttattaaaataaaatgccataaataactagcgtcaacgtactaatgttgcctatatttaaaaataacaattttca

SEQ ID NO: 253925 - DNA, 1085 bp, Cannabis indica
tatgattgtacatatatgtatatatatattttttttttcttttcttttctgttttttttcatatctatatatatagcaagagaaggaatctagtgttatgtgaatcaaaactctcaccaccccgactcacatcccatcatcatctctaatgtgaacttgtttcaccacattttgtaaagttgtatcctcacttccctaaccccattaatgtttgattagtccttgataacttaagcaattaggtttgggttgtgaaggataacattttgtgtgtacgtgtggatatagtgactttgatgggtgttaagaaaaactaggcttttggctcaattaggggtgactattgacaattaaatattctcgggttggcttgaaaggctcaatcgtccaaaaatggcctaaatcatttccaagttataaagctcgctaggatttcgcctcaaggattacactaaccaattctagatgcttaaaactctctcaaggtgttagctattctaaaaactcaaagtatggtgggataacacaagcacacaattgttgaaagcattcctcataggctagcatttagacaagaataacacttaaaattagcattttcaacacacaaaccaaggcactccacaaatggaggaaaatggatatttttcatcatcgagcgctaccctaaaccaagctgaaaatacaagcactatttttctcatttgcaagctaaaacagaacataacaaacatgacaaaacaacatgattaatacacatctaatccacataatttttattacacacaatactaaagtcaacaacaaaagtagactcacaaagtaacaaacacaaacagtagcaacacttaaactaacacacttattttagcacacacaagcacaataacatttaaactaggttaactaactaaggaaaaagagatactccctcaagattcggactcttcccccactagagtccctgcttgaaaatgctcccaaatttattatataatatatataattagatatagtcttgttcttccgctcctgggttgcccaaatgtgatacaataaggccaaggcaacccgaagtccttctt

SEQ ID NO: 253926 - DNA, 1493 bp, Cannabis indica
ctaataataagcaaacaacaagggatattgatatgatcttaattagtgtaacaagtaatgatatgttagttctttatattcatgattacgaagtcaatttaagaagaaatttacaagtgttaaccacttaacctaattaataggttagttctttatattcatgattacgaagtcaatttaagaagaaaatgaacaacctgccgccaaagaccccaaggaaagattgattttgatgtgtaattaattattactattatttcaactattaagtattattgttattatacagagcgttgtccatgccaaaatggacatagtttacgcaaaacattttgcagaaaatacaaaattagttcgaacatctaagtgtaaaatcaaaatgctaatataaaataatgtctgccactgatcgagcaattaatactttcaatgagaaatttaatagctgtttatcattataattaaaaaatatatatttttgattttaaatatgaattattattcttttcttttttttgaatgaatgatacatcttcattaaatcaaatcattcaaaataacattaagtacttcactcagaagaaatgacttcgagtaaatacaatcaacatttaaacataaagctcgagtcaaacaatgagcaacacggttagtcgaggattgtttaacaaatgtgaaaaacattatcaaaagcaaaatgtaatcattgcaagctgagatgcaacagccaaaaggagaagccaatgataccaaactttgtatagccactactacaaacaaagacttttaattccagtttttaaggtctttcatctcggttttaactaaaatgaaaatcaagatatatggcagtagaataaaaagtttttaaaaaatcaggataaaaaaggtaccttcactaacatcgcttctaatgaaaattgggatatatgcacaatcaacccatattccttcactaacatcgcttctaatgtattcaccatcatcatcttcatatgtatcattgatttcctcaacttgttcacgtatccgttgttgatcaacaaaactattatcacataaatcaaccaaagtgaaaccgaattcgtgtattataacggtggctttattctccacccaagaactgaatgtctctaagtccaatagttctcgggggggggggggagtttggacggatctgatcaagctaagattggatctgagcaagtcaagggcggatccgaataggttagggaccctgccccaactctggcgttgtgcgcggaggccaggagaggcaaagacatgcttcaccgctacgtggctcggtcgcttcctgaagtgagtgaacacgagatcgaggcgcacagtgaattgtcctcggagcttgtcttgggaggagttctgaaggaaatttctcgagtaagttccctctagtgtttggggtcatttttcttttttcgtttgccgtttgtatagcataaccctagaaggacgtagacagagttgaataa

SEQ ID NO: 253927 - DNA, 626 bp, Cannabis indica
gatacatgacgatcctaaaatgccaatcttggaggaagaagtctagtatatgaagacggagcatcaaatgaaaagggttcttgagccagaataattttgatctctcttcaacaaattcaactccaatgtgtgctttgctttgaattcgaagcctccaataatgaagcaaaacatgaggctatgatttctggcttacaattggcaaaataggttggcaccaagaatattgagttgtacagtgattcgcagctggttgtcaaccaagtgtttggaaagtaccagactacatgagaaaagatggctagcatagcaaaaaccagggagctattgcaacatttaagcactaatctgtgaagcaaatcctcagggataaaaattccttcacagatatgttagcttaattggcaacaaatccgaaagtggaaaaatacggactagtccccattgcatatctactcactccaagcacaaagacactgggggtatcagccattgatcactcaacttcctagatggccccaatgctcaaatatcttgaaataagcacactctcggaagacagaattgcttcacaaaagatccaatatcaatccccttgatacatgatgatggatgggaagttgtac

SEQ ID NO: 253928 - DNA, 609 bp, Cannabis indica
tgaagaaaaccttctaggtggctggttttaggttgcatgaaggggaagaagagaggaggttgtattttttttgtggttacttagcttttaagtaatttatagtaagggttcttctttttctttttttatatacaatcagccccctaaaataaaagtagaaagggacaaaacaagtttatttaaagaatgactaatttaccctcaaaagcaaattaacctttaaaataacctaggggaattttggtaatttcactaatccaccaaaccaacattctaaaattctaaaatagtccggaatatcctcaaaataatccatcccttaatgtcatgatatttctgaccacatcgtcaatttttcacagtcgtcgggcccgaaaatatttttatttcaaaaatggtatccacaatatccacatatctcaatataaactcagttgtaattattttatagatttcactaattgatccaagtaagatcataatcttacttcattaccaaaataattacatatttaataaaatatgtctaattaaatatcattttattttccgggatattacaccacgtgtgtgtttttataaaattctcttttactaatttatataatt

SEQ ID NO: 253929 - DNA, 1161 bp, Cannabis indica
aaaaaaaaatcatattttttttagcttgtattgattttttattgtttcttttctttatattctaaaatatacacatatatacaattattttttaattatactataaaaaaactatccaaactagtttgccatccattgcactaattcatgaaaatgaacatgaatttggcacgctcaatttttttactgcgttatatgcataagcagttttcattaacagacgaaaaagaaagtgaatttaccttaagaaattttccgagatatggcagtacaattgaaaatgcagccaaagaaagtcctaaggcctcggttctctaaaggcccaaaaaaaaaagaaacaagcaaaattttacgacatgcttatacctataatctaaaccataattgagaagaacttagtacaaaaaccaaggttttcatatgcttacgagttgtgctggtgtaatatcagtcactgagttggaacctgcgaaatggtttaaaagtataagcgaaccgaatccatatccgatccatctgggtaagtaggactcatcgagcccaggtatccctgaaaaccaaaatcatcaaattcaagatcataatctcagagtaaagtaaagagaaggaaccgataaagagattactttaccgaaagtgaatcggagaactgagagattgacttgggaattgtctagggtgcttctggaattatcgtcgagacgagctgagaccgataaggactttcggacgttgttgttggtgcgaaattgagatgggattttcaactgaattaatggaccaaaggggacgaaactggtgctcatttttatttttgccctctcagatgtttgggaactgagaaaattagacgtcgaatgtaagatgccgaggaaaattagagaaaaattgaaaaatgggccagcccaaccacattagttcggcccaaatacatgatttcagcccaatgctagttaatatggtaagttaaatttagatttagaggaaattacactctataccatttttatattgtcctcttttatttttatcctctttttcaaagtctatcatttttacctcttttttaaaacattgtaccaattttacccctatcacttcaagttactctccatgtgactctcttatgtcagggtattttaggtacaatacatataaaaa

SEQ ID NO: 253930 - DNA, 883 bp, Cannabis indica
ataaaacccaacacttttctctaaacttgtatcttcgttatttctaaaaacaaaaaagatgcctagaacactttttctgagaaaatacttggaactcacctaggttgacaaaatgtcaacctgggcactacgcccaggcaccaggtcaacctaggtgttgggtccttgttttgcccaccaaatgcttctgtttgattcctaaaaaaacttgtatctcaattattagtgaaaacagatagtatgcccaaaagaatttttaggagaaatttttggaaatggcctaggttggcaatatgtcaaccagggcgctgagacctagaaccaggtcaacttgggcgttgggtccatgttctgattcccagatggctccgtttgtttcccaaaagtatccatatcttaattgtgtatgaagtagagaatatgcacggaagactttatctgaactactgttggaaatggatcaggttaacagcaagtcaacctggcactaggacctatcaccaagtcaacttgggcgatgggtcccagttttagactccaggttgatccgtttctttcctaaaatactagactccttgttttttatggagaaaaagaaaattctcagaatacatcttcaatattgtggttggaagcctcccaagttaacaatatgtcaacctggatgctgggggcatcacctgcaccaaccccttgattcagctcaacctgcacctgcacacatgtagctatagtttattagtattttagcattatgattttattatcatagacattttatttcatgttccgtatggcccattggccttttacttttgaacactacctatttccaaccttagggctttcatgttcgtactcttggcctataggcactctattt

SEQ ID NO: 253931 - DNA, 1117 bp, Cannabis indica
tatatatttatatagctacagctatagcttgtacattgcatgaggttattggatggaaggagattgagattgaagaaatttgacaagcgagctgtgagataatgagggagacattaattgaaaaagaaagatttataatgtatgtatatataatcttttctttctaataatgagtgagtgaggcagttaggtgaggcctctatgtcaaaatatttaagtcttcttggtgtgccccatttggattcattgccttggccccttttatatttgaattggtgtcttggaaggaatggggccagtcacatattggttttgtcccttaattgattaaaaggggttgagtgggttgggttgggttgtagaagaaagaaaggttttgatatgttaagattcatatataggagagaattaaacgtatgtataatgtcctagctagctatgcctaatattgtattggtgcttgcttttgatggacaattcaagcaataaagtaatatattatatcttttatatataaaatgcggtaatctaatttttagtttaacaatatttttaaatttttctgttaactttaataaaatatactattatttaatatttttttattaattttataatattattatatatatttaaaataaaattatatagatattttataaaaaaatttaaattaaatttaaaatacttgaaatattataaatatttttaatcacacttttaattttgttaatataactttgaattaaaataaatgacaattccgtacaattaggtaaacaacgattcatcatttgtacatataaaaaacgtacacataaatacatctaaaatacacgccaacataactacaatagttaaaaaaaaaagaagacttttttttctattttttactaccttaaaataatttttttttttagtgtatttttacgttaatttacttatatagtaaactacttatttgtacctacgcactgcaacctaaacttaactaacaaaaaataacgtatagaaacgacctacttgtcaactaacgttactaaccaacttacgtaaactacaaccgtaaactttaaaaaaaaaaaacgttaaaaaaaaaacttaaaaaagtaataat

SEQ ID NO: 253932 - DNA, 1032 bp, Cannabis indica
aatgtttaaaaattaataaaaaaactaaatataataaatttttattttaaaaacaataaaaaaaaaattaatgttaaaataacttaattaaaaaagaaaaaaaaaaccctaaacatctcttcccaacacaactcctcccacgccctttcttcttcacattctctctcttcctttctccttcttctcaggcaagctacagtgcagcctctctccgtcgtcggccaaagttctttcctcgtcgtcggccgatggagctcttctcccccttctcttgcgattcaggggtttcttctccgtcatcatctgctgggaacaagggatgcgaaccaggggtcatcgctcttcaccctcatcggcgtcgacatgcgaacaacccccatcgtcatcgtcatcttcctcctcaccatcaacagccgaagaaaaatggaaattttagattaaaaaactcaagtatcacattcaattctatcatagttagataagaattccagtatcggcaatacaactaaaaccaacaccaaagcagcaacgcatcaacctttgcgttgatgcgacgttctcgctttgacatgggatctgtcttctccattttaggtccagaattggtgtgtttagaacccttgaatggtttggtgtgttttgaacccttaaatggtttcttcaagtcatttttgggagcttttgagtgctttacggcgagtagcttcggtttttttgggacttgagctgggagcgtcaggcttagcaccaccagggatttgcttcctcttcttgagtttactcatatgttggtccttggctgccattggagagaataagttcttccttcacctccgtcaaaaatccgtttatggttttgtataaatagggctactcttgtataaatttcaatactgattatgaatagggctgttgttggtgaggaggaagaagacaattttagtgttctcagattttttaggtttggaaaattattttgtatttaatttaattttaagtgtttatgtttttaagtgtttatgtttaatttaa

SEQ ID NO: 253933 - DNA, 992 bp, Cannabis indica
tgacaaactttattgacactaaaagcaatatcaggtctagtgatggtagcatattgcaaagcaccaacaatggacctatatgcattaggatcaagcacaggatcactgccatagtttgacaatttgagaccactattcagtggagtgctatgagttttggcaccttgcatctcagctttgcaaagtaaatcttgaagatacttcttttgagaaagaagaataccagtggctgtaggaatagccttaatgccaagaaagtagttcaatttgccaagatcctttagagcaaatgacttgtgtaacctggttatcaaagtggagactaaagcttcattagaccctgttatcaaaatatcatcaacatatactagaacatacaagcaacatgaagaatctattttgacaaaaagggaatgatcggttttggctgaattaaaaccaagagagagtaagacagaagacaacttatcaaaccatgctcttggggcctgcttgagaccatagatagccttttgaagcttgcacacttagtaggagctgaaggatcaacaaaaccaggtggttgtaccatataaatttcttcttgtaaatcaccatttagaaaggcattattgacatctaattgcctcactgtccaaccttttgtgatagctagtgtgacaacaattcggatggtaactggtttaataacagggctaaatgtttcattgaaatcataaccttcttgttgatgataaccttttgccactagccttgctttgtattgaacaacattgccttcttcatcttctttaattctatagacccacttgcaccctataggttctctgccctctggaagatgaactagaatccaagtcttattcttgagtaatgcaagtctttcaacatccatgactttaagccatttttcatttttcattgctgcattcacggttttgggataaagagaggccattaaaacctttggttttctaattcctgacttggct

SEQ ID NO: 253934 - DNA, 612 bp, Cannabis indica
aaactcgtaaaaataaccgtgtagcacattataataatattacaatttaatatattaagcaagaaaacaagttaattaattaagaagattttgtgcatgaaagtcttataatttttatatatagctttttattatgtgagccgtgagcgtggaaataaataaagtataatatctttcttttttgtggtgtggtggtagtcaatattgcacttatcacctaaaagtcgtgaacattaaagggtcaaaagtcccttttcacaggtgaagaaaaacagtaagtaatggttcatattgaattttgaaatttcaaacgaatatggttagggtcatcccactttaacttcttttctaatgactcaatttctaatgtagaaaatattacaccattttatactcttatatctaaagtgaaaggaaaagtgtattacatattaaatgtagtatagtatagtatagtagtatggaagagatatttgaaagagaaaatattcttttttcttgttgttgttgagtgcttatggctttccaagttcatcgagcatatactcaaaagaagttaccttttagtgataattgttttgttataacatatatttttttttttgttaaagg

SEQ ID NO: 253935 - DNA, 882 bp, Cannabis indica
aaatcaagggttaagaaaatgatcctatgctatgagaacataataagactacttactataaaattattctatatttatacgttccattattggcacattaatacggtttagatcaattactatacctttatacaatcattactaaaaaattttacttttagtcataacaaaactcatgactaatagtaaaaagttgtgactataattataaattagtattcctatgttgtgactaaaaggtccgtggctaaaaatattagtaacaaaaattacaatttgttgtgattaaatgtatttttagtcacaacacttgttgtaactaaaactaaattagtgacaacttgtgtctaaatgttatgatttagtcacaaataattttttgttgtgactaaaagtcacatttagtcacaaaaaatttatattgtgaataaaaagttgtcaccaaaagtaacagttttttgtagtgaatataaatctgttattacaaccgtagtatagattgtaatttaagttaatttataagtattttattttatgaaaactcaaccagtgtcactacatgattgtcctatctcaatgtcattaattatactctctaagagaataaataattaaaaggggtaataatatgtgcattaataaaaaaaaacattattatttgctacaaatggtacttaacactttctaaatgtgttattttgcaattaattaacaatattctttaaaagttattacattaaacaaaatgagacccaatacttaattgcattatataataataatattaacatataagaaagtattataagtactactagtgcattgtaacatttttctgaaaaaaaattactatgtcaccatatagtgaaaaatttaagttta

SEQ ID NO: 253936 - DNA, 535 bp, Cannabis indica
attattttaaaaaataagttgtaatggtatatttttttagccaaaattattagtgtgtaattagaattgttttttgaaaaacctattaagagagagaaattaatatatttgaatttaaaatattaaaaaaaatacttagtttaagtttgaaaaaaccactaaaaaaagaaagaaaggacagaaaaaaaaaagaacgtgaaaaagtgcacctagctacttttaaagttctgattttataatttaatgcatatagtatagtactatgttgaatacaccattggtggaattttaatttttaataattgtgtgtaaggttattattgtaaataatttcttaattcactacaagaaatgtcacttttgccagcatatttttgtgttggcaaaagttggtattgcgttggtaaaatagaatttactcatgttgtgttggcaaaagggggttggcaaatcaatgttggtattagaatttttgccagcataaaatgaaaagcgctggcaaaaaaaacttttcccaacgcgtaaatgtgctggt

SEQ ID NO: 253937 - DNA, 891 bp, Cannabis indica
ctggtgtttgatcatgttgctttttcatcatggattgtttgactgaccaggtagtctttaatcattgctatcttattatggtcttgacaagtatgggtctggatttactttgccaagccgatgtatacttgcacgacttagaggcaagtttagtatttaatactaagtgctaaaatttctctacataagttctttatgctagtttgatgtgttgtaccgtatgggtgccccccaagtgaccttgcagacaagagtcttggtcacttgctattcaccatgtttcacagactttgcatgggtactgtctgtgagggtaccatagtacgcatttggaactaatagaataactttgaaaagttaatatgtgatcaactggttcataaacacaataaatagaatgtaaatatggcaattattcaataattggtcattgttgttgtgcaactacataaattgaatatagaagcctatattgcacaaatttagcttctagatgtcaagtggctactcgtactcacctactaaagccgagaccactgttgaagaacaatgggagaccacgcccaagaagggtcgtgggtgctagcatttttagtactttaatgttgagtagtagaactgctactttggagtagacttctataagctagttattggtagtatttgcgaaggggctctctatttcggtatcttgataggagaacgagccccatgttatcgttgtaccttcccagcttgtaggatgccttactagttatttctgtaacttgataagggcctttccagttaggcctaaacactcctgctgcagagtctttagtgtttaggaacactattcaaagcaccatgtcttctatgaaaaaatttctgctcttgacatgtttgttgaag

SEQ ID NO: 253938 - DNA, 699 bp, Cannabis indica
attataattattatcattattataattatttttattatacaaaagttaaaaattaaaaaaaatatataaaaaatactaatatcgacggaatattaaagttggtctgccggtattaatgtgtcagcgtgtgtaaggacagacattaataccggcagatcccactgctattaatccgccggtattaatattattaccgatggaaatatattttggtcgctactactaatattagcgatcaattattatcggcgaattattactggcagaatccactggtaatactcaatactcgtggtttgtctatttagtattggcggaggtttccaccggtactactcttaattgttatagtgaacctaattacccacactaataagttttattttcttttacaaatctaaaactcctctgggactaaaacttaaagaatcagttgttgaaggtatttggatcattcaattattttatgtgtaaaaataatcatctattaaaagagaataaagtaaaaacatctgaaactggaaaactcttaatttaatcaagaacaattatcatgacagctgaatttaataatgacttgcaaggggcttaatttaatcttgtcttaagataaagatgtatcgaattgttctgatctgaccaacttttttttgcctaactcttccaaacattctacaagtttgaaaaaaaaaaaaaaaa

SEQ ID NO: 253939 - DNA, 657 bp, Cannabis indica
ttagaataaaagtcctcacaacaatgatttataggtcgccaattgtgaattgcatcaaaagaatacaaagaattttagatttctatcccgaataaatacgtaacagatcatacttatcaaatattaataaaaaaaattctaataaaaattaaatagagacatcctaatattattcaaactagaataaaagaaaataacataaccaatcatattccgatattaaatatctatgaataatcattgtaaatcaatggattacatgaaactcgttttattataagtttgaatatgtgtggggcattgaaaaagttgataagagaaatgagaaagtgtattaagtcttgatgatgaagctttttataaaattgaactaaacaaaactcttcaagcttaacaaagtgatatggtcaaatcaaaataaagttgactacttttattttgcttttttggttttctctctttttcatctacttgtatatatatatgtatatacgcgtggtagactttggcttttttaaaaattgcaagaaacttcgattatatttctataaaaaagataatcaaaaagaaaagatagatatatgagaaatattattaaattaggtaatgttaagttggaggtattaaaatagaatgaaataaaaatgaaataatttt

SEQ ID NO: 253940 - DNA, 584 bp, Cannabis indica
aaaggagttttagtctattgtatctctacttgtataaacagttaccggtcgatgagcctaataatatggactcgtggagtaaggatagttaacgccttaactatgtaaaaatctcttatttattattttgttatttacgttattctttactttcttaagctctaaaaatatttagttgtcgaaaaactcggtaaacagtaatgtgcacataattgattcaaagttgttacttgtattaattttcaggtcttccaatcgaagatgctattaagatgtaattgtttatttagagtaatgataaccttgctgattcatcaaaaaaaatattaagtgtttggtatataaattttataacttatgacaatatatattcgttgtcataattttctaacatttgggagagttacttgttactttgagtcaccgccaccattatcatcaaaattaagtgtgtaaaaagatgttacacatcttaattagaaattcttaatgctataagaattatggtgtgtgcatgagttacatttgagtccataacatttatggggtgttatgagtttttatttcaaatggtgatatcctaa

SEQ ID NO: 253941 - DNA, 542 bp, Cannabis indica
gctacaactattggagtgttaacccagttatggtaaggcataggaaggtccatggcttgaacccaaaaaatacattttctcatatcaacattgtgtcaagcaccatcttcaggccattcatggatgatcaagagcttcccattcatgacccaaggacgattgtcgagaacagtgacacaatcttctttcaagtcaaagaaaataccctataaaccagacctcatagttttaaaccgccagtttcccttaagcttaccagtcgacttccaaatctggaccggaatgtccttcaatcttgacctggagactcctttccattcgaagaagttggccaaaaccccaatccgagtaagttctgcatcaagctcaaaattcggttccagttcaagagtcatagactcaaagaaactcatcatagttttcaataccattctcatagccaataccattttgagaaatggtctcattaatttcattatcccctcctggaacttgggagacattaatatcgttaccatgcctcctgatccctgtccatagca

SEQ ID NO: 253942 - DNA, 2066 bp, Cannabis indica
agttgatattcaacggtaatatttaactggcgtttcaaattcgacaaaaaaaaataaatataagtgagttttgctaccaaaaaaaaagataagaaagttaagtgtataaaaattaaaacatgagaggagttttaccgcaaaaaaaagatatggaggtcacatattcttatttttattctcatatatctactctagtttctataaaatttatatttttttataagtgtaattattattaattttttttacccctaatacttgtggctggttccgccactccacgatgcatcttttactattttaacatttaaaaagaaatttagtctaattttttttatggtgatgtacgttatagttatttaaggtattttataatattttgataaattcataataatttacaatatagaaaacaatattcaaaccgtttatctcacatatgtataaaataaaagagtcatgcgtgtaacagacggttaaaactttaaactctattttcgacgtgttaaatttttctaaatattttttaaaattttacaagatgccttaaatatctaaatatatacaaccaagaaaagaaaattgaactaaaaattttcactagatacaaaaataaataagagtacgttagtgcaccctgaatatgttgtccctgtgaaaatttcactccaaatttcaaatgatcaacaacctttaaaaattaactattttgaaaatttaattacgagttacttagaagtgtaatgaataataagtgtaaaaagataatttaaacgaaaataaaattgtctttaatgcaaaataagttgggatcccaaatgaccaaacaataaaaaaaacaaaataagtcttggtagttgaaatttgtaaaaagtaatgttactacaacacaggtctttttttttttttttaaagaagcaaaacataagttcttaaaagaaaacaaaagattgaaatattgttgttgaaagacatgaacaacttggcaataactcggattacgagatcccccatcagctaccgattccatccttattaggtttttaatcccatacctacccatacacagcaactgataaattattagagaaacacaataaattaatcacaactatatatatgtaactcaacaaccaaaaacgtattcatagtcataagtattattaatgcaattatatgacaccaaatcatcagctatgtatgtcatcaggctaagtacgaggggatcaatcttaattaagaccttctacaagagtaattcaacaagagtaataaacttcactaatccatgacaaccactgtgtgtaatgcatggttgttccaaagaacagatgtgataagtcccacaattatggagtacttcatcagtgagtacacaacaaacacaccatatactacagtactgctgactataaactttaaactatatttgagttcaacatgcagacaaagtactatatattatgtataaagtctgtctatatataagcctactatcattatattatactagctagaggcatacaaagaattcaataacatactaacaacacattctaacttccatctacacttcctttgttttcctattgttgccaataggaaactgaacttagtttttgaacaattaggttatatactaataatgtaataaaacttagtccaaattcacattccaagtcattggccctgatccgtcttagagtaaaatgatcaaaatattcttcttaaagtggtcatattaagttattattcctaataataatacactacaaaaaactgctacctttatttacaactttttagtaacatactttttttatgactaaatgtggtttttaatcataacaaaatgttacttgtgactaaaacatattattaagatacaagttctcactaatttagtttaatcacgataagtattgtgactaaaaatacatttagtcacaacaaattgtaatttttgcgactaactttagccatagaccttttagtcacaatataggaatgatgatttataattggtcacaactttttcacaagtaaaattttttatagtgataata

SEQ ID NO: 253943 - DNA, 666 bp, Cannabis indica
cgactcgaggactcaaactaataagatgatgtttggtaaactaacatgactcacaatctaatgaagacaccttactatattgaggacaaagtttcttaagcaaaggaagggatggatggcccaaacaacaatgagcctcagaagtagaagaaacacttggactagcaataaaggttggtggaagtggatcaagaacatacagtccaccagattcatgtcctttacaaataatcatcttcattataagatcctaaaaaaaaacaatgatcaggaaagaatgagatgcaacagtttagattacgagtgagtttactaatagaaagcaaattaagtaaatgtaagactggtgacaaagtgagcagaggtataggaacaacaatgctagatccaagaataaaagatggtgatccatcatctaaggtaatagtagaagtgggactatgagactgaaaattggaaaagagactggaattacctgtcatatgatctatgacaccaaaatcaatggcccattttaagaatgtggaaagaaggcatgcattagcgttatctgaatcaacaatcgtagatgaagacttaagtatttcctgatacctcaagaacttggtgaattcatcaacacaaataaggaccgatgcatcagtagttctaatttttgaactgtaa

SEQ ID NO: 253944 - DNA, 1998 bp, Cannabis indica
cttgagctaacgtggagatattcatacaaggagtttgttaagttgcaactaacttaaaaatttatcttttgcagccaccgactttgagatttatatctctaatctataaatacaactaacacttatcatttataaagatgagttttaggaggtgacttcaaagttgaagattgagaaatagagagagaggtacggagaaaagcgagagatagtgtttgggatttgtattaaaaatcttctgtagatgaagaagattcttaagtaagagtgtaagagataaatattttgagagaatctaaacagagaatcaatctcgagtgtaattgtactttattttatttttgctcaattaataataacaatatcttcagtattcctgaactagctagaatagaatcataaatctcattaatctagaaaacttaaattactatatatattagtgttaattttattattttattgttttaatcatgttctaattttaattactctgttgaaataatcttatcattattgatggtttatttgttaaattttttgttgatttgatttaattgtagtttccccattaatttccaagtaaacagacagaagaaaaactccaacaagtaggtaacaagtagtgaatgttcttcatactaatcgtctctccaaaatcacagttgatgactttcccaggtgctgtcttgcatgcaccacattacacgtgtgacttcaggaataagacatctctgcagctaaatctgcatatctgtcgacactacaacaacatgtcttttagtatacacacaaaaatatatccaacttctaactagtatatcggtgcactaaacgacactaccttttaaatagcaagcggccggtgtcgttttatacctaagtttagtataaatacatgctacagaaagaaccagccttgtagatctttgtctcttaaagaaatatcattaataattagaatataccctgaacaaaaatgaggtccagaacttttcttgtcttaggttctcttttagctgctcttctcgtcatatctacagcgttcgagatttatgatgatggaaaaaaaggttgaatatactccgaaaactcccacttcattttgttatatatatcctattatactttcttatcaaatttgatatttaacaaactaataataatagttataatcaaataattatattaattagtttacaatatatagtgtatacacatacgtgtaaaatttgtgtatgaatattttatatatgtacttatcaactttcaatagatagacccatttttatggattttgcatatatatttaatatcatttgcaggagaattactatcagatgtaacatgtttattgacattcatatttttatattaatttattgcataatgtttttttattctagctagtaatttatcgacattcatattcgtatgaagtctaaattaaatttctatacacaaaggctattagatgtatataattaaaagtgtgtatggctgtatatacataacatatatgaagttggtttcatatatattataataaagatgagcatgaaatgtacgtacggacactaattcaaggcgatgggcaataataataatttaaaatttgaagctaataatcctaatcatcctttttatacgcatcaattatattatgatatcgtttggtgtgtaaagaattttcgtctaattgattaaagtgtttttatttgttaaaatacataaataagttatatatgtgtgcgcgcgcgggtgcctcatttttcgaattatttattttcaggtaagagtgaagcaaaagaaacgataccaggtgacgccaacacgctagactccaatctccctggaggaggaaaaggtggtagccaaggaggtggaaaaggtggcggtggaggaggacatggtggtagtcaaggaggagggaaaggcggtggtggaggaggacatggtggtagccaaggcggaggtggttcgggtggcggtggacaa

SEQ ID NO: 253945 - DNA, 606 bp, Cannabis indica
ttttgtgctcagaaatgcaaaacccgtaatgtattccgttgtacgacaggtcggtcccaggatacgtaataagttctcaaggtatgttactatttttttattttaattgcccttagatcaacctcagttttcaaatcaaataactaccacatttaacggctgtcgtacatcacggaatacatcccttaaagtatactaattacaggacaaaatcgtgtccatatatatttatatacttataatgtacttactatatttcaacctgtaaaccatattataatgtacttactatatttcaacctgtaaaccctagaagtcagctcctaatttgattttggtgagcgaaaatataaagaatttaatttgctatggtatattagtcgttggtaaccgttaattattttctgttattgatcatatatagtctaaagactattgctgttctattatatatttattttttaagactcaatatatattaatttgtttggtcccaaaatcaaagaggatagatatggctaatattagtgaattttttttgtgtattaggtttggtcatgtcatcatcattaattaattaatggttcctaccaactaattttgtat

SEQ ID NO: 253946 - DNA, 704 bp, Cannabis indica
gcaaaattgcaattggtgggcccacatcctatggccgaccactattgcatgttttcaccatttatttatcaattttataatgctgaataattcaaacctagacctagaaggattcctataaatagatagtgatggactcaaattaaaagattatagtagttgatgcacttaaacctttcagtcaaaatttgagccttctcttctcctctctatttttgaatccttctctctctttctcttcaaaaatttgaaccctatagtgatagagtacatgcccacgcatagcaagttggtactcaatcgtagtgtgtaagactgtgaagaatccattcaactaaaggaaaatcgggctcagattgtggtgatactttgctacaaaaaggatataagggttagagatcttagcaagaggtgtcatttaatttcgctgcaaccaatgaaaggtttcttgaactttatatgtgtttaaattctattgttttagaaattcatatttaggatgttaaataacatacatggtagtaaatctagatcctcgtaaaataatccccaacactacagggcatggataatcttcaccatacactctcctagagaatgcccagccagcccctatcccttcagaatcaaaaacctccccaaggaggaccagtcaataaaaaccccccacagcaacagattcttctgtgtaagcacaattggac

SEQ ID NO: 253947 - DNA, 837 bp, Cannabis indica
tatatagttgtgtagctattattagatatgaaatgagataatagaactttttttcaatttagaagattaatgtacattttactattaataacatacattattataacacaactatgttttacttactaaatatactgacacatattttatttttattaaaacaaatacgttcaaataattatactattttaattattaattaaaataaaaaattaaaatattaaataaaactaacactacgtggcttgtcacgtaacaatcacctagtatataaatatatatataaatttctctatcactgaaatccaataatacataaatggttaaatatttttaacaatacatatatatacataattaatctttttttagaatatagatattcttacaacatatataaattatttcgttagcaaacatatcaaaatacataaattaagaatcattaacactgaatatgattgttgagaaattcttcattccttaaaataccaatcgaatgccaattataaaatgaatgaaagctaatgataattttcctttttctttttcttttttttttttttaaaaaaaaaggaaagctaatgagaattcaaagtagtgactttgacatgaaaatataattataataactatcaataatgctaagctacgtgaatgtcacttacttctatgagatagtggccgtactacttgcaattgctacataatatctcaaatcaattaattgtcattataactttacttagaaaccctagaatttcatttcaagagaagatgaaaccctagaatatgaccaaaaaatggcctaacctaacccagtgatctactctaaat

SEQ ID NO: 253948 - DNA, 673 bp, Cannabis indica
ttttttaaaagaaaaaaaaattaaataacttgaaccaatcttggactgacacattaatgtggcaaattaaaaatgttaaaaagtaagattgagcgtaaaattacctctaattagagattattcatacttatttttttattaattaaggttatgtatctaataacgttaaattagagttttgttgcaattatttcaatttatttaaagttaaaaaataattgctaaaagatctttacttattaacaaattacataaagttagtcaataattattagtaatttaattttaaatataattaagtttttataaagaaataaagtatcaagttacgagttatttattatttatttttcttttaatttataaattaatcacaaccattcaataatgatctaatagttaaatataaatataaccacgatggtcacatatttgatgtaactattgaaacctcctctatatatttatatatgaaagacctacaaatcaacataaggaatcctaatgtgcaattgaaataattaaaaatgtaattcctcttttgtctttttaattgacatagtttaagtcttttagtaaaaacgccagagggtggggcagccggggcatacgccccaggccccataattttcgaggccccgaaaaaatttaaataatatatatacatatataa

SEQ ID NO: 253949 - DNA, 526 bp, Cannabis indica
tggttgcgcgctttcttgttaaacttccagtagaggtagaagaggctgaatctgacagctctgtatcaacttctagtggctggaacttcttcaaaaaactcgagctactagcttcttgagcttgaacagataagcacaacttgcttcctgaaagtaataatacttaaaatgctaaggattaatctgtacaaaacatctgaaatcttatcatacatcattcaaaaggaacaacttccttttgaaaacaaaagagaagagaatcaaaaattataccttcagtactattactatctgtagtaattgaagagttgcaactttcattagaaaatgaagattccaagatagagactggagtcactggactagaatgtcggccattttgcaactttccaggttctaagttattgcttctataatcatccatctcactatccccctgagaatatgaatatcatatttgtttcatcaactacaatcagattatatatggtgcaaaatcatgtctatggtattttctttgcgaata

SEQ ID NO: 253950 - DNA, 583 bp, Cannabis indica
atactcaatcccatactcatctcttttggattaacatgaaataaaattgaggactaatttgcggttaaatttttaagtttaactcttagttgtaaataaatatctaaatttaatttttggcattagtaataattataattttggaacttttgtaaggttcaagtcatgaatttttattttttttaagaaataatttaaatatactaataaaaaaaaacacgtggataatgacttaatatttaacgttataaccgttaaaaattaaaaggatgttaatgaaacatacttggtagtaaatctagatcctggtaaaataattccaacattgttgtaatcggagctgccacaatggctgcaatttcgagattgtgttactactttatcaccaattttaaatcatacttcaatgggtcaacctccaactcttcatataaactgttgtacatttctcataagattgtgtcaatttcaaccatcaatgtcgtacttctttcgcttttatacacccaattaaattctttgaaactcgaacaccatcatacaatacaaccagaaacacaggcaatcttgcaattcaatacaa

SEQ ID NO: 253951 - DNA, 3587 bp, Cannabis indica
tttattttagttttagcctttcatatgtatgctcgatttgttttcttctctgtcgtagattttttcctgtaaatatatatgtgtatatatgtatgtatgtatgattatataaagctgggcgcactcactttccgtatactgttgttattgaaaaagaatttaggttataaacacatattgggattaggggttttatctcgtgaagacatggattagaagttttattaacttatttttaagttgggggttttagttttgtttgtctcagaattatatcaggcattatttatacagtattcaaatgtagcttaaggtgcaagtaatgtttagttgtttgggtttcttggatagaacagttttgggtcgagacttaatgtttaaatcctatctaaagggctctgctgagatataattatgcgtacaagtggggccatcatgatatgcaattgcaaattatacattacatatgttgcaaattgtagctaaagttaacagtgaagctaaatttgaatggagtgtgtcttttgcaagcttctgtttactccacatatcttattccagttatgatttttgtctaattgaactgccactttgaaagattttctttcgtggttgataatttttttgcttttgtttcctttattttctttcgtatctcaaggtagttactgttgattagcattttgtttagttatttgttaaacacgaaagcttcaattgatttgctttccctctagtttatggaatacatattgaagaactatagaagtttgtcttgcttctatttttattttaatgccattcaaatagtattggaataagagaagtgtttctctacaaagagtttttttgttgtatgtgacattttgtggaccttctgctagagtcatagattgtgctctatcatatgattgctttgcaattaagttggaggcactcatattgagcaacttaaccatcttagctacctgattgctgttttttagcgggggtgtgaggggtggtttgcaggtatagattttaatgtctacattgtattgaatattcggtgctgcaactgacctgtgttgtatttcatcatttgtctaagcatttgccatattctgtttcatttagtgtattatgttcgttctgttctgtcactaaatataatatttttctcaatgtagatggatgcccttttagtacccactgataacaatgagcttctaggctctgatatattgcctaataagcgtagaaggaagaaatctattgtttgggagcactttgtggtcaaaaaagttgatgctgaacacattagggcctattgtaaacagtgcgaaaagtcttttgcttacattactggctcgaagctggcaggaaccagccatcttaaacgtcatattgccttggggatctgtccagtaactcgtcagaaaaatcaactaatgactggtacacctggcccaagatctgttgttactgaacccccaaagagacgttataggacaagccctgttttcccaaccttcatttttgaccaagaccgctgttgtcatgagattgccaagatgatagttctgcatgaatatccactccatatggtagaacaacctgcttttattgaattcattcggactcttcaaccccagttcaaaatgccaagcttcaatactgttcaaggtgattgtgtggatatgtacctgaaagagaagcaaagccttttgaatcttgtgaatagaatccctggaagagtcagccttgccttggatttgtgggtttcaaatcaagacctggggtatgttttcgtgacaggccacttcattgatggtgactggaatttacaccgccgcattctaaatgttataatggtaccatctcctgattctccggagtcttttagtcaagctgtcgtgtcttgcctgtcagattggcatttagaaggtcggttgtttaccttgactcttgaccaatcctttgtgaatgaaactgcatttgataatctaagaggctttctttctgtcaagaaccacatcctgctcaatggtcaattattggttggaaattgctttgctcgtgttcttagtaacatcgcccaagatgctttggggatcatgagagaagttatttgtaaaatacgtgaaaatgtaaagtacgtcaaaacttcagaaactcacgaagacaagtttttagagctgaaacaacaactccaagttcctagcatgaaggaccttgtaatcgatgaccaaactaaatggaacactacatatcatatgctggtggcagcttgtgaattcaagagtatttgcttgcttagatacctcggaccctgactacaagataactccttcaatagatgaatggagacaggtagaaattctctgcatgtacctgaaatatttgtatgacgcggctaatattttaactgccccaacataccctactgcaaatgtcttttttcctgaagcctcaaaaattcagatggatttatttcaagcttccatgtgtgatgatccttttatcagctacttgaccagacctttacatgagaagtttgataatattggagtaattgttgcctggttttagcagttgctgtggttatggatccaaggttcaaaatgaaacttgtggagtttacattctccaagatttacggtgagaatgctgagacatggattagaattgtcgatgatggcatccatgaactctttatcgaatatatgacacaaatgttagctttaccagaagtgatgatggaagaagtagatgatggcatgatcaaatcagagccacctcatgatatttgtcatgatcatgaaggtccttatatttctactggggatgggctttcggattttgaaatctacatctctgagattacaagtagccatcaaatgaagtcagaattagatcagtatctagaagagtctcttctacctcgggtacaagagttcgatgttctgagttggtggaatcagaacagattaaaataccctactctatctaggatggcttctgatattttgtcaataccagtatctagtgttgctcctgaatgtgtttttgacacccaaataaagagaatggacaagtaccggagtacgttgcatccagtgacagttgaggcccttatttgtgccaaggattggctccaattcgggtcatcaacacaaacaccctcaccaacttttgaggttactaatgcaattgtgaaaatggaattttaggtttagatttaggtttcattttctccctgtaggtatggtagataatgataccctcattggattttttttttctttcttaaatggaccaataagtggttcaagtcattgctttttatgctgtcttaattttcatctattatagaatgttcatagttttttgatgcttgcaatagggaaattgtcctattcttggattctttgaactttgggacttcttgccctggctaatttttccatattctggcttggttggcttatacaaattatttacttcataaagtgtgtcgttactctctagtctactgttaaaattttagattttgtggacactaataataaatattgtgttaagaaaaaaaaaagaaataaaaggaa

SEQ ID NO: 253952 - DNA, 817 bp, Cannabis indica
tatcaaacttgagataccattgccttgatgcttgtttaagcccatatattgacttcttgagtttgcaaacgatgtgttcttcagcaaacttctcaaaacctacaagttgagtcatgtacacatcatcagataggtcaccattcaagaaggcagtccttacatccatttgtttgagttctagaacaaaaagggcaactatagccataataattcgcaaagaatctttggtggaaacaggcaaaaaagtttctttgaaataaatgccctctctatgactatagcctttagccaaaagtcgagccttgtacctctctacttacccatttgagtcacgtttgatcttatacacccattttcactcgatgggtctacaacctttgggtagttcaaccaactcccaaacttcattttgtgacatagaactcaattcttctttcattgcatccacccacaatgcagatttaggactactcactgcttcttggtaactgggctggctcaaaatcatctcccacatcaacctcatgtttttgcatatagacaagatagtcatcgggaatagcaagcccacagtctctttgtgatcttctcaccacaacttcatcgttccccaaatcaagattttcatcttgtactggatttaaggttcaccatgagcttctattggaacttcttcaatcacaggatcgttagtaagattagaagagaaagcagaagcaacaggtacagggaaatagacacactcttccatgaatacaatttctcgtgacacttgacttgaaccaattcatcctcaaatagacagctcagtctgatt

SEQ ID NO: 253953 - DNA, 511 bp, Cannabis indica
tttgatacattgctcctgcgtttgttaaactaaaggccattaccttataatagtacaatctcgatctgtaatgaaagaagtatgctcctggtctggttcatacatcgaaatttggttgtatcacgagtacacatccataaaactaaggagctcatgacctacggtaacatcaataggttggtcaatgctcggtaaagggaagttgtccttaggacatgctttatttaaatctgtgaaatcgatgcatgagcagcatgatccatttggctttggcacaagaacgaggtttgctaaccagtttgggtagaatgactcccttataaagccacatgccaaaaggcaatcaacttcttccttaagcgcttggtacctcatagggtccattttgcagcgcttctgtcagacacctcgcacttatgggtcaatgttcaatcgataacacatgacctgcggtgatattccgacaatgtccgaatgtttccacacgtaaacattcagattctgcttgaga

SEQ ID NO: 253954 - DNA, 517 bp, Cannabis indica
ttaaatatttaatattggaactgcacattatcattacttatgaatataaaataatagttctctttttttttaaaaagtataacacttttgtaaccttcgaaatcaaaatttcgaaccacctaactattaatttaattaattaatgtcttatcatcttaggaaaaataaaaatttgcacattttttttacaaatatgcgtgatacatatttataaaacaatgtgagcaaatgaaatttattattttagattttttttaaaaaaataagtgtaaatatatttaaaatataataatgacattttttttatttattatttgtcagaaaaataactttgaagtacaatcatttagaatagaaactgaaaatgtgattggttcagtgtttgtcaacaatttttgaatgttaaaatatttaatctattattgttacagaatttgaaaatataatgtcatttttgtttaaagtactgtatatttgatcaaaatatagttgtttacattgtgaataataacgcaag

SEQ ID NO: 253955 - DNA, 645 bp, Cannabis indica
aaaatttatttttatatttgttgaccttacttttaaccaacgacactgagtctttaaagcgataaaattatgaataataactaaataaaattaagcaataagaatactagaataaatagaggttcgaccccatgattaaggtaataacttactctccttttactttaagctagtttcctataatcttcttcttcttgatgtgtgtcaatcccagtatattaaggattgattgaactataaatgtgaatacattaatagaaaatatcattgaagatcttgctcagtcgcgttatcctactcgaaggatttggcttcactgaatggtgagaacctacttggacagtcgcatacatactctgttcgaatcttacttgctgaaggtttaagcttaaacagtttcatgtaaaactctatggacagactgttagaggacaacaatccatccaggctttggaaatgctctccacatgtcactcttattaaatgccacattatcctatgcataaattgggataacatttgcccctcaaatctgcatgagaaccatctgctccaacgtggacttactcgaccaccaagtttattggacgggtgataagttgccagagaaggaaaataagagccaggaggaataaggcctgactg

SEQ ID NO: 253956 - DNA, 1014 bp, Cannabis indica
attttatttaatatgtaattattttgttaatgaagtaagattatgatcttacttagggtaactagtaaggatttattgaatgattataaagcgtaatttattaattacggagattatattgggatatgtgggtatcgcagataccatttttaaaataaaaatatttttttcgggaccgacgattgttgaaatttagcgatgtggtcagaaatatcgcaacataatgggggaattattttgaggatatttcggactagtttaaaatttgagaatgtcggtttggtggattagtaaaattaccataatgccctaggcttttattttaagttaaagatttttgggagggtataaatgtcttttgaatggataataaaggctttttttttagtttgacttggttggaatagaaaatatattaataagttttaatataattattagattatgagattatgagggctaaaagcaaaacaaaggaaattctcaaacatcaccctccttctttcttctttctgcccgaagccctaagaagcttcaaccaaggattttttttttctttcttttgcttaaattcttagcaattggattgtagttgcaaggggtagaagttgttttgatatcaaggtataatcttgtttgttttcctttgaattattttagttaagattgagtttttgatttagttattctagagtttcatggctagttgggatatcttgaattcctgagtttattcttaagttaaatttgggaatgtttagattctaattgatgtatattgtggctgccttggtttgaattagataattgagttttagaatcaagttttggttcaaacatggtgaagttatgaattggatgaattgtggttaattgatgtgttggatatgttgtatttggtatgttatactgttctaaaaatgctatttaggtttgtgtttgttttggttcaagctggggaagaaaacctgaattttttggtctgccagaatcggtcgaccggttgttctggtg

SEQ ID NO: 253957 - DNA, 564 bp, Cannabis indica
actggtgttggctgggaaaatctatcttatccaattcgtgatcagaaactccaaaaatattggagttttcacactaaacacaaggcgtttatgatcaccctgtcaaaagatggaggatcggttagaatttgcgagagaacaagactttttgggtacgagataggtgtaacaatcgatgcagcagactggatgattggaatactggaggaactgaaaaagaaagtcggacagcaaaggattgctttcaaaagattcttcagaaacagtagtaggaagtttatttatagaatgtttcgataactctaagggagctttcctaaagatttcaaccttgaagaataatagagttaaaatggtgattattccagaagaagtagaagctaaaggatggtctgacctatacgaatgtctctttggtgtactcaaaagaaagccagaaagtcttcaagacggagtcacgagaaggaagtttgagaaccatcaagcgcttccaaggcagcagggaggtgaaaagttggcgtggaatgcaacaaatcaacatacatgggtaaatgttgtaaaaaa

SEQ ID NO: 253958 - DNA, 1851 bp, Cannabis indica
ttccatccgtgaattggatcccatttaagaccaatataggataaaactgacgatttaagagagagcttataaaatctcaaaccaagtaacctttaaacatgagactgtacctgccgctttttccgttgctgcgagagagcagcattacattctgtaagctcatcaaatatgcagcagatattccaggacagatcttctttccaccaggtcccacttcatcaggagtaactatagacagaaattaatggattcacgtaaatgctcaactattttaatccaaacgtctaattacactaaatgtgtcacagcagcatatataaaacaaaaaggacctgttcttccattgctaactgcagacgcatttactgtaatgggcgttgatgcggggatgtgtctctcagcctgagcaagtagtgatcttgcttcatctctttctttctttagtcttgcaatcacacggcatgcagcatcatgctgccaccaatgacaaataaacaacaaattaggcatatcaacattctagcctggaaaggttttgggaagaaaaattaaataagtaaagttcaatcagaaacaaatatttaagattaaaaaataaatagaaaaaatatgtaaagtgacttataaaatagaaacattaaagttagatccctcttcacaatatcatgatccattgacaaataattgaaatgattggccaaaccgtagcattgaaatattagtagagaagatatccaaacaaaacaaaataaaacataaagaataaatatgatctgaatcaagaaacataacagaaaggaaaaataaaagcccaatagcaaatgagaatgaaaaattcaaattgcctaatcaatttaactcaaacaatacctggtataaagcaatgactcaactcctgtcgtgcagtatggagctgttgttccaatgcaaaattggatagcatcaaactatcccattcctattctcattgaaaatgggagttatacattaggagcatgaatttgatacaagatatacaataggagtgtcgccttatttccttaaaaaaatgaagaaaaaagaaatgatacgtcaatatcataggctgcatgacaatcataaaattacaggggcatagaaaataattaactggtacggaaaccgattggggatatgaatttcagccattactcgagatttattatcaaaatttctaaaagaaattcaactaacttattggaagtgaactcaatttcttcagagtatgacaccgataattgagttcggttcttccagtacttgcctatcatcctatctaatagcctcttgcttggccatagaaagtctttaagagtaactagcccatctataaaccatgcatctataatctattcatttattatgcaaagccaaagttaatggactgtttaacaatatttcgcatctgcctgcaaaagcacaaaatcctattaccacccagaaattatagcaagcctgtcaataacttcctaggccagccccatgataaagctgttatttcccaatcattgataaattgatgaatatttatagtagctataacaaagtgctgaaacgcattaccagttcagctctatatcacgagaactatcaaaatgccaactgtgcaattgcttcacgagatggaacattaagtgtgagaagcaaaaaaatctaaatggcataggttctcgttgcacatcatgatccatgtccaatccataataactatccagtataaatatagagcaaaattgtaaagcccccatttacaaagatagagaaggtacacagaacagaagtctgaatttccatttgactagaagcacagaatatatagcatattccactatt

SEQ ID NO: 253959 - DNA, 1143 bp, Cannabis indica
ttgtttagggtataacagatatgaatctggttcttgaagtactattttaccgaattaaattcctgaatatttagtttattagttgaaggaaaggtcaagaataatgctatggggcatccggtcggtagctaaccgaccgtgacattaacacgatttaataatatcgtgctatacatattttaatttaataattaatatgtgaaaatcaattataggtgtcatcagtgtggtggtgtggtattacatttaggtgaatctgcagaagcctaactggaggtttgcaaaggtacataatggaaataatatcattaagttaaaaccagaaaatataagtttcaaaagaattataagaaagagttgaagtactactgaggctcaatatatataaaattaattaatgtacatgaagtaataaatatataaacatgcatttacattagtgcatcatcatagatagtttcttgccacagagagttgtatccactctgttcttgatctaaggaataagaagaatattgattattaatattatgagtactagtgctgatcatcatctcttctccaaagtggtacatataataattcaattcatggccaggtgatgaggtaggtagtacttgatctgcttccatgctgacccactgatcattattattcatgatatcaatatcatcaaatgaaattattgatgaacaataatcatgatcatgatggttattattattattatcatgattctccattaaactgcacgattcatgactatcttctccatcgctaattgaatattcgtactggtctttgcgattatcatgatcagagtccatagacgacgaatgatcttgttcatcatcatctgagtaatttgtactgctgcaattgatctccgcttcaagagactgaatcacaatattcaatctatcctcatcgctctcttccagtacagctagatcatcatcatgatcttgtaattcctccattaacgacatcaaaaagtctccattgatgagtccagctgacacttcaaataattcttcattattgaactcatattgattaatgatcatgtctacagaaccagccataattaatattttgaatatataagagatatatagtttagagtatagagagaaagattta

SEQ ID NO: 253960 - DNA, 502 bp, Cannabis indica
aatgcaatttcaaaaagcaatctaatcagcccttctgcaaggcccactttcggtcaaagtcaactacccatagcagccgttcatttcctgatccaatagcccatcacgcgcattcgctccacctcaaacaggagcaagtgaagactccaatccgcctgcttctccttccacgcacggtccctatcagcgtcaccgcacacccaattgtagatcgccacgtgtgcgcccatcagctcctcctgcaactagcgcgcgtcacgtgtacctactaaagaagaaaatgagaagtcaacaagtgtattttgcttcagccaaaattacgcacacaaagtccaaaaattatatttctcctacaacttacacctaaatattcattttatcttctcaatttatttcacctaagtaaacattccttatttatttttaccctatcatttcacaattttttcatccaaacaaacatttatttttccaacactcttacacatactctatttatccc

SEQ ID NO: 253961 - DNA, 659 bp, Cannabis indica
tattttagctaaaaataaattgtgtcattagagatgctttcttaagaatacttgaatgtgctaaatatcacaaatagaaatacatattgggtagggaatgctttcccgtcctcattccatttaagaactttaatatgcattcccgtttataccatattacggagcaaaatattattaagaaaataaaatattagacgggtctctatcagggcgggatgcgtcatctccgtctccgctttgacccatttaatatttggaaataaaaaattcttcatccttatccatttcctcatgtagatggggaattctcgctctattagaggcagtattttatgggaccctatccacattataaaagtatgcatccctaatcacaaaaggtggcacaatatttatttaataaatggtatataaaaaatagctaatcacttgtgacgtgtcaatcataatacagtattaagcatcttaattaggatggtatcgatacttaaatgcaagaagagtgttaccgtcaaccttcgatcacaacctctcagtcaattttcgtgctcgaaaatacatgttgaaatatattttttttaaaaaaaaaaaaactaaataaaattatgccggtgttcgttatagttacagcatcatccctataaattttaaattaattt

SEQ ID NO: 253962 - DNA, 1170 bp, Cannabis indica
gaggtcaatcgatttttttcgctgggttggagtcgatgattgaaggcataaagaacgatttgggttctcaatcgctactttccaatcgaaaattgcgatttcagtcacttcagtcgctgagtgcagaggtttcaaattggtgatttagcaaagacttctacaacttcttcttctgcttctttcttctactactctttcaagtccggagttagttcgactcattcgcttgaaaaatgtgtttcgctgatctacgattggagatgaatccaccccagcaccccgccaccactactagccccaaggcccgtagatctgactccagatttcttctttggtatattcgacacgagaatcggttagtaaattggcctttgtgagaaaacaaataagttgataccccatgtgggttttattgtctctgtccttgtatgttttccttcccttcacataagctaaatttagggaaatttcaggatgtttttctaataaaggcgcccaagaaatctccattggtgttgaggatgattgtattggtatttgcaatggtgtgtggtgtatatatatgctccatttgtctgaagcaagttagcacccggaacaaggttggatatttgaatctctaggtgattgaaaagccttgtcaagaactgaatattgattccttggaaactcctcttgtgcactaccccaaacccaaaaattatagcaggtataaagctgtttattagttttggtttttgggcttgatttcatttgaaagacaaatttcatgatttgtcatgtattttagggctgaatgcgcatgcaatcctgtgcgatatttcaccattttatcaatgcagaggtctggaagtgggtggtttgaaacattgttgaataaccatactaacattagctcaaatggggaggtattctccgtcaaagttaggagaagtaacatctcaaccattgtggagactttagatagaatttacaatctagactggtttagtagtgcctcaaagaatgagtgtacagctgcagtagggttaaagtggatgcttaatcaggtgaatatatgctctagaaatttgaattcttatttaccatgtgctatttgccttggttgcacaattagtgcattcatgattagtgcatttcaggaaccattcattattgaatgtttctttt

SEQ ID NO: 253963 - DNA, 585 bp, Cannabis indica
caaacagacataagatgctgagaatagccaccataacctggtatggtcacacaaaaaaaaataaaaatatttactcatttagattatatagatatttctttataaaaaaaattatgctatacaattgttagtgatttggatagtaaagacttgccatggaataagctgaatatgcaaaatcagatgctccaaagttgacaccatcaaaaacaaaagccaatgcattgatgggttgagtagctgcaacaaactgattttcaaatgaaagagattgtattagtttcattgttaccatttagagagtgaaaaggattagtagtatttacgagcattattattgggcaccagtagtgctcagcactttttataggtagcgtcccacgattagttagcgatattcccttaaagtttttcttaagttatatgggacccaatacgtaattacactaatagcaatatgatattgaagagatgaaaatactaggctcaagtagtgcctttaagcaattcttttatattctttgattgaagagatatgagactcttttagctagggggactagaggatcaagctatcttttttta

SEQ ID NO: 253964 - DNA, 701 bp, Cannabis indica
tacaagtcggtattatgttatatattttgtgcctttgttaccgagtctgtctactcatatatgtaggtatatgaaaagacaaaaactgagcaccagtgagttcaaaacttgagggaggttgtacatatcaaatggtgaagagtttggtctcgggacgacttgagcctttattttatagtcgtggagtcaacatatttatataaatgtattttgaatatgattataaagagctcaagatgacatccaaacttttatgtatgatcgtatatttataagagtttaaagtttaagatttgacacgaattttgagagtatctaatttaattaagtaaagcatgcaacaataattaaaaaatcactataacgtgcttagacaagtagggcattacatttaaaaattgaagagtaaagcagaggtctcgtgaccctttaaaaagccatctgattttatttttttcgaataaaacctcgaggcaacatgtttaatgattcgtaatttatagaagtacacaaaattaaagattcaaattcaatgatacaaatgatatttgaaaaaaggctaattttaatttttgcccctgaactttgacatgtaccaaatcatgctccctgaacttttaaagccgtttaaaatactccctgaactattgagattgttggatttaaggatttttgtctaattttattcaattttactattt

SEQ ID NO: 253965 - DNA, 1881 bp, Cannabis indica
aaacaaagcccaattcccatcataataattagagcagacttttcaagtaatctttctattttattgcttaattaagcagtgatcaccactccaaataattgacccacttccatttcaaattaaatgaagccctctttttgatggcttcaaacgcacaacaacaaaagatatataatatgacacatatcaacatgcaagaaaaccaaccatactctttacttcttcttcttttttatttgataaaggtagcagtaatatttaatcagtacagaatcaaaatacatactgaattaggacaaaactagtaataattaataattaataatatggttctagcaactcccatattatgaaagataaagatatagggtttagtgtgcaaaaagacaaaaacgaagggttacatcatcagcatccactgttgggataagacaactaagaacccactagcatttgtctacgcaaggctgtgtccccatgtgattttgatgcacactaggcccctcatttctcactactctcttttttttttctttctattattttctctctgtgcttatcatccgtacgttttacaaatatacctacctttcactacattctatgtttattttattggctaaacagatttcatgatcacctgatttcattttgagcaattaaattaaaatatagtaataattaatatattattataattataagagaaataagaaagagagtgaaactggggtcgggcttgttttgctgagagaacaaaaaaatcaaagatgaaattcatttgtgggaaaggaaaaaaagaaaaagaagaaattaagaacaattggttgatgggtttgatgaaaataataagttggtttaattagttgtactgctaaactatgggcttcatatggtgtatagttaagttacatatactagtgacaacacaacatatttaatttaattataatttggctagtagtgcatatatattaatatgaatattacatattatatgcagaagagactagatggtcaaaagctataatatataaaaataggggagcacgaaaatccttcttccattaactacttctttcttagtgctaattaatcaaatcgaaatataataggcaagaatgagtgggcttttgtttttgacaatgcaaacaactagaggcagtaaacgattctatacctaaaagataaggcaaatatatgaatatcatataataactatgttattttatagcaataatttaaagagcttataattaaagaatataaaacataaaacaaattctattaatttcctttatatatcgtagtcaaagccttcttattagttatggatatatttatgtactcaatcttggcagggtttcacatgaagaagtggcattaattaagcagggaataaaaaacaactgataataatgataataaaaaggaacatattaatattgtgactagtgtctagtattagtgatataattgtcacgttgtgttatattatattttactaaactatagttataagcattgacttttcattaattgtattagatctcccgtatccaattaattacattaaaacttccgttcgaaaatgacagtgttactatagtagacacgtataaataatatacgtacatatgtatacaagcaaatatgatagtcacatttcattacatgatgatgatcacgtggtagacccgaaaaaaatatataacatatagtttttctatattaagcttgtggtcagaatttgaagtataatataattcggctatcagatcataaatctctttcatatatatacttacacagttaccatccttaacaactcaacacatctttaacgaatattaaaatctaattatatattccgttctaaat

SEQ ID NO: 253966 - DNA, 1361 bp, Cannabis indica
tcaaatccaagaaggttggggggcatataggtgacttggacgagtgcttcaaagtcctctggaagtacaacatgaaactcaatcccctaaagtgctcctttagagtcagctctggtaggtatctaggctttatcgtcaatgccccaggaattgaagccaatccaaagaagattcaagccctcctcgatatgaaatcgccataaaaaactaaggaagttcaaagtttgactagtcggattgccgcactcagcaaatttgttgccaaatcaatagacaagtgggtcccattcttaaacatcttgcgaggaaataagcaattttaatggacggaggaatgcgaaagagttttttcaggtaataaaagaacatttaatcttaagtgaattgtaacgtctccgcttcaagcctccattgggcctttacacccacggaataatggctcttatacaagagtacgtcactctggctgcttcatggacttacgactggccctacagacaaacaggagtgtttccagcatgctttgtcctcacttgcacgcttcttgggaaaacttcccaggaggtcacccatcctaaaattgcttcaggccaagcacgcttaattgtggagttatttcgagattggctaccaaaaaacaagatgcaccttgttgatataggtagtaccaatcaatccattaaagccctcttcaattgtgtagtcccatacttacacagtctcagaatcaacccacttgacgttttccaggcgatgtgggattggacagcttacctggtatttccccttacggatcatgggactactgactgtcacattaatggccttctaggcagaccacacccaaaggttcggataaaattttcaagtactcaagtcgaatgaccacctttgaaagtacgatttttttttctgcaatttgttttgtttacgttaactaaagatcgtatcagatcagcataatagctttgatgtaagttactacagtaagagacatatttccaaccaacaaatgaataaagatgtttatttaaattcaaattgagtcgagttcatcagcatgttattaatttaccatccaacgcgtacaaaaggtttggtcgtacccaaaaccccgaacagacaaaaaaagcatacttgtaaaaaaaaagtgaccaagagtcataagtctgctcagtcacttggggggcacctatacgtgtacaaagcattaggtaaaaaaaaaaaacaaacacaattgtgcgatgattataaacaaggaacgaaattcattgaattacaaagcattcaggtccgggattaaaggctgccttgccagccagttgttcagaaaatgaaaaatatattccaagtttaaagac

SEQ ID NO: 253967 - DNA, 1690 bp, Cannabis indica
aaaataaatttccaacagaaccaacttggaaactacatgtagatgggtcgcccacagatcaactgttcggtgcaaaaattgctcttgtcacacttggggggcaatatctacacggagcagtcaaattcgagtttaaagcatccaacaatgaagctaaatatgaagcctttattaccggcctaaaactttcatgggaattgcatgctgaacacattgagatctacagtgactcataattagtggtaaatcatgtatctggggagcacgaagctcggggagaaaagatgatagcttatctaagcaaaatacatgatctactcgcacaattcaaaagctatgccctcaagcaaattcaaagagaagaaaacacaactgctgatgcactagcctaactcgcgagcagcaacataaatgataaagctactctaatccccatccaactccatgaaaaacctagtatcactagcacagaggagattgaattgattgacacatctccaaactggatgatgccaatagcagcctacctcaacaatgaggaactcctagataacaagaacgaagctcaaaaaattagaagaaaggttgtacggtacatcatcatagatggggtcatgtatagaaggggattctccatgccactactcatatgtgttacacaagaagaagtcgcccgacttttgtccgaggtacatgatggattctacggcaaccacgcggatgggcagagtttatccaagaaaattctaaggcaaggttatttctggcaaaccatgatagaagactccaaggcctatgttaagaaatgtgataaatgccagagattttcaaagatacctcgtgcgccgcccaacgaactaactcagatgcaaagtccttggccttttgccatttggggaatcgacttggtcggacaattgcccaagagcaaaggtggagtacagtacgcagtggttgcagttgattacttcaccaaatggacagaagctgagccgttggcaaccatcacatccaaaaaagtgtaagatttcattgtgaaaatataatttgtcagttcggactatcgtacaagatagtctcagacaatggcaaacaatttgatagtcaatccttcactgatttctgtgcaaaccatgggatcataaaaagtttctccgcagtggcacatcccaaagaaaatggtcaagtcgaagcagttaataagacattcaaagatactctaaagaaacgacttgaaaatgctaaaggaaattggccaaaagaacttgaagaagtattatggtcgtaccgcacaaccgagaaaacagccaccaaacagactccatttgccgtggcatatagttatgaagctatgctgcccgtagaactggaacctctttcccacagaagattgacatatgactaagaagttaagcatgcactcctcacagaatcacttgatgaaatcgaagaaaagcgaaccatagaaaacctgaaattggtagctcatcaaaaaaaggtagctcgatactttaacaagcaagtgaaagcacgaaatttttttgtgggcgatatggtcctcaaaagggtatttttgaacaccaaaaacagcacggtaggtgagctcagaccaaacagtgaaggaccatatcaggtgattgaagttctggaatcaggagcatacaaattgggtaagtatgatgaaaagaag

SEQ ID NO: 253968 - DNA, 624 bp, Cannabis indica
caagttatctgctatattgtctactgtgtatactgtgttccctaatgtattctatatttagcttctttactttcttgtactgacccttatggtcagttattctttgtcaagtagttagttatagattaaggttaagtcggtagttagttggtctggtgtgtatatatacctctctgtttcccctttgtaattcattcaattcactttcaagattaataaagttttccttctcttccgcattactaacccttcttcttcttcttcttccattcttcttcttcttcttcttcttcttccattcttcttcttcttcctatcgacacgaaacccccccccccaaacttaggcagatcattccaaatggttcatggtgatgtgagtaaagaacccccctccacgaatgtctatggagtcttcgtcgaggcagtcgaggaagaggagttgacggagtccgtaccgattgaagaaccgtgagagagtgaggaatgcgatgattgtgaggcctgatttgggtatctgggtgagtgtgttgaaggagatgaccatggaatcgtcttcgctgccttcctccgtcgattgcctctgcctaatgttaggttatttttagtattaattttagattaa

SEQ ID NO: 253969 - DNA, 606 bp, Cannabis indica
acaccgactgatgcttccaatcatctctggtacataatcatgttcgaggtgagttctaactggctctggcttctcaccagctgggcctccctttctgcatacacataattaaagaattcagttcatatttaacattaagaaaatatagcacattaaacatctatttaaccatctctacaatttgagctataatcacaaaaaacaagtaagaatgagttcaatcagcagacccgccagtgctagtggccccagaccttggaacattgcctggctagccaacattcctcctcaccattagacactgacccttgagtttgaccaataactttactttacataatgttgagaacccgaaaaatagacaaattacgtttcttttcttaggaaaagatacaaaattcatcactacaaaaaagataatggtaaccccgccattaactacttcctttatgaatttcatagcaatagaaatacatgtcctaatgtaagactggtgccaacagttcatcatggaagaaaggctaataataggcatatctcattcaatattggaccttggacatatcatagttccgaatagaatctctttagaaagaaaatcttttg

SEQ ID NO: 253970 - DNA, 780 bp, Cannabis indica
tgccttgtttgggggtggacttcaaatccaagaaccaggcaacctcgtgaggagaaggagtaccccatccttgggaagcgtagaggacgaagagggcagagaagtacttagtgcccttaggagtgatttgggccgagcagagactgaagaagtcagcgacatccttgaagtacttatgcaagggcatcaacgctcctcgctgaacatgggcccccgaccaggcgcacatccccttgtcaggatttgtggtgcgattattgtgggcaggaatatagcagtccagctcgcccaggtgcccgccctggtcaagagttcgaaggcatgccttcgtaatcttggacggaggacttacccatctagcgcccaagggaccctgacttttatgaggaatcgccgcggcaagctcctcactaacgtagtctacgccctcgaccaggagtctccgtcagcatcgactggctgcccagcctcattgtaccccccatagttcaggggttcaacctcttcctctccctctacctcagagggactgccgggacgcacatcgtccagctcctcaacctcctggacttcagtgtccccgttacgatcctcctccatctggacgaccaaatcctgttcggtgttgggcagagtggcaagccgagccacttgaggatctgtagcgtcagcaagacatgtcgttttctttatatgagccatcatcctatggctaggtacaaggtcaagagaatgtccttcgctagaaggaggactagagcaaagacgagggtgatcctc

SEQ ID NO: 253971 - DNA, 2556 bp, Cannabis indica
accccaagttttaaaatatgaaagattgggttgtttatttttcaaactttcatatagaaaaattttagcttttagatttaggaactctattaagcacataatgcacagtcaataaaatttactccccaccaatgaaaagtagcactagaactcatcaaaataacaacaacatattcaataagagctctattttttctttcaactttgtcattcatttcaggtgaataaggtacaatagtatcatgtatgattccatgtgggttataaaaatcaacaaaagtagtagaatcatatttcgtgctctctatcactacgtaacatcttgatcttactattaagttaattttcagtttcagccacaaataacttaaacatgtcaagagcttcacttttttttttcattaaatacacaaaggtaaaatcagaataattatcaatagaagtgataaagtaacgtttaccatttctagtcaaaactccatcaagttcacaaatatcaaaatagattaaatctagagccttaatttctttttctattaaatatttatgtggtgttttagtaatcttgacttggctacaaaatttgcattttttaaagtcatttaaaaataatttaggaattaggtctaaagtactcatgttcttgattatgcatttatttacgtgacaaagtctagcatgccaagtattaaaagaacgcaacagataaatagaagcattaactttattaacttgaatattcaattcaaacattctctcaattgcatacactccctataaatatctcatttttggttaaagtaaacaaaccaacccctatagtccgtgcaaacccagccttgttgagaaggtaatccaataccaaattctttctcatctttagagtgtgcatcacatccttcagaatcacagttcttctagaggtgaagttcaattctacattaataactatagtggtgtgggagttacctgacaacactttctgatccttagtagaagaaatatatgtttcaaacatagttctatcatatcaaacatggcaagaagcgtcagtgtctacccaccacccttcagatctaccaataaagttaatctcataaatcatagttgtgaatggtaacccttcagtcaggttagcctgcaaagtagagatatgcctgttcttacactttcgtgccaaaatgacctaacttgttacaattctaacacatgaacaaaccaaagtcatttctattaggggtgattgatgcatattatttagttcctttgatagttctaattctaattattagtctgaggttgactatcgtggttcaaattcacttagagattttgattcttaaaatatttcccattaggtttcagatgagtagtgaatcttttattagtgttgttgttatttctaaaaacaagtacctcctattttggtcttgctttcgagcttcctcctcaatgcaaaggcgagtgatcagactttccaacaaaaactcttttattttgtgcgtgagagtatttttaaaatctttccacgatgagagtaagttatcaatcataacaacaacttaaaattgttcatcaatagtcataccttcagacagaattttgtgagctattttctaaagcttgtgagagtaggcttcgattaattttatcatcggtcatttgaaacttcaggtagcgtctcacaatatatttctttgttcttgcctcctcggtatcatattttttttctgtaatgcttctcatatttccttggcagatttatgagaattatataatattcatacagatcatcagacatacaattcaaaattaaattcttacataaaaaatcattctcaacttaggagtctattttcttaacctgtgattcgtacttctcaacttcatccttcttctcggcaggaggtagagtcttagacacaattggtttcaaaataatcagcacaaacacaacctttttcataatgagaaaagaaaacatcttctgtctccaacgtataaaatacataccctcaaaacgaaaaaggcatgttaatgtcagaagtaaatacacattggataattcatgttggcacataactttgaaataatttttataatttttaatgatattaattatatggaccaatatgatcgcgatacttgtatatttatttacatgtaggataattcatgttggcacataactactcttatagacaacacctgtaatttgctaacagaagtaaaggttggcaagttttctcatcaaattttgaggttggaggattaattacaagtaaattaaaagttcgatgagtttaactgcaaataacgatttatattttaattagtgatattataatgtataacattggagatttttcttcttgaaaataaaaatgaaaaataaagaattgaacttccatgatcttcccaacatactcactgtcacacttttgcagtgactcacatgagactagctatattaattatttttctcttgattgtgtcttatacatggtgtatatatatatagtacatgtgtatgtatatatatttacaaatttatct

SEQ ID NO: 253972 - DNA, 2159 bp, Cannabis indica
actatcttcaacaaatcacaccaataaccactagtaactgttctatgagtaactatccctgcccactggtgccaaacaaagaaccaccaagagtttcatatcccatagcgatttggtcacgccttaacaacaacagcaatataataacaaaattttttaaaaatgaatatatttttctaatagatatagataatgcaaggtactgccgtactgcacagaaagatcaataaaagcaaatttttaaaactgggctgagaatttctctatacgtatgacatatgacaaaaatataaatatgagtaatacatataattactaaattttcatatgtaatgtgtggataatgacaagaggaaaaagaaaaaaaaaaacaaaagatttacaataatcaaagaatttattgaaatttatgaatataagagtaggaatgaaaaacctgaacagagcctcgaacacgatcgtaagtatcctttgatttatggtgatataattcttctcagttgacaaagaagactgagccgcacataatcaatactccgactttgctttcactgtcgaccgtgaaaaatacttgacggagtgagacgtatctaggcagaagcatctgaaattataattatttggttaggtgtaaatataactactcaaacagtccaaaatatattttccctaaaaattctctaacataatggtatataaaccgccagtggcggatatacccctcagaacatctttggctgccaaaactaccccttattacaaccttatcccttttttgcccaagaatcaacaacaaccataatataaaatacaatcttggtttttaagagagagagagaggaagtagcataggatggatgggttacagggtttaggccttcctattctgggaatagtggcagctgctgctgttacattctatgtcgtaagcttttctgaactcagagaggtaactgctcttcttttccatctttcctttctcttctatcctcttctctattataccacttcatctcatttgggtatctttacagaaatctttccaagacttggaagattcacaagctgataatggaagattcaagccatcaccaacctcaagagaaaaacgtgccagaagaaaagcccagaaagaatccaaattctgactatatatatttctcctcaccagtactcttttctctcactatcttatctgcctaagcatatcacttctgctttttatatatacatatatatgaattgcttgtagaatgtttatttcatttcttaaagggaaaaaagaaaaaagtgaaaattgttgactatgtcttggtattcaatgatgatctctataattttaagataaccctttaaacttgagtccattttgcatattttaaatttggtggagctttcattgtgatcagtttagtttaatcattattattctctttgtttctctccagcttttactatgtttttacagttcagtcttgtctcacaaattgaatataattatgtatcgatctaacatagaaattaagcaatcaaagattatatatttatagaaccatttttgttttatgaatccttcactgataaggtatggttaacatgaacaaggctataaatattttctaagtttgcttagacttgagctctttaaccctctcttcggtgctcttcagcgcttttccatatattcgtattatctgataaaataatgttgttgtgagtaaagcttgtcttgaatcagtaactacacaaatattaagtcactcaagtgtataattgaaaaggaaagaaaaaagacatattcaattgatatgtggaagtggattgaggaatggttcttatttactacctcatcaacctcttcaggtgagatgataaaaggtggagccattgcaacattgtcccccgatacgcgtacaaacatcccattcttcacacattcagctccaaaataagagcctattcctggaaatttttgaaaatttgttaggacaactttagatgcaaactgttcgaggtaaaaaggaagaaggaacttgccccattcaggagggaatggattatttggtgatttgttatctgtaaactctgtaccaagaaccaagccagttccccttatctacaaaatctcatgtgaaacatatgtatatactattagcatt

SEQ ID NO: 253973 - DNA, 616 bp, Cannabis indica
ttttgttttagatatttacagggtcagtcctatgttaatttaggcttttggcaaaaataaaaattagggccagtgaaaaaatgaggccattagtatttgagccctcaacctcatagttgatatactaattgaattaccactaggctacaacacatatctaacaatgaaagtattattatttattttattactaactatattttaattttttttttcaaaatggggcctgagcggtggggggcctaaggcggccgcctccttcatctcacctcaaggcccgccctgcatatttataaaaactaagtttaaatatgggtaaataccattttgaactttgtgttttataaaagttactaattgaaccctctattttgttaaatgacaaaatggaccttgcattttcaaaaaaattataaataggatcctgaattattttttgtcaaaataaaacttaataataatctgatatagagatgttatgagaaaactgattacattttctgtatatgttcgtattagaaatcgtctaaaagtttgttatattaaaaaataaaattattaaaaattgagctcagattcctatttttaccattttttgaggaaattacacttagta

SEQ ID NO: 253974 - DNA, 556 bp, Cannabis indica
taggaaaatgtgttagaaaataggaaaaatgtgaagaaaaattataaaaagacacatagacacttcttgtgctttcctttatatatatataaatatatatatatatatattagggaactaaaccgcacttcgcgcggatttgaccttagttttgtattctttttttactaatttaactgtattaaaaaatgtaatattttgatgtgggtattataaataaagagaaaaaaaaatattgaaattagaaatgttattaactattgtgaaaattatattaagtttgcaaaattataaaaatttaaaaaaaaaatattggatgtctttacaataaaataaattaaaaataaaagtttattaaacggagcgtgtaaacaaaagttgaatgccttctcacaaatataaatataggataagagttgtaaaagggaccacacgcaacatttctgcttttgaaaacttaaaataagaattatacaaaaatgttagtgtttgaattttttttaatataaatatgtacataaaaagattatgtcgaacaaattatggtgataggaat

SEQ ID NO: 253975 - DNA, 545 bp, Cannabis indica
cctttagaaataaacaaaataatcaaataagcaacgaaaatatttttaatatacccactatgattaacttttaacgggtttactcaacaatataacagtatataatccaactaagctcgtggtgctcaataacgcaaaaatttctttaaaaacttttatttctcatgaaaacatgaaacaattaatcatattaccctaaataattaggggcaagctataaatatgcgcaaaagccttgaaaggcatcaaagccaacaaaattgtggcgcaacaaatcttcacactgtataaaatattaattcgctaactaattgaccaataatcaattcttacaaaaataataatagaaataaatataaagactattataacttaatgtaaaattaaataaatacacaaataaataaatataataatatagttaagtataaaattactaataataataacttaataaaatcacgtaattaatggacttaataaatttaaataaatgtcgtttcaaaccaccaaatataatagctttataaaatacagtatgtgca

SEQ ID NO: 253976 - DNA, 2159 bp, Cannabis indica
tgtggcaatgggatttgtgtctgggactgggttgaaatttctttggaatcttaacaataggggtatccgagtggaggaggtttttctttatgcttcgattgtggttgataccatccgagtggaggaggttttttctttatccgagtgggcttttacctaccagaggtttggctgtattccggtctcctccttgccggagaacctattttgtaatgaccgtgaggtctaattatgtttctttatctaatacatttcgacactaatttaataataataaaaaaaagaatccttataggtttacatttgaattatataatattaaaaaaaatgataaattaatggctaaataacctttaagtgaccagccagaggatagaggatgtgggccccaataatatccacttataaatgaaagcttgtaagggcaagcctagcccaaaataggtgtggatccaggccattgtgctgttggacacgtcagcctagaaactacgtggcgcaagaaatcgcatccgcacaatattaccactgaaggcgcgcacaaattaacattgcgtctccttcatcagactagcgaaggttcatagagagggaggtgaccccgaaccagtaggaccaacgacgatgaacttggtttgaacggcagagctgtaaatccaggtacgatcttactcccatttcaagttcgcgtctcaatcatttactccttaaaaatcgattaagtaatgatcatttctcttaaattcgttctagtgatctgttatttttttgtcttccgaaaattcagaagacgcaagaaatctgttttttctttaatggtttctggctgtttgatgcgattatgggaacagcgtattaaacttggatttgtgtttgtcttctgggttatgtgatttttgttgctaataggtctgtatgcttttttaaacatatgctgcgttgcccttatttgagttctttgtagattgggcatagttcccaatattttatgaattcttttacctatgcgttctgttttgattggtcaatgtgtttgatgatatatagttgttgtgaaatgatggtgctcttccttttgggacttttggtgttctctataagcagtgccaatttagcccaagattcaatgcaaataactgtattttttgaggaaaaaataaataaattgggatgagctttatgcagtgttttttgtaacaggattctaagcactgttagtatcgttgttgctaacttcgaacaagtagctgagcatggttacatgcttctaattcagcaatgaagcgttacgtctatatcaatgatgatgaatcttcgcatgatctgtattgtgccaatcgcatttcaaacacaaaatataatttgttcaacttcctgccgaagaatttatgggaacagttcaggtgatttatgatttgatgttttcaatttcttgatatagtattggttgcggtaattcagtcgatttggattgttattataatatactttatataccattcctgtttttcttggctaaatgaaatttatgctaaacatgtagtatgtatctatgtcttggttactggtttttctgttcccttttttttttatttgaatttgttgttaaggaacacgatatatttaatcataggctttaatcttgaagaattttagaaaacatttactttagattttatgctctagcctagaccttgtttttgtttctgttgattttattctgccaaaccttcattgtttttaattctattattgttactttcaaaagaaagggttcgaatcttatatttggcattgcatttcaaatttatgttttatctctatccaacgacatgtacttctatgtgataactttctactgcacaaacattcttattctcttttgtcctgcctctcactatcaaatactatgttttcagccgcttcatgaaccagtactttctgctaatagcgtgccttcagttatggtctcttattactccagtaaatcctgccagtacatggggtccacttattttcattttttgctgtctctgcaacaaaagaggcatgggatgattaccatagatttctttcagacagaaagcaaatgagaaagaaagtttgggttgtttagggagggcataaagaaacatgtatagaaaatctattctctttcc

SEQ ID NO: 253977 - DNA, 677 bp, Cannabis indica
aagatgacaaaccttgcagaaaactctctgctggaggacaacttatatctcatgaggagttgattctttacattcttggaggtttagggcatgattatgaccctgttgttattactttaacttctcgtgttgaccctataaccttgcaggaagtgcaatttctcttgcaaagccaagagatgcgattggaacaactgaatactccaactccaggtgatctcaacactcccagtgccaacctcgctgctaactctcgaaggcctgtcaacttcagcaatggtcctcctgggtttaactctcaaggaaggggttactcaccacgaggtcgtggccgtggcagaggaggaggaagaggaaaccgtcctgtatgtcaactctgcaatagagtcagccaggtcgtgtccaaatgctatcatcgctttgatatcaattttcaagcacctacatcaggccaaggacaacagcctaatccaaacgcttcattgggacaacaacctccaggtcaaggacagcaggcttactactccgcttcctctgctaacacacatcaagataatgcctggtatatagatagtggagcaacgaactctactttcatttcaggtcacaaaaacgacataatacaataaataatgtgtagatctatgcaatacaataaaaaccaacaatacttgtat

SEQ ID NO: 253978 - DNA, 735 bp, Cannabis indica
atagtcaagcgctatatgtcaaaaggggatgtgtaagtttaatatgtttatattttctcttagcatattccatggttaaatgatttcagcttttactactgtgccagattgctaaaattttgctgcacttttggctttatcttataatgttatggtgttatgcaacaggtacgttcatgcagagctgcatggggcttctaccaccgtgataaagaaccacaggcctgaacaaccaatacccccactaacattaaaccaagctggatgtttcacagtaagtatggttttttcataattgttaatttttctgtagtattattgtcaatattgagttagattgtatggtaatagtgtttaaaccttagctttttaataccattctatataggtgtgccacagccaggcatggaattcaaagattgtcacgagcgcttggtgggtttatcctcaccaagttagtaaaactgctcctaccggggaatatcttacagttggtagtttcatgattcgtgggaagaagaactttcttcctccacaccctctagttatgggttttgccttgttatttcgcttggatgagagttccttgggttcacatttaaatgaaagaagggtgagaggtgaggaagaaggaatggatggggttgatgaaagtgctcctcccaaagaagaatctgattcggagtcagagactgaagaacttgaagagtcaaaaagcctgcctagtttgcctac

SEQ ID NO: 253979 - DNA, 660 bp, Cannabis indica
gttagtcatttaactcggttagtcatctgtttttttttttttttgtttttaaattatgaatttgaatttgaatgtattttttgttattaaataaaatatacatttgttttcttatttaaaagttaatttgaattttattttaagttactattattttatttttttatttttttgtaagcagctagatatttttagtttaggcttataaatatcacggaaccaattagcttttatacacattcttatttgtttttgcttctatcggttaacacaagtaaatttctcttatttgtatcagtaaagtctgcaactattaaatactagaccaacattcctcaggcttaacctcctaatgttccacacttggcaatccttttttcttagcaaagctcttatcgaagaccaaagcttggtatatatccttgtctgtctataccaacatttcaaattattattttctattttattagtgtgtactacattactcttttctattttttcttaatgcaatctcgtatgtttttattttggatatgttctttagatgttttttgtgattgtgtatctatcatgctatgcatttacatggagtagtgtatgcatgtatttcaaacatcataacttcattattcatcctctctcctttcttttttttttttt

SEQ ID NO: 253980 - DNA, 1150 bp, Cannabis indica
ttttatattttcgtatatacaactgacatttgcaaaaacacggtttttcataaagcatgagagccatatacattgtctaaatcttattgattcatgcattgaggatacatttggtgactattattgtgacatttgcgaagaaaaaagaaacccacgagttcgtgtttattattgtgccgagtgcaaatatgtcgctcacgtacattgtgtactctcagaggtatgtcatgattcgtattattaatttagatatttcatataatatttgattagttttgtaggaatatttgctatactacaattattactttttcactacagatggttgctaatattttattactaaaaagaaatatgtttttgtttttattaacttgtaccacagttatccttaatacaaaagttctgctcgtataaataatacttatgtatatattaatatgtttgaatttaagtatgttcaccaatttttctatatattttatcatatttaagatcattagaattatgtttttgttccattcaaaaatgaaacatgttgtttttataaatttgtaatatttcaattaattgagtaatcttttatctatattttttgttttgaagagaaatacaattttagcatatataatatttatgctttttaatatgttttgaatttaagtatacatctatattttgttaaataatgtattctttacttttcaatactcttatataatatttatagatggtttgttttctttggtgtttctatgtgtatatagattataaaagtattaaaaggagaccttagagatgtgaagctgaagactttgtaatcagatcttttctataattctgctgatgatcaacacacaattcaagccacatcatctcttttcacatttagagagttcatacgtaaattacctgtaaacgacctaagaattcttaaaggtcagttttattgggatgataatgatgatgatgaggaggacatgatgagtaagagagaagatgctcgtgatgagattatcgtaattgaggagcttatcaaatattctactcttgcaaaacatgactttgtggagtttatcttcaaagagtttcattctagctatagcaaaaagaagttgaaaataaaagggagtgatctagcattgaaaat

SEQ ID NO: 253981 - DNA, 692 bp, Cannabis indica
tttcttttatttccatactaatgtattatatctatttatttattttttgtcttcttcttatctttgaaatcttttttattggttaatttattttgttattagtatttctatttttttaatgttaatttttattgatttacctaatatattatattatagatctatttttgctctactttttctttttctttttagagttttattttatttctttcctcctattttgtaaattaattataattataaaattagaaaaagataaagatttctaaatatttcaaattttttttttaatattttttttattattgctctatggtatcttaatgcatgtgttcaatattatattaatatggtacttaataattggttaatattttttaaggtatttaatattataccatatatacacaattttttttttttttatgaataatcttttgtacaattttttttgcttatttatttatttattattaatagaatattattatttgacaccttaaaatggccaatacaaataacactatacgaaatgacacttaaaatttgtaagactcgatattgaaatgaactaataacggtatgtcattatttatagtatttagcacttcccttagtatttacttattagagtttaactttttgttcaattataaataactttgtaattttttttcactttgcgcacc

SEQ ID NO: 253982 - DNA, 620 bp, Cannabis indica
tgtgggaatcaaccacaaacaaataatcagaaactattttgaaggtcacaaacgtaatccaaatattggggttcaaaacgcagcaaaccaaaccaagactctaaatattggtggcaatcagatgtaggggaatgtcaatcgtatatattttttgaatttaaactctgctaaaaaaaattgtatatatttttgaatttaacctcacccaaaaaaattgttatttttgaataaaaattaaaaaaaaaaatcacccactaattttttataaactaagaattcagttatatagccacattttatatagaaatagatatatgagagtctttacacttttacataacatgtataacaatatgaaagaagcagattttgaggaacaatattaacaatatgaagatttaactgaatccattttctttgtcttctgtattctatagatgtgttagtaacaccatagtaacacatgtagagatgcataatacaagttctatatcaaagtttggtctctcagttatattctgggattgtagtttacagtgcataaagactcacacacagagtataccaagaaagaagtacataacaagatagatataatgaaattgaaagtttctttcact

SEQ ID NO: 253983 - DNA, 1289 bp, Cannabis indica
ttataattaatagcagaacagaataagtgattaaaaaaaatacaagtataatttaaataaaatacataaacaaaatacaatagcaaaaaaaaaaaatatgactacaaactaagaaattggtatgaacaatacaacaacaaaaaataaataaattatcgaatccaaacattgcctcttcaatcccggccaaaaccacgaactcagaaatcttaaatcgccacagtcactgtcagcttgcaaagaaaaatattttatttctgggcagagacaatactctccttgttattaatttcaagtaagtgagcacaaaatgtaagctcacaccatataagaaaaaagcttcattttcctacaaagaattacacaagacaacctaaaaggaacatattaattcccaaaaaatgagaaaacaaaaaaaaaaaaggcttaattaaacaagtaccaattgaatcaacctcatcactgtttatatatttaatgtaattattaatttttttttcatattatatatatatattgataatgagtagttgaaaacagacagagagaaaattaaatagccataactttgtaaaaaaccaatgttatttatataccagctaataataattatggaagaaaaacagatattttaatgggaaaagtaatagtaaataaattatagaaaagattaatgtaaaattgctacaaataatctaattttgctccaacaaattatattctaaattagaaagatgaataagatttaacatatatatatatttatataatactctaccatgtgtgatttcgtggttaaagattaactaaaaaaatattaaaaggttataattaacacttttctatataattattactgaaatataattgatattgttatatatacctgcgcacgccatagaagatcactgctaggcttgaccttatggcaggtcaaaaatgcagtttcaacattagtggacttaagtgtttatttctccataaaaaataggaacgcatctgggcatagaaaaaacaaaatagctgttataatcaattgttcaccaaaacattaccacaaaatgagaccagaaacacagaaaattaatatggttttgatttcagcttatactcactgctgtcaaaccaacattactaggatttgcagcgcatctgggcagagagagaggcgacgcgcatctgggcacagagagaggggaggcgctccatatgtctaggccgccggagaggaagaaagagaaaagaaaggataggtgggtgaggtagccggaggtggctgggaggtctgc

SEQ ID NO: 253984 - DNA, 1154 bp, Cannabis indica
ttctgctacacacagagaacacaacactgatgaagatctaaggaaagaacaagtgtcttcagaacttcaagattaccaactggtcagagatagagttagaagataagtaaggccaccagaaagacttggttatgctgactgcattgcttttgcattggtagcagctgaagaaatcgaaaattgtgaacgtactacctatacagaagctgttactggaaagaatagaaagaaatggcttggtgccattaatgatgaaatggggtcacttgaaagaaataagacatggattagagtacctagacctaaaggacaaagagtaataggctgcaaatggatattcagacacaaagaagggttgcctggtgaagaaatcagatacaaagcaaggttagttgctaaggggtttaatcagagagaagggattgattacaatgacatcttctcccctgtggtgaaacaaacttcaattagaatcatgatggcaaaggtggctatgtttgatcttgaaatgaatcaaatggatgtaaagacaacatttttgcatggaaatttagaagagaaaatatacatggaagaacctgagggatttaagaacatggaaactgatcaagtatgcttactgcagaaatctctatatggcctgaagcaggcaccaaggcaatggaacctaagattccatgaattcatgttgcaaattggatactcaagaagtgagtatgacccttgtgtttactacaacaagactcctatctggctattgctttatgtggatgacatcttcataattggaaaggatagaaagtctatagacatgctgaaagaacaacttagctctgaattcgaaatgaagaatcttggtgaagctaaaaggatactcgggatagatatcaagagacaaagaccttgttatgttttcttatctcaggaaggttacattcaaagattaattgacaagttttgcatgagtgaggccaagtcagtcactactccacttgcctcacacttcaaacttgctcaaaatcaagcaccagacaatgaagaggacagattgtacatggataatgtaccctatgcttcctgtgttggaagtctaatgtattgtatggtctgtaccagaccagacttcgcttatgcactgagcatggtgagcaggt

SEQ ID NO: 253985 - DNA, 1233 bp, Cannabis indica
gtcaatatggttgttttaggcattattagtaaaatttgttaaatacaaaaaaaaaaaaacttgttgttttaggcatatgtcgtgtttaaaaatcataaacaaatcttttggtgtcattttataactgaaactaaagaacctttaagtgtgacattgttatccgtattcctgaatgcctcatacatagcaatcacggaaatgtgccttagactatctgcaatcagtacatatcttttgcctaataatatcacgcagggcattatattccaggagttagtcgaaggtcctcatagttagcaaggacaggaaggtttccaggactctcactattcatccactactagagaggattagagtctcccaaaatagcgagtatcccgagaaggtagcaggttagcgcgatctaggaaggatgtggcctaatgatcctagattctacctaacagtatcccatctggagctcaaagcaacagttacatatcatcttacaccaaatcaaatcttgtcccctgcgtcaagccatggtagtacgtgtacgtgcctctaaagccccctttttatctaatggactatctagacaacaacatttcaaggtgaaacctttgagtgacgtgtgtcctcattcacactaaattccttacaacttacagtccgatcatgttgtggtatctgcccttgtggcgtgttgagtttcaaatgctaagtcggtgaagggtatgcccttactcacatgtatgcctataaataccctcatttttaatgtgcaaaagatgaacaatttcatacttaccgaacctctactaaaattcctacagagctaaggtttatattgtaaacacttagaatactcaaacactcacctataaagctaatgcaacaaactcgtgaactagggattatcaacacccaaaccacgtaaaaattacctatctatcatttactattttatatctttattaaactctattttattggtttccgaaaatctacaactaatgttgagaaccaaaaacattatttttttattatttttttaattactttagtttacttttttaatattttttttatacatatatttaagttatttttcataagttaaaactaacttgtaacaaatttttaatggtagtgagtagtaaaatatagtttagatgctaacaaatatagtttggtatttaacaacaaacaaacaaatttagtcgtaatgttatgagaaaattaaaaaaaaaa

SEQ ID NO: 253986 - DNA, 852 bp, Cannabis indica
aaatttaattttttgaaaaactaagataaaaaaaataaaagaaaaactaaaaattagaaaacattaaaatggtctccttttttcaaaaataatttttattatatatacgtatatatattttacatacgctcctggttcgaggtcgatgtctacggttgggtccaaggttccaatccgaatttcaaaacttattgttcggattcggagtctgatactagggtccgtgtctgagtttggagtccggtaccaaagtagagccgaagtcaggatcgaagtcgggatggagatcaaatccagatttattgagatataagtggtgggactgagttcgtgtcatggtgtggtgtggagtagaatttgttttagtaaaataattctgaaagcaatttttagaaaactttaatcaaatacatttgaatttttaaaatgcgaaaaattattttttattcttaattttgaaaattaaaaattgaaaactcagccaatcagcttttatgaacacaaaaagctttgtaagtatgagaaaattatacaatcttttatttttcaaaaaaaaaaaaaaacaatcaaagtaactattaaattatgatctaattctgaaatttattgccatttcatgcattgtaaattaattaaagtacacacaatacatacatatatattgactattaataaatgtatagtgtgtctctggttttcttcattgttgagaatttgtttctaaactccacctaatgaaagaaatattaaacatttcagttgaggacaatttcagcggatcaagtacatcaacttcgattggctgttcacgatgtaagcatattaatatttgacaaaaaatttgtatacatg

SEQ ID NO: 253987 - DNA, 2321 bp, Cannabis indica
tttctttttccttttttttttctgtatttggattattcgggattttattgctttttccttgagatctacatcttgatttgaggtgatttccctagtttttaaaagaaaacagtggagatttggtggattggggtgtttcggctggctcacgaagaaagaggagtttcctctatttttttgttaggccggtatttttgtaaaatgaaacttttattttacatttatgtttattttttctttatcgggtataaatgtaaaatgctttctttattagtttattatagaaaaaatcccttttattttcttaaaaatacaaaaactgctaacacttttgtagaggcattttgtttttttttttttttattaaatacatgttattataaattaaagtggtatgtcttttataatggaacatatactccaaccaataatatgcttcttccaaccttaaagcatatttagtcaagccatgaacaaccatattcattgttcgtttggcatgtacaacagacacactagtgagaaagtaaagaagacaagaaatatcaacaattagatcattaaaagtgccaatagaactagaacaactatataaggcattagtaaccatgcgagcatatttttacttgtgaaatctgtagttgtagctgcatcgcccaaatcaagctgtgaaagattgccttggcttccatttcattatatggaaaatttcattgagaggctttgagagggcagaaatcacttgactaacattgtcacgaaccaaaacaccaactcctattgtatttcgtcgagcatccaaagctacatcaacatatagtttgagatttcccaattcaggtggctgctacgatacaaagatggtagggtagtttaaagtccttgaggtagaatagagttgcaggtgatacttttttttaggtaaataagtcaattttatttcatcatcaacctgtacatcataacagaattacatccacatattcagttaaacaaaaagaactaagactcacaaaattcctaagtcctttgactgagattttcaaaccatattctgtccttctctcctatttttaatatgtttagactataaatcttggtaattacaatatgtttaacaacttgaacagaattagttgttgtttgcagtacttctttgtcccaaagtgctttgtttctagttttgaaaatcatataaacatatgtgttgagaaccaaaatgtaaattcttttccgcaattttccatgatgaaatctacgaatccaattcaagagccctaaaaaatgatattggttagtaccaatttcaatccaacagagcatctctgacagacattgcttactgtatacgcacctgaagaacaaatgttcatgagtctcctcattctacctaggtgatacatttcttgagctgatctataattagaccaataataattctccgcgaaggaggctagatggttagcaggtttggttttgtccatggattacctaattctgtttggcccaatatacagaagagtgtgcaaaatatatgtgccatctcaaatttcgaatgcaccattgataaataaactagataatctcctttatgcatcgaagaagaagcattccagtcaaaacaaagttcgatgaacgcctcacagctcgagcatatttacaaccaaagagcgcatgtccaatcgattcccaagcttggtggcaaatcaagcaagtcgcatttgtaattattttccttcaaacaagggatgttgcaaccaatagagcatcatggagaactcgccacacaatttttttaaatatttgtggcattttccgtgaccaaaagaacttccaccagaaagaagatgaagtataggacgaagatatatttgttttttccaaggaagtagcgaaatggtatccagattgtacagtgtatataccagatatataaatgatgatgccaaattagttttccatgggtgcagaaatagcacagcggggtgattaaaatatgatccacatccaaggctaagaagtattcatgaagcatattggtattctattggcgttcttaatgatgaggttggccactactgcatctgcagggctcctgtagttggatggaacaagagcgctatgggtaggtatccatgcgtcagaaccacactttatgtttctaccctcacaaacttttgaacgcaaactagcagcaagaacttctcttccaaagaggatctcgtgccaagttaaagagggagagtgaccatgaggtgcttcaagaaaagagttgttggagaagtaacgactctttcgtagggctgtacatcagttggttt

SEQ ID NO: 253988 - DNA, 1881 bp, Cannabis indica
ttaatttccttattaatttacttgctttcttattttcacttgtttttattattttctagttttaattttctcttaaattttatattgccaaatagaagtaaagatttaattttaaagtacttaactacaatccttgtgagatcgacatcactcttataatttgttatacatatacttgcgtggtaaaataccacaacaaatttttggccccgttaccaggaatttttagttaatattattaaaagttaaatttgttctaatttagttttttctttttaattttagtactaattctgttggttttatatttttctctttctcaggttcaactagtttatgacacgtcaaggagcaactgtcagattgcctattgatcgttaaattgagaagacttgcagagagaatagaagaaagaaaagattagaaaatgctgcaatagagattgaacacgaattagatatggctgaaactgtcaacgtcggcaacaatggtagtaacaatggacgtgttgtagaaaaattacagttttacaaatattgctacttatgctgctaaaaataaacattaggattatgccacttacaaacttaaaattttgagtatttatgccgctatttatcctaaaataaacaaccaataattattctagggttgggtgaataaatgaaactgaatgacccaaattaggtcatatataatcatttatatataaagtatagtttttttttttgaatattcgacatttatataaaaaaaaaagtattattaattatgcatgcatgtacgattgaagttttaaataattggaacgccattaataacgattcattaaattataaaggtatattacgaagcatcgaaaccctatatatagtgaagattacaataattatttttctagtaaaagagagaacctgttgttgtactatttaatttattaatttgttgttaataatgggaaaagtatgtaattaatgatttgttagttatgttttgctcatttataacacgtgcatacgtgactatttattttttatttaatagttttgcattttaattagagttatttttttttgttttttaatttttatttttgtttttgaacaccgacataatgtattacttgaattattgttctggttgggtttaatattaattaacgacttatgtcatcactctatttatatataaattaataatttggagactctcaaattacatagcgtagttaattttaactatataattaaaagtagtgtgattcttactttaatacatgttattgtgtgtaattagtgtatataatttaagtgtacttaacattacttatatatttaaccacattaaacccattgcacgtataaaataatgaaaagaaaaaaaaagttaacttaattttcccgaaattttagagataattttgcatattaattaaattgtataatttgactgaatgtatttgtatatatatatatactaggtgaatgtacgtgccgagccacgtattgctagtttcatttaagattttggtctttttaagattttgaatgtattttatttttaaagattacaaattttttgtttgaaaaaattaaatatttatatttgaaatattatttaataatgtattaaaaataatattagtgtaattataaaattgtaaataaatttattattggagtagtagattattctatttagttcttttttttaacatagcattgtaatgtaagtttatatctataaatattctgtaaagtgttaatattatatgaacatctccatttataaaagctaaaaagtgggtcaatgacagaagtggtatatctgcaatcacacaaagatagaagtggtatttctgcttcctatacttatccagag

SEQ ID NO: 253989 - DNA, 636 bp, Cannabis indica
ctcataaccaagctatgttttctaagaagatctctttgcatcaggattgtaacaaatgtgatggaggtagatgttgtcatgcctaattgagatgtaaagccaattccaagtactaaaagatggtgaatttctcaccattgctaaaaaaaaatacaaagagcatgatccccttatcttcatctctcatgtgcagagatgtctaggtaagaataattttaaattctttattttcttaacttggcaactctggtatgttagaaacaaaatgagagtagttctggaaaaagaaccaagaactgaaaacttggtggatttgtgctagacatactacgagtctgttaaagaattgcaccatgctacatctcagcatgaacaaagggcaagtgccaaatggactttcctagttgccggtgtgcttggaataaacgctgatgtcagccgaagagagtcgtgaggtatgtagtgtggcagcagctgtgagagactctagtggagattgtataggtgccaaaagttgaatctttcatagacctttaaacaatcttattattgaaattttggccattaaggtggggttattgctcagtagggatgtttatagaatgtgcaatccgtagtttcaaactccaactaatc

SEQ ID NO: 253990 - DNA, 604 bp, Cannabis indica
cgaaatcatcaagagctttttagctgtggtcagaccacaagaaaatggacaagtagaagttataaataagattctgaaaataaacttcaagaagaagctgcgggcatgaaaatcacactggctggaagaactcccaagagttctttgggcatacagaataacaaaaaaaaacttcaaccggacacactccatattcaatggcatatgtatgtgaagcattaatcccaatagaaaccatagtaccttttcacaaaagagagacttatgacccaactcgaaatcatgtattacttcaagaatttctagatttaattgaaaaactttgagaacagtcacaagttcaactccaaatgtactaagaaaagatttccaaaaatttcaatttcaaagtgaaaagtcaaaagttcgaacttagagatttagttttgagaagagtacttccagcctctcacgagccagtagtgggaatcctaggactaaaattgggaaaggccatatgaaatttaagacaaagtatgtgttggaacctatcgcttaaaatgaatggatagataaaaaaatctaagggcatggaatgtgaattacctacgtagatactattagt

SEQ ID NO: 253991 - DNA, 1096 bp, Cannabis indica
ttacataattatgtgtaactattcttaaaaaaagatacaaaagtattaaaatgataaaatacacataaattttagtaattagctcatcaattatcataaaaatgcaaacatatagaataaatttaagctcgtataagagaatgtattggtctacttaaaaaaaatgggttggcccaaataaagtatatacaatacgaatttttcgagtacggtacaaaattaccgagcttacaagtcttatcgggcctactttataaaattgttgcacagtaggacactagccatatttttttatggcatggtacgaaattatccatatatttctatggcccgacataataagatccgtattttaaataaaagcttgaaaaatataaacccgactataactattgaaagtcctttacctttacttttttcgtagaaaaatgtagggcttgatgtgtttaccaaacaaattattttataaatttaaatagtaaaaataataggtataaagtgtttttataatgcacctctaaaaaagtacaccaattcattttttactatttcagtgtttaaaaaaaaaaatagtttaattttttataatcgtatacgttacaaatatttaattaaaaatttgtgtaaatttttttaaaaatttggaataatttataacataaaaaaaagtattcaaacagcctacctgcgtataaataattaaaagtgtcacatgtgtaaataaatcaattgaatcttttgtttgacataaatttttttgaattttttaaaatttgattaaatatcttaaataagtatatgtaaatgattataaaaaataatttgatttaaaaaatttagtggctcctgaaatagataaagttgattcatttcatacaccataaaattttccaaatgatataatgctacaaccaaaaggtttcagtactttcttattttattttttatatattgctaatgatgtatgattaaatttatcaaaaaaatatatttaattaattcttaaccatataattctttctgaaaatattaataaatgcattaattcccttttagcatttctccaatcttagaatagatgaaaaaaaaaaaaaaa

SEQ ID NO: 253992 - DNA, 925 bp, Cannabis indica
atttaacaaaataaataatttaactaataacttttacaaaaaacacacatcattcaaaataatattacatgtgaattgtagcataaatacttaatgttttatattttatacatttaaatactttatctttatttttggaggcaaaaatacctaatgttacaattctcttacacctgttactaccacttctattaacttataaatatgaacatgtggaggtcccaaatacattatatttatttattttattttaaaacctcatattcttaatattagagtagaaactaaatgttctacttgtttaaaaaaatgagagagatgcaataccaaattaccatagttatgtgaaccaatgcaatatatggaacacgattatcgaattgaagtgctaatactatgttaaaattattttgagaactgaatttttttttaaaacaagtatcattaagtttctaatattaagaatattaagttttaaaattaaaaaaaaaaagaaaaaaatgtaatgcatctggaccctccacgtgtgtatattatgagttaatgaaagtagtagtaataaatgtaagagaatcgtaacattaagtatttttaccttaaaaaaataaaaataaaatatttaagtgtacaaaatttaaaacattaattatagaaaaacttatcctaattttgtgagtcttttctcgtaggtataaatgtacttatatttttagtgaaaatataagacatttgtggctgtgcaccaaaattgagcacgtgacaccttcttgaatgtcccgtcatcaacttggtttttgtgctccaaaattgaccacgtatcctcattctccacacaccactttttacaaaccttatatataatcctatacttatgtaacatgtataaaaatactaacattctttacactctatactctatagtcaa

SEQ ID NO: 253993 - DNA, 5437 bp, Cannabis indica
ctatagcgttgtacttatctttttataaaaaatcctaatctgagggggattcatctatcttttttggcctatataaacaagaatgtaaatcaaatttaagaacgactgaagagataaaaacaagcaactttgagattggaaaacacattgaagagcgagagagaagagattcaatgcaatcatcatcatctatcatcattagagttcttttcttcttctttttttattcttttgtttagttatttaattatgaacatgattattgtggttattaagaactaaacactcattctagagtgttgatgtaactattttagattatgaatttaaatttttagattattctcatatttattcttgctatttatttatgtaattttgtgttaattattatctttttaatgcttgattaccattaattagtatagatattctaagttttacacttgagagaggtaatctaaagtcgaacttagaattacatgacataaaaaaagtgtgagatggagagattccactaattctttgagtttcatttaaagaaaattatattgctttatgagtgcttaattgattaacattgaatagagatatcttattagttaattaaagttaaatctatcatcactcgaaagaggttaatagattacattaggattcttgaaactacaaattataagataaattgagatttaatttgaaatagagaaatcaatgctctaagtttttactttctgatttaaaatcgttgtttgtctgattattttttcatttattttattatttaatttttaattataatttactttgtattatctatttcaagtataaaattaaaaagtataataattagtaaaatttaataataaacccccttggttcgacaactttttttagtattaaaattttgttataacaacactgtacgtttgcagtaaaaattgtatattaatggacaaagttaaatataccatattttttgttgtaagaaaatgtaaaaaacttttaatatatattaagtgtaactacctctatacataatgaagtagaattttaattatctagggtaattacagaatatattatcttttattaacattcacgaaccattttaatttattaatttaagtaccaaaatgaaaaatatttataaatagggatcaaactgaaacttccattttagttttattattagtgaggtgatcgtttgcccaagtatagagtatcccattgttaacttaactgggggaaaccaagccaacgtgggcggtagaagacgaaccacacagctgcaacagctgatagagctcaggatcatcaacaccaatctgattaataaaaacaggtatttttatcatcagaattttacataacccttctctttttcctctataatgggtaccaagagggaaaaaggaagaagaagttaatagcaaaagttcttctgcaacgggtgtcgaagaatcatattctcacatggttttacgaatttaaaccaaaagattatacatttcttttttttttgggtgttttcttatagcattaagaaatggggttgctatacattttcagtttcaatgaaagttataatctgggaactgaaatcgtgtggtttaccgtttaccgcgttgagtttttgtccctcttttttctctattgtttgttcaaatcgtgtgttgtaacctgtaagaatgatgcttgtaaatggtcatataatgggtttggcttactagccatgaaacaacaggtaacttgggaatatgcttaagttgcatttctcacaaacgaatgtagagtgtaattggagaatcctgtttctgagattttgaaaaagaataaacttataatggcttttgctttcttgcatatgaatggatacttgtcctactttagcttttggggtaagaaaagaggctcttttcaattgagttactaaattagctatcttattaatttgaaggttaacaaatacttattttttcctgttttggttgttatcaaatttcatttgaacttttgttgtattccaacactaatatgtggcattttgttaagaaatggagctggcttttgctccccccatgtacctttctactgggaagagaactcttggaaaggttaagcctcataaccccatgctttctgcaagccaaaagtcttttcctcggcgattatcaacatgtttggcaactttatcttcccaaccaactcaggtttctcttacttttaattgcctgttaaattattttaccttcacatgtgctgactgttttggttccaggcagtggaatttgaggtagagaacaaaaaacatgatctgttgagagctgttcaggacacccaacggggtctcataacaacggctgatcagcgctctttgatagaggaggccttggtttgtttccttttttaaatagtgttagttatcttatttaggatcacttgtgtataatcatggaaattaaagtgtgattgttgccacaggttagtaatagattgaagtttttctataataaagtgataaaagaaactggcaggtgagtgtggaagggtacaacaggggtaccccaattgacttggtgaaattggatggaacgtggcgattgcagtatacctctgcctctgatgttctcattcttctggaggctgctgctagacttcctttcttccaggtttacaccgttagtctatgtttatttaagatgcccgttcatctttattcagaggtttagccttttaatctatgaagtataagtttacatttcctagactgtgggagctcttgttttgcaattattaattttttttttgttgaagcttttgataatgattcatcaaaaaggaaacatagagaaataaaataagaaaccaaactcttatatagtgaagaagagttatgcaatacattatgaatcatacttcaatagttcagatcagaactgcaatcttttatttttctttctcttgttcggtcttgtattctaaccataaactgtacagttttctttacattatgttagtgacgttctttgacatgggcttttttttttgttcctctgtcttgtttacaattattggggttataggttgggcagatctatcaaaaatttgaatgtcgggatcaatccaggggaggtataatccgcaatgttgtccgatggagtatcccaaatttgttagaggtatagtcgtgataaacatgctaattctgatttaaagctgcatatttggtttagagatatattacctgggcaagtttcagatttgtacatttaaagcaaatctggtggataatgtaaaaggaaatttgaaatacattgtaactccagtctgtgaaactcacattttacattgacatgtaatgctctttgttttcatacttgaaggaacaagaaggtgcgactttgcttgtatctgcaaaatttgatgtagtttctgtccgtaatatctaccttcagtttgaagaggtatgtttttcttcttttgtgaagcatgactttcaaaaatttcaagtttaaatgtgtgtggttgttccctctacatggttctctgtttgatgtaccattacttaatctggcctgctctattgagtcatattttctcttcttattcttaaacttcaaattgattcagacccatttatcattttgctttctctcatttacctttcttttggagttacatgatatgctaccctacatgtaacatccaagtgaaggcggcaaagtccatactaagtactaacctaaccctatgctctacttttctttccaaattatgcattgtctatgtagatgagtttttattccttgtataaacacacatatatatttatgtatatatgtaattatctggtagctttttatttatttatttattttttattttagctaatagccggaaagatgggaggagtgtgttcatacaattttttttaatttgattttctgttaagtacttttgcaaacttcctgtatcttttctttagttcacaatctgctgtaaactcagacttcatccaattccacaaatgccaaatctttgtgaaatgattttgatgtagactcaattatgctgaataagcgagtctgtcgattcgtcaatctgtatcaatgttcttattataaaaggaaatctgcattgtggatgccatcgatttagcttgtcttgtattgtccatgctatgacatgccatgctttacatattttctttacgccctaattgattgacacttaaaacccttttcacgagagctgtaaataaattggtccatatacgttgcaaaaggcagctataatggctcattttctttcgagcatcactactttatttcatttgttttctttctttctcccaatacaagttctgaatattcagcttctaaaccttatctgaagcccttaagttttttatggcagataactgttcaaaatataaaaatcagtgaagaactgcagtctctaattgccccagcaatactaccccgttcatttataagtctgcaggtaaataacattaaacgacattgttctgttcatttcctttcacatatggtgatattacatcttcaatccactggattgtatttaaagttctaatgccaactgaagtttagttcataattaccaatatgcaaataaagttctacatgaaggttcagaccccttttctttcatcatatgcttcctgaatgaataaaaccttagcactattacatcttagcaaatttcaactgctgcttacgtcaattacagaattatgttattctatagtcaagaatgagaacttatctaatgattggagtgcattagttgaaaggataagaaaatagctacctctggctatgaaagcttatgaatcctctcttacagattttgcagttccttcgttctttcaaagctcaatttccagtaacaaatagagctctttctgcgacagattcaggaaggtacaacatgtgttatcatgaacattgtttaacatttccctcctagatttgcatgttaaatttaaaacttaaaacatacctgctataaacattcagagaaactcacaactcagtttcagtgccatttcagatatgctaacctgctataaacattcagagaaactcacaactcagtttcagtgcatttccattagctgcatagaaatgttgaatgaaagcataaaaatctaaccaaacaagaacactctttactcactcagcacataagaatcaaaaaattaaaaactaggaccaaaaacaacattaagaatggaaaatacaagaattgaaccaaagaattaatgagggatgatcaaaccagtagtccatatgagatggtaccatcgctttgcatatgaagaacagaagaagcgattaagaaaggaaagagaagcaatttgagcttagagttcaagccatttgagcttaccttgctgatttactctaga

SEQ ID NO: 253994 - DNA, 554 bp, Cannabis indica
aaaaaaatataattttagtgatatattctaaagaagcttacatacgcagtaatataaaagtatgctgtaaaaaaaaattagtaatgtattttaaaagataaaaaagagaaattgataagtgtgctctaacactatgggtgtaaaatttgcaatataatatcaatttccacttattttaatttaataaaaattataaaaaatcaaatattaattagatgtggtgaagatactaaacacattgtggtagcaatgctgtaatatgttttaccattgaatttgcattggagaagatagttaatattaataattaaaaaattaaaataagtgatgggcatggggtaaagtgaattaaggggagattaaattggattgagaaaggtaagaaaagttgggttgtctctattgaatgccatctcttttatttccaaacctcgtattaaatgcagcagctggagtatccacccaccttccccactctcctctcctctctcccccaaaaaaaaaacaaaacttaccttcctctacacactactctctctcttctcctactaact

SEQ ID NO: 253995 - DNA, 1093 bp, Cannabis indica
ttaccttgattccgaattcaggtgtgccagccaacctgagtggaacaactgctcggtgaattacaggctcctaaatcacatcaatcacaacataggtaagtgacacgctaaatcactttccggggacttaaacttgaaactaaaagtttccctatcgatggataacatggaaataccctaaacaacataaaaatgggaaaaactagggttcccaaaactgccccaaccggtagaccagttccccaaacggaatttcggttctgtggggtttcctagggaccaaccagaattccggttcttacaggtccccctgaaccgaaattccagttcagtgcacgaatcaccagaaattccacaacttcaccaattcaaccccaaactctaccaaactttccagacctgttatttagaccaaaaagaacatatcccaagcaataaaagaactacagaacctcaaaatcaaatttcaccattagagaccaaagtttgagttctaactcaaaccttgtctaaactccaaaccaaataatcaaaacatgctaaaaccaacatatgaaacctatttcaactaaagaaaacataatccacaactcaaaatcctaatactcaatccatgcaataaataattacttaaagcttaagaaaactatggaaaacaaaatcctaaagaggattaccttcaatggaaacaccaaaagctaactactaatcacaaaacaagctgaagaactccactaaggtgctggttcttctggggctcgagagaaaggagtgaagagagagaagagagctcgtttcttgatttttgattttcatgaaaaataaatgataaatgtaataacttatgtattaactactaaattatctaaagaataagctgaaataaacttaaaataaatcttgctaaaagacaaaagaaaccctcggcaaaagactagttttcccttcccacactaataggcataaagggcacttaagggtattttcatcaattctaaattctcgactattcacgacaattccaatgtctaactatacttccctgctatactaaaaaaaactaagatgtgattctaatagccaaacaccgctt

SEQ ID NO: 253996 - DNA, 745 bp, Cannabis indica
tttaccaaattggtaataacattgttttacagtgatgtacatttaacttggtaatatatattgttatttatttaaatgtgcatgtactttttatttgtatttatttatgtgactgcttgataaatattttcttattgaatttagtagctcacttttatcaaatttaccatgtgcaaagttgtaaaagttagaaagtcggtagtgagtgagaccttggaggcttgtatgtgtattcgttgagggttatataattgagggtgatctagggcacgctccatttaatttattaagtgttattaaattaatgttgtatttacttatttattaattattatgtatttaaagtccaaactcaactcaattatgaaatattttatatttatgaacaaaagcgacattatagttttccatattctgacacttgtaagtaagttaggatttttataaaaaaaaaacgggcgttacagttggtatcagagccttgacccaactgaaagtgtggtagacatcgaatcctttaggggagattgtgatagtcaatagtctcatgatccataaggagaaataccggcttcctcttctcaacttttagcatcttctaagtcttctaaaaatttatggtattcccgtttgggtcatcctgctcgtgatattgtttctaatatttcttcttcatgtaatttttccatttccaaaaataatcatatctctttttgcttctcatgtcaatatgttaaatctcatt

SEQ ID NO: 253997 - DNA, 912 bp, Cannabis indica
tgcaacataaaatgttatttctgatctttattaactagtaaatctgattatattgaattgggttttatttagggcacaaaacccaacagttgttatgctaaatatccttggcaggcctccagactgttggttgtcaagatttggctattctcgccaccaaaccttcatggcaatacttgtcctcctttaggtagaggaacctggtcggatggtttttctatagaccctccctaatttgtcgattaatctcccttggagaggatctctcatgagatcctgacctcttccagcagttatttcattgaacagccttatcaactcactagcttttgttatggcagtcttgttctgcttgatgagatagaagtatgtactcttagtcatccatccatctcaaaaatttgcgtctctattgtaaaaatgtattacaaacaatagcgcatggttctatagtttgccggcttggtaaatggccccactaagtctgattaactcgagatcttctgcaaagtttacatgggactcgccaaccgttggcttacctatttagggccccatctctccagcataacacaggggaccagatcttgtcgtggtgcgtaggggttgctctacgttggtcattccttcagtacgtgacgccagtggaggatccctcttaggcaacaaaggctggcgattaagaccaacatggttagtagtatccaccggacgagtcttcgtggctaggtttttgattcctgctgagatggcggggttagacacatccattgggtttgtggtatttccagttgtggctagaacacagacatcaagatcaattgcgatagggtcttgaggaagacctgatgaggcaaacattgaagttggggttctcaaagaaagtgcaaaattattaacttcgaattcggc

SEQ ID NO: 253998 - DNA, 645 bp, Cannabis indica
gaataaacattttctttttgttttcggttgtttgtgcttctgctgctgtcatcacaaggaccttcccttacatcattcactatcccacctcaatccattcatttcttcttctccataactaccttgcttctctctctctctgcttatttctttctctggagtgttcatttcatcatggctgttagctcgagtgagatcaatggagacgatgaagatgaaaataatctagccaatcgtggccgttaaaaggaattgtaagacaaatattatagtaactcaaataaaaagtttgtaattattgagtaattgtatatgttacgagtgagacaagccactattatagtaactcatactcaactgaatggaagggaagccagctcgaaaacatgattaacacaaacagaaaaagtagtagtacaccaaaaaagagtaaacaaattcaaaaagaaatctttggaaagattgaagattaaacatgagaattacttagataatacattctgtttaaattgtctataacatgctttagattgattggttcacttttttattattattataattcttttttctcacacaaatctatatactaaaattaatgtaaattagattttttttgaataaaataagttagttatgtttaat

SEQ ID NO: 253999 - DNA, 666 bp, Cannabis indica
cgataaaaaaaaaaataaataaatagaagtttgtttagagaaatgtgataggtcgcagtaatacatattacattttaacgttaagtgtgtaaattgatgtcatggatggagttaatggagttaacgtggctgtcaattcattaattgatgtggcattttttgattggatggacagaaaaattgacaggaaatttagacagacgatcttgatccgttatgtagatacggtactctcctttttccttttccttttttggaatgaaaatcttttgattgggtaaaaactgatattggattaacttaaacaatactaaagattacttttattgtagatactctaatatcaatactctattaaacacatgctgattaatattatatgacactttcaaaagcggtatagctaggcactactactagttgtgccttttagcattttttctcgagaaatgctaaaagacaccagtagtgtctagtacctttttatatgtcaatattgctattggtctaattaagtattgggtcccatataatttaatataatagcttttagaaaatatcactagccaattgcaatgcgacatgtcgaaaaagtactaaacactactagtgcctactaatattagaatgtttttttatttctataaagcaatataacatgtgttt

SEQ ID NO: 254000 - DNA, 568 bp, Cannabis indica
gttatgattgttttactgaaactatttctgataaggaatattgagtaacgaattatacgacttagcgaaaatataaacttttggcattgaaaggttcagaactagaagataatatcttcatgaaagttttaggaaattaaattctctttccaatgataccaaaatctttgaaattggaattatattcagagagatagtataattttactaaaacagttttgcaagaacattattcaagaaacgaagcaaatgatacagaaggaaaataacttttcgacatagtataactccgaattaacgaaatgtttcttcatgaaacttatggaaaatcgaataagctttcaaacgatactaaaatcgctgaaaacggatgtgtaattagagagatatgataattttattaaacaataattctataaaacgggaaaacaataaggatgatgacttgtaactaactgtgaccatagaaagtgtaacagatgtgttccataccttaataaccaagtacaaagataaagaatgagaatgatctcagtaagtcttgaattatggagaatacaactctgat

SEQ ID NO: 254001 - DNA, 596 bp, Cannabis indica
ttagtcacaacaaaaagttactacatagtattcgaatattagttgtcattaatttagttttatagtcacaacaagtattgtgactaaacacacatttattcacaataaattgttatttttgtgactaatacctttagccacgaatttttagtcacaacataagaataataatttataattactcacattttttattttatttttagtcataagttttgctgtgactaaaagtaaaaaattttatagtgcgagggcctatattgacaacaaagtcgtcactgataacagtatcaatgacaacttttttgtcactaaatatatattttttagaaataataattgcaatccaaattcgttttcatttgttaattattttaatatttttttaaccatctaacctaattttaaaggaaaagtaattaatggtctcaattccaaggttctctctccatttaacctaaacctaataactacatctctcaaactctctctttacctagcagttacacagtggatgtgtaaataaaaaaacctaaaaccctatcagctttctatcttcggcaccaaatctgatctagctccatctctctctctct

SEQ ID NO: 254002 - DNA, 1008 bp, Cannabis indica
ccctagcaacacaatgggcgaccttattagcagatttacaaataaaagaaattaaaacattctttaaagataataaaattaaacgacagtcagccaccaacaaaccaaattgtgatggcatctggactgaactatttattgcttgaaccaccatcaacgcatccgactcgacaaccacatctttccaacctttatctttagcccaactcaacgcttcttttattataatcacttcagcaatttcaggaagaagaatcacttctacttgaaatggattcaattaatctttcattagattcacgagccacacaacaaaacccggacctttgatagctctgtccacattcaccttgacctttaaactttctggtttaccccaatgattgcactgaaaagaaacactagtctgaaagagggacgactaagttctagcaatcttccattggtcaaggactgaccgagccgacttcaccacactagaagcagaacaaggtttttgctgccacaaaacctcattttggatcttccacaaactccaactgaccattgctgcatcaagaacaatatcaccacggtcctcgtctaagagtgcaaaaaaccagctgctaaattcttggtataaattagaatttaatgcaatagctgataaattccagcaactacgagcgaatccacaaccaacaagaacatggaaaattgtctcatgctcatcattacaaaatggacaaaataaatccacattaacgtgctttgtgctaagttgaacctttgttggaaggcagcctgtacaagccctccacaagaaatgttgaacttttggaggtacttcaagtttccacaattttttccagcaattttcctcttctagatgcagccaactcccagtagcagattgcagaaacttacaagcgctcttgacagtatataaacccgagtgttccatgttccagtaccaagaatcatcgtctgtagaactacttaactgaatgctcataatcaaatttctat

SEQ ID NO: 254003 - DNA, 1634 bp, Cannabis indica
agtgtgaaactatcgagaattttaggtttttaatagtgataccttaaggtgcccaacaccaccaatgtggcatgttgtgagtggttagtggttttcaatattatttattaaatcaaaatatgtgagaccctctgttaaaaaaaaatagtgtagttttcaattgcacaaataacaatataacataactagtggttcttggtaccttgtagcattttttaaaaaactatattctaacaaaaaggtgtccaaatatcgtaaattgtacatcaatatataaactaataagatcatgtaagatacttaatttgtacgtttaaaccagtaaaattctacttaacaattaatgagggagcactatacactccaaattgtgagacaaactattaatgaaacaaaaataatataagatttgtcagccctgaaacttagaatatacaacttgaaagtcactttatttggttataaaaggttctgacatcatgtattatttccatgcaacaatagagatatcatatatctcctcaattatacatattttcttcaactagattttcgtttataactttcacttgcagtatatttatatatatatatatatatatataattataataatatgggttatcagcagggaagagtgaatattgcaatggccacagaagctttggttttgataatgatgataattggtcagtcagtagtgttgacaagtgccaaacacgttgttgcctttcgcactggcggttggacttttggcgtggcttgtaactggcctggtaatggaaaggtctttaaggctaatgacacacttggtatgtatacatttttcaccaaacatatatacatgaattgttttcatttctcttcaaagatagtaattttcacaaattaatataagtcgatctctttcgaaaatgaaaattaaaattaaaataaaccaatgaagacgagcaagacaagtctcatgaccttttttggttggtcgttgatctgcacataagttaattaacaaacagttcaatatatattttttccaaatcttttgaaattagtagagctagataaaatatgttgctgaaaaagtttatttcgaaaaataaatgagaaagtaatgctttatgtttttacttgtttataactttataatgacaaatgctttattaaatgagcctttcttgttctcccacggatctagatgctatgtctagtaaataaaaatgtaagccttaacactttattcataatctactcataatatttatttgatgatatgtagtgttcaagtacagcccacaacatcacaatgtggtacgtgttacaaaagctggttacctgaattgcacggctcgagaaggtgctcgagtttattcaagtggaaatgacaacatcaagcttgtaaagggacaaaactacttcatttgcacttatcctaaccattgcacttttggagttagacttaacataactgcagtttaatgtattcattaaattaatccctcctatatatctctttctgtaataaaggaatatatatattttgatgtaatcatgatttgttgctattaaaattaattaacttatttatatttgcttgaagaagttaggtttgtatactttaaacaaatccaataaaa

SEQ ID NO: 254004 - DNA, 793 bp, Cannabis indica
tttttgttcaacaattatttttagttgtttttattcatgtatatttttttatggtatatatttttagttacttcctgacattttttttattgtatgtgtgttgctatgcaatttgaatacatatatttagtttatttttcttacacattttattaaaatacagtgataagattttttatttttttaattgacacaatgtgcagctgtagatattgtcatattaattgtatattacccattatattatataccccattataaaatcataagaatttattatttctattattaatgtaattatgtatttaactcttaaaaaataaattatcattttaactgtcactaacccaaaaaagaaaagaaaaaaaaaagttgaaagtatgaagttgtaacaacaaattttatgaaaatataatgtaataatacaaaaagatagatcaagataaatttcaaaatgaatgataaaagtatatgacgatatatacttaaatgaccaaaaaaaaaaaaaaaaacgacaacactgttaaaacaataatataatataataatatagattattcactaatttatatgagtttataagtttaaatacaaaataagattctaaaatttactctccaactataatcactatcctaagatgttataaattaggacttaactcatttaataattcagctaaaaagtaaaacacatttaatagaaccatgaaattataaaatagatggtacttttacaatgaccgggttggcctggtcaaccgtcaacccattattttattattattttttaa

SEQ ID NO: 254005 - DNA, 1345 bp, Cannabis indica
ccaatctccaaaataaaaatgctaaattaaaaccctaaataaaactctctctttctctctttttctttttcttctttttcttcattttcttctttttgttggagtagactagcagcctcctttttctatcaattcacttacgcctattttatcttcaagtcactaccctgcttcaataatatgcctagcatatatatatccaatgtatatataccaaagcctttaatactcaccttaggcccaatttctttctctcctccttgctttgttttctctatttaaatggatgggcccataatactaaatgcaaagtttgtatttaaaattttaatacaccacacataattatattgaattaactatgagaaactaaataaacaaataaaaattaagaaaattaattaaaactaattaaaactaatttcaaaatactaaaattaatatttattcaaaactaaataaaaagctactaaaataaaataaaaatacttgagaacaaagctaatttaatgcacaaaaagagctaaataataatatttttcataaagttatcaacacacccgaggatatgcatgacgattactgtcaggacaaggccactgatgataatattggagagaagggccagcttgacaagtcagacctcgtggtgatcttaacaaaacaacttcaactagtagaaatcaagttgactcgacgagatcaattcaacgaggtagtgctcacaaagatgagaagaatggaggccataatgaatgtcctaactaaagtagttcctaacatacaagtttctccaacaattgatgcccctgagaaagtaaatccaaaagatattgatgcccctaacctcaggcattcacaaagacaacggcaaagggatagccatcaaatagccaaagaagactccttccaccaagcagcataaaaagtctaaagctactgaccaacctcaacagaagaggaaagaaaaccatgcttcaaggtatggtgactagaccaattgtagaggcaaagtcacgtagaaaaataagactgacatcggaatacagaagctaaaggcccgaaaggagaagcatcaactcagtcgatgatgacatcgataagatatatcatgtattagacgacagcagtggaaatctctccacgactgatcttttaagaagaccaaatgagaaaaagaaagagctaaagcagaaaaagtaaaccctgtgagaatgatttgagaacccacatcaacaattgcgttagtaatagagaatcttcaagtgacaagacataacacttagaatgcaaagtcgagagttgatgaagatcacggagaaggtttcaagaaaataaagacggc

SEQ ID NO: 254006 - DNA, 642 bp, Cannabis indica
acaaattcacaaactccttaaacacaatctctcttagattctccaggtcctttgagaccaacaaaaccccattattccaacccttttccttactgcctcttttacgagaaacccttaaatcgttacccaattcggcatcattaaacgccagattgggcagtaaaaccgacgaagaatccaactgggtcgtagtgttcttcctatcctcagatataatattaagcaaatgaagaactgcccacttgttattaacacttccaggaccggttttggattcgaatttgttgtaaagctcggaaaaagtgagggcctgggaagacttaccttgattagcgagtcggcgcttgatggactcagcaatggcagccgagtcgggagcaatggaggacctcaatcgagcggagagtattcgaacggcgtagcggagatatttctggaaagttgggcgaacgcaagtattgatcgaagagtgaaaggctcacatcttgaaaagctggaacttggctgaaaggttgtaacgtagaaaaggaaaaggaaaggtggagctcattgttcttaatattcttggtagtgggtatgtttgtcttagcagagaagaagaagaagaaggaggagggcgtgagggaatatgggaattagggg

SEQ ID NO: 254007 - DNA, 839 bp, Cannabis indica
ggcttcctcaatctatattattattggctttggaattggataagtgttaatgtgcgtaaaaacctttgtttgaaattttataaactctgtttttttactctttgtatgcaaaaactaattctgtggctactttaaatcagtgggtgtggaccaattatatgtataaatatcatatatgattctaatggtcttacttttaattaataaatatcatgcacttttcgttgtttcatggtgtttataatttatttattattttgttgaatataattagtgtatatataatggtatattacatttcgtttgcttgggaaacaaatttgatttcggccatttctcgtttgtatttatgattatgagagcttttgcttgggctatacagttgcactactagaactacttcattaaatgcaatttttaagactagaagtgatcgatcctctcattctctacttctgtaattcagagatatcaatgtttggttgagttgggtatctattgtattttttaccagttattatctctgtttacgtttttcatgaaaatatgtttgtaaaatctactgagttgtttgtaatgggactaagtgagcttatatgaagtgtgaaagtgttaggccttaggataataaataaagagggtaattgtaatggaaagaattgatgccatatatatgagtgagtagtgagggtaagatggagagaattattttgttaaagtgagcattagctctttgggagagagttgggtctctcgaatacccaacaacttgttcttttgtcactctaatatcaatatactagctattttccattgttgacactttttggctctatttt

SEQ ID NO: 254008 - DNA, 832 bp, Cannabis indica
gttttttctgattcactttctctggtctcaactttggagggtctgacattgtatttgcatgaactgggggttatcttttctgatattaaagttttattgtctagttttcctgaggcatctctctctcatgcgcaacaactttattgttgaggctcatagattggttaagcatgcctttaggatagacaatgaactttcttggaagaaagaaacctccccaccttttctataacttttgttacccttgttattttaaccttttatcggttacctcaacaaaaaataaaaagaaaactataattattaattttttttaatatatttgagcacgggaataataatattttttttgaaagaaacataaaaaattaattattaattcagaagtaattttttttttaaatttataatttaatataattttgaaatttattaaaaacaaatagttattatttattaagaaaaaattctatattttctattattttaaaaatacatattatatttatcctaaagtgtaatattttcagagtaagatttcactaaaaacaatatatatctattctatataaagtgtgcctatataactgaaattcttggtttatgagaaattcatgggtgacttttatttttatttaataaaataataaatattatttatatataataaaataataataaaataaatcccattaatatttgaactgatatttgatgctaaatattcgaaaatcacaacccatttaaaaagaaaacaacacgggatttgatactctgagactctcaattaaaaaaaaagaaaaagtaatatgctcatcaaatttgtatttat

SEQ ID NO: 254009 - DNA, 763 bp, Cannabis indica
ctacaaatgctaaatgcaagagtcagtattacaagaaaacacacaaatatagctacttatagttgatatgtaatgaagcactggtcatattgttgataaactctttgaaattgttgatatctttattggcatattttcaaacttcccttttcgtcaatttttataaatatagaacattagcgttatccttttgttagagaaaaacatactttctttataattctaaaatatattatagaaaaaaagataaaagcatcattagaaattaacataaacattgattaacatcagaaactcattcaaggagaaaaagggaatcacagaacaaaacaaaataaaagtgaatagcaaaaaattagaaaatgctcataaacagttaagttgaacgtacgattcagtagtaaaattactgagaggaagaagcttcaactcattttctttcctacttctttcaatttcagcttcacacttttcaagtttcagtttcaaatctgcaacttcctgtccatataaaatgccagatgaagcacaatacataagcatgggataactagtttaatgtctacacgagattttcttcaatagatatcaactaaaatcattcacaggaagatattcaagtgaattattgatttgatgcacgtatcttcagtaataagacaattttagctaccttttcaaattgttgtcttgcagatacttccttttctagtcttctttgtaatcattttgaacttgatcaagatgtgtctgctcaaaataa

SEQ ID NO: 254010 - DNA, 571 bp, Cannabis indica
aagagaaacatgggtgtgggactaatttgttgtggtccttgacggatggaggttgttgttgagtgccaaatgagagagcaaagagagtcatgggatagagtagcgacgttggcccttgcttaaaattattccggcaaaccaaaaagaaaattgagtgagattgctattgagaaaggtcatctataaaacttctagcaaaggaaaaaaaacaaagattagagatataacgtaccttatttgcacccttgcttgagtttttatggcagaaaaacttgtcactggtggtgtgtgtgcgcgttagggaagggaaagtacaaagttgatacaaagaaagaaagagaaagcgaggagggaggcgacatccttatgtctactagagttaggtaattcatacaaaagagagagggagagaggttgtgttagttgaacaatagaaagtaaggtgaagtgaaggaggcggtctcttaaggttaggttaagggttaaaaaaaaaaaaagttacatatatgggtaatatatataaatatattaatgtgaatagtgcgaattgagttgggttgattgggccaca

SEQ ID NO: 254011 - DNA, 919 bp, Cannabis indica
aaagagttttatttagggcataaaacccaacactattgtgagtccaaattgctaattcctcatcagctggattaagagatagaacatacgagaagtttcgagaataccctgataggtttctagagatatactctacacttattctttttattgttttgatttaatgtacacacatatggaggtcctaggggctatggtacgatgataatcaaataatacgaaattcttctgctgcgtacctaatttagtaccataaaaccaacaaaagaccttttactgcgaaagacaacatagcccaagaacaacttgagctagtaaccaatcaatatacaagctcaaggtggttacgaatgatttgttacttttattgatgattaatcaaaatatgctcatacttacctaatggccaagaaatttaaaatttttacaaagtttaaagactttatgtgctagatgaaaaacaattaggtaaatctttaaaaatactttgattagatcgaggtggagactatttggattgtgaattcgaagactacctgttggagcatgcgaccctatccctattcacatcactaaaaatgcctcaacagaacaatgtttcaaaaagaagaaacttgaccttgttagacatggtcaggtctatgttaatttacttatcactaccgctcaacttcaagggatacacacttcaagcagctacttacattcttaatgtaatacccgcaaagagtagaagcaagactccaagagaattatatggaataggacaaaatcgaatttgaattatttttatattttgggttgtcctactcatgtttaaagacctaaagagagaaaaacttgctccttggtcataagtgtgtatatttgtggactatatttagaagaaactcgaagtagtcttcctgaaagatgatta

SEQ ID NO: 254012 - DNA, 1650 bp, Cannabis indica
ttcggattacggatgtagtatgacatcaaagtgaaggtgttgtatataatagagattatatatgacaaggaccaatatgaataaagttgtatttattaacatgtcatttactataaagacctaatttatatcataacgataattaatagtagatcggcctaaatcctgagtaatcatgaactcttgttctaattattagtttctttgattcactcgttaaagtttctcagagaagatgattcttacaacttttattttgagaatctaataatgtggatggctgagaacatgatctacaattatggaatcatgattttcctaacggatcaaatgctggttccctttaagtgttaattctagaactggaaagttatgtacaaatttagatgggatctaaattatacttccactagtgttttaatggtactaaaagataaagaagtaattagaagaaaaaaattgattttaaccaaacctaattacgaaccacctgattcggagtcgggcgtggttgtgtgaggtggctgggatcgggcgaagagggaccaagagagagaaagggattaggattttgacaaggctattttggaggtttttgaaaattggtcctattttaaaaattacctacactaagtgttctccaaaccaattttatattaaaacaatcacaataattcaaatttccctttatataatactaatcttttatgtacaaataaataaaaatgtactatagtgaactaaataaattgattatgacaaatacattatcccatcataattttatgagatatgataaatttgtctcaaaaataataaaaatataaacacatatatatacacatcaaaagacacaattcattttattatggttaaagattaattagaacaaatatcatgataaaaaaaatgcatactataaagtatatagagatcatcaaataaaaaaagagcacataaacataatacgatgtccaaaaatattccaagaaaatgaaagcttaactgaaaaataattatatagagattggcaaaatgataattttcactcttatatatggcagattgaaagttgtgaagaaaagtataacgaaaataaaattaaatctaaatacatatgtattatgataatatttttagtgaagatctttcaaagcaaaagaaacattacccaatagttttgtagcaaaatattttcattggagaagaacttatcaattgccattgtcatctataaatttcatatcaagaattagaagaaatataataaaactttaaaaataaataattattgccaaataatatcaacatagaacatcaagaattagagaacaaaaaaagagcataacataaacttgaaacttatgtgtggacacaaaattaaattaaatctaaatacatatgtattatgatgatatttctagtgaagatctttcaaagcaaaagaaacattacccaatagttttgttgcaaaatattttcattggaaaaaaacttatcaattatcattgtcatctgtaaatttaatatcaagattagaagaaatataataaaaccttaaaaataaataattattgccaaataatatgaacaaagaacatcaagaattagagaacaaaaaaaaagaagcataacataaacttgaaactt

SEQ ID NO: 254013 - DNA, 678 bp, Cannabis indica
tcaaaaaccaaagggaaacccctttgatttgactctttacctaactttttagcatgataatataatagtataaatttaaataatccccacgctaaaggagatcatatatctactttgaaaaaacataactagtaaaattctttaaagtttatccagataaaatccacttagaattatttagttaaaattatttaagttgcagccacacttgttattattacatccttttataccttcataagtaaatttaaagcataaacttaaaactaaaaaatagacaaaaatgatatttactatattattttaaaaatgtacgtattatcccactcttttctataagaaaagcataatacttattaaattggaatgatttaccttgtagtagtttagataaggctgccttcatttgtttgtctgaggagaaaatgaccgctccaaaaccaatcatattttgaggagtttatatcgctgcgtccacatatagtttatagctaagaacgtctgcctctgcattactttgctcactagtacactcagttgaaactccttttttagttttatttctttctcgacagatttaattataataggaagaaatccatatcttgatttggtgtggagttcttatagttcttccatgactttgagtgtactcccaaacaaaataataataataat

SEQ ID NO: 254014 - DNA, 900 bp, Cannabis indica
ggatatcaacctactttggcttatatatattatgtaagctctctcctatataaatagcaccaggttaaacaaaaagttctaagttctcattcctgagctcttaagttctagctctcgaaaccctatctctccctctctctcatacacaccacttgtagtgtatgagagactcagtctttctcatctcactacttaaaatctgcactacattctcactattgtaattcaaagagagcgactctagaaaccacaaagcttatgatctgaatggtattatctctcatatcaatacaacttaaaggggagtaggtcattacctgttaactaagggggtcaaacctctataaaattatagtatcaattttatttacttgttctaattgtttacacatggtgatctcaatcttaaagaaggctccactgctagttgacaaaatttgaagtcaacattttggtgctttcactaagagtgttgtctatcaattcgatcaatcaccatggttgtaacaaggagaactccagccttggccatgccggtcattgacataccctctcccagggaatgtccggccaggttctcgccaacctaggccattcaaccaggctcctacagcatcagatccttctgtgcaagcatagttaaaccaaataagagacatgataaaaggcttagccgaccaaaataataagaccttgaactagataggtcaaagggctctccattctggccatacattaatgccttgtccttgcctaagtttaatatgccagtatggaaaatgtatagcggaagagaagatcctcccacacacacatcaaatacttcgagatgcaaaaagatcttccaaaattcactcgtagtgtgcggtgtcggatatgtccatcgactctatcagaaac

SEQ ID NO: 254015 - DNA, 588 bp, Cannabis indica
ttagtgtaataaaagaattattatacaatttgatttaaataattcaaaactatgatgatatatttgttaaaaaatagattaatattcatttatgtgaaagaaataaggtgaacaatgtttggaatggatttggtccgagtgggagttatgaaactcaaaagcacaacctgaaacatacaccaggcgacatgttgcctagtgccaggcgacatgtcgccaggtacaacagttttaagaaaaatattttgaccgttgtaaatctgttccagctcgtgtaatagtcaaattaccttcttcaatctattttacactcatttaagtgcctattgcagctatgagatatggtgtgtttgaattctaagtgtgatcacctaaacactataaaaagatgtctttggtgcttatttggtaacctagttttctattaacaagcacttgctagaaagcacaagccttgataattctcaaaaatattccctagagagttctcttaatgcttacagatagaggaaatacatttttggacaaatgtgataataccttgtttaagtcacggtcaaggttctgagtgtgtgatattcttcttct

SEQ ID NO: 254016 - DNA, 613 bp, Cannabis indica
aatgaggagaagaacctgaggcagtggaagatgactcaggtaaacagaaaaaagtttgctgttcagggggtaatgtggtagaattgacaaaagggaatatagtttcatgaaaagtaacatcccttgaataaaaagttctgtttgtgttgagatctaaaagcttataggctttcatactaatagggtaacctaagaaaacacaaggggcagcccttggtgaaaacttagacctagaggtaagtaaagtggaagcataagcaaggcagccaaaagctcttaagtgatcataaacagacactttggatttcagaagctcaaatggtattttaaactttagattaggcgtaggagttctattaattaagtaggcagcagtactaacacattcatcccaataagctagaggtatgtaagattggaaaagcaaagccctagcaacattaagtgttgatgtttcctttccacaactgaattttgttgtggcctttggacacaaaaatggtagtgtataatgcctaaggagctgaacagttcaggaaattgtaattctttggcatcatcagacctaacccctttcattcgaacaccatattgagttttgacaagctgtaaa

SEQ ID NO: 254017 - DNA, 680 bp, Cannabis indica
ctcaaattttcgcagaaactatacatttgtataggctgacattatggtcgatagtgacgcttgagtcccctatttaatcatcaagaaaagcaactaagatccctctataacattgataaagtaaaataaaagcatacacgagtacatcccaaaaaaaagagaatagcttggtagttaagaggacacaaaattaccaaatctaaagtcatcaaaacgatatagcaatacagaattattaaaatcaaagcataagaacataatatcaagtacactgaagaacaaacaaaactaaaaaagctaattataattccaaacatccataataattttattaccatcatttttcacaccaaccagtaagtcggtctcttctccagctgtaaccactgcgaagaaagagagagacatatatcaacttcaaaagtttatgccacgcagaacctaaaacttaactcttctttcttgatcatttaaaggcagtctaacctcgtgccctattctttgggaagacagacactgtatcaatgccaggagctgggttgaaaattaatcgtaattttaattttaatggctcgccacgtaactcttatctacagtctcagaagcagcttcatcctccgcactcgattgagccctagcaactgaagaaaagaaagctcaacatgttaaaagcatgtcca

SEQ ID NO: 254018 - DNA, 1283 bp, Cannabis indica
actatgaacgtggccatgatggtagcagttttatcttatcacattgagtaatgccatctccattgaaactatacataatttgttagtatggttctaggtcttctaaggtcaaacctattctaattagggcttgcttgaacatgatttttgaggatggtctgtcgtcgatcactaccctggccaccatcatattagtatatgacctcaataactaaaggatcgttttggggtagctgacatgataagagtccgattctccgaaggtgataggttcacatccgtagcgttgagactttggactttggttcttggttcatgtcgaagtgatcttgcatatctttctaaggctttccttgagttcctagctaggtcagggtctccaatcacaatctctagcctgtctggaactggcacaggctagacaggtgcatcgcccccagctggagctttaggtcgtacataatcctgtagagcattatatttttgtctgatgagacattatatctcgtccggcaactaattacacacattagtgtcatgaccacaattattgtggtagcgatagaatttgtccatgtctctcttccctgactctttgaagggaagaggtttgtgatacgacaataatgactgtgtagccgtatagatctcctttcttgggccaagaggatggagtaagtggtaaagcgagctcacattctcgtaagggcttgccccagtcttgggcttctttccactgggggagttgcttggcttaccactattgttggttctcttccctccatttgatactcctttattcccatcgccctatgcctaagtatcaaggacctaggagtctagtgacttcttcttgccaccctttgagcccttagctcgagtgacggtttcttctagtttgataaagtcatttgctctatctaagaagtcattcatggtgtataccgccttgagacgaaggtcagaccatagaagactcatctcattgagtctgactacaagggccattacccttgcgtcctcactaagacttttggtcttagcaaatgcctctaagaatcgtcggatgtagtccttgaggggctcttcttcttgctgcttgacatccaccaaatcattgggttcaatatgccattatagagaaggagagaattgtttgccaaaggcatccactaaatctttccattagttgattgatccaatggagagcttaaggtacaactgttgggttttatgccctaaataaaactctttacaatctgattagttatcaacataagaaa

SEQ ID NO: 254019 - DNA, 504 bp, Cannabis indica
ggtattttggtaataaaaatacataaaaggtataaatattgtccacaccttatggaggaatttttataaatgaaatgtcaatttgtattttctatgtaataattttaatattttatcttattttttattaattaatgattttttatcttttaaaaatttaagtaatagttgttcaacaactaaaaaattaatacaaaccaaatttaaaattttttaaattaaaaaaatactttagaactaaataaatacaaacacaaacaatcatatagaatattcatacaagaaagtaaaacattttttttttgtaagtaaagcactaataataaaatttaaactaaaatacaaatctataagcaaataatattgaacttaaaataaaaactcaaaactcaaaatcaatttgagtaatttgcggcataaatacctaagttttactccgagtagcagataagtacttaagtggtatttttggcggtaaaaataccttccgtcactattgtggaa

SEQ ID NO: 254020 - DNA, 803 bp, Cannabis indica
caaccataataccacatgtactcagtaatctggtgtactagttttggtagcattggttcatacattctgaatttctaaacatatatattcacgatatcaagatgcaatcatatacaccaactatcgttctaacagatatgtcatacatctggaaacaataaacatgtacatatgtgtatgtgtgatactagtcttatctcaatattaatttcaagtgtggcgatcaacctgagtggaaatagttgctcgtaatcagagaccctaagtcacatttcttgaataaccaataagtgttgccctaacacttttggagacttaaatttaaaactaaaagttttcctatcaatagatagcatatcaatgccctaagtatcaagaaaacactcaatgcgggtcccacgaaaagtcttaaaatagacagtccgtttttaaaaacagacccccaaattctgcttaaattggacagttcgaaactccattgtctaattttaaaagttgcataactcattaaattccaagccaaaccttaccaaattttttagggtgcctaaaaacatcatagtgaacatttttcatgtaaatcttaacccaattcgcagcagaattcaagttatcacaaccaagtcaagtttgagttcttctcaaacttgcataacttttgttacaaccacccaagacacttctaaacaatcataaataaccttaagaagttttttttactctccctaaaatttctcaacaggtcctactagaaataacaactaaaaactaaaaaaaaccttagaaaacaataaaaacgagct

SEQ ID NO: 254021 - DNA, 836 bp, Cannabis indica
ctacagtggactaagcagaacaaaatctgactgaaccactatatttcattgtcttctgtattttttccagctttattgtctgttatcgcattcctattggagtactcgccgttttaggttgaatactcgcatttatcatctctcaaacaattctatcttttaccagctaaattacacttcttggtgttgtgaaatactagtaacaacatttggtgtaaaaaaatgtatgtaaaaattgtattaaatttgaccaaagaaaaaaggaaaatattataattagtaaaataacaacttgacataaaagtaataaatcaaatatattttaaaaaataataacaatattgtaattaagaaattgcattaaatcacttattaatgctaaataaaaatattctaaataaagaaattgtaataattgtgtattaagtttatattttgtacgtaataggtcaaatttttagcacggctaagtttaacaaaatataatattacactactaatttaatgctctaatatttgaaataatttaagattaactctaatgaggagagctggcttatgtgaacatatttttggcaacattaaataattatttaccattagagtgaaaagggctgagaagaaagattttcaaacaacaacttttaaagttgtttaattatttttatacaaaagttgttaaaaataataggagtgagaaagaaataaatattagattgtgagattcaacattaattgagattatatgagatgctcaatcaattcataaccttcctcaatcaattcataatataatatttgtttgagtgtgatataaatgaagaaaaatatattta

SEQ ID NO: 254022 - DNA, 762 bp, Cannabis indica
ccttaaggtgctaaatattaatgcttttcctttgacaagcaatatcaatgctcttttatatttgacgttttgtgaacattactaacaaagtcaaatcaaatgtattagactaccaaataacaggttcgtgactttgtttatcaatatttcgatttctattaatggttaatgaaataaaagattatattatttccaaattcattgtccattctcctccttcgtgataaagtgtcaatcagatattttcttttcacttttcttgttcaatgattaaaaatatggatattttgtgatttaatgatgatatttgaatggttcagcaaaaataaaaaataatgatatttgaattaatataattcttatattaaataataaaacgtaaatgcaataaagtccaattaacaaataatttagattttttttttaaaaaaacaaatataatttagattaaatgcattattttttagtacattcatacgttattattattttgttcatttgttattatttttgttgtgtgtttgaagaagttttctaaaggaggattaacgccttttgttattattttttggagtttttgcttggtgatagtaggatatcagctttgactatatttggtgtgggggagggtcccgatctaggccaaggggtttcgaggatctgcccattattgtttggttttcgtccattggggaagtcattttcgcttttgatgggtggtctaacagaggcgttctcgtatggatgctagggttgtgcttc

SEQ ID NO: 254023 - DNA, 6095 bp, Cannabis indica
atataacttttttcttttaatgaatgtttcttaattatagggaaggtcactcaacatagtcaatttcaggttagttttctcctttgaccccatacacatgcaaatacaaagcgttttcatttttagtgccgttgatttttgaaaattctagggtttttggtgttatactcattttgtcagatttttttaagtacatttccctcgtttcccaattcttcgtacaaatattgtttaaaaaacgtatttttatttgattttggctacttgggttttgaggttttgagaatgtgggttgaattttttcagttgggttatttttgttctctgagaaaaagaaaagggttttgttcttaacacttgtttttgatcgtttgaaggttttagtttggtttctgagaatatagggttttctttttcaagggtttagagaatcgatctacctatttattttttggtattttctgatatgtttgtaacaattctttgtacttcttttactgagatttgaccacaggattagcattgactttgttgtaatcgatatctataaatatacaggtatcttttgatattgagagcaaactctaatggctccgaatccaagagttgttaatgctttccgagctatgaagggtctaggtattgaagaaggaaaggtcaaaagagttttgaaaaagcttttaaaattgtatgacaagaattgggaactcattgaagaagagaactatagagctttagctgatgctatatttgaagaagatgataccattgaggaggagaagaaaaaaggaagtgatcataatgtgagtatattttctctttgctcattttgtttcctatcatttcctgtatgtgaatatgtgtgcttattagttggttttcgtattagcctggacaccaggacgatgatatggatgaagaaacactcgtaaatgaacctgttcggcccttcaaaaggttaagaaaaggagggcacgaagtgaatcaggtttggagatttctctagttgccaattttttttatggaaaagacttgttcttgatgattttgcataaacataatgaaattttgttttgcatagtagccagggaatgtgacagaatcgcccgtggctagagctgaaggtagctctatttcaactcagcgcgctgttataaaagacaaaggcaagcggcccatggtttcggatggtggttttcaccctatgcagcagcaggttactactgcttttcaattggttatgcctaaagacgagccttatacagaggacatgtttgcttcgggcttaccacaatacgagcctccgattggggtgcttaatccaagtatatatctctgtccctctcacttttccaggggtgtttagtgttttgtgtttttcgggtgcatattatatttgttccgtgattttattaactgcatttacttgtaaattcatttaacttttgcagagcctttaacaattagaaccattccagtgcaaaatgatgggagtggtggagaaaatggcaagaaatcttctgaagaccacaatagagaagggagaactgatggtgttgcgttttcaccaggtgaggttgtaacagacaatgagcttgcaaccgtccaatcttcttctaatgtagaggttgctacctcacccacaggagaggtaaagctttctctaagttgcaatttggcttcgaggagatccaatttccgcttgcctaatgtagatgatgttataaaactgacggaagctaaatgtctgcatacatacaaaatcaatgacccgaatttttctgtcatgaaattgttaagaaatatgtgcgaaagcttcctcgaacttggaactgatgagactgatgaatcacaggatggtacagtaaatttatcaactttagatgtattgaaaagatctcctgcacggaatgctttgggggctagtagagaaaatgtatccatttcatcgtgtacctcaaatggagttgtcaatggtgaatgccatatttctgtggatgcttctcaaattccaattggagtgcccctgactagcctggacggttatgctgggaaagataaggacagggatctggaagaccacaacaccacaaatagtaagagtttggtagttgcttcaccgtgtgaaatggatcctggtgatctaagatctcttcattatattaatgacattagcaaaggtgaagaaagagttagtattccttggctaaatgagataaacagtgaatgtccatcgtcctttcattatatctcccaaagcattgtttttcaaaatgctgagattaatatctctctttctggaattggaaattctagttgctgtccaaattgcttcggtgattgtctatcagcggttgagccctgtatctgtgcccgtgaaactggaagtcaatttgcatatacaactgctggtgttgtgaaggatgtctttcttgaagaatgtatcaataaaacacgtgaccctcaacagctctgcacttatttttgtggagattgcccacttgaaagatcgaagaatgatgtttgcttggaaccatgcaaaggccacataaagagaaattttatcaaagaatgttggagcaaatgtggctgcaataagcagtgtggcaaccgaatagtgcagcgaggcataacttgcaatttgcgggtgagaagttctctctccatttcccacttttttttttggttcatatttttctcagctgaagcattaattaaaattggtcacaggtgtttttcacttccgagggaaaaggatggggtttacaaacactggaggacttgccagaaggcacgtttgtgtgtgagtatgttggagaaatactgacttgcacagagttatacaagaggaacatgcatgacaaaagtagaaaagacacatatcttgctctgcttgatgccgactgggatgctagtggagcattgaaaaatgaaaaagctctgtgtttggacgcaacacattatggaaatattgctaggtttattaaccacaggtagttctttcatgaagtttcttcctgttattttaatcatgcaattgcctgtgatgtatagttgctaggtttactatccaagtcttgcgcttttaattatccattaatgttttctttttctttttgtatctgaatattgctagatgttttgatgcaaacttgattgagatcccggttgaagtggagacccccgaccatcgctactaccgtgtatgtaatatcctattatgccttctgttgggactcagttcattagtctgttttattcactatatgaaatgatttgttctgttgggcagctggctttcttcactgcgagaaatgttaatgccatggaagagctaacttgggtatgtaaatgtcatttctgtttgctctagttatttggtgcttaaaaaaatacataatttcactatcttttcttcttgagattgcacttaattagaataaagtacactaattcgtccatgtttaaccctgtccatttaactgcaggattatgggattgactttgatgacctcgatcatcctattaagccattcgagtgtcgatgtagcagtaaattctgtagaaacatgaaacgtccaatcagtaagtatcattttcatgctcacttcaaactcctattatgcaactcgaaattgaaaaacacgcactttctcaatttgctgacattttcttatgcttttatagtttttagttatcattattgtgagttttgagatatcttctgcctttaccaactcaattgctgtatttaagagacaagtatttccaaattttggataccgtggaagttgttgtagttaatatgccaattttcaaataacgaacttaaatgtcgtttaccaattatatttccaatataccagttgggaatataattggtaaatgacatttaggctatgtcttgttggaaggaaggagagttggatgaaccgacaaataaagaaggatagagaatatgatggatggagaggatagtagtgttctttgtttggtattctgggtggagttgaaaggacggagagaaaaataattgttaaaattaacatgtgatcatttatatataattacatattattttttaaaaggataaatttgacaaatatgttttgtctttattttttgggttcccccatttgaaaggattttgtgtgtttggagggagaagtttccctccatctctcctctcccgtccgctcccctcttgccaaacgaaacagaggatttcaactctcccttcatccctctcccctccacccttctctcccctctaccaaacatagtgttaatcttttggtatccaaaatttggtaaataagttgaaatttgttatattctgcttgatagactcgggttgagctttgtctttcttatgcaagaaagaaaatccaaaagctaaagaagatttaggattcatgtgttgtctggaatgataaattcatactgcgtctgaatggcttgctttcgggcaagccatagatctgcatgtatggtaatagtagtgctatctttgtaatgcttgttcaatcctagacttatatttcaactggtttatcgcttttgtttatatcgtagctttctcggtaacttacacattggattattctagttgttttgattctgttgagctgcttctgaggatcaatatctttacatttgacagggtcgaaatccttgtctaacacaagatgaagagctagcgacaaacgaacgaggcaattggtagtttttcattttttattgggagctttttgttaatgatctatgtctgttattctccatagactactaaggagacctcatcttcttcttcctatgtgggttcatttttggattaactctgtagtatagagtttaggtagttgaagttggttgtttgtacagtagtttttttttgtagatttagccgtttttttaatgtgcctgccatgtaggtcttcggggttgcatgctcggggcgattgtgaacaaaccacccatctctttttttgatgacttgtccttttgaagggctaaaaacatttttggttgattctatctagttctaataactatggtatagagtttagtgacaatattatttattgcattcaattagtagtaaatttgatattgggcgagggaggattcaaacttgaagtctcgagatagtaacactagtttataccatggtgactttatccaaaagacatgttttgaaaagagtttgaatatgaaggttattttattttatttattttgacataaaaattactcgtatatgcctatatggtgaaaaaatagtgttcatttcttcattattacaactcataatttatttatttgaagaatcataagttttagatgattaaaaccaataattttttttaataatttgataaatgctaagtttgatatgatttataaataaaaaagtgcctaataatcccttgattgtctagctagagcactcatatttcaggagctaaataactcaaaaggtaataaaaaatgaagaattttttaaaggaggctccattaattgagctaatatagttcaaaattttaggttagggaagcactaatcattcttcaaatatttcattaaaaaaattattcttcaaatattaatttaataatttctcattctttttttaatttctttttcatttaatttttttggtttgtatgataaaatatattaaaaattataatatttaaatagtatagagaaaaaatagagaagttgatgtatgctataatataatgtaaaagtgtgaggtaaaatataaataaaaaatagggttttaataaagcattttaaaaaataaagtaaagaaattgatgtgagtgttcttataaactcaataatacaaatcatagaatcataaggtggttaaggagggcaaagataagcaagataaagaagtcaattttaattgttgtcatagcaactcttgtttaggaaatatggcgtacaagaaacaatattttttggcagaactccaatacaaatgtagagattgtaattgtaaaagtgaaaaacatagcaaaaaaaaaaaaaagaattacatgtatatggccaaaaaaagtaaccaaaagtgagaaagaatggt

SEQ ID NO: 254024 - DNA, 754 bp, Cannabis indica
tatatataagaagtacaaattggtatacaaatgagtagtccccctttcaaaaaataaaaaataatataaaataaaaaagagcccaaatcccataatctcgatttatgttgacccttcaaaaccttattataagttagaacttggcctggacagagggagccattgaattggacaagtgagaaatgtacaaaaaagaacaacgtacgtcaaccattgaccatgagtgcatgaagacaacgactatgtgatgagagtcgtaatacgttgactatcgatgatggtgttagtagcccagggaagaattatatatggtgagtttcggagaagtgatgtgttgttcaatttttattttttattttatttttttgaggaaagtacttgttctcttataaattaatatgaaagtcatttagaataagaattattacatacaacgtataaattgatactttatttataaaaatattttcataaggtaaagataatatttatacttggtttttactacttacactatattacttacacaatcagacgatggttgtatcagacgatggttgtaggatggttgctaggtggttggctaaaggttgcatcagacgaaggtttcaattatacgaaagtttctgggtggttgttgggcggttggccgaaggttgcatcagacgaaaatttcagttagatgaaataactgttagtaaaatatttatgcaaccgtaatacaactgtaatgcaactgttgtgaaaacattaa

SEQ ID NO: 254025 - DNA, 4154 bp, Cannabis indica
cctctttatccttgacctatttcttgggagtttcttcagatctaatcttcaacctcaggagttcccagagtacacttagccattcgtctcaacttcagctacaaagttctcctttatgcgaaaacccatctctgaacagtaagtggttcattcctttctttttggtatttctttttcctgagttggtattcttattttgtaattaatcacattattgttcacttcgtttggttttagtgattttgagttaatttttgggtaatttctagggttttaatcaaagagaaacttaggtttatcgtattaataagtttttggtttaaataaatttcttccaagaattaggattgttctttttgtaaaaatatctcaatcttttgcgagatgcaatctggcctaaacctcaatctttatcttctattccattagcaagaccaatatttttacctcaagtcactattgctttttcattaggtgaccttgattttgaaattatgtctactaagccttgtaaatcaaagaccccacaggaccctaatgtcacctttgaggctgaactcatcgaatccaaggtcagaaccattggagagtatgttggtggtgtcttaaagtcctgcagcatagaacaaaggcgaggatattgtataagatatgttgctccagggtaatttagctgcttccccccagaaagagttattcgcgaggagtgcggtggtacaagtactagtggctcgtctgggattggcgcttggagcctagagcacatcaaggttggagcagttctccccttgagagagtactacaacgagttctgtaactaccttggaatctccccttttcagttggttccaatttcttacagaattcttgcaagtctaaaggttttgtaccacattttaggatgggagtgtcccactcctcttaaaatagtttatttttactccgttaaagcagtccccgcgaggaagcaatgtgcaatgtggagcgggtttctattatctcggcacccacacaaacgaccataggatcgtcgtgaggttgccaaataagactgagttcaaggagaattttttctggaaaccggcctttctcctatcaacacaactgcattccgcatcatatgtaagtaagttttgtctcaaaaacttggttttgagttgttttatgatttatatttttgaggtcatttacttgttatgcttgttgtgttgacagcggtttctaagagacttatccccacccctcagatggccgagcgtcataaaatcctattgggtctcccattcggactacgatcagctaactttctcttaagtgaagccaatttaagaactgttggccttcttggctcgaatgagtacacttgtgactacaagtttccaaagtactcttcgtgggagaaggtcccagttccagctgatgaagagagccaggactatgtggtttgtgtacactatctccagagaataatccatcgggcagttgaagaaggagcatcccgaggtaatcaatgtggatggtcacctactatgcttagggcaaagcgtacttcgttagtaacattctgagatagttgatataatttctatacttggaacagtttttgcatataccgtataacgcattggttcgatagttggtatcctaggttccatgtccagcttagttgtactagttcatattatgggattgccgagcagtatgggaccatcttggatagggcaagccacccagattcaaattgggagttagatccaattaacccttacgatatattcatgatcacaggatctagggagtttagtaattgttatagttcttcctcgtcatcttttgatgattgtggtaacttccttttaagtgggagtttattctccattttccttttatttgtttttgagccagtgtttgatgtatctcttttgtctcgcagatatggatcttgacttggaaattatgtttaatagtcccccgctcgttgataaaagagccaagaaatgagctgcccaggcaaatgaagcctcaggttctattaaagaacccaaaagaacaaaaacaactgccaacaagaagtccttgagccaactcactatcgagccagcaaagtctccagagaaggttgcgcctactgtggcgagcgctagtgaacaacccactgggtctatacaccaagtgaaattctctgggtaaggcataaatatgttggactcagtaactaaaactaagataaactctattaagaccttatgtataaaagagacgtgtgagcgtaacatgtaggtctatgttatatagatattagatgcaatggcatcattgcatatgagataatgtgatatacagtacggtggcacaattatatacgcagatgtgtaatgtatgaaatgtgattattagaaatgttcatataccgtcttattattttgtcttactgggtcttggctcacgggtgctctattatgtaagcaagggtaaaacattatcgagtcagccatgagttcgagggttttaaagataaattgtacatattctggccaagctagaccatgagagttgggtccaacaagaaattgtataaaagaagaagaagaaaattaaatacctcctacaaattatttatagtatcaattaaacatataataattttgtgattaggatataaataacaatgtcatactaatataaaataaattaaataattaagttttaaataagaaattattttaataactgatgaaaggctatcaatggagagtgggggatgggaatgtggtgagggtgatagaggatgccaagaccacacactttcaaggtctacgataagcctttattacctgaacaaatgagggtggtggacctatttcttcctgatggttcctaggacatagacttcattcatgccctatttactaaaggtgatgctgatattattttaagcatgttgagtggtgaatggggccttgaggataaaattatgtggtattttagtaaaaatagagaatattcggtctgtagtggatataaattggttgttgcaatgcgagaggaatcactttcaatctgactcatcttgaattgaagcatggtggaacttattatgaaagcgaaaaattcctctgaaaataagcattttgtttggaaaattttgtcatttatggcttccaactaattatgctttatctaagcggggcattcaagtggcacctatttgcactcactgtcctaaaggaaaacgatatgacataattcatgcttttttgggctatagatatagtgttatggtgtggaaaaaatgtggcctttggaaaatgcttcgtgtcaataggattctagacatcaccactttcttaagcactatggcaaaggtttgtgcttctaatacctttgattttttttttctagttgttgcctagaacatatggaatgtaagaactagtacgaaacatgggagcatctatctgagagcaggtgacatggttgactggtgtgagagatttttaaaggaattccaagatgctaatggtggcaaaaagcgtactagttcgactagggaggaggggaagtggtgtcgaccgggggtgggatgtattaaaattaatgtggatgctagattgaggacaaaagaaggccatgctacacttagttgtgtggtgtgaggaaatgatggtgcagttgcttttgcggctgcgaaagtgttacagcagcaactaacacctctaatggcagggctgctaaccattaaagaggggctactagttgggatacaataggattttcatataacatcattgtggaatcagactatctacgaacaatccacttcgtttcttgagaagccaattaagtggctcacattttagccaattaactttattatccaaaactagtgttatgtggattggggttgcatctcttagtgtttgttaaacccttcagctaaaatgtgataacaaagtttgaatgaatgcattctattttaaaataaaacaacaaataatttatttaaaacttgcaaaataggcgacggttaaaaaccatcgctgatgtggatttcccgacagttgaaaaccctcacctttaccctgttataggtgacgattttaaaccgtcgggaatgtaaaaaaaaaagagaaaaaatacagatttttttgcca

SEQ ID NO: 254026 - DNA, 1415 bp, Cannabis indica
gaacatgagctactccactcattaccattagttttgagatggaacctcatgagacctttgttttccaaaaatcccacatatattttcctataaatagggtaacatagtacactgtaaaaaggatccaagaattttagatcaagccaaacaatgtcaaactctctaggaaatctaccatttttgtaaccttcaatgccaatagaagtgactcgtagattaaggctcattaactcctgaactatgtaaaaatatcttctcttaaacacgctttattatcgatattctatattaagctagttgacaaaaatttcagtcaacagtagttaatcttctgtgtaggagtagaatgatatttttttttgaagattaaatttattttaggacctttgtaattggtttatttccaattgtatgttgtaattttaaagtatttttgttatctaacttgatatcaattttttatttttgtttgtacagggggatttctattttatagtttaaagcgttagtttttctagttggccttaattgggttcacttttgtgggatccatattcaaacagtgtgttcagactctttatcattgatgatggctattaataaggagaaaaagtatttcaatgagttggatttctatttgctgatattatagttttattgcctaaattttaagaggcaactttgtcacatgtggctcgcaataataactctgcagctcatggattggctcagtattctcttaggctaaacaataagctatcctgatttaaagaggtacctgcaatgattgttgaggtctacactgtgaattcttaaagtgattcttatcaaatatgcaaaatacatatatatgtgtgtgtgtgttatacttgtctcaattagattataccttctgttaattattttttgtgtggataccatagttgttcacatatatttacgtaaaaaataaaaataaaataacaaatacaatttttacacctaacttcttctcaatcttaaaattcccctaaactattctggttgctgaaacatagtgtttatgttagctttagtcttatgtagataatagaatagtgatgtaacatttttgacaccgatgttaaacattattaattttgtcttctagattttgactactataaatcaagtaaaattttattaagaaaataattacaaacacatattttaccgggtggggattgggctttggattaggctgaggtttgggcttcgatcatgcgaggtttggggctaggaatgggattggatttgagtcgtgtttaggtttgagtccgactcgagtctagggtttggggttaggtcccgaatcagagcccctacctggtctgagtttgtgttaggtcaagatttaagctccaggttaggctaaggtttggggattagagttgcac

SEQ ID NO: 254027 - DNA, 861 bp, Cannabis indica
cttatggaatttataatatttgtcagcatctcttttactcctcaaattcctcatggactcaggcttgctgaaggcaaccttttgctcatgtgcgaggtaaatattctcccgtgtttcattaagctcggtataaatagtattcacgggcacatacttatcatgcttttttttgtttctttctatccttcgatggttccttaataccatcctttctcttcgaagcaggagcccccgagttgtcaattctcgtggaaatagtacctgttgaaacattgctgggttttcttcccgagctagttttcaacagattcatttccttttaggcttcttcctttcgaacaaacacctgagccctttcgttgaactcagtgatgcttctcacttgacgtccttgtaagtcatcccacaactcgcccttacgattaatggatcagcatagatccccgcctgaagggctataagttgtgtgatgtcatccgaattcctaaccctagccgcagccgtgataaaacaacttaagtacgccttaagtgtctcatcgggatgttgctttatattggttaacgaggctgcttcgggtcgcctatccctagcagcttgaaattatttcttaaaatccttggatagttgctcctaagaagttattgaatgatgagtaaacttgttaaaccagctactcgatgctccaacaagcaaggtggggaacaaaatacaacgtaaattgtttgtcacattactcgctcgcaatattttgttaaagttattcaaatgcgagactggatcagtggttctgtcatacgatgagacatgcaggtttttgaatcccaaaggaaaaggggtattcattatgtctagatgata

SEQ ID NO: 254028 - DNA, 584 bp, Cannabis indica
cctaaacatatttcccaagagcagcttcattccataactatgtgtttcggaaccccaagcccccacctgttttcgatttacaaagctaagaccaagagtcataaccaggcttatttgtatcagatgttcctttccataagaatgctctagaaatggcatttatcttctttaacactgtttttgaaagaaccattatctgcgcccaatatgagtgtatagcaataagcactgaatttatcagaattattcggccagtaaaggaaatattccgagtcccccaaattttgattctttgaaccatcttctctactattgaaccacattctattgtcgttaatcttttggcacaaatattcgagatccctaattaagtatctaaatgatagatcacttgctcctaataaaacctgaggcatccaatactctttgaatctcttcctctttcatgccacaacaatacaaagttgatttcatttcatttggaaataatccagatgacttggaaaacaatttaagaccttgtagaagaaagtagatagatttaagatccccatgacaaaataaaactacatcatctgcaaagc

SEQ ID NO: 254029 - DNA, 1335 bp, Cannabis indica
atttaaaatggagttttttaagatttttttcgaccatcttctctgttttcagaaaatattaagattcaacttattttggggaccaaacagaatttttgaaagggaaaatagggacctagcgcccaagttgataactggggctggaccctgcgcccaagttgacatattgtcaacctatcaacctgagttgttttcgatcaagttcagcaaaaagtattctgggtatttttttcgtcatcagaaataacgaagattcaagaaaactcgaggaggaaaccataatctcgagtccctagatgtagggcccaacgcccaagatgacatagggctgggcccaacgcccaagttgacaatcaacctaggacgctgcctttaattgctcaaatccatatttgatgagaccattgaatctggaatggtcaaaaatagggtaggagatctcgtcctcaagttcagaagccttgtaagtatcaaaaataaaatcttgggagctcgagattaagtactcagcacccaggttgacaaaattcctggtgccctgggttctacttacctaaatctgatgtcgttttgaccattcgtctagtttttcacaatgacaatgatccacaaagtcagagaaattaaattcacaattttgtatttttcatttccagctcacccagaaatgaagagttttgagtgtctcatttttgtaaaacaacaacatctctgagaaccggtgaccagctttgccataatgcataaatagactaaatgatgtcaaaatatcacttaggcatcttaaagtacatccattggacgtttttacacttacccaacgtccaagttgacatcatatgtcaacgtggcactcagatgtcaatgtggcattgggtcatgaactgccttcagtaaaatagacataactcactcaattttaatctgattgacgcgattcaatttgagttttgaagataattcaatgatctatcaagtcatgtctcacaatcaagacataattctaaagctattgtcgtcaaaattcaccccaatgaagttacaaaaataagctttgggttacctgtaaggggacccgctgggctccaaaaaatggccatcaccaccaagagctaattttcactgttagatcatcatcaacagtcaaaaaatcttatttgtattttcccctatttttgtgggcctccttcacctataaaagaagagcttccttagctcatttttcacattcagaaaactacccacaaggttagagcttctctttctacactttctctctctagaatttggagcatctaacacttagtctatagctgtaattaccatctcatgaga

SEQ ID NO: 254030 - DNA, 635 bp, Cannabis indica
acccggacccgagacctgcagacccggaccttaactcgaacccgtagatagtgttggggtcgagtgtattgaaaatatattataactttacacaatctattaatacaagtgaataccaaatataatattgtatcaaataatattaatacaatataatataatacaacacaatcttacataatacaatacagcaaaacgagccttaataaaactaaataatacgtatcaagttataaggtgccttatacccttcatctataatattttcttgtttcgatatatgattggagaatatatgattgatattgtgagtcacggacttataaatcacatgagtatgtgaatatggttctataccataatattgttatttttaaaagaaattttactatcagcttcttctgtaatttattctttaaaatatcttataattttttttttattttattttaccttaaatttttacattattattgatttttttttaacgcgcactattgaaaaaattaaataactcaacatacaaatttatatataatctacaatacaatatataataattagatgataacactagaaaaaactgttacttttattgaaaactttttagttgcaatataatttttttatgacta

SEQ ID NO: 254031 - DNA, 980 bp, Cannabis indica
ttttctatttatcttattatttgtttcttaattataatttactttgtgttatctaattaaagtataaaattgaaaagtataataattagtaaaatttaataatcaaaccatgtgggttcgacaacctttttagtattaaaactttgatataacaacattatacgcttgtagtaaatatagtatatcaagtttttggtgccgttactggggattgaaaattctttaattattgcttatattattaataaaaattttactttaaatttagattttttttatttttgtttgtttgctttgtggttcagtttatgcgaagaaatcgaagtgctacaccactcacactgttgaatcctgaaattgaaagaactttaaagacagttaaaagcgaagaaaaagttagatttcaccatggcaaccaataacaatagttgccttaataacaaccaactagcacctgctgcagctgatgcacaaccacgggtcgttcgttattattgctttctagtggtgaatgaaaatctgacttgtattgctaatctagtcattgctggtaataatttgaattgaagcatgctttaatcaatatgttgcaacagaatcagtttggtgggttggctactgaagatcccaatatccatctagccatatttctggaggtatgtgttactgttaaaatgaatggtgttactgatgacgccataagactacgactctttcctttctccttaagggatagagcaagaatttagttacaatctctgcagtcaggttctattactacatgggatgaaatgggtagaaagttcatggtgaaattcttccctccatcaaaatctgcacagttgagaagtgagattgggcaattcatacagcttgattcagagcaactttatgaagcatgggaacgattcaaagacttattacgtcgctgcccacaacatgcctatgagagctggatgcaagtctcaattttctacaac

SEQ ID NO: 254032 - DNA, 1165 bp, Cannabis indica
acggatgtaagggaattgtaggtttttttgactcaaaaaaaaaaaagtatttaagtgtataaaatctgaaataataggaatttatggtgcaatttatccttctttttaattagatttaattaagtaatgttaagtgcaataaatgttcaatattagtaaccatccatgccttgccaagtgtatgtgaaatataccaaaagccaagccaactaaagctttatagcttcccgatagctctgctcaactcaaactcacttgcttccatcccataatatcttgtcatttgtttgcttagagagtctaaagatggatttagtcattgaaacaaagaagcctcacgcagtgtgtgttccatttccagcacaaggtcatgttaaccccatgatgcaattggccaagcttctacactctagaggcttccatataacctatgtcaacactgagttcaaccacagacgattgatcagatccaaaggactggactctgtgaaaggcctatctgactttcactttgagaccatacctgatggtttgccaccatcagatcgtgatgcaacccaagatattccatcattatttgcctcaactagaaagaactgtttaggtccatttaaaaagcttttacataagctcaaaaattgttgtgaagtgcctcctgttacttgtatcgttactgatggggtaatgacttttgggatagaagctgcacgggagtttgggattccagaggttgtgctatggacatcttctgcttgtagcttcatggggtatctccaatacgatgaacttgtcaaaaaaggtctcgtacctttcaaaggtacaaacttttctagacccaactgttttcaacttgtttatataagggttgataatttgtgacacaagaccatataattggaaaacagttaagaaatcatctatgttgcgttcctacttaggatcttgatataacaaataattggatcgcattggtgctcacaataaatatattcgcaaacatatcacaacacaaaagcacaaattgtcatataatttatttctataatatatatttttggacctaccacaaaacactatataataaataataaagttgttggcatattattatttttttattgtatttttttatggaacagggcacatattattcaacgatcttaat

SEQ ID NO: 254033 - DNA, 895 bp, Cannabis indica
gtagctattattataagaaaacttgattaacggaggtactttacccaagatcattcaagtccaatgacatgcctgaagcatgtcttctaaaatcttaattatcctttcaaattatccatttgtctgaggatggaatgttgtgctaaatttcaaatgtgtacccatgcctcgatgtagactctcttaaaataatcgatgtgaacttcagatctctgccagatactatagaatttggagcaccatgaagacgtttctctaacatataactcagcacagatcaatggagaagttcgttcgaacaggcaaaaagtgagctgactttgtatacacatcgactaatacccatacaaaatcatactgccccgtatttttaggtactccaaccacgaagtttatagtaacatcttcccatttccattctagtaggctcaatggctgtaacagtcccacaggcctctggtgctctaccttcacttattgacatatcaaacattttgaagcatattccactatatcattctttatacccgaccaccaatacatggtcttcaggtcctggtacatcttagtcatatcggggtgaacagagtaaggggtggtatgggactcatctagaatctcctttctaatatcagcatccatatgaacacatacacgattcgtaaactgtaacataccactttcatccacggtaaaaccttcagccttaccaactaaaactttatcctgaatcttaatcaaatttggatctccattctgaggttttctaatagctgcttgacttctactttgtgacacatcttagaagtggcattgagaaaccaagtctgtacataaccccgtctaggattttgagcagctttcctcctcatttttcttgcttcattcttatttt

SEQ ID NO: 254034 - DNA, 600 bp, Cannabis indica
ctcttgtgcctactctgagaggtgcattctagccttgatcttttctatagcttcattgatccgttttactgattctggacctaattttttcctttctctagtttaatcccactggattggagatttacagttcttgacatacaacatctcataggggcaatccgtatagtactctgatagttgttgttgtacgaaaattctataagtggtaggtacttgctctaagagccttcaaaatccatcacacatgcatgtaacatatcttcaagtagcttcccctcgaactttccatcagtttgaggatctaaagctatagtaaactttagcttggttcccatggctcgctaaagactctgccaaaatttggaggtgaacttcagatcactatctgatataatggacttcggagccccatgtaacctcactatttcattaacaaataattctgcatactaatccactatgaaggttgttttctctggtagaaaatgtgtggactttataaatcagtccaccacaacccatacagaatcaaatatccccgtggttctaggtaaccctaccacaaaaaccatagtgacatcttccaatttcaactga

SEQ ID NO: 254035 - DNA, 2175 bp, Cannabis indica
gctctgaaatgacatatcaatgattacaaactaatagcgatgcaatcatttttatgatatttgtatgtgtttcatatcgacaatccaacacaaaactcttttaaaaaaattataacacggttagttttattaatatatttatttagttgttataaagttggtttacataattctaacagttattttttcacataatattattaaggtacaattgattgttgatcagtgacaaaaacaacactgattttttttttttcatgacgatggacattcaaaatttctatttttagttgcaattattaagttctatattatttgaataatagttgtgctactacaatattataatttaaaaaaatagggtttgaaatttgcaatatacgactcgtatagagaaaactcgattgcggtaagttttgttggtattacataggggcattattagttgttttaaggtttaatattagctgcctcacagcaaatataactattgcattacagtttcatgaaggttatcccatacttgacttacaatgcttaacttttcacactagctatcaagaaaaaggggcaattctgtttctcatattttgcaacggacagtttgatcaaggaacgaattatgtaaattataaagttactggccaatacattttaatatatagattgcgaatatgaagaactagtacacaagctaaaatatgtgctagaatgcaatcaaaaaaatactcaactgtaactgaaacaccaagtgaaagaaggataccaactgttgaggataaaggacgattcaagcctatttttctacatacaactaaaattgaaagaaatttacttcacaaggtatccattgtgtgaacatgatcagcaacacaacaccaaccaataacacatccttctttgtaaggagcaactcactatttgcataataattattttaaggttgtatgtcatatctaaaattattaacacaaacataaaagtgttatcaaaatcatatttgacacattaatgtaaagtttcaaaaaatttcctattacattgactattttgttgaatctttaaaaatttcttattactaaaataatgtaatttttcaggcctaagataagtgttaccatagggaatcgaactccgaagaacaaccaaatgagaaaccttatacgaagtattttagctaactacaccacacacttagtggtacaattaattagtcatttaaaaaataaaaaacaatcagtacttttctaaaaaaaaaaacttataatccttagaaatattttaaaatagaataaataggattattgcctcctaaagaaactagtaataagaaaagttagggcaatgttagggcaaaacgataaagaaactagaaagaaaccttcggactctcattagcttggttcttccctttcttaacgtcagggagagaaatgttttcggcactacaagaatgccaacttttgccggcgctattgggtaattgcgccgacattagttgacatttaccgacgcaagtcaaaaaagtcgccagcaaaggaagtcaacattttttgcccacctcaaccttttgctggcgactattttcgctggcaatagaatgtaccaattgcgccggcaaacgttggagccaaaccgccaaaaggtgggaattgttggttgtacgattcccacttttgccggcgcaatgaactgccccggcaaaactattaagttaatttttttaatattatttacttttgctagcgccaaactacgctggcaaaagtagggaaaaagttggcggtcaattttcccttacagttaaaaaatgtgcgcacaaaaataggtggggcttttaccgggggatattagtgcaccgacaaaagtaggaggacattgaggctacactcttcagactatatggaatagaatagcgataatattttaatttttttaataatacatcaaacgaaatccttatataaaaaatacaatatatatttggtatgtttttttttcagaccaagtttgagttgctaactaataatcctatgttcgtggattacgtcaccaaatctatgtcaaaaggattacatgactggagatcagacacgaagaaggcatggaaggagaatattgaaaaatatggagaggaagaagcgaacagaagatcacgtccagatatggtgacac

SEQ ID NO: 254036 - DNA, 673 bp, Cannabis indica
aaaacaatttgataggatacgagtcttgttgtccatgagcattcttcgatctcacgtgaaaaagaacacgaaacccttgaaagtagacaacaacgaggaaaatcatgacagctgagagcaaattcgtgacattaggcgaatttcgccttaaaaatgcttcgcgaagagcgccaactttgtctgttcgggttaatagtggatggaaaagagctataacagcgccttcaaactcaactccatgaccactactgctaatagtgactgggctaaatgccttccatattatattctcactaaaaaatcaaatgacattatccaatcattaattgaatcattaataaaatggctataaaataagaaagactaattagtacttaccaaatgtttgttgtgatgaaaagtgaaatagttgagcctaagccataacccttttatagaagctcatctagggatatgacaataatggaagcaaagaagagttgaagaataataaggatggaatttccaattccaatttgatcaacactttcatacattcccaagcaagcataagcaacaacttcaccaatcgctatcaacatactcagtaatttttatgctccatttctacaaaaaaaacaacaaatattagaattttatgtaagttagaatgttaatgttacattatttctct

SEQ ID NO: 254037 - DNA, 887 bp, Cannabis indica
caaatttgatgagcttaggatgtctgataatgaaaacctaactgaagtctatgaaaggctatctgatatagctaatgaacattttgctcttcgtgaaaagcttgatgattttgttcttgtgacaaaaattgttagagttcttccagagaggttcgatactaaacttttggcaatggaggaagctaaagactttagcacaatgaaggtggaagaattaatgggttccttgcgtacttttgaattgaatcaacaaatcaattgtttgcatttcttttctcttttcttctatatttttttcttttctttcttgtctttaaatactagaaacttgtgaaattgtaaacaagacagcagccatggatgaacaatttcaagtttggattttattttttgataagaatatgagctaaactttttgaggcttgaatggctatgcactcctatgttgggtatgattaatttttaagcttattttagcatctttgcctttgttcattcaagtgagcttgtcattttatttgattgttatttgttggccatgagtaacaattaatcaagctagatcttgttctggaagggtagatctagtagttaaacttggatggagcaagagaaatcctagatttaggtttttctttgtaagtggaataggaatatttcatttaccttgcataacttaagaattgatgcttaattagtgttttgcaatctggtttgatatatgaatatgtgaatctaaatggtagaacttaaattgtgattttagaaaattctcataaacacataaaaaattatgttatcactgtgcaggaatgctaaagtaatgctatagctgttggaatttattttaccaggatcttagatctactcacaagtatgttgtttaa

SEQ ID NO: 254038 - DNA, 1422 bp, Cannabis indica
caacaccaccaacaatgtagaagttttttcgattactatgaataccgatgagaaagcttttactgatcaccatgaacgccgacaagaagttttttccgatcaaccatgacagcatgaccaacgatagatatctccatgaaaagttgatgagagaaaatcacgattgatgcagatctccatgaacgcttaattacttgccaattttttttgggtttttcttagtaaaattttttttatgttgattagtatgtttgctttaattattttcttaatcaattgttgttgtttagttgattcacatacattacttgttttagttcatagatttcaatgttttctggtatttttcaaaaatctagaatgaaaaccagtgaattgaagtttctaggtagtataatgagaacaatgactgcttttaaaatttcaaaataaaactatatttaatgttgttgtcttattttttttaattgtccatgattgtgcgataaaagatgtacaaaaaatagaataataacacaaaaataatgaagaactgatgtaactttattattgagaacaataaatactatgaaataaagaaataattgtgttgaccataagagaaaaagaaaaaaaaatattgtatcataacattttgactcatctcatctaaaaatgattaaattttttattctgcaggattaatctttccataattattaacattaaaaatataaatttaaaagatgaaagtataaacataaatttcaaaatataaaaaaagaataaaaaagttattttcatgttattgtgaagtttcatttgcgttgttttgcaacatcttatctttaacttaaaaatattatgttaaaccaagttattttcaagttgtagtaaagtatgttatgagttgtttacactatactatcaaaaaatagaaggtgctaatactttaaattacttgccaaattttttattacttgccaaattttttattacttgccaaattttttgggttttttttagtgaaaaaatttgatgttgattagtatgtttgctttgattattttcttaattaattgttgttgtttagttgattcacatatattggttgttttagttcatagatttcaatgttttctggtattttttgaaaatctagaatgaaaacccgtgaattgaattttctgggtaatataatgagaacaatgagtgcttttaaaatttccaaataaaactatgttgttgtcatattttcttagttgtccatgactgtgaaataaaagatgtacaaaaaaatagaataacaatacagaaataatgaggaattgatgtaactttattattgagaacaatatatactatgaaataaagaaataattgtgttgacaacaagagaaaattaagaaaaaaaatattgtatcataacattttgactcatct

SEQ ID NO: 254039 - DNA, 709 bp, Cannabis indica
gttaatttattgttgatttttttgttattttttgttgttttattgttatttttcatatttacatttatgtagtttttttgttgttttcgtgttgtttccaagaaaaaaccgtaaaaatacaaaaaaaaattatttaaacgtaaaaaatatatttttttacaaaatagtgctttaaataattattcctatagtttgatcatacattttgagagaaaaggtttaagtgtaacactttcagagccaaaaacctcaataagggagtgagacttaaagaaatgttattggggacttataaaaatattgtaaaatgagagaaagtttacaaaaatactgtgatacagagttttttttatatttttagtgtatcaattttataaaaacattgtgtttaaagtttcaagattataaaaatactatgttttactaaaataaaataaaaaaaaaaaaacaactcaaaaacaactaaaaaaacaatcctagaataacttaacaaacaacatgaaaataattataaaacaacaaaaatataactacaaagcaaaagaaaaataacaataaattgacttaattgcaataagcaaaataatcagaggaaaaggattaagcatgaaggatctagcaaagctgcttcttcaagtacaattatcagacataatcttctatgttcgaattgtaatgaaaagggacatcaagaagaacgatgtccccg

SEQ ID NO: 254040 - DNA, 690 bp, Cannabis indica
ctttatgattacaatttcatttctttcatttttttttagggtttcaaaagtgagaaataaacaaaataatttattctttcctcaaagaaaaaaaacagagagagagcccggtattggcaatattagtggatagtaattggcattaaataatattttactatctctacaaacattaaaatttaatgccaattattgaaaatttttgattttttatattcctcagttaaaaggttattaattgtgaattgattgttaatatgtagaaacagtttttcttcacaagataataaaataatgatttaatgcttttaaaacatttcttcttattatcaatatatctatctattaagctatgtacactcttatctttgtagcaaaaaaatatatatattaatcacgtttcttacaaaagtctaatgatatatatcaaacattaaccctcacatttctcacactcttttctttagcttatatttttattcttctgttgtgaaacaacacctcggcaagaacaagaaacagagtataccagatcaatgaaaaccaatttgaatcaattcatgttgtgcagcaaaaataaaaccaggaaacactagtaataacaggtattaaaacacacaagaattaacgaggttcgaacaagataacagtatattaccttgcctactcctcggccagaaacagccacaa

SEQ ID NO: 254041 - DNA, 1028 bp, Cannabis indica
gcaaaatgggtaaaataggcgacgggtaaaaactgtcgctaatgtggacttcccgacggtttaaaactgtcacctataacagagtatcagtaaaaattatcgcctatagtatagggcacagtttaaaaccgttgcctataccctgttataggtgacagttttaaaccgtcaggaatataaaaaagagaaaaaaatataaattttttttgccattaatggcagaaaaatctgtatttttccccattttttcctacattagttttataattttatctaaattaaaataaaacaactaattaattttgttacaataacaactaacttcaaaacacattaaatgtatacaataaaaataaatatataataaataaaaaaagtatataaataaataaatgtatttatatcgagctcggagtgagagaaatagagagagtgagacagacgagaggcagtggtagtccgacatatgagacggagatgagagggacaccgacgggaggtggtggtggtctgatgtatgcgacgtagagcagagtgagactgacaggaggaggggtgggtggagattgatgaacgagagagacaagaagaaagggagatcaagagagggaggaagacggtaagagaagagggcgatggtgaggaggcgtgggtggggttttggagagttaagattttcattttagggtatgggaaatagagaaaaaataagtgggtatgtgagaaataaaaaaaggtaggtggacatgtaagaaatgtggcgagaaataaaagatttacataattttaagtatttaaatttctttatataaaacatttacataatttttatttttaaatatatatagcaatattataaaattaataaaaatattctgttaattaataatattattttttagttgagttatacgacacaatgagattttttttaatgattttttgtttattttttatcttatatttagttaaaaaaattagagaattagagagtatctagggtactaaatattttttttaattaatta

SEQ ID NO: 254042 - DNA, 1070 bp, Cannabis indica
aattattgtacttttaattaatatattaatagctcctaatatttttattaaaaataactcacatagttaatttattaacagtttatgtatttattttctcaaaaataaaaaataatttatgtattatgaatataatataattaataagttaataattttatttaaaaaggtgtaatattttttattactttagttatgaaggtacgttatgattaatatttcgataaaattaaaaaaaaataaaacaaaaaatttgttatataatgtgaatctaattaatgaaacaattataacatatgcatactaattgatctatttatacattttttgtaggaagtaacaagctaaagagcaagaaaagaaaaacagagaaatgaaaagaagccttaactcaactgagtaggcaaaagctttatttataggaatccagtctatacaatcaagagagaatgacagttaaaacaagaaacagaaatcaactaactataacaaactaattaacagaatagagttagttatttaggtgacatcactaagtagtttgttaacatcccccctcaaacgaaatggagtaggagacatcttgagtttggcaattaggtagttgaatttgtctattgatagaggcttagtcaaagcatcagcaattcggtccactacatgcacatatctaatcgataactctttggcaaggatgagatcacgaacaaagtgcaagtcaatctctatgtgctttgatctagcatgaaatactggatttgctgcaatagcagcaacactttggttgttaacccataatattggacattgagtttgagggacttgaagtttagatagcaaggaaacgagccacttaatctcagttgctgcatttgctagtgctctgaactcactttcagagctggaacaggccatcacatgctgctttttagctgaccatgacactagatttcctccaaagaacccgtgcttttcctctcatcaatgcatgatgcccaatccgcatcagagtacccctgaattgttagtgaagaggcaggtgatatatgtaagccgtgagtaatggttcc

SEQ ID NO: 254043 - DNA, 749 bp, Cannabis indica
atgacttaagggcatgattgtcatgattttaatatgtggataccataaggacaatttctatattgatgaggggccaaatagaaatagtcaataaatattaccaacaggtttgtctgttggtaatataacgggtaatggtccccatttgcatcatatcttttcactcttgtatccccatcaccaagagaaaaagtttcagagaaaggtttgatgcaaattggaagatcataccaattaaaggtcattacaaaatcgattgtatggactccggtacgcttccgctaatctatattctattgtttgattctcttgaattaattaggactatattcagagtttacagtattctaacactttccccatggccctattaggttgaataattctgatttttcttaatgtgggggttgttgtgacgattcatgcaaaataaatgatgttagtatttagctgtttaattatgtcccagcttgcagttacatttttgtttcataattatgatatttactttggttactggttgtgtttggtcgcatgtgttttaacgaaaacaaataataatagaagtaaaaaaaaaattttttgtaaaatatatttatttttacttaaaaccaaaaaaatttcaagttttagtcaaaatctattagattgttcatgttggggaggtggccaaattggcacgtgcattgctatctttgattataatattaaaaatttaattttaaattctgatatttacagttagttta

SEQ ID NO: 254044 - DNA, 821 bp, Cannabis indica
ttgtggattattagatgtattacgataaatattgatatttcttaggtcaagattaaaaatcaatacacgtttgcattttcttgaacgaatttgaggagttctcgtgaacatttcttcaattgggctattagcgatttaagctccagtaatagcgagatagtaaatcattaaagagagaaagcttaaggtaaggattagttttgttttaagttaaaaacggttggttttatatattgactttatttagagtagttgtgaagattttgacttcatgaatttttttttgggtagctactgaactagttttgatgtttatttgttgaatttgaggtgatttttagttagaaattgactttggaactttaaagcttaagcacgagctttaatggcattttgtgtttaagggctcgtttttaatttctgttacgttggtactgtagtatatatggtatatgcgtgtcctatgaaatttggaaataatttggataggttttagtggtgtttcagaaagtgtaaaatttgagattttcatgccaagaaacggttaaccatttttaccggaatagtttctcatttctaaaaatttcagggagatcagaaaattgtattttggtcataatttttcattcgggtgtccagtttggacgttctatatattgtttcgaattttgtgacgagctctataatatggtgtatgttttagagccaaaatataaattttattttagtgtatttataccgcggggtttagtagaaaaccctagattgtcctttacaaatattaagcaatgttttagaataaacacttattagtttactgt

SEQ ID NO: 254045 - DNA, 793 bp, Cannabis indica
tttcaagattgaagatgatcgatctccaactaataatttagcaactttactgcctcgttctcacatgtacaattcgtattctaacaacctaacaatggcgagaaacagaaaaaattatctattaattatatagcaaagacaatgttattctcgaaataatttatgataaaatttgatttcatcagctaatttgctttatatatatgtagagaataaattgtatattatgctctaaattcattttaatcataatatataatattttatttgttatatatatatgtttaaaattattgttttcatggtacaaaaaattgtaaattaatttttgatctagggtgtaaggtaaaaatttgaaataaaatatataaagtaaaatttttgtgaagatcacttgaaggttgaatttttgtaaagtttaatacagtgttaatatatatatatatatatatatttatatgatcgtggacttcaacaatgattatatgaataaaaatgtctttccaaattgtagcattggtcgtttctggaaaccaaataatagaaacatgagaggcagaaaaaaagacaaagtttggtgattatatataagtcatgccacggatctttgatattaaaaattggatattacaaaaaaaaaaagtttgatgatcagctgatcaatatgttgacaaaattgaattaacaagctaccaggctttcataattgtttaaatactgtgtttggtgtaataatttataccaaaaaaaaaaaatacttctaaaatttttttctaaattgagccagaaataa

SEQ ID NO: 254046 - DNA, 861 bp, Cannabis indica
taaggctttgtattgtgattgcgggggaatgaacaaggtggtggacctcttagataccatgattgagaactggattgagtagaacttgtaagttacttttttctctcatataaatatgaacggctctttaacaagtgttctgataacaacatttaaaatttggaggtttatttgaaacataagtattgatattttgttgtcgttgtatctcaacaccaatcaaaaaagaccaaacatataacaataaaatcaataaatgatggaatgcataaaacaaaatcatgacaagtgttttgcatggttcaatgtatatgtaatccacgggagacaacagccatagatggcttgaatcttcattgagcagtcatagaattacaaactcaagtggagacttgctccagtacaaatactgttgttactgggactcacaatcaaacacatgtatactgttacaaccctcaaacactctcagattctagaattcttattaactctctcctcttgatcgaatcagactaatctcctatttatagagccaactgactaggcaaatctgtcataactaactaacggtcactcggacctttgactgatgtaattagttgtacatgaccatgaagtctgaacccccaaagttgttataattttgttaacaaagaaaattctaactgtgactattaaaagaaatgctcaactttgaaggaagacattttatattgaattgtcatattgtaatagaaatcgttactatcatgcagttctatacacagccagataactaaaatacccctagagagggatagggctaagctgagcaaaaaaggtttttcatgtgatgggaaatgaaaactattagcccca

SEQ ID NO: 254047 - DNA, 793 bp, Cannabis indica
aaataaatattaaaactaccttataaataatgttgagaaaaacacataatttggaataaaataaataatatgacaagagagaaagaattgagaaagaatttcactcggttttattaggatatgaaagtctttataatacatcgagatatacatttcaattattgagaacctaagaacaagaacacaaagttaatcttggaacaatatcatcttttcaattagtgtgataagaccaccatgatttatttgagggcataaatggcacaggcacacttaaagccgcaagaagatcttttctgctgcgtctttattgtgtttgatgttaatcaataaaaaaaatattatactggaaaaacaataatatattcaagtgattaagattgtgattgagttggccaaattattcttcatgaggtttattaaacaccttcttgagcatgtaatatatcataactgcagagccaaccacaaagcaccaccaacggcttaaaatgctgccaacaccactcaattgttggtaatggtcaccaggctgccgcataggtgagctgaaaaagtaccatttaacacaacacaacccttgtttttgttagttgaatataatgtaagattgtaagaaagaaaaaagggttagtatttcatgccttggcgccaccggagttgattcgggtccaggagtcacagcaggtgtggttgttgcatgttcaggctctgcaaggcttggctgtaaaggctcttcaactgggatttgaatgtcttaaacctataacacaatagtgtagtattatgttac

SEQ ID NO: 254048 - DNA, 816 bp, Cannabis indica
agaaattaaactaaaagcaactgagctagagaattaattaccagttgcttgaatgtttataatgtttcccccaaattgaaatggaaaaccctaatcaaacccagtaaaagaaaagcgaataatgcgtaaggcaaatgagctagaaaggctcaccggtgtatgtagtagtacaggctgcgttagaattcaggagatttggtctggctcagaagctccacacggtaacgtcgaccctataccgtcgccgccggttacaaagtgggaagaaagtccgattgagaattagtctggcccagtaaatgtatgtgggcttctacagttaaaatccagcgagaagcaataagcccacttaaattagtctgaaaagttaaatttggaattttttttatcaaaatacttacttttttatttttttttaatggtaaatttgaaccattcattaggaacacaatcaggcattacaatgttcttaaatccacaggattcagctcattaaaaatacaatatgacatgaaacaaaatcctctagcaacactcagtgaccctatgtgtagattatttaacaaaagatatcagaacattatttaaagaagacaaccactcaccaacaagtcaaactgaagaaggcatttggattgaattgttaattgggtgaaccacaactattgcatttgattcgattgaccacattagcctaacatttatgttttatccaactcagcacctcctaaaaaacccattacttcaactattttaggatgaaaccataccataccctgctagctgaaatagcctcgagcaatcatttattgggat

SEQ ID NO: 254049 - DNA, 1280 bp, Cannabis indica
ttggctaaaaacgaggtcaacaattgtaattgagatttcatgagaaaaataatgtagtatttatggaaatggtggcttacttttgtatttgtttttattttttcttttcggttagtttaacatagtctttacttgagggcgagtaaatgttaattaagttcggaaaaatttattaggtttagttttatgcatttttagagtctattttaatgtgttttatatatgtatatgtatattttaccactttattgtttagattatgcttggtatttgtttttgtgttttttcaagtgaaattcaatttttgtttattttggtgctcttcaagcccttttgagaagaaaaaagttaattttgaggaaaaaagaaacttcaataatacttagttggttctggtgtactcaaaatttggctacacttcagaagctaaaacgtatccaacaaaaagaagatgaatcaactttaatgatataataataattatatcattaaatgcagattaaaataacaagttatttttacataaaggtttaaaaagataatattcaaagctcgttgactatatagtcttaagcgagacaaggataaaaactattggactgatattgacgagacatacatctgcgtcggaattcatagacaaaaaaaagatattcattcactcaagtagaataaatataatcacatacaacagcttcgggttacatatagcgagacaatcacctcgcaatactgactcaaatgaagggatgtgacgaggtgaacgacttgccaatacttagtatttttttcttattaagatggacaaggaggataaatcatgtcaagcaagataccaccttccaaatgagcaataaccgtctaaaggataaaaattaaagagcaattgggtagttattaaatagtatcccacatgtgatcaaaggaaacgaggggattgcccacgtttcataaacggttatatttgaagtaatcccaaaaagaataactgccaacctatactcctataaataggggcagattccgtagaaaaagaaaaaaaagatttgagagagaaattattattattcaaatactgtatcctgtactcataaaaatccctaataagaaagactcgtggagtatgtagattttaactacaaaaccaggtaaaaatatctggtgtgatttaattatttattattaatttttgtaaagtatttattactgaaaagaaaattttgtttaacaaaaattgcgctaacaatttggtgctttcattaagagccttagtgataaaa

SEQ ID NO: 254050 - DNA, 1197 bp, Cannabis indica
atcaccaccattattgagaacatctaacatagtactagtaacaagaggcccaacaatatgccaataattggtgcagaacataacagacatcccatctattcttggactgctgtcttcagtcatagactttaaggcactaaatacttcatcagccgtaaaaggaagagatagagaagtttgtgaatctggtgtaatggcaactagaattgtatcgagcactgcctcaagagcttgttgatcaacaccttgagaagtaaaaatagcagcaaaataaagctcgacctgctgaagaatgtcactgctgctggtgtacacactgccatcgtcacttattatttttttaattctattgttggagtgtctagcattggcacattgatgaaagaacttagtgtttgaatcaccagatttaagccacgagatccgagatctttgtttccaatagtcttcctcttgtgcaagcaatcatccaatattgtttctgatttttttaagagcagtaaagtgatcagcatctgtgttagaggaattctgaagcacttccacatgttttatgagcctctttaatgtcctgcttcatatgtccatacttgtgatggtgccaagattgtaaatgagtagcacatgattgtaaattactcattgtttgagatatagcattcgaagtattgctgacccaattcttgaaaatgatgtccaaacaatcttgattattgagccaaattttttcaaaacggaactgagatttgtatgaaggttcaatttgttgcaccccagccattgaaaccattaatttaagtgatctgtgatccgaatggtagaagtcaagatgctgaataattggtttctcagaagattcagaccaaaaatcattgaagaaaccataatcaagcctctccttaacgttaccaagtccttgacttttgttagtccaagtaatgagttcaccttcataagcagctgctgctaaatgacagtagtcaatagttgtttggaaggcttgaatttgaccattattacggggaggaccaccaactttatcttcatgagttaggatctcattaaagtacccaaaaccagccatggatgagtaggagcaatgtcataacatcttctaaggagtgtccaagtgagaactcgttgactactgttgggatgaccataaaacccagtaaaatgaaaggaagacagatcttg

SEQ ID NO: 254051 - DNA, 4573 bp, Cannabis indica
aaatgaaaaagtagtgcatttatggtaatgtaaattttgtagtgttatgttttgttatataacaaaatttgcatcactttttaacacaccactagaatatatttttggtaagtgagctattttagctttgcatcactaattttcttctctgttggagatgctctaaaataaatataagcacaaacatgacattaatagatttaataaacatgtcatgtgacaaacttgagactgtcagagcacaaaattaacataattaaacataactattaactacaataaaaaaaattatgaaacctatcacataaacacatagaatatgaaacctatcacacaaacacatagaatacatagttttaatctaacacaatatcaaaaaacttaattatatattctacaagttaattaatacaagattatcaactcattttatcttctgctattcgtgttataaaattactgcttgacataattaaggtaaatacaaacacaaaacaattattaaacatgtcgaaatttcaaacaaaaacacaaacacaacacgattattaaatttgtcaaccaaactaacttatttatatcaatttcaagtcgagtcattttaaaatttaccaaccataactagcatatatcaatgcaccatttttataggactccattctaatatcaagcaaatgaataaattttctccttctttaacttaccaaacaatacaaaatattctcactgtcctcttcatccttcttcaagtaatgcatcatctttctctccatccctctcaccaaacacatcataaaccactcttttacatgaaattatttctacatttttatagtaaaaatactgtagaaatttgcgagtctttaggcttttccctcacatctagctcttgtcacctctactattaccctctcttttttcacctctaccaaacatagcattaagcattactgtcatgatgaaaatatctagagtgagatgctcgtgcttggccatttttgttggggtagtttatataattatgggcaattctacttttcaacataaaaagtttcatggcaatgccagtggtcattatatatacatatatcagtacgatcatcaagtacaacaaactagcttggtaaaagattctgagttaaccaaattgttattggttatataccattgttattatttcataactctcttagctaatataacacagtacttggttaaaaatggcgacaatttcacatatagcagtggctgactccaattttacctaggcgccagcacctcccttacattacatctaactcatctttacaaaaatgaaccaaaatatttaaaaagcaaaattagtaacacttgaaaaagaagaagaagaacgacgaaggaaaaggatggcattatcgccatccctctctctatgaactggtggaggacgccatattcgctctatatatttggacttggactgtatacataagatttttctaaaggcaatatagatggacattgtttacacctcttcagattactacttccgcgctccctgcaatcgagttggagaggcactcaaattatatcctctcaaagcgagatgtcgaagacagaacatgaagctgaagctacttggaaagaaaaaaccgcagaagccggcatttcttaatgttgccatgagatggatatttttttttcactgatcaatagttgctgttattctgttggggttctcacatgacgggaattggagtgctgtcgttactattttgaatcatttgtttctggacagctttaactgctgctactctagctgcattggctgccctgtttgcagccgctacagctcggctcaccctttcatcaaccttggccacatcataagctttctcagctgctcttcttgcttcctgatagtgaaaaaagaacgaaaacatatttcgttaaacaatcttttatcattttcaatcacaaaaaggggttccttgactgcactttcaatacctggacggcattgagtactttggaatgataaacagccacgggagaaacagggtgagttgtactttgtgtgcttggaatatcaagaactccattttgccagtgaccagattgtgtttcgccatttctgaatgtatacatccctaggccttgccttctaccctcgtgccaggccccctcataacggtgaccattggcgaatcgataaactccaaagccatgcatcttgtcagcaaaatattctccagcatatgtatccccatttctgaataaaagaaacagcagcctcggtataaaagatacaaaacaatctaatacatactaacacataaaatttctggtgttgtacagcagcaccatatacttaacgaatccaacaaataattttgtggttaaaatagaaacatattagaaatgcaaatctaataacagcaacaagaaaatcacaaaattaatttcaaaattcaaggaacaaatgttactattgtaataaagtaagcaagaggcaaaatgtataaaacggccaaaaagaggagtcccataattataagatggctcaagaatttatgcacattcctttctaagcgagattttactgtttacttatcagaataggtaataacagaaaatctttaaaatttaaaaaccatcttcatgattgttaagtctttatcaaataacatgtacatctacttattaggcaaccgatagaaccaccagacttgcatgaagtcaccaccaaacaccacaagaaagatgtttctttctttttgcgaaagtttatgctaattcctctggattagcagcaccagaaaaattcaattaaacacgtaaaaaatataaataaaacacaaatcacatatccaaaaatgtccagttaaacattgaatcctacagactttaatggggagaattacctgaaatggtagtgaccaagcccatgcttaacgccccacttgaattcaccaacataacggctcccatcctcacatgtatgaacaccacacccatgactctgtccattagaccattccccggcataaacgtcaccggtataaaatctataaaccccgaaaccgtgtctcagtccctgcctatactggcctcggtaacggctccctcgagcccaagtctcaaccccataaccatcatacttcccgtcaacccaatcaccttcgtatctcccgctcatgttataataatacactccactcccggagcactttcccttatggaattctccctcgtaaatgtcgccgtttcggtatacctgaaccgagcaaccggaattcactctcttctccgatttgggccgagacccaattgaccaaaacaccggcaaaggcggtctggacttgagttttagcgggagagacctcgagaggaacaatcgaatcgaggggaggcgaggaagggcgagattgagggagaagaggagagcagcagagaaagcgaaagcggagagaaaatcaatcaagaaagagtggctgggatgtgagacgaggaagtaaaagaaaggcagagagagaagaatcaccaggcggcggagacggttgaggcgtcgaatgaggcgaaaagcagcagtcttggcggataaagaaatggaattgagagatgggttttgcttggcagtagggaacttgtaaagggtcggagatttagagagagaagaagcgttgtgggtgagaaggggacgcttatacggcgtcgtaggagggatcgttagatcattaggaggaagagcttgagatgggtaaggcggcaaatgaattttgggatgaaattgagcgttgatatcgtcgtttgtaagggattgaattgagattgatgaatgagacagagaagaagatggattgtgagaataatgatgatgatgagaatggaatagaagtggaggggttgggttgaaatcggaagagacgccgctgctttcttttccgatctgagcttctgatttcttctgatgcatcacataaggaaattgaaaaagtggaagaagaaagtgttgtagttgttttgttcaagtgggattattattttctcgggaaaaaattagggctaacgattggttgtttgtggggtttggcgattctttctcgtctgcttttcttttctgggttcaatacaacaagtttttgtattatgagctttttcgagagcgtttcactttatttaaaatgcctattaataataattaattaattaaaatataatactactgttgattaaaaaattaattaaaagaaaacatcaaattttgaagccgatgagagcgaagaaacattacttttcttacagaatcaccttgagcttttgtgttatttacaaaaatgtcacaaaatattatatttggtaaaaaaatttatacttttaagtttatttttttgtttaaaaaaatcatatgaaacaacagaaaaaataactttcagataatataaatttataattctcaaaaaaaaaaaaataaaataataattattataaaaataaataatacaaaataacaaaaaaactaaacaaactaaaataaactaaacaactctaaactagtaacaataataaaaataaatcaaaataatcgtaatgt

SEQ ID NO: 254052 - DNA, 531 bp, Cannabis indica
aaacgagaatggattagcagtagggatagtgatagcgttgcctcaaggcttaaggcttcaaactgctttacggttcaaattttcatcctctaataatgaggcaatgaatgaagccttgttcgcagggttgagactatcaaaatttgttggagcccaaaaaataaaggtctttagtgactcccaatcggtcgttaaccaagtgcttgggaaataccaaactcatagagaaagagtggatttttttgtcgctactgtttagggtttaggcaccgactcaattattaaacgggtctcgagacgtatagggtggattttttttgaaacgattattaaataggtcgtgttcgggtcgagcatgtgcctgtcatacatgggtctcgacacgacacgaacacgacctgcgagcgaaaattgccacccctaaggcgtaggtacgagcgtcactgaaatatgataagtaccaggcgtaggtacagactcgtctgattagatgatgtgacatattggtgccaagttgtggcacgggctcac

SEQ ID NO: 254053 - DNA, 708 bp, Cannabis indica
gaaacctacaaataataagagtgcaacaatcctcaaggcaagatcaagggagccaaatgaatagtgtggatttatgttaccgccccatttaattaattatgatcttgatctctataataatattgatgaagagtaataataaccaatatttgtggcctaataattataagttctcaccaatttacggctgcattatatatcaggttagtaacaacaatttttgtctatatataggcaaaattttggaggaactaaagacaacacaaaatatatttatatataatatattgtataactgtaatttggacgcttttttatttgtcttggtcactattgaaattaacgatgttgatattctttatatataagtacgtacgtgggtaagcatgcaaaccgcgtataggagagcgccggcgcaacgcgtgaatcatcgtttaattaagccagttttttgagggccttgtgcgtgcgtgttgaatattttatcctaatattgtcataaaagccattttcattaattagaccattgctatatatacagtaccagtgttcgtacgtaccaacacatcgtattgattttagtaatttagtaacattaatagatatcatatataaaaccacttgaggctagttcaaggccataggtgggtaggtgtctcctgagtttgtgtcccaaataaaatatgtttgtaatatataaacgcttaa

SEQ ID NO: 254054 - DNA, 600 bp, Cannabis indica
tgcactgtatttctgtaataatattatataaactagttatataagtcaaaatttacgactgttactagtttgatataatgtatttatacaaaaatatatatgccatatatatagagaaaatgtagtgtgacactactcatggtttgtacttaatttatatcttattcaacacgtattgatgttatatatgtatagttaagtctacaaatataaaccgttcttgattaaaaagaatttacatatgtaatagagttttgaattgaatgggatattgccaaaagtgtatgaggacataaagtcaagaataatatatatattgctgggagtgtggtgtaggacatagaaattggagggataacacgtgcaaaactgacaaggttgaaatataggctttatagtgttacacatctttacatgtttatggccaaacttaatcatatcgtttcttgtctaccaaccattcctgaccttccacctccagacacacgtgtgttaacagttacacacaggagtactatgctgccatacacaaatcaagagaggtagagagagagagagagatattgtagcaaagtctatagagggaaccttaaaagttct

SEQ ID NO: 254055 - DNA, 1483 bp, Cannabis indica
tatcataccttatcaatgtccacatcttccaaatggcttcaacaacttcttcaatgttttcttcaacaacttcttcaatgttttcttcatcatcactatcataagcgaagcaatgtcgtagatcgtccatttctatatatccactttggttttcgtcgaaaacttcaaaggctgcacgaatgtgccggttttcattgcctatcattcttaccttaacaagtatgctcacaaattctagatagttcaaatatccatcctcatctaaatcaccctgtaaattcaattctatgtatagtgagctagtactttttgttagagagtgccatatgtgaaaacttaatacatcttatcgctaatttattttgagatagaactcaacatcgaaatattatgtaaattatcgtatgcttacaattttcattagaagatcaacagatggacatggaagtgaaattttgaatgcggctattagttcatccatgttaatcattcctctgctgctaacatccatacgattgaaaaatttctttacaccatcatcattctccaccatataaagactaatttcctgtaaattcaaaattaagaggaaaaagaatcagataaaatatcatcaccaagggactcgttaaaaatagaaaaaaaagaatatgctaagtggaacaagaaatctaaaagtattccaccttaaaataatatattcaagtaaaaataaataagttgaagaattacaaagaaagcttttctcttgagaatgttcatttcagagaactccatgagcttttcccttatattaaaacccaaaaacatatctcgagctttctttgaagcttgtggctcaggatgatctgcgtttagtacagtagtagagaggaacttaatattagttactcattattcattacagaagctctttaaatacttatatataacattacctagtacgtcctgagttgtatgctcgcgttttggacaagcatcttttgcattgtccgggacaggactaggtcgaggtctggggtctgggtcgatcgaaactttaggcatggggggctgctgcgataggggcccatccatggagggatagtgatcaggcggcataggttgctgcgtgttgggattgtgataaggcggcgtaggctgttgcaatgggagcccatttgtgttgggatagtgatagtgcggcataggctgctgcaatgggagcccatgtgtgttgggatagtgatagtgcggcataagctgctgcaggggagcccatgtgtgttgggatagtgatagtgcagcataagctgctgcagtgggagcccatgtgtgttgggatagtgatagggcggaataggctgctgcaatgggggtccatgtgtgttgggatagtgatagggtggaggaggctgctgcaatgggagcccatatgtgttggaattgtgataaggcggcgtaggctgctgcaatgggagcccatttgtgttgggatagtgat

SEQ ID NO: 254056 - DNA, 677 bp, Cannabis indica
ttaatataattgttcttcctaataataatgggataattacatatggtaccattttttgtaaaaaattatattttacgtttacagaatttattttacatttttacggttttctataaagacaacacgaaaacaacaagaaaactacataaaagcaacatgaaaataacatataaataatatacaaaacaacaataaaaaataacatacaaatagtaaaaaatcaacaacaaattaacaagagtacaatataaaaagaccgtattttctataaataaaattaaaaaaatcgtaaaaatgtttaaaattacgtgaaatcataattttgtaattttttttttattatttttgtgtatttataaaataatcccaataataattcatgtaatattatatatatatactgcagtacttcatatataacattaattgtaataacctttttaattctttaattaatgatatatattctctttcgatattatacatatataactacacatattatatatgaatatgagcccagaaaaggaaagagaaaactgtcaatgtatatctatataactgcaattgtatttaggctaattagaattttcgcctcttgaactttgacacgtactaaattatgcctcatgaacttttaaggttgttaaaaatgccccatgaactattgagattgt

SEQ ID NO: 254057 - DNA, 1460 bp, Cannabis indica
caaaagaatagtctttaaattaggatctaacataggtatttttgaataaagaaaggccaggacacacatgatgtgtggctcctgtgtcaataatccaattggtactatggataaaaaaaatttcttaccagagaaatgggaaaccacaggctgatcatcagaggaattaggagtgctattctcagtgcttttctaagcaaggaaggccatgagcttctgacattgaacacttgacaggctagaaatgagatctctctccattagcatctcctctggttttccttcatccattcctgaaaaatttacactagcagacttcattagaggtcctttagcatcgcgattagggaaccttccatgaaatttatgaccaggggatatccattgagtttatagaacctgtcaattgtgtgtccattcataccacaatgagtacaattgtactttgatctaaaaggttgaacagctccaacaaattgtccattgttgctcgatgatactttatccacatcaaatgaactattgcatccactacttaaccctctttgtctctcttcttgaacaacagcagcatatgctttgttcacacttggaagaggatcacgcatcaagatctgagatctaacaaaattgtacgaatcattcaatccaaccaagaattcgagcaatcgatcctcctcctgatattcttgaatcactttcattacaccacatgtacaaaaggttgtggtctatactttctaatttgatcccatagggccttcaaacgagtatagtatgtagtcacagtattagatccttgagtaggactctccatggtctttttagcttcaaagattcgtggtacattcttctcattaaaccgttcatataactctgtccagatttctgttgcattgtcataatacattatgttatatgcaatctcatcataaatagcatgtaaaaaatccaagaaataacagtgttattgcatctacaccagctatcatagtcttcatgatcatcattgggatggggaagctttccattgataaatttcactttatttcgagcaaccaaagtaatcaacattgatcttctccaggtactgtaattctcactacttttgagaatttttaaaacaagaatgacacctggattatcaccattcgaccggaaataaggatttgagaggtcattggcattagtcgatcgtgaattttcaccaagaacaaagaacatattcgaatcacaaaaggtgttctctgtttcatgattttctcaagtgtgtactccaacatctcaagcttgagttccaccaccttgagccatgaacaataactaaatccaaataagaatgaagaagaagaagagctcatgaagttagctatgataccatattagctcaaaggagctcaaacaagaatgaaagagagagagatagagagagagagagagagagaaagagagaaaaaaaa

SEQ ID NO: 254058 - DNA, 574 bp, Cannabis indica
aaacccagtgttagattccccagctcaacttggttgagaataggagttgaaaacaattgttgctcctccgacaaactcccaaataatctaaaatcagtaaaatttgagccgagcggaggagacctcatggagttctatataagaactgatttcctaattatggaccagactgttgttgttgttgaggaaaagattagggttgctcctgtgaaaaattttagaattgctgctgcgaagaaggccgatcgaaagtgttgttgcgaaggaggttgttgttgatgttgtggaggagcgacataactctgagaagacaaactattaggcgactgcaattgattatacatttgaataaagttctcaaaccgtaggttatataaattagcacattgttcaggcgtcaaagcacctccccatgtcacgcatagttgagaatatttctgtcatagtgctaaatatttcagcagttggcggaggaggcaccgtcgattgactttgagtaaatgacttcttgagttattttatttaattagtttttgtatgtgagtttttatcttagttgctttacggaactagt

SEQ ID NO: 254059 - DNA, 504 bp, Cannabis indica
gaaacacaacaatataatatatatcctcctatcagtactattagtgtcatcatgaaagaagaggatggaagataaaagctggtgattttaaattaagaatatatcatatgagattttttttttctgcaatgtttatttgaaaatagaaataagaactttgctctagaaaacgtaagaggacgagattaattagtagtggaaaagtgttggttaatataaaagagaaggaccattgaatcaaagaaaattttttttaaatgtaaaaaatgtaataaagttaccgatcatttttttttatattgtaattactaatatttatttcatatttcttagattttttatttttttaaaatattacatttctcgttgatcaagattttgtgtattcccaacaaatttttattagtaatatatttaatttagtacattcaggtacatcttaattaagttgcaccttcaaaagtcattaatatttatggttatgaaaatgtcttcattctattg

SEQ ID NO: 254060 - DNA, 940 bp, Cannabis indica
aatcttcaatccactgaaacaacataaagagtggtttgatgaaacagatcagtatggaaaaaagtataaaagaaccaaaatttctattaagcaacaataatttagtaattccatactgagatacaggagtttttggaatcctttcaccaaatatcagtgatctttcattttcccagtcaaaagccggttcgtaagctggtagtggggattgaccaaaatgctgcaaatatatttttttttgtttaacaactaatcaatcctgaagtacactagaatgaagctagacttatgatgattgctacaatgatccagtagaaacaagatctgagccagcaaaacctttaaagtatttgatagtgatgggtcagaagtagtagcctcagcaaactgcagtcctgagctacttggcacatcatcatcagtggcgtcttcaatcttggttcgtcttgcattagcgagacacatttctgtaaaggggttgaaaataatttgtataaaaatcggaagttagaaaattgattcaacacagtggcagaaaaaccattatatttaagttactccatgagttctgcagcagtagcacttactatacatacaccatcattatttaattttgcattagcaaaagtaaaacttctaaaaggtaccaataaattaaacaaatcctaataccatttttgtaaaaaatgcttatggtgtgtttctatttgtattcattactaatttagaactctagaataaaaccatcaactgtataaactcatggagcagaaactatccactctaccttacagcttatcaagtgtactgttaatcacatgttccactagaacactagtgatagtcaagattcttacaatttcatctaaacgaatgaatgttaattaagttaattctttattccttacttactttaacaacaagctaactgtagtaattt

SEQ ID NO: 254061 - DNA, 594 bp, Cannabis indica
gtgccttgcacgtagcttttttctagtacgtataaatgtataaatttttctacatttttctacactttcttttaaaaaaaatatatattttaaaaaataatatctataactacttttagtttgttcttcaataccattttggactctatgttttacaaaaattatcaattggaccctctgttttgttaaatgacaaaataaactgatctatattttctaaaattgtacaaataggacccatgaactgattttttgtcaaaatcaaacttaataataatctgacctaaagatgttatgacaaaactggttatattttctgaatctgtttgtgttaaaaattatcttaaagttagttatattaaaaaaaaaaattgttaaaaattgagctcatggtcttattttaccattttcgaatgtggggtttatatactggtgcaagtgtttgtttttggacagttgttatagttgaattagttagttaattttgttaaagttgttgggttcttgtactctctattttggtctatatataaagaccatttagtgattcattataggtgtgatctgtgtctgagctgagagtgaattttgttg

SEQ ID NO: 254062 - DNA, 620 bp, Cannabis indica
agcttcaaattgcttgttgcaaaaatggcttccttcatcgttgataactgctctaggagttccaaaccgggtgaaaatatttttttgaagaaaattcagcactattttacagtcattcaaatgtgttgctgctgcttctacccatttgatccataatccacagctagcaatatgtaagcgttattgtatgatgacggaaaaggtcccatgaaatcaatgccccacacatcgaacaattccacttctaatattccagtcaaaggcatctcattccttctcgagtaaaacactaactaaacattaaatcagtcaatctctgaaacatgagtaattttcaagaagcttaaataacataataatgaaaaaattcatttatgcatataatccagaatttcagttcaattacacccttgacagatttcaatttattttcatttagctcatgaaaccatagaatgcaattaactataattgaaccgctttatgcatgctaattacaaccatcaatcgaataacccaaaattccatatgcatgcaatacttactattctccactaatttagattaatgcacaactaagaataaggtctttttttttgggcttgtagtgttaggcttag

SEQ ID NO: 254063 - DNA, 1351 bp, Cannabis indica
ttgatgtatttttctttacgattcttcaaggaagagaaaacactcaagaatatttgtgatatatatcacaaaagtgaatacttgtgattctatcttaagacaaatagcgtctaaaccttctaaattttactttatacaacaaataacctcctatttttttttggctaaactacctacacttttaaacttttttttaaaaaaaaaaaacttaatttttaacttttttttaaaaaaaaaaaattaaaaaatactatgttatcattggagaagccttgagccaaccgtattggcaatgtgcttgacatgaacaacagtaactataaggaaaaaggaaaaaggataaaagataaaatatcaacaattaaatcttaataaaagaaattgtaaacaaaggagcattcagatcagagcattcgaaattatcaaagcatctgtttcgagatgagccattgatagttgcatttgtataagccaatttaagctatggaagattgcttttgcttacaccttgtgagaagcaaaattgccaatgattggctttgaaagtgcaccaaccacacaaccatgagaatcatgcaacacagtcccaacaccaattatattcttgctttcatttacaaccacatccatgttaagtttatgggcacctggagatagcggtttccatggcacaagttcttggattggtggggagagtcttgaagtggcataaacaaccgaaatgtacttgatatttggagctttgaaattttgcatatatgtagcagcaaaaccagcaatttgttctgctaatttggggcacttccatgaacaacctgattataggctagatgatgcaaaaaatattttccattccagttttggtgaagacagatgagatatgaaccatatagtctctctggcgccttaaaaatacttgtttgtagtctaaaaccatatttgagtttttcttgatcgagcatacttacaaccaaaaagagcatgtccaatcgactcccaacacctgtttgtagatcggacatgtagcatcgttaatgatcgttcccgcggaccaaagatgtggcgacgggaagagcatcataaatggcccgccaagcaaaaattttaattttcagcggcaactttaatgaccagacatatttccacaatgatgtcgaagagttggaagaggaagagatgcaagtttctttgagggaagcagccaggtgacaaccagacttgaccgtatactgtcccatgtcattatgatgctagataagagtattagcatttgaaaaaaaaattgagtggcaaggtcaatatccgctttacatccaaaggggaaaaactgattcaaaagttgcacattcca

SEQ ID NO: 254064 - DNA, 1335 bp, Cannabis indica
tttttgttaactaataaatgaacctttttgtaataaatgatctttagagttaattaagtaataattaataataatagtagcaataaatgacaagaggctttttacgtagttttgaagttaatttttcatggtacatgtgtcttatttaaagtttgataaattatatatacataatacaatacattattttgtagaatgaataatagatatatatctctttcttttctccaaaaatggtcgtcccttgttccctaggtctgtccctatttatagtagtctagaatgacagttattctattgggatcttatcacttgtaaccgttcatgaaacatggacatttcccacatttcatatttacatcacatgggataattattgataaccaccataaccactctttgtctttatctagagacggttatgctgactacgcttcatacttctcgcaattcaatagtacttttctgtatacttcatcgtgagccaacgtataagtatatgttgtagtattcattgcgtttttctattaatattgagtgaggtttacacgagaagcttattataacgttacaaaagcgagatgaatcatgctgaggttgttgtctttaataattattgttttaactataagggtgcaaagtggagtcccatgagctttcagcatattttcacttattagggtggaaaaacagtattttatgtcatatttctcaacaatttctttgagcttggcccgtcatcataaacggcatcttattagccaatgaggatgtctctagctgcctcctttgacagatcatcaactacatcttttctccttggcttattagacacgtcacattgtcaatgctacatcattacgaaaaaaaaaaatatcttattattattttgttaactaaagttgtaagtattcagtattgtgtatagttgaaaaaaatttcaaattaaaaaataatttggtaggacacgatctcataatagtaattatttgggaagaaaagtattattattttatataataatatgttagtatttatctaattctaccaatagttagaagggttgcaataagaatttgaatacttcaagaaacataataaaagaagtgaatagaaaaagctgaattgtttttgctcttgataaatataaaaagtgaatataatggaactcattcaattttttttttggtagaagaactcatcaaaaggtgaaactaattaaaagcatcaactaaagtaggaatataggattacggatcaactaaagtaggaatatagaattagggatgtccattcaatccaattcgtacaatagttcaaatttaatctaattca

SEQ ID NO: 254065 - DNA, 1451 bp, Cannabis indica
caaggatgctatcttgaacactcgtctggtgcaacattggggagctttctatctcaggcagataaatgaaaggaatacaaacagaacagctgttcattcgaggatgacgagaacttggactagtaaaaagaataacactccatgttttgcagctggcctagactagttgaagaaatagggagattccagtacctctctaagatcaaagtcaccccgatccggtaaaggaggaaaagtcagtgatggaaaagatgtctgaaagctttccagcaactataaaaagcaaacgaaatgatcagtaagttctatatgcaaacatgttcatccacagaacatttttacttcatctggtcctactgtcatgttttcaacaaacaagatagttgtttcttaactatatcaaataagagaatgcatagctgaatacagcagagatcttctctcagatgaaataaaacatgtctagagaacaagatgaaatcttgcggtaaatgaagctcattaccaaataaaaataagctgtttaacaaatcattacttcatagtttaaagaagtaaaacttgaggactgaagctactttcctaaattagctgtctcaaaagaaagcaagttcaaccgtaacattactaaatgggggctacaataatataattttctcgaactcttgaaaatgatgaaagcaaatgaaagcataattatgaagaaatatactcacattctctaaaactggggcctcatagagttcaacaaatttctctctcagtatcctattcatttcgtcaacatcacaggcatgggtccaatatgaatcatggactcctgaaatcaaccatagataataaatgatatagcatgaatatttacatctttgtgggtttataagatagaagagtcagaaaaatgcttcaattaggatgagaagcatagtacaaacctgcaaagtttaaccctgcttttttgcaggcaacagcagtcatcatcatatgggaaccatcaagagagtgaacaaaatttgggggaaaggctgtcctttgccgtttagccattacctataaaattcacagaaggttgtgatttaaaagattaaacaattacataactagtctaaagtggtctacatgactgaagtaattattcagttgcttcctataaaactaaactatagagaactttttttccagtgaatgaaatgtacccacaacaaagttcctacattattaaaaaagaatactgcagaaagtcgagaccaataaacatgttcataaagtttgatatagagcactaaaagcatagcatagcatcagatctcagtaagtttaaatccacatcaaactccaaatccaaatttaatccaccccctctaattatgtacatatatttttgtaaaggaacaacaaaaaacaatgacaaataagaagagagagagagagagagagagagagagagagag

SEQ ID NO: 254066 - DNA, 539 bp, Cannabis indica
cataaaacccaacagtttgaactatgcctcttgcttttctaggaagggtggtagttcttcttgggtggcaaagaaacctgtagacgtttctgagatttgtgagggagtggttggaggagagatgctactagttggtgagagttcggtgccggagaaggaattcaccgctccccctgttgacgatgccccgacgactcgcgaacatgcctcgatatctatacctggtcggtttctgaggggtaggggcagaggtcaggtacggaagtcgtggtgtccaagatctctgggtgcagttgacggtgatatttccgttttcaatgctagtccccttttcgtcactctgaatattggaaagaatacttaaaatttaccctcttcagaagataatttgaattttgttaaagacagaggtacggtttgtagtccgttgacctcttttaggggctagttggggtatggggctcttaaatcgaagaggatgggtaagctgagtgggctggggccaatgttgtgtgggcctatccctaaggcacgtgttg

SEQ ID NO: 254067 - DNA, 648 bp, Cannabis indica
ccgtccccaaactactaacatactaagttgtgatttctaccgagccaaacgccgagttccaaaataccaggcaccggaaatacgaaatatgcaagctactgaataacataaataacagtataataaattatttaaattgctataaataatttcataattaaacataaacaactgataatttccaaattaactaagcgggctttacatcccgagtcctatgtcacgacaataacattcaataaataccttagtccataatttcgggaatatccctaattcccataaccaataaactttagcttctaatagctccaaaataagttttacaacttcttgaaaatctatatcgaacacggtaatcaccccgagccctaaaactggccctaaaggaaagtgaaaattttcccccaacaggaaaatcggtctaccggttctgctgcaccaaaaccaaccggtcgacccgttttggcaatgcaacagtcttgagttttttctccccaaactcgaaccaaatctaaaccacaccggcccaacacctccagatcaatccaatatcaccaacaggggcggacccacattgtagcgagggggggcagtcgccccccctgaaaaaaaaatcgagaaaaaaatgtatatgtattttaatta

SEQ ID NO: 254068 - DNA, 735 bp, Cannabis indica
atataatctagaaaatcatatacaaaaatcatatataatcatatacaaagtaatcacattttcaaatagaaaaaaacaacaaaattggaaaaaaaatctgaaatagaaaaaaaaaccccaatagtaatagataaatcatttctgaaagttctctaaaaaaaatatgaaatgaaaaaaaaaaaaaaggaaaatgaataacccttacctgccgtctgctgcgcctaagcaggagcaccggaaccgatctccgtctgatgcgccggcctcagctggggtggggacgagtgggtcgagtcggcagatcgagagggtggtatcatgagagagagatagcaggggtggggacgagtggggacgactgtgtggcctgatcgagagggaaagagatattactttagggctgaaatgtaatttttttttttttaataaaatggtatagtgacgtgccacgcgtgtgaccaaagacggatccccacacgttttgctcgtcgctatccgtggctatagcgacgcgcaaaacgtgtggggatccctctttggtcacacacgtggatttgatttgaaattcttaatatagtctctttagaattaccgacaaacatgcaaacttcagttcgtgactcaagtttgccgtctttctttcttaagacatgagcagggccacccccacgattctataatggcgtaaactaggtgtacgaccaatccatagttctaaaacggtgtcttagggag

SEQ ID NO: 254069 - DNA, 1202 bp, Cannabis indica
tatatatatatatatatataaatactatagaattgatataatgtgtttgtacacataattttgttatgagtaatctgttttaatcttttaagtgtaaaagctgtgtaatatttgtggtaactggttaccagttacactttgttaaaagactaagttagctgccaactagagagagaagcaagtcttggaactctttagtgttcttgagagaacaacttgtaaactctataacaaaggctgttattcaaccgagatgtagagcattgcacggagctagaactcgttaaatcccggtgttattttcttttactttcttgcattttcccttctcacttctatgagaattctgttttagttttgtgttatttgaaattgtgtttgtgtgcatcatagcatagtttttgctgaatttttgttgctggtttgtatgtgattttcctattttggtcgtttataggaattgttatttgttaccacaatattcttccgccataagtaaggtttttcaatgaacttaggaagagatcactcgtggacatgtgatcttcttgtcttctccatttgctgtactttggttgttcttagttatacagtagtataatatttgaggttttatactatgatgatgatcattgtgggaaaattataattaatggtacataatcaaaataactaaaattttaaacaattaaacgattcgtaatgacaaaattaatgaacacaaaatagtaatcggagaaaaaataggaatgaacagagtatggaaaaccagaaaacaattaaaacaggaaacaaaaaaattaacaccgagatatatattagttcaagtctaatagatcggtatgctctatggctctactccagttttggaacactaccaaatcttttttattgattaagaacatgtacaatacagtcaaaatcgattctctgatgaaatctctcaaagtgtttcaactctcacactattacccaagaatctaacacataacggaggtatctacggaaattccagaagtgtgacagaaggcatttttaccaccaaaaattaatttaggtactttactgtaaccgggagttaaacttaaatatttcgccgcaaattactcttacttatatttatttgtgagtgcttcttgttcaatgttattattgcaaatttcatccataaaatgaacaagacaaaaccaaacaataatcat

SEQ ID NO: 254070 - DNA, 601 bp, Cannabis indica
agaatgatagaggcatctcttgtgcccatttagccaatatatatggagtagattactgaaagaatttggtttattttggtacatgccacaaagctgtgctcagctcatgtcttgcaagataagaggagggaagaggtctgctagactgtggacagcagcagtatcagctattttctgggcagtttggttagaaaggaatggcagaatttttgaaaataaagaaaacaagagcaaagacttgtgggataagaataaattttgggttgcaacatgggtttatagaacaaaagcttttgataacctttcgttacaagacttacttagagaaagtggatgttatactgtcctaagacttctccctagctaagacatttactctgttttattgtttttgttttacttttctaactgttacattactacggttttcctccgccacaagtaatggtcccaaataaatatgggggaggtcaattcttgattgacctttgtctctttttccaatatatatacatactatatatatatatatatataaatatatatatttaaagcatttccgaaaataaaggccatattcttcttagggacagacccaaca

SEQ ID NO: 254071 - DNA, 2248 bp, Cannabis indica
ttggtccttaatgttgtagtgtagtctcacagcttttgtttggttggacgaagattgattctcaagtatttgagagggaagttgccttcttcgaaataaactaattagttaagaatcttaaatttggtaacatcattgacccctccaaaatagattaatttattgttgctatctttattaaattgtaaaaatctgaaaagttaatgtagcagaaaaaaagggtagaaaatttgtattttttttcttataatgaactgtaatgtcgaaaataaaactaatgctattcaacacaataggcattggtttactggcgcctgtgttagacaccgattttaaatcgacagcaattccacctactattgacgtcaattttccatggtcggtaacattcattgtgactattttccatcgacacgtatattccacccagttttgcattggtgcatagggcgtcgattttaagacccgacgactatagcttagctcacggttttcaacagtcaggaaatcccttttttagtagtgtttgaaattttttcaagtactttgctggatgaagggttttatcactccacagatctttcacttaaccaaatttggttttataattttctccgcccatttgcaccacgctcatctctcactctcgtacattaaacatagataaatatgaaaatttcttgaactacgaaggtatattcgaggaggttaattagtacatcaacgagatcatgtacaaagatacttattttgcacgtttacctgtatataattataattaataattaatgagggtggacttacacttcaaatgggaagacgcaactaataataaaattaataagattcgccagccatgaaacttagaagatacaacttagaaaatcactttattatttggttataaaaggttgtgacatcatttatttccatgcaacaatatatattagtatataatcttataaaaccctagaagagttcactctgaacatcatctcgatcctctctattattatttctccttacagttatcactatagcaattaatacataaaattattactatgggaggagtgaataggggaatggccacagaagcttttgtgttgatgatgctgctaattggtcactcagtagtgttgaccagtgccaccaaatacgttgttggcagtagcaccggtggttggacttttggtgctggttgtaactggccctctaatggaaagctctttaaggctaatgacacacttggtaagtatatatatactattttttatatagtaattaaatttctattccataatagcaataattttctcaaaaagagtcaatcatagaaaaagaaaaaaaaaaagagtacggccttcaaatatagagcaaggagatgaagagcatccccaattattggatatcctacaaaaatgacaaactaggccatactcgatactttcacatttaatttatatgggagaatgttctctaataggcacacccttaaaaatgagaggattgtcagctagctttcttttattttttttgaaagattgtctagctaactttatttgtaaatatatatataacagtgtctgattccataaaacatactagtttaattatctttttcttaaatcttttaaaaagtactagagttaattcataaagtgattcaccggaaaaaaattatttaaaaaaaatgcattttgttcaccttcttttttcttttacaggagtatataagagcagaaacaaaaaagaaaagtctaaacatttcattcattttgtagtcataacatgtttttggtggaagtatagacatatatatgaattaatcctttgttttgtttttgcgaatgtacgtagtgttcaaatacgaggcaggtcatcataacgtggtgcgtgttacaaaggctggttatcggaattgcacagctggagttggggcaaaggtgtattcaagtggaaatgatcagatcaagcttgtaaaggggaaaaactacttcatttgcacttttcctaaccattgcactttcggagtcagacttaacgtaactgcagtttaattccacatgttgtggatagataatctatcaataaatccccatgtatctctttcctccaataataataataattaaaaaaaatacacatctcaatgttattaatatctcttttttatattattattatttatttatttacatttgcgagaagaaaaagttagcttgtactttaaacaaatccaataaaa

SEQ ID NO: 254072 - DNA, 1727 bp, Cannabis indica
taatttaaatatagaaagtagtattcaaacaaaatattcatgtatgcttgcaatacacagtttaaaccatgttttcgattgttaagtattattaaataattatttcaaataccaaatcgcatggggtgcatggatgcattcattttaaggatatgaattgtaaaatatttttcatatttgtaattaaaagattttgtataatagttgagttatttaaattctgagtccgttattgtatgactcataatgtgtcatggggttttcaggagttggaatactctcagtaccatatgcattagcaacaggaggatggttaagcttgattctattctttgctatagcaacaggagcattctactcaggcttgttaattaaaagatgtatggattttgattccaacataagaagttaccctgatattggagagaaagcatttggtaacaaaggaagaatgatagtctctattgctatgtacactgagctctacttagtctcagcaggcttcttgattttagaaggtgataacttgtacaacatgttccctaatgatggttttgaaatagcagggcttacaattggtggcaaacaatgttttgtactaattgttgcccttgttatcttaccaactgtatggctagacaatttgagtttactctcttatgtctctgccagtggggtgctagcttctgctatcatcctcttctccattgtgtggaccggggctttcgatggagtcgggtttcgtcaaaagggtgagctcgttaattggagtggaatccctactgctttgagcttgtatgccttttgttattgtgctcatccagtttttcctactctctacacttccatgaagaacaaacaccaattctctaatgtaagtacacgccttactgtttctaaaaataccatattttatattcttactattatttaaagtctacattttatactttttgtgcaaaaatataatttttattaagttattttatgaatttaaaaaaaattagaaaatatagaaatattttgtaggagtaattagtacccttatagtaactagaggggtaactaattaccatgaggacgtaaccaggtatcttataatgtttgcttccgtatttttttaattattttctgaaatttttctatgaaataacttttttgagagaaactcatatttttacaaatttatacttttaaaactataaaaataaaaattgacccgattatatttttaaaatactatattttaaatttttaccactacataaaaaaaatttatatttttgcttgaaacttgtgtataagctaaagttgttgttggtggtggtgattacaggtattgttactctgtttcattatatgcacaattggttatgcatccatagctgtttttgggtacttaatgttcgggtcaggagtacaatcacagatcactttggatcttccaattgggaaactcagctcaaaaaaagccatatacacaactttggtgaatccccattgcaaaatatgctctaatggtgacaccaataattgaagctgtcaaaaatggttttccttgttatctaaataagagagtgtttggtataataattggaacagctttggtcataagcagtgtgatagtagcacttgttgtgccctttttttgcatccctaatgtcattggtgggagcattttgagtgtgacagcttcaatcgtaatgccatgtttatgctacttgaag

SEQ ID NO: 254073 - DNA, 961 bp, Cannabis indica
gataaagaacatttccttaattacaaggaaattgatggtggaactgtgaggcttggggataatagatcatgctcaatagttgggattggatctgtacaattgcaattatcagggggagccactatgaaaattcatcaagttagacatgtgccagacattaagagaaatctgatttctgtggcaatgttagacaaagaagggtgttctataagggttgaaggtggaattctcaaggtactaagaggatcaatggtaatgatgaagggttcaatgatcaatggagtgtatgtactacaaggaatcacctcaagcaacctggcttcagttgcttcaaaagaaataaccaattcaatgtctctatggcataaaagactaggacatgtcagcttgaagggattggaagtgttgaacaagaaaggactgttgggaaaagatgccctacaagatctggatttctgtgagcagtgcattttgggtaagtctaccaaggttaagtttgggaaagggagacatacaacaaagggcactctagactatgttcattcagatctttggggagcttccagaattgtgtctcgaggtggagccaggtactttctaaccataattgatgactattctagatatgtctgggtatcaattttgaaacataaacatgaagccttgagtacatttaaagaatggaagacactggtagaaactcaaacagggaagaaagttaaaaagctcaggactgataatggacttgaatactgttctgagttgtttaactcattctgcaaacaaagtgggattgctagacacaaaactgtgccaagaaatccacagcagaatggtctagctgaaagactaaacaggaccatcttggaaagagtaagatgcatgataatctactctggtgtgcctaaaaatttttgggctgaagctgtgtgacagcctgttacttgattaacagatgtcc

SEQ ID NO: 254074 - DNA, 491 bp, Cannabis indica
acagaggagaagtagagaagggcatcaaaattagtcggagcccatccacctgcacgaatcagagacaggttgagagagagagagagagagacgagggaatcgtgtgagatgaagggggtggagatcgtgggcgcttggggtgaagaagccggcagttgagcactgaaagtcgaagggagaccttcgttcgccatcccagcagcagtggcattcgatgggagaccttcgtcttcatcgttccagtgggagacgaagggagatgatgagatctcatcagattttttttttttttttgaaagcaaattcgtggagactggagaggctagagagaaacggctgaggttatttagattggttttcttacatttttctagggtttagtcttttttttttttttgataagtgggtttgggagtctttacttttgtattatttcaatagaaaaaaaaaagactcttcatactaaatttatctttcagcaaaaaaaaaaa

SEQ ID NO: 254075 - DNA, 883 bp, Cannabis indica
atgtgggacaatatctacaatagttcatgactacattaggaaaaaaaattataatttggagagattatttttacaaaaatataaataaaataagggaaacttacaaaaatactagaatttaggttaacttttacaaaaatactgtcacacggaaaagttttcaaaaataccgtgtttttatataacaccagtaaaacacaaaacaacagtagaacaactaaaaaaataccaatagaacaccagtgaaaacttaacacagtatactgcagtatgaaacttataaaaaaaaatacaataaaaaggtaaaaaataccacctgacagtatttttgtaaaaaaaatggcaacagttagtataccatgtaaattttcctaaaataaaaggattatttcataaatactcaacaatgacaaattttttagttagttatagatttacagtttcttttaaatctttacggattttaattttttttaaaaaaataattcaaaatattattttctattattttcacgttgttgctacgggaaaacaatataaaacaacgttttttaaattgttttttctaaaaaaagtaaaaactctataaaaaaaaactctgtaaaaaaatgtaagaaaaatttgttaaaagtagaaataattcaattttaagtgttatgtaaatttttcttggaataaattaccaaaaattctacaatattggtaagagcttaatagaaaaaaaaaataattattaatttattacaatttgtaaataaaatattgtctttttcattcacagtagtttattaaagaataatattgcaagtacaaaaatttgttaatattaatttttttttagttttttgtcctaaatttattatttttgtttttcttatatttc

SEQ ID NO: 254076 - DNA, 2266 bp, Cannabis indica
ttttttttttttgaagtaactattgattgattatgtacggttgagaatcatggggttccaactcaaaatgaattggcaatgagtggagtagcccatgttcttatatatgtttgtggctgggagttccatttgctcgcttgcggctggctaataggtgtgaatcgatgttgagaatcatggggttccaactcaaaaccaattggcaatgagtggagtagctcatgttcttatatatggcttaatactttcacatttaatctatgtgggacaatattctccaatatgtatctatatataatcaaaatttatgatattcgatgtgttgataacatagatattagtttatcaatttatctattaaactatatctccaatgatatatgatatcagatattttatgagatgtgttgatattctatgtgctgataacatagcaggccatcttgatataggagtactatcccaagataatatttctgcaacataatttatctcttaaatcatatttccacatttcttgtattaattaatttcaaattcacctttccaaaacaaatttatcagtttgttcatttcgtttctttattttacggatttttagtttttgtaatttgtccttgccaacactttcatagtatcaaatattattagtttttattttttaattttcttctacaaactctgtctcttcatctctacatcaattgttgctccactatatagtacaaactcaattactactttaatagaaacaattgttattctttgtcaagtgttgaatcgcatatccatcaaacttgaaccaaaaaactttttccactataggatactggttgtacaattcaaatttcaaaagttgaaaaaaaataaataaactcataataagtctatattccatcaataaaattggtataaattccaaaaccccttcatcaatataattgggaaataagctaattaaattctcttaagatgtttgaatttatagacatttttttagatcatgccttcctacacttttactaagttttcttttttaaaacctgcaacaacaacatagatgccaaatttaaaatatttcttcaatcttctaacttcttaattagagtttttaatatgattttgcaatgccattacattctcctgaatcatctttaacattttaactaaatttatattattccttagagttgatagatcaatccattttaaaaaatagcaccaaatctgaacaatactttgtcaaaatcaaacaaaaaatcattacaaaattataaatacccaaataatacccagaaaaatttaagcaaacctttcatcttggacatctaaaaaacgtccgtttaacacattttagactacatttacactcaagtggtctccattcatatatattcatagatctttcttcacttttataagtatgagatgaagaaaacatgagaaaaaaaaaaaaaagatgattaaagagggaagacacaaaccagccgtggagaacatagccgtgaaattaatttagaagtattttttttaaacaatactatcatgtcattcattaaacgacaaaattaaaagtgaatggaaggactatgttccgtcatttgttataatttgagaggtattcttaacaagcaatatataataaagggtaaaatttgatatggtaaaaaattcttaggataaaaatgcaattgattcaaaaataatatacaaacaataagaaaaacaacaaaataataagaatatattataaaaatacattaaaagatcttattttctgtaaataaaaatcttaaaaaatattcaaaattggggtcctttcaatattatacctaaaattgattttatttataaaaatacctttaagaaaattatttgcacaaataccgattgccacatcagcataaataccgaaatataaaatcattaccgaaaattgaaaaaaaataaaaaaaatctcgcttccagaaatttcagtgttttgcaaattttaaaaaaaacaaccttttggttgcttttgatgtaaataatatatcaattagttattttttattagaaaaaaattaattcaagataattttttctaatacacatttggttccttattttgatcagacaactttaaaattaatatatataataattttcatattgtaactaattctattatgtttttagatactatttggtaatttttataagtttttttattaacatattaaaattctttttattaaataaatttattattagtatactatatttt

SEQ ID NO: 254077 - DNA, 693 bp, Cannabis indica
cagttccatttggggcatcctgaaatgatctggaaatggtgtatcaataattcttttcacacaaggctccgtgtcctcttcctcagaattagacatgacacaactttgcttcctagagatcttctcagtgatcttcatcaactgctcaaccttatgcttgagacattgagttttattactagaagattctcttctgcaaacacgatcattttaatgtggttcctcagatcatttccatggggtcttacttttttagccttagccttttccttctttgcatccagctttcttcaaagatcattggtcacactacaagaaaaccagcttttgccggcgcattgttgcgccagcaaaagtaccctagctgcaccggcaaagctttgccggcgcagttgtgcgccggcaaagattatctgggaagcttggtcggtaaagaactttttaccggcgcgtagagtaactgcgtcggtaaaacttccttttaccggcgagaaatcacgccggtgaaaaataagcgccggtgttaaaaaatggtcttatccgccatgaacctgctttgataagcttttgcccactaccattaatgagggttccactgatgggtcgggaatgctgatatagaatccacatgtctcattacggaaacgcggataacaattcctaataattttttttgttgaacagttatttttt

SEQ ID NO: 254078 - DNA, 564 bp, Cannabis indica
ttggttgcacacccaataattctcccctcaaataaagaaccacatgctcgtgacctcccctccagcaaaaccacattgtgcccccgttattaaacccaatgaaacacgccgcccgatcatcaactttatcaggaagactttcgacacaggtcctaacaccgatctccatcttgttcgtaatcatcaacgggacacgccacctgactaccttaatatcaaatagactttcaatacaaggcaccatatagatcttcaaacgcgatgttgtctgctttaggctaagtcctcatgaacctttggctctgataccacttgttgggccccgttcttccaccttgttaggccgccacctcacttcccacattagtatgatattgtctgctttgagctaagcagggccagcccaaacattttggaggccttgtgccaaagattaaaattgggctttatatataaaaaaaattgtgtacattaattaagacctcaattgctagttttttatttcttttatttttttaaagatatgtttctaaatttttgaatataaattttttaatgtattta

SEQ ID NO: 254079 - DNA, 556 bp, Cannabis indica
tttaatatatttttaaattttcatactttatattttttaaattcatttgtgtgataatatgttgtggtatagttcttctaaatgtaaggatctcctaaagttgttctagtaatgaaaagttagatgacatctggaagggcattctcggaataagttgtccatcggaagaaatcttgtggaatggtagatgtcattcgaaagagcgttcccaaatgtctatcatgtccacctcgaaggagtcttcaagaaagctagtcctcctctagaaaagagttccagatggctagttgttctctccttgaagagagtcccgtatggtcgactccaactatccatttattatccaggaagacctttcaacatgtgcttcagttcatagtctcagaagcttcgcttcatccaagaacactataacttaagctaacatggagattctgttacgagaagttcattaagtttcttaagtcgtaacaaacttaacaacttagcacttccaaccatcgactttgtgatccaaatccctaatctataaataccactaacacttatcattttg

SEQ ID NO: 254080 - DNA, 700 bp, Cannabis indica
tgtcatattgtgccataaaaaaatacagaatgtatcgtgtcgtaccataaaaaaaatacaggttgtgtcgtgtcatttcataaaaaaaaatataaatcatgtcgtgttttactcagttggcctgttttcttatacagactcaaatttgtactttacttttctacattttattttgggtaatttgcgactaaactttctaaatttaaagtttggtataatcaacttgaactgaaattttaaaaataaaatcctccgaatttcaatttcttttttgtctctattttttctttagttttttaatgttaaatgctaaatagacttgctattgtgtacacatggcattatttttaaatactataaaaataattaaaaaaaataaaattattgtaaaattttaaaaaagatattttttttcttttttctttcttttcttttctttctttcttcttcttctttgtgtgtctaccattaccaccactaccattgcactactatcatccaacccaaatgttaccaccatcaccactgccacatcaccgccaccaccaaccaacaccaccccactgttaccaaccaccattactacccgactgttaccaccacaaaaacccctaaacagaaatagaaacaaaaattcataaccaattttagatctgaaattacaaataccacaaaccaacatacgaaattgataaaacaa

SEQ ID NO: 254081 - DNA, 561 bp, Cannabis indica
gcttcaacaagtcttctcccgaagacctctctcttgttcaatcaagttgttctaaccaaccctaagacagagtaagaacaaatatgaaaacactagaacgtagatgaagaactaagttatcacaaaaagaactctctcttcacaaatgagaaaaatgcaaaaaatgaaagctagaagagttaattcgaatggctgctttctaggttctatttatagaacatgataaccctagagacagccacaaagtcgaatctacatctgtacaaaactttcctaaagaaaatcctgatttgctgcatcagagacaaattttgttgcagcaaatcaaaccagaaaaaggaaacttgcataaaacgtgtccgatcatgtatttggtcttgatacttgccaaaaaacagtgtgtttgatctgattttatgaagagacaatcgaactcattaaagaaaaataagattagtcaaagtttccataaaagcaaactttccatacgagaatttcttctcttacaaaaagtttccatacaaggaaaatgaacagctgaaaaatgattttttcctaaga

SEQ ID NO: 254082 - DNA, 905 bp, Cannabis indica
tcagccattgacttggctactacgggggtggttcccagggtaatcgggagcttaatcatccctttcagtgcgatgacatcgccggtaaaaccgtatatactcgacataacaggtcgcagatccttctcatgcaaccccatttgtttaaatgcttggaagttcaagagattcactgaacttccattgtccacgagtatacggtggacattgtccccgccaatattggcgacaatgaccagtgcatcagaatgcgggtgatggacccatctcttatcactctccatgaacgtgatgttgtcgcattctgttttgagcaacttctctggtctctcactgagattgttcacgttggtgagtggcttctccttagcttccattgcatctcgctcttgcgactttctggagtcacctgcgatatggggaccgcctacaatggtcaatatattgcgaggcgttctcgaaccactcgcattttaattttcctctttgtcatccgctcggggatgactttcctcgttccttttatacttgctgaattttcccctccgaatcagctcttcaacttcatcctgcaaaacccaacactccaaagtggtgtgaccaatatctttatggtacttacagaattttttggggtcccttttgtcgcgatttcccctgatcgggggttgcttctcgaagaccccattcttctcctcgatggcgtagatatggcctcgtggtaccgcgagttcagtatagttcacaaagcgcggtccacctttccttttcggcgaggactccttctttggaggggacttggccagtttcaggcttcgctgtcttcgtggactgcgtcttcttggtcttcgacctctggaacttttccctcggggactacgggatcgtgaccgcgacactggtga

SEQ ID NO: 254083 - DNA, 1627 bp, Cannabis indica
tttcattgttttagagaaatcatatttagaatgttaatcaacatacttgttagtaaatttagattttggtgaaatattcccaacgtctactctatcaaaaaagtcattcatagtgtacactgatttgagatgaaatttgaaccactgaggagtcatctctttgagcccgactgcaagtgccataacccttgcatcttcgctaaatatttttgtcttaatgactgcctctaagaaccattgaatgtagtccttaaggggttcatcttcttgctgtttcacatctgccaaagcataaggtttgatttggcactgttaagaaggagcaaattgattaccaaaagcacccactagatttttccatgaatcgattgattgagggggaagcttgagctaccatcgctgagctaggattgttagcgtggtagggaaaattctacacctaacattgtctcttactctttgcagatctgtctacaatttgaagtaatgaatgtgagacagtggctcttctttcttggtgtattgatgctaggaatgattcttaatcttcaaagcgattggcagagctttgatttggtcagagagcggtgagcaccgctctctgtccagttcaaattttgacaactttggggttgtgattccttttaccaaggccactagattgtcaaactctgtcctattgacaccaagggtggtggtttgtgtcctagtgggaacttctattacccggtcaagatcacctctagaagcccctgcttccaccaacctttttctagttagggtgtgacgcagttcctttgatctcccaagttaatcgtaacctccagtcgacttaggtttggtttttgtctcctaaccacgaggtcgtgaaggcaacatcgatgatatttttggatcaaaatctgggtcatcttgggatgatgcgcttcgacaacggtcattcggatcattgcagtgactactttccttaaagtagtcttcatttagatcacaagtacggagagaattaaactggttgctcaagttcaactcttcccatgtacccgaggaaagtactcatattgttgggcatcggggcctcatgcaaagtaataacacaactcacctctctaatctcaaaaatacttttgggtatgaagcctctcattagtccttactcgttagatctcatagcctccagtttctaggtagagtctttgattttatcctttggtgtgagtggcaggtccctttccctttatatggtctcgagatctaatgtcattagagcgatggagagaaccttgtggatgagttctattggttcttcttgtattcagaggtcactccatattaggtggagggcccattggttggtgcactcgagcttcagtacttccgaggtctttctcaaagtttgcttccctttaaggagtcttagcacctgttgtttgcttagtacttgactattatgtgtggtagtagcattccgtgcgttaaggttttccccttaagtacttgttcacacgtggccagttggctaatgggaatttctctaaccaactatgaaagaccgttgtgggtggtagccagcaaccagagcgatatgctttcctgatacggtgaaacatgttagctctttgctgct

SEQ ID NO: 254084 - DNA, 1098 bp, Cannabis indica
cattcgatccaattaaattagatctcaagattcaatctaattactcattggatatcgatttttttaattgaatatctaattacacaccttatttttaatattaactaatatgaagaaaaatacttaaaaattaagtattaccatttatttaagtttaatactccataaaaatattattgttacaagcataatgtaactaaacatttgaaataactaaaataataatattgtcaggtaataaaatataacaaaagagtgtttgcccatgttcatgctctgtggtagttgatgtcagttaccattcggttttgtgcgtttggcattcagtttcttccatttctagtttaatttactttgttctacagcagttaatctttaattttctgtatcttttcttccttgagtgtatcaatgaatcattttgttcataaaatgaaatctgctatctccctaactgaaaatgaaagtacaattcttgccattactgatgatgattctgagtttgaagagtctcatgaattcattctagtggctcgtattcttactaataagaaagtgtggctaagtacatttcaaagacaaatggtcgagcattgggatggtcgtttcaaggtgaataccaacgaacatcttattgggttgttcatcctttattttggttgtgaaggtgaccaatttagggctttagacaaggagccatggcatttttcagaatcaccatattgtgctcctccaatcaactttgctgcaaaatgttactcctgaaactatgatttactcaccattttgggtacaagcataccgattgcctttttttgagtaaatgtaaaactttagcaagatctttggcttctatccttggtgaatttgtggctattcatgaagattctttgaatgaaggatggggtcttttcctacggttcagggatcgaattgacattacgaagcctcttctacgaggaagaatgtttactctgcccaaagtcaaggatggattttgggtagaattccaatatgagcgtctcctcgactattgtatggaatgtgaaattattggccacctctattagaaatgctctgtttttttttttggaaaaa

SEQ ID NO: 254085 - DNA, 1679 bp, Cannabis indica
gtgccttttattaaggacatggcaattcaaatgatgtttaagtttcaaatatattgaggagagattcacaggcttatgtgtgtgacggttgttttacacccgaggtataagtttatgttgctcgaatactatttccctataatctatggagatgagcaatatgtaactgaaatcgcaaatatttgtgagctttgttgcgagttactggaggagtacaggtctaagttttctcatttaagagagagaagagttcaagtagataatgtatcatcttcttcgacacggcgaatggatgcactttctaactttgatagatttgttagagcttcctatcgagtagaaaatgtgaagtctgaactagatttatatttggaggagaacttggtacctaggactgaaaagtcatttaatatatgcaattattggaaggtgacgggcctcaaaaaccctttgttgagtatgattaccaaggatgtgtttgctatgcctgttagcactgttgcatcagaatctacattcagcactggtggtagacacgtgagtcctcatcgatcgagacttcatccttctacattagaagcattagtatgcacacagaattggttgatgactgacaaaaaaggtaaatatcattaaataaataattatatatatttgtgtatatgtttcataattagtattgattttgttttgttttttttacagtaacaataaatgatgaagatgttgatgttgatccaacaatggtaactagtttagttttcgtaatttatcaaaaaaattatcaatttttattattaatatttttctttgttttttttttcagaagccttacgttgttgatcttgatgattagaatatatgttgttttattgttagtttttattattaacatactttgttattagtaatataagtgtaattgatatttcaactcaactcaaattataaataagaatttgtttggaactttatttttttttttggtattgtttattgtttgtgtcacttaaaatcttgtttagaaatttatttttaagctatgtcttaatgaattcatgaaaaacaagcaactaggttaagaatgataatagtaattaaataaaaaaaattcttatagaagccaacatatttggtctaattatttttgcaagcaaaatactaagagatatttctcataaaaaaaaaaaaaaaaaaaaaaaaacaaaaaaaaaaaaccgaaaaaaaaaaaaagtaaaaagaattttgtcaatctcttttaacattttaactagtcttgtaattaaataccaaaaacatgtcttgtatcttattctgtattaaataattttaccttgtaaaattacaataactaataataaaacattaacaaataacctatgtccttgatatttatttaaaaattaagaacaaaataaacaaaatgcctaaagtttataattttctattatatcatttttttttttggataatgaaaatattgtttagtgtttgttaaaaaaaaaaaaaaaaaaaagaaagtacgggtcagacccaattaaatttctgagataatcgggacgtgacgggccgaggacaactgcttgtcgagtcgggtcggggtcagtagcgggccggggcgagaccccgcctctttggccattcctataactatccaaggagggcttcgaactccagac

SEQ ID NO: 254086 - DNA, 1001 bp, Cannabis indica
taaattataaaattttattaaaagtatttaattaataaaataatcgcttgcaatctaattagaatatcatctttgttgaaaacatgatcagaacaaataatcacaagtttaattcctaaattatttaataaaaaaaattaaattaaattaaataaaaaaattgtagcatcacagtttaccttaaaacactcatattctagtttaccactcagaaaacacaacagtaaaaactattgtaacaagttcaatctcgtagcttgagtactcaactattgtgtaaggtacgtaactgcactactaacaaccctttcagtcgcaaaaccaacaaagagaaactaacaacaaaataaaagtatatcacacagacaagactaaaatattcaaaattatgtcacacaaacaaaattaaagcactcaaaatcatatcactcatacaaaactaaaatactcaaaatcatataagagaagtaagactaatcgcagtagtaaaaatcgaacgagagtaacaaaacacaactctaacatatctgtacctaaatctaaaaaaaaaactagcggatctgataaaaaaaaaacaactttggatacttatagaattttttttttttaaaaaaaaaaaaaaaaactaaacctacttaattaattatctgatagtataaaaattgaaaaacacaaaacacaaattagtgatatataaaaataaaattgtttttcatttttgttgcctagattataacgaaccttctaattattaaaggaaaaaaaaagaaataaaaatgagtgtaatatttttttattttcaaaaggaacagggttcttttctggtactaacatccatgaattttttacagacaatgtacagaatttatttatttattttttttaaataaaaaaaagaagtagaagattcgttttcggtggacccaattgaagggtccatgactacatgtgatgttggcatattgtattattgtgggtaaccctctgttacaaagggcttt

SEQ ID NO: 254087 - DNA, 1026 bp, Cannabis indica
tcgatctcttatttatatgaatatatatgtatatatattcatttaattatatttatacctgacaaattactttgtttttatatttttctttttacagatttcgcaagaaaacttaaaacatggaggtttgaagatatttatattttacaattcagagaaaagcctataatcattatcatatcttgtaatttagtattaataaataaagataatcaatcttcacatgtagcatttgtatattgtaatatttgtatattaatagaatctcatttgtataataatgattcgcacttttcatgaatatgcctataccatttatataattgaacaattataatccattttcataagctaaaagaaataattaaaacaaactatcaaataagaattaatcttgactagtgtaataaattattttattacctaacgatttaaaatatttagctaccaaatttgactcacaaaattgcatagctaatacttctattaataaataaaaaattgaatttgctaccaaattatggtagcaaacaaaattaatagaaaaaaaacattaaatcattttgctactaataaatattttttgctgccaaaaatttaatagtaaataatgtacatttgctaccgaaatttttggtagctgaacacttttagcgaccgggattcagctacgaacaagctaccaaaaattttggcagcgtaaagttttttcgctaccaaaaagatattattggctaccaaaagttttgtaggtaaaacacatttttcttgtaccacaaattccacctagttactttaaattaaaagaatggcgaggatgaagaaagaatgcagtcatcattggttggttttccaaaaatctcaatatgctaacttttgatattgatcaagttcaagcaatgcttgaacttgtttaaggttaagaccttagtcccaacatcagcaggattatcttcagcactgaccttctctaaatcaaccagtccttcttctatcttctctctaatccagtagacttttatatct

SEQ ID NO: 254088 - DNA, 3059 bp, Cannabis indica
tgttttagaattcattttaggatgttaatcaaatatacttgttagtaaatctaaaacctggtaaaatatttccaacagggtttaggagaagtagtggaggcatctcgcctggaagctctggtgtcctgacaagaggtacgttggagccactactcttgccccatggaccacttgacaccaaaaaactataaaagttgcaagaccacctccttcgactgcaatgtccttatcatgacactttagtatgggcaaaagcccttccgtgaggagaggtccaacatagacggaaggatggaccaaagcccatccaaagcctacaggattcgcctccgagacgaggcttatccaggtctaggaaggcttccttgcttcttgggatggaacaatcaaacttctagatgagtgttgggatgcgttcggaaagagtacacaaagaggtgcctcaaaagcttaatataagatgatgtggctgccctcagacaccgatcccacgaatgaaggtttgacccatgtgtcagagcataagaatgcgcacaccactaaaaagaaacctcccttttgtcaaacaacaaaaacctaacactatagtacatgtatgcggcatgcgtcagacacctatcaaggattgggtggtccctaggcgtgcgaaacacctccgccccacgagctggacttctgctatttggcctttagtcacttatttaatgtatttaccattagtgggcctagttgacacaaaaaccctagcaggtcacgagtgaacccgaattaagttcctaacctataaatactacactataggcaccatgcaagaggagatttttagttgtatgatgaaatcctagtgtaaaaactatagcaagaagctagggttcttaaaattatagaatcccctttgtaatacatcaagtcattcgtacaaatacagtgacttgtggactaagattcactaacacttcaaccacataaaaataaacaataaacaaaatacacaagcaacaacattcgatagttggttataggatttatttaatttaaattaaataaataattaaattaattttaaaaaatccaaaataattaaatattcaatttcgaaaaataaataaattaaattaaataattaatttaaaattaaacctatatttttaaaaattatgtttgtaacaaacctaaatttgtgttatttttagaagaaaataaaattaaatatataataaaataaaatgataaataaatttcatttttcttattttataatttaattaaaataaaataataaacttttgaaagttgacaaaatatttggttagttttttaaaattatctagattattttataaaattatatcatatattttttttgtaaatttcaaataaggtcattttattgaaattatttaaataatcaaaatataaaatatctgaccttaaatttaaaaataagataaaataatcaaattttaaaaaaataactaattaagcaaaaaaaatataaattttatctttttcaagttcaaaatttactaatatctaaaattaattaatttcaaactgataattagattgtaaatttaaaaaataaaaaactacatacaaaactacacaaaaaatttgaaattgattccattaaaaagcatgaaaaatgaagaaaaaaaaattggatttggtgcatatggtgaagcgctgtagagaaacctcggcggatcatgctacacgcatgattttcgggcgtggaggtgtgcttaagacatgggctgggcgagctccttcagacaaaatcgtatctgaatgcgcgtgtacccgagtgacactcaggtgtctgcgcgcgcatgtgggtgatccccactcgtaattggttttaatttttcaaaaaataaaatcgaaatttagttctataaaaaggtaaattgcttaatttttttcaaactatcgaaataaaataattttagatcgtgaatccaattattttacgtaaaaatttcgtaaacatcaatcaatcatcaaataaacacatagatcaacatgaattacatccaagtcacacatacatcgttttcaatccatatttgaaagaaaatcattagcatggctctgaggcaagttgttggagtatattttaccaggatctagatttactaacaagtatgtttattaacatcctaaacaagaatttataaaataatggaatttaaacacataaaaagtttaattaaccttgttatacctaaaattcagctgtcatctcagtggaaaacacatgtcaagataaagggaatacagatcgatttaatcgctctttcattaattacataagtatcagagtataatcgcaacctgctgactataaagtcttatgcgaggaaaaaatatataaattgttgcttagtatattaacgagaaaccatatgtcgttggatgtgaatagcgaggcatcaagcacattacttctaggaagacaaaagcgacacatatcaactgcggaagcacttagtgtataatgtacaaacttagtgtgacagttaggttggctcgagaggtacttatctcgctatgggaaggcatcttgtaacttcatccagttaccttcagacattttctcagtgggacttacaatcctaataagtcagaagctaacagtcaaaacgaggctcgaagaatctttcgtgaataagaacatcggtcatcacaagacatgtatcgtcaacctcggaaggaaaaaattactcaacagctcgctattgtgatcactggaacaaagcttctgacgagacatccttagatacgacaattcaagacgtgttttcatacacgatcattttgacccagtaaaagcgggaaaatcacagttgtatgattttcgaataataaccgcatttacactgtgtgatatgtaatcaaatcccatgattttagggaagattgttgtaaacagattacagtcaactttgtaattaactgcccactatgtaactataaatagtggcaaacaagatcaaaaaagggacggaaaaactcatacaaagaggccctgagaaacaatcaaaaatctgaataag

SEQ ID NO: 254089 - DNA, 1187 bp, Cannabis indica
ggtgataaagtgaaggtattaattcgagtttgttggagtagtggaagtggtgattttatctgctcgttagtcgttgtattctaggaagtagttgctcgctgattctctagcaccgttcaagtagaggaggcaaatctgctttaagaaaaacgtgtttcacgtacctcgacttttctttcaattactaattttgcatcttatcatttatatttatatttctgttcgtcaattaataataataatatattatattataatatttgtttgttcttctccatattcttttattttttctaacaatatatacataaattttaaataagtaattgcttattatagagtttgatgtaattaactaccccacctagaaaagaagggtagaaaaggtgtgctcttttttttttccttttaaagggaaacgtttcatttagtgagtgttctcttgctttaggaataatataagggtgcgagcatcttgtaattgtatagtgtgatagaattaagtgagaagaaaacaaactatgtaacactttttacaaagcatgcatatttaaggcatttatagatactccactatgtgaaaactaattttcaaatgtcaaatacattatatgtagtatatagtagtgtgtttacaattattcatcgtctctttcttaggtaaacttctataatgacattatgttgtaatatattattttacaatacatttgaccttgaggccataaggaataaaagctaatactgaaaagctagtctagcctcacaatacactactacaaaaacaactatttctgataattttaaaaatatttttttggagaccgtcgctaaaaaaataaagtgaatgtttaaaagcatcgagaaaaattgagtattcctgacgattttaaacactcgtgaggtattcccaacagtttttaagcgtgccttaaaagttacaaatttttattaaagaaaaattgccgatggttaaaaacgtggcctatactaaccgtcacgtgtagtataggccacaattaaaattgttgcctataatgttataagccatgatttttttagtcgtcaattagttcaaatttaaaaatttttaaataatgtgttttccctcgctccaatataacgcgttttcagatctaaaaattttcaagtatataaattttcaaactgtcggtctctctctctct

SEQ ID NO: 254090 - DNA, 447 bp, Cannabis indica
aaaataatcttttatcccggtttctctataacaaccaggattaaagtgattttcttatcccgatttttataatagcttttatcccattggcatacatctcggttttcattttagcgaaaactgggataaaatgctcctaaaaactgggataaaaaacatatttttgtagtagtggtttatgagctcttgctaatataacatttgcctataaatagggcatcaccctctttgtcgttatatatttgttatttaataaatatataatgaagattaaaatgtggcatattaggatttcaaaaaaaaaatgtggtatattatatattagtatgagttgtaactttgttttcattatttcttgggaaattatagtaaatggccccaaatcataggagtatgttagtttatgtcctcttttcaaaaaaatatagcaaatggccctaaatcata

SEQ ID NO: 254091 - DNA, 823 bp, Cannabis indica
taaaataattccaacaataacacactaatatgtatattatgttgtgaacgttagcactttctatgttttttatttagtagcttttcttgttgagtcactgtgactcacgagtgcttcatggtgctggtaagaagaatagcagtcgtgtttggccatgagtcagaggtctcccaggaatgtacatatcaggcgtggtgtattggcttccgagaagcaggatcaaatctttttcttatgaatggaaatgtaaccttcttttgtaataacggttttggaactagttgtaaaagaattttattagcatgggatccccatattacgacaatattgggaatgaaagtttttattttaaatttaatcaaaaaatttaattaaacaacacttaatcctaaactaataaattagtaataataatattgcaaaagcacacatgtagcgtccctgagagtcagggcgttacaacatggtatcagagcgtccaaggtttaaagattttgaagactggcttgatatgtacgttggatgtgaagactcattccactcatggcttagtaagtgctacttgttagttgattaggagattatttattgattgtttgaattgtttgtttatctgaaatgtgtaagctattagagaagtatgataatttagatataaaattgttaagcatgttaatgcatgtacggtaatgcttattagcattaattctggttggaaagatgttatgaaaaaagaatggtcgcgagtgtcctaaaaggtgtacctgaagtaatttagtaagaataattatgagcttacgaggctcaaagttggtaatgtggg

SEQ ID NO: 254092 - DNA, 958 bp, Cannabis indica
gtataaaaatataaaatttaattactcaatcaaactaaataaaaatactaattaatttaattagattttgaatgtattagatttttagacaatccatttaacattcaattcgatctaattgaatatttaaaaataaaaattcaatctgatacaaatcacaattagatattcaatgtttgatggtcgattataattaaattaatcagttattattaaattgaatcaatttatgcataattggaagcttcaaatcccatttaagacattatttacatcaattcccatacaagccattatttatggctgtttatagattcttttggtgtgaattttcatttgttttaaatcaaactagtcttacgttgtgcaatttaacatatataactgccttaattaaaaaaaaaaacccaaagtattgcatttttaccaaaataaattaattaaatgttcaaaccaatctattaagaaagtagtttgtattttgttattgttattttgtttttgtaattattctttttttatttcaaaatttattgttcccaaatattaatattgcataaaaaattgaaatatttgcggtgaaactcttttaatatttacaattgttatacatatatgaccataattaaaaaagtaggcgggaaaaagtaaccttattttattattttgttgtcagttataccattttttagtccatcaaatgttaattcataaactacgtattaaataagctaaagaaatatatcgccacttgtttttgtaactgacacttaatgaatttaattgtacacttatggcatatttgatttgttgtaatcaacattgtaatggaatcatgattacaattccaatgttggtttgcttttaaactcttgtaatgacattatattgtaatcactattacatcacttgtatgaaaaagtgaattacactcctactatctcatgaatcctcatta

SEQ ID NO: 254093 - DNA, 751 bp, Cannabis indica
tttgcacgtgcgatgatgtcagtcatgtctttcaaaacataaaaaatcaaattcttggtttttaggctgtcttggacaatttgctagtgaaattccttgccacaggctaagatactcctgtgttgccccaatatatccgtatgcactctttgaaaattatattagtgtttcaattcattagttaattaatatttgttacataaatagtcattaaattattaccttcccaacatttgagtaatttcttcgagaacttggtggccacgtatagggtataaatggacaattttctttggcataatgacctttagcatccaatgcgcactagaaaattttattgggatataagtaagatagtataaaaataatttcaagtcataatatagaaatgaacaattagcactaaagaattaaatagtgtttaccagatgttctagggaataaagaacatttggtggttgttattcatcgatggtaaccaagcagccaatcatcttaccgcattgtcaaaagactgactcttctattcaaggatgctaccactcactacgagaagctccggatcgtaaaacttgaaaaattttcgtaaacggttgatgctctcctagatgtgcctgccaaaaaaaattattaattattagtgtcttatagtaatttgactagaatttgatatattaggttaattatattaaagaagagtatacatcattccaaacgacattccctggttgccgatgaagtcacacaatgc

SEQ ID NO: 254094 - DNA, 763 bp, Cannabis indica
gagcagaaggagtcattgaattccgctgcaaacaatgtaaggtttctcataccttttatgtgtgtagttttatatggttttagaagttcatgtttacgagatgaaaaaaaaaaacttttcgtaaatctaggtcttggtaaaatatattctaacactctacacttgtaagttgcaattcttgattcatactttgtattgctacgggtgttgtagaagattccatctatagtgatctagatagtattaaaccctcgatattaatacaactaaacagggagtaggtcattacccgccatcacaagggggccaaacctctataacaaatctattttttattgcttttcattcttatttgcgcaaatacatggcaagcatcagatatacacgatcccactgtcggttgatcactttttgaggtcaacaataaattttacaaataaaaaaaaatacattataaatagataaaaaatttgcactaaaaaatatctgaagaatctcgatttaccgtccgtctcatcaaaattttatagtatatgagaactttagataattatgaggtgcttcaattggttaaagtaagcttgggttggatgcatggagtatgcactggaagtgaccgatattgaacttgaactagatatgagaaacttatcgtaatatctattcaattcaatatcacctagttgatcctagatcaaataatctcaacaccttggtatacaaatcaagtgtagtactagtatactcctcgtaataggatctg

SEQ ID NO: 254095 - DNA, 836 bp, Cannabis indica
taatgcctccatctctttatctctccattcggcgaacatacacctttgtctatcgaacgcgagattcaccgcagcacgcacttcgtcctattcatgatgcagagtgttgttatgaccttggatgagtctgagcacgtcacaaagattttgtaattcggaggcgtctccgatggtcgtctgggcgttggttcaagggggaacagtcgtattatggatgccttggttgggtgcggaactgttattccaagtctcttgcacacgaggcgcaattccataaataggaactgtttcaccattccccacgcttgctggctgtccaggattaacagtaggcgaaacccttgaactccttggattctgcgatgtaagatccagcgtctgtgaattctccggatgagtaagacctccacgagtttgcaccatcgtgttgacggttggatgttgaatgaagagcaattcatgatcttgctctcaatgaaagcaccaaaatgttgactccgcttttagccaacgacaatgagtctattttataagcgataaacgatatattataacagatatatgaaaaagcaataataagacacaaggattttatagaggttcagccccgagcaattctgtaatagcctaatcctcgttacttgtattgacttaagagcaaggagaaagattccttttcttatagctcttacaacagtatctctgaatacataatttttagataataatatagtcttagctctactgcttttcgaccgatcccttgcccagtgaatatgcatcactatttatagggctagaaagcttgaggataaagagtttcctctctcgttaca

SEQ ID NO: 254096 - DNA, 2077 bp, Cannabis indica
cctcatagcttctttcacattttctagaaagaacttagacgctttaattttcacagaaccgtctgaggaagatcgatatatttcaaggttaatggaaaattgtttgcaactattcccttttattatttttttttgaaaatcaatctgtattccgtgttttaagaggtagaaaatgcatgagacaataggacatatatatgaaactttatttgcttttagacaaaactatgcatttctctaggaaatataggcctgaaatttgaataatcacgggtttcaggaagaacacatttctcgttgagtattatgaatactcgcgaggttcgtgatgaacatcttgaatactcgcatacacttccaaataacttagtaaatctgaaatttagctattttgatccctgttagaatttggggtttattttttagccttcaaattatgtgtgcttttgttgtgaaaactgtctgagtcttttgaatggtgggtgtgtcgcagtaacttaatacacatgtaaactctcacatgtttcttgggtcactgtgatacgcccagccatttgagacatacggccagctttcgcttttcttgctttttagtcgcatgttaggactaaccaggtttctcaaaatggtgagggtttcccattaactcaatggtcatgcaatgaatgcatgccccttgggatactggggaactgtcaaccatttcttgagatacactattagttgtacatgtgagacttatactttgtgaggattggctgagttctcaaaatggtgggtgtgcctcataatcttaattttcatgtggcgacatgatcattatgttactgagacaccccagccatttcttgagatgtctggttaatcctttatattttctaaacctttttatgcgagtgagggcacttcttttattctcacactttcaccacactgaaaagatgttctatctttcagatgagcaacttgacggatagccaaatgattggctttggaggtggggcttttgctgatgaagcagagaagagcgacagtttcatacccaccttgatctctaaggaggaggtccctgctgctagagctgctcgtcagggttcactatctatggacaagatagacaggatggttcaggaactcgttgaaccagtaatggttgagatttgcaacagcaaatctacggtgtcagctcatgaatatctctcactcattcaagacatgcccctgacattgaagtcgaaaaaatggaagacttcgaggttccagattgcgagtcggaggaggaagaaagtgctgagggtagcgagacggattcagttgacgacgctcaactgaatcaacccttttcatgtgatgacctagtctcgcgagtcaccaaatctgacatgcatacatttgcacagttgaattcggttcgaatagggaccttatgcccttcagcgtctcaaagacctcactttccttttaccaaccccgcaattatccccacgcaagatgtggtggtttcgatccctattcttcgatgtggagtaactttatcctttcatccttttgtcaaagccatgctcagacattacgatgtctctcccttttaactaaccccgaatagttatcgcataattttggggttttatgagatttataaggagtatgtgcaaggggaaccaacgatggaggattttaactatttttatgacataaaaaatgttggccacgataacagcttttactactttaataaatgggccaattatgagattatggggtagaaggtatggtttccaatatgggggattggaaatctaattggttctacgcgtttaaagtaccaggagttaagactgacttcaatcgtcaacctagtacgtcgcgtatctcaacacttagtatatatttttgttaccttgtatagtcactaatgtttgctttttatttgatcacagataggctggctcgacctgttctggaccctgcttgcagatttcaagatcgcaattggcagttgttgtgtactactacaaaattgcaagaacacaaacttttacttgagaacgcttgccttcagcgagaaccagtgtac

SEQ ID NO: 254097 - DNA, 668 bp, Cannabis indica
ttagaggtcctccttaggctgacaaggaatcgtggaagaaggaagtcctagtttgcgtggtcttggattctaccaaagaacccaaccagcccaagacccaagcttgcacaagaagacctttgtgtcaacctctctctggtattgagaaatttcctgagactgggaatgaggccttggctgcaggaaataggatcttatgatgtggagaatgaggtatatgcagagctcgagaccttctacgtgtagacggtctttctcgagctatgtgtagacggtatttctccaagctatgtgcagacgtctttctttgagctacatgtagatggtctttctcgagtttgaaaatctcccacgaataacctcgtattatttgtttaggagaatgtcttaatggtttgcccctagtggcatttttgcaaagataagtttgtaaaccaacttgggttttctcatatcttaattgccttgtactctttcattcgaacttaatgtaattgcgtttgcttgcatttttattcacaatgtaaataattatactttgatcaaatgaaaattactttttgggtttttcgattactcgtccttttcctgtttaagtagttagtagtctaccaaaccatttatttctaggcaattgtcaattctgcctcgctatggcagttataatc

SEQ ID NO: 254098 - DNA, 908 bp, Cannabis indica
aaacataaagtaatacatttatacaagtctaggatcccgttacaaaatacctttacaaaagtttgctgttcatatacaaaagttttgtcgccaagcgactaatcagcaaaagccttgatatcccaaagatcgtatgctccaggcctagctgccccaacatgtacaatcttcacctgctcgctctcacgactcctcagctttagccttgcccttacctacacgtgaaaagagcactgtgagtcgaaagattcaataagaaaagcataacataaaacatactaatatcccaggttatgaaatggtgcccatacacctgatcataaccctatcctcgtgtgtcacacggtactcagtctggaacgttcatacaataatactatcgatcataatgtcagcctatactcaatatgctagtcatactctagccatattgatgtgacaacatcgatcagtatttcagctaacatacatttatcagtaatcagcagaactctaagtatactattactgctatcaatgtaatctaacaggctataataacatgtatgctaaacatgtaataacgtatgcatgacattatactaatcttacctcaattccaaattcaagtgtgatggccaatctgaatggaacaactactcggcgaattacaggctcctaaatcacatagataacaacatagataagtgacactctaaatcacaaccgggacttaggttttaaaccaaaaccctatctactgcaacttaatatggaaatacctaaactagcagggaaagaaccaaccaaaaacctgaaactagcacgaatcgacaacctgaatttttcgagaatcccaattgcaaaaaatggttacccagttttccccagaaaacccaaaaaaaattcaaagcctaaccaaatcgatt

SEQ ID NO: 254099 - DNA, 684 bp, Cannabis indica
ataatagtttgaagtaggaaattcagtagagaggaatttccaaaatttcaaagaggcaaggaactaacagaatagagggaaacttatttatgaaattgttaatttttaaacttgtcttctacaatagtaattcaagttcagattatttctcaagttccttgtaattgcctccaaacaagtataaataccatgattccagagtagcttctgatgagtatcaatttcaactatctgtccctcagaaacaacagccatggtgtctgctgttttgacagtggacaatgagctatgacaaagacaaagacggtgctttccttcattagagaatccatggtatcctttagttagtattaacacaaaatttgaggcaatgtttgcaaaccaattaaaatacaagttttagtcgtgtattagccttatttcatgtcgagaaaaagaaaatagatttttgagaaaaaagcaaattgagaaaattagaaaggtggtatgtcaaacttacctgaactagatattcactttgagcatcaagagcactaccagcttcatccaaaaagaaggcttcttgagtttaccatgagtgctcttgcaatagctattctttgtttctgacccctgagagcctcgctctcccctttctccaacaagagtttgatatttgtcaagaaatgttgagataaaatcatg

SEQ ID NO: 254100 - DNA, 694 bp, Cannabis indica
ggtccaactcatcccataaaacgtaaccatgcaacacaatatatattggggatttaacacagttatacaacaatatgtacttaattacaaaaatatcttagaaaaaacattataacataatgataaactttattatgtatatacctaatctttcaaatttgtaactgacattcacatattaaatttatttaaaaaaaaattgtaactgacaaactaaagatttttaataacaaactaaatattccattaaaatacatgattattattagtagttaatgcctaaaataattataaaatggaaagagaataacaaacattttaaaagtcaaaaaagttaccaaatttgtttcttttcaagaatattatcgtgcaacattagagcttggttggaatttatacttggaggtatttattataattattattattatttttaattattttatagtcttttaatataaattctaattgagtatatatcacatatttatactttgaggtattaaatgacaacctggtattacatgactatcagtttatattatgacgtgttatctttcattgcatatattatatatatattaggtattttttattatttttattagcatatattagaaaaagatttttattttaaccaaatagtttaaaatgtatacaatttcttatagatatatttatatatggaacactt

SEQ ID NO: 254101 - DNA, 545 bp, Cannabis indica
tatattttcatcttatgtgcggaaggtttttcggctttgatacgaaactatgaactgaggggatggcttcaaggatgtaaagtggcaaatggtgcacctagggtgtcacatatgctctttgcggacgacagttatctctattgtaaagccacaatggatgaggcttctagggtgcgtgatctacttactatctttgaacatgcctcgggccaacaggttaactttggtaaatcctcaattttcttcagcaacaacaccactgtggcaacccgtaaaaacatctgttctttactcagaatggtcgtggctaatgagaatagtatgtaccttgggttaccaagcaccatgggcaggaacaaaaatgcagtcttgggttacctgaaggagcgggtcagaaagagagttcaatcttgggactctaaatttttatctaaagcaggaaaggaagtcttaattaaaacagtggctcaagctttgccaagttatgctatgagtgtcttcctacttcctttagatattagccatgacatggagcaacatatggc

SEQ ID NO: 254102 - DNA, 880 bp, Cannabis indica
atcattccaaccattatttatcttttctgtaatttcatcaagtgtttcagagaatcccattgcaccatctccagtagcatgatcttttccatatactatagccagttcattataatacggaaatgacttgtttaataatctttttgcagttggatgactctacaaaattatataacattaaactaaaaaaataatgaataattaattaaacaattaatgaaataaattttttctatagtaactaaccttaacccacactcatcaaacacaattttatcatctaccacacatttgagttcctcactccaaccaaaaccactagtagaaggtcccaacatatcaaaatttgctgtatattgtctcttcaatatcttgagacgagagtcaatgtgtggctgcgctttaattccagaatttggaattttgtcattcatcatttttcaagttgttgcagatatacaggcttgaatgtaccattatcagccttccactttccgctgttacacatttctatcaaacattccactaactttaaaatcttctatgaaagtctattgatgtttttttccaccaattggcatcgattgaaaagtggcttccatgatatctcctacaagttaataaatcattatcaagaactaaagataaaacaaagtaaaatagatattttaacaaacattaacatatatcttgatcaactaaaaaataattcatcgtaaataaaaaaatatcaattacaactctttacaaaaattaagaagcatttaaaaagtaagttttaattagtaataaaacttaaaactatcaaaataggatttataaacgtcgatttccttgccattgctcaaacatttctctagctaaattatccctccaagct

SEQ ID NO: 254103 - DNA, 1262 bp, Cannabis indica
ggattgggtataaagtagtggttctagggacaccatactaagtcctagggtctaagggagttcgcttgcatggaatgccctgttcatcgttctgaccgtggcaaggtcttcttgagcaaattttggtctgaacttttccgtttgcagctgaatcatagctcttcgtaccatccccaaagtaatgcccggacggagatggttaataggagcattgatgtaacgccctgatacttaggcgtgctacaatgattttctaattgatgtgcctcctttgctaatcaaagggtttttctcgaaaattgtgttaggttaaaacttttaatttaatttaaaaaacttgataaacatatattaatttatatatataaactgtaatcttgtatttaaacttttacaagtaatagcaaaatatttttacaacttgtcgcacaacgactacaaaatatagctcaagatgtcccgagatcgaacactccaggtcacgccgtcttgacatgtacaatcatcacctgagctcggaactcactccaattcagcttccgcctttcctttacctacacatgaaagtagaatttgtgagccaagagcctcagtaagaaaagcatacaacaattaatatattggcgacttgcatttaggtgcccatacacctatctgcaatgcttatcagatgattaagaatgatcttaacaattagtactattgaccatgatatcacccactaccattactatgatcgcattgcgggaccgacactatgttcgtaccgctatgatagtatcaatagtacttaaaagtacaattggctatgatatcactcttaaccagtactatgcccgtactgtcgaaccttcacaatggttgtgccgctatgatagcaccaatcaatactttcttgggtgaatatcactcttaaccagtacggtgcctgtactgctgaactgacacaatgattgtaccgctatgatatcgcccaaaacatatacaatcacaaacacaacatacatatataatgtgttctatgctagtcttacctcattttcaaattcaagtgtgcctgtcgacttgaatggaaagttacgcgctgaatggaggccctatgtcacaacataaaattgataagtgtttactctacaacacttctctaatgctcgaaaagaacttaggatttttctactgaactgtgtggtgaagacaccctaaaataaaatacataatttggctctagtttatttacactatagtagagctcgtcataagct

SEQ ID NO: 254104 - DNA, 1371 bp, Cannabis indica
aaaataaataaaaaaataacatttaatgaccgtccacaatcgtgggccctacacttaattatatttttgccatttttcttaattatttgtctataatttcacaaatgccatatatccaaattctaatcctataaatgccaaaaccatttatataataattataattaattatcaaataaaattgtcatttatattatttattaattagactgcacaaagtctcttaattaacaaataaatcctaaaatcctatttcttcacaatcaagtcatatcttagtgaaaattcataaataagacaaagtctaatttagaattataattgatcaattaaaatcaattaactgagtcttacaagcagttttgtctcaactagtatggagaccatgggtctaaataatcaaacttctaataagcagatctataatttaccatgtaaattccctaacttattaattcctccttgcacaactacatatttagaattacaatcttaattatatagaacgctctatgtgttccacgatatggatacactatgaattatccctttgttataatcctaataatcaatgatgctctatatatgatttacaccgagtagggataagtttaccattacacccttcattttattttatccttaaagtacttaggtacctattaatgatattctagtgaactactataatcactaaaatgagtagtcaacaatttatctctataaagccaaacttgaaggaaatcatcgtttaacttttatgtctgaatagaagctatagattccgtatctatgattagcactcccactcaattgaactgccatgtccttaatctacatgtcacgagaaggtccattggtcaattttaatgaacacatttaagaacacaaataatgcaactgaactagaacctaaccatctcaggattgagatcatttgatctaagattaactaggtgataatcaattgaatagatactacggtaagtttaatatatttgatccaagttcaatattggtcccttctgaggcatactccatacatccaatctaaacttactttaaccattgtcctgcaaagcacataacacttatccaatcgtgcaagtaaactacattgtagattattctatcagttacaccttgtgttatcccatttttttgcactatgacgtggcagcatgtaccagtgacatgtgtttatcattccttgcacttgggccaaaagatattctaagtgacttcaccagcaagaatgagttagtctccgagctgtgtaccagacttgtatcgtgaagttcaagtacgaatgcaatccctacaatcctgggattgaattagagggatatggcagtctgtctcaatccccca

SEQ ID NO: 254105 - DNA, 516 bp, Cannabis indica
aaactaatcatacatatagatatctatctatttaacattaaacaatttttttttggaaggactacagtccttgctcttattactagctctgtcaatagtgttaggtgccataggtagttattagactacaaaagtcatcattattattgtattattaaagaagttttgggaagttctattgggaaattctattggtgcattttgaatgtatttcatggatgtctcttttattttattctattttaaattgtgtattttgtaaaaattattaattaaattttttgttttgttagtatttttcaaaatgtcacaaataggactttgaatgaattttttatcaaaataaaacttaataataatccgatctagagatattttagtaaaattagttacattttctgtatttgttctttataaattgtcttcaagttggttttattaaaaaataaaattgtcaaaaattgagttcaaattctattttcactattttagaaaatacaaaatttattttatcat

SEQ ID NO: 254106 - DNA, 612 bp, Cannabis indica
gagttgttgggaatacaggagcctgatggtaatattaaatatgtaatgaccgttatacttagacatgggattaataggatacttagcactaattaatctaactatgtgattatttatgcattttatgctttatagaccctattttcatgaaaatatgtattaagattattatttctcaatactagagattttattaaatcataggtgtgatatgcatctatgtaaattttcataatttcacatttttatgcccgaaaacagtggaaatggctcggatggaaattttagtcacatggatacaaatttgtatcaagtattttatagggcaatattattggatatcttagaataccaggatttaatgaaataatagaattggaccattttacccatagggttacgagataacttaacagggaagtatgggcattttagactttttaccctaagagattagtcactccatttgggagggataggtggttgtggctcatccttttgatgatgaacaactgcttaggaagcaaacaaaaaggaaaatcaaagtaaaaaggaaccaaaaacaaaaaccaaagtcaaaagcaaaaaggaaagtaaaaaaaaacaccaaat

SEQ ID NO: 254107 - DNA, 892 bp, Cannabis indica
aacttaagagagatatggactgttcagtcaattacatattatgacattaattaagtacaaaaaatgagttgaaggctcataagagtatatatacggatttagagatctagattgtatgattaaggataatcatagttctttttgaaaatgaggtgatcaaccttagtagaaactttaaaattttataaacaaccgcacacgaagcgcggtttgtttcccagttatatatataaaaaattaaaccctagagctaactgtacatctcttttttctcacaaccctcttgcgcctcctatctctctctctaaaaatctcaacatttttttttgcttaacactcaaagactctgctttaggaatagatgatctgaactacattggccatgatcggtgtttctcgataccagtagccaaacaaaggcctagaacagcctctctgctactcaaagcattgctcgccgccgttgtcccaagtggaccactatcagccgctattggcccaaccagagacccatttgactctggcgaaggtgctatttttgatgactagatctgagattgtttccattggaacatttaggtaccgccctcatattcgtcttcttttttcttcttcattgtatcatattttttttcctaccattttcttttttctttctttgtgtgtcctctctccctctttcgtttgactagtttctctacagatttgggttttggtttggctcccaaaaaattgttacgtttcttggttttgatttgagatttaataatgcttaaagatttagcaattaattaactggaaaaataatattgaaccaaattatgtattgattttgacggattaatttacatatgtagtagataaatatgtttacatatacattatgtatgta

SEQ ID NO: 254108 - DNA, 470 bp, Cannabis indica
gcagttggacaagaaatttcggccacaaatctccttgtggctataggtatctaataaatgagtttcgcttacaattaatttaatatttcaaagttaacatagagtaccatgcagccataaatcattattatgaatagcaatactcaaataaactttgtatgttttcaaattcaaaactactaagggtatttggataattaagttagttgaattgaaaaagaccaatgtcactttgtttaagtgaaaacatagtctcatgcaacttgcatataaataaatgttattgtactgagatgaccaacttactggttgcatgatttgcttcatctcacgttgtttctttcaatactaggtcgcactaaaccttcacatgttaaaattgatactaaattgttcttcatcatacatacacatatacacattaagttttcaataaagactaggtctttctttttttttttttgttaacc

SEQ ID NO: 254109 - DNA, 658 bp, Cannabis indica
ctttttttgatccatttctttaatctttagggagcttgactttactaataaaataggctcgcgcaggatttcaaatcgttgtttaggtccagagtccaggtctgggtccaaggtctagggttggggttggggccggaattaactccagaccctttgtaaacattacaatataaatacaatataagttaataaattaaataatacgatatatattgtattaaaatttatggtcgtaacaattaatccaatataatattttacccaaacataatattatttgttatttaatacaaaacgtatacgatctaccaaacaagctttagaaatattaaataaaatttattgaaaaggaagatttgttatatttatatttttattttttatttgggaatttaaaaaattagaaataggaaaataaaagaaagaaaaagtatggagttaccatttttctaatcaaccaaacaaaaaatcgcccaataattaattttttatacttatctagagaatttttttaatctatcaatttctatgttcgaataaaacaaatttatataataattgaagaacagatcaagtaaaaagtagtaaaaaattatgcaatataccacttaataccaatcactataatattattttgaaaaatttaagactaaaaatt

SEQ ID NO: 254110 - DNA, 1176 bp, Cannabis indica
ggattggagtcctaaatatttgtatttcgatcattcgattattatcccaattattatccacttgacgtggcatgtccgcctgatgtggcatgttcacatagtcaaaatagaagacacatggaatacaacatgtccacatagtcaaaacagaagacacatagaatacaacagattcgtccttccttcatataactcaatgtgtggcatcttaaagttacccggaagtagggtctccatgatcctcctcacacaaggttctgggtcctcatctttagaatctgagagggccccactctgctttttgactagcttggttagagctgctatatgctcctctaaccttttttgtgttgcttttgagaagatcacgtcctcgcattttatacttaggtggtttcagaggtcacctccacatggcctcgatttttcacttttgtacctttgtacttggcgtccaatctagtcaaaggtctacggtggactagctgtcctcagaatgcccatcagtcgtccttctcctggttgacagaatcactaggctggtttttccaccctttggacttaaatactttcgtactttgcccttttggcacgattttgcgtttaggagcagaagggcgtccatgctcgaaaacactagtggccttttgcgtccttaagggttggccgggcgaattcgtgtctttccaaatatgtttaggagcagacttttgtggaggctgacctaccttgcctttacctttatccttgcgaggattcgaggtttcggcctcagtttgcccaagagcacgttctttagccattatttccactaatgggtcatcatcgaactttgcctagtcctcaaacttattttggagacgctccatcatcctcttcattttctcagtgagtttactctgttatgttaacaaacaccactatgaaaaaaattaaaaaaaaatatttcaacatgtgttttcaagtacaaaagttaactaaaaaattgtaacaagaggttgatagtaaaacacaattaggtaattttaagatatattattattattgtgctatgcatataagatataactagataattatattatcaaacacatatatttcttaatatttctcattcattatccttaaaaaattacatttctcatgtaaattgttttaatagaaatacaatttcat

SEQ ID NO: 254111 - DNA, 494 bp, Cannabis indica
ttcttgatcaacacgcccttaggcgaaccctaccataggagatctgattgtcgacttggtaagtgatcggtccattgtgcagtgaacagaggtaatactagtgttaggacttacaatacgtgtaatcaccctcttaaaaggctactggggaatagacatgtatggtggtgcacatgcatcatactatggcctgacgtgggggacaaaattgacgttgtactcgaaaaagcatcgtcgtcacttcagcggttgacaagtgcaggagatgaccttctgcgacactgcatgggattaaaacccattatgagtctttccgctacttacatgaacattatggtggtgcgcatgcatcatactatggcctgacgtgggggacaaaaatcgatgttgaactagaaaaagcatcaccgtcactttagtggctgacaagtgcaaaagatgacctttgttggaatttattttaccaggatcttagatctactcacaagtatgtt

SEQ ID NO: 254112 - DNA, 689 bp, Cannabis indica
gaccaacaacaacgacaaacaaacttgagaaacttctgtggaattcataagaaagagtttaggtgcgggagagcgttgggacgagagcagtcaccttaacgacgatgatgccgccagtgattgggaggagaagctccctctgacgacaatgatcaacaagaaaatgtatgagttgagaaccaacccttcgtcagagtctaacggtgatgaaactggcatagggatgggttgtaataacatgcttctaggttagaaggggtttgacttttggggtgagtcaatatcctggttcgactttggagtttaattttagatttagtgtttctttcagattcagttttagagggaaagaaggaaataaataaaagacaaaataaaatcaaatttattttaattagttttaattttaaattattagaccaattaggaatgcacacgtgttcattttagaataagagtaatttgcggcatacatacataattttaactctctgttgcaaataaatacctaagtttaatttttggcagtaattatacttaagttatatttttagaactctgtaggtacctgatccttgattggtccaggtcatgaatttttaatttttaaaaattaatttatatatagcagtcaagtacctacagagttctaaaaatataatttagtattattatcgccaaagattaaa

SEQ ID NO: 254113 - DNA, 1289 bp, Cannabis indica
atatggaacattttttaatgagtaatcaattgggtaattaaaaaaaaagaatgatgtggtaatatgttgacttcctataacaggttaccaacaagtattttttttttaaaaaaaaattaatatattttttatttaataataggtaataataattctaaccaatagtaagagtgtaaggtgcatttgtttttattaagattcagacctttaaatttgaatacacatctgaataataagatattatatctgaatcagaatacttaaatatatagattgtttgtctttttcatatatgaatgtatttttcagagttttgaattatataatgttaataaatttattatattatatctaatttaaaaaaaaaaagtattttaatattcaaatacaaaatataattaattttaaaaaatttaaagtatcaattgtttcctgttttttgcattaactttagtgcaagttcatttatcaaattattcatgaaatgtgcattttttgctctccaattgggtttatttgtttcctccataatttattcttctgatccttcctcaaaaattacttgaggttgatcaaattgattgaataattcaccattaatacgctccttcatgataaaattgttaattgcaaaacatgcaataacaacatctttggacataaaactcatatggagccatcttatatctagtattggaaatcttactttcaaaactctaaatgaacgttcgatcacatttctaagtttagcgtgagcatgaataaacttttcctctttcattacagcacgactacggcgataatctcctaaccaacatcgaacattgtgataagaagataaaaatccctgagagcatggatatgctgcatcacataggtaattcgtatttgaaatgtatacgcatacaaatattgaattagttaaattaaggaattagtttatcgcgataaaataaatttcgttaatcacttacttggaggaagaaatagaaaataattatttagcttggctactatctcttttagaactcgtgaatcatgtgctagtccttcccatcctgcgtaaacataagtaaagaccatgttgaagtcacatattgctataacatttttgtaacagttccccttttctctttctctataagcagtttgtttatcaagtggaattatagcatgcactagtgttctatcaagtgtacctattgcccctacaataaatttataagttcaatatttatgacacatattttactatacaatcatgatttaaaaatacaataccttgaaaa

SEQ ID NO: 254114 - DNA, 508 bp, Cannabis indica
ctggagactcgagaaaagctagagaaaaatatgttcaggcattacaatatgaacaaacagataatgttctagctatagaagaaagaaatcctaagttgccgcgtattggagaaccagtcatatctttcagcgaagtagatccgaccacgttatttatccacataacgaccctttggttgttgatgttcagattgcaaacaaaatgatggctcagaccatggttgataatgaagatttataacgtccccacttcaagcctccattgggcctttccccgtggactcatggctcttatacacgagcatgctactttggttgcttcatgcaatgatgactgtccttacaaaccaacacaagtgtttcgagcatgttttgtcctcatttgcatgcttcttgggaaaacttcccaagaggtcactcatcctaaaattactccaggtcaagtacgcttaactgttgagttctttcgtgatgggctaccagaaaacaagatgcaccttgttgatat

SEQ ID NO: 254115 - DNA, 603 bp, Cannabis indica
ctcaattacatgcaaactttctactctcatgataaatttaacatgcaacagatattaaatatagaaaccatatatgtactctcgtcctatatcaaaatttaattctatttcactataacataatcgacactcacttctcagatctcgcatcgaaatcctaacacagttaattgatggccgaataattaaaagtaattaagtatgaatgaaatagaatacatagaaattaggggcaaaataaatcatattaaacccataaaataatgttgaagaatctccatctaaaccctaattaaatgtttagctattcatgtttatgaaagcacaataccacatattaacttttagaaaagagatataggctatcaaggactaaaaagatagaaaaacacacatgttaaatgcctattcaaattaggaaaccaccaaaacccacatgagacaaaaaatatgatttttgtgctgcttaggggggcgggctgcggcacagctttatcatgccacggcccgtgttggaatttcacgttttgacagtaagttttctactgtattcattgaaagtattttggccataaatctctggatattgcttggaattggacg

SEQ ID NO: 254116 - DNA, 577 bp, Cannabis indica
acaagcggtctcaagtgagcattagcaaaggtgtgtgtgttatcaccggtttgtactaaagaaatagtggttcaatgctacggcaaccaaaatttcatcaaactttgtggtaactacactaaggtaaaattcaagtcgaaagacattttacctaatgcacctaagcaagacttctttgaaagtgtgtatttattcaataaaaattggggaatgttatattttgatataatattttgattgattaaataaatgttacaagtgtgttacacattttaatctagtggggattgttatattattttataatataataagtgtagattaaaatgtagtaaatatattattatgtgaataatatgtattaggtgtttggtaaataaattgtgtaacatataatttatttaacctaaaattgtaacctacactttataacatggagaagagttacaaagttaattgcttttgtaacttcttttggttgatcataatattgtgtaataaaagagatgttacacaatttgatgataggattcaaatggtttgaaatatagttgttacaaactatattaatgctcat

SEQ ID NO: 254117 - DNA, 1122 bp, Cannabis indica
catgatgtattcatatttcaatgttgaggaaatatgcttcagatccgactcatgtcttaagttatgaagcccttgaactgcagtcagatttgtcctatgaggaacagccagtttagatcctcgataggaagaagaaggttcttcgaaacctgaccatagccttggtcaaagttctctggaggaacaacaaggtggaggaagccaccttagagttagattctgacatgaagactcaatatccagagctattcaagttagattttgaggacaaaattcttttaacgaagggataattgtaatgaccgcattttagaatatggattagtaaagtaaattagcgttaattattaattttattttttataataatttatgaatttatataattgtggatcccattattaaaagtgggtactagaattataatttctcaattcttgagattttattaaactctagaggtattatttgagttatatatgaattatgctattattataatttttgcttagcgacaacagaaaatgcgatggatggccatttgagtaacatgggtaagtttagaacctttttcttagtgggataaatatttaagatagttagaataccgggtttgagcgggttatggtttttgaccattttacccctaggcttaatttggtttatgcttttgcactaagggtattttagtaatttggtaaaggggataggtggctgttttagggctttacgcctagccaattttattttaacacgagattaatcaattaagctttattcattttggaagaaaatataaaaaaaaatgaagaatttccctttctctttcgtccttgctcgaccaccacaagaaccaggcaagacctgggatatttttggtgtaaattgaagaagtgttagctgaattttagtggttttaagcaaaggtaaccctagaactctaatacgtatgttattgaagtctttgatttttgtttgaatatgcaaatttgtgaatttggggctgttagggttagatttgttcatgattcagtttctaagttcaatttaagttagaattgaattcttgcagctggtttagggttgtggtgtggtggatgcacaagtttgagttagaaaact

SEQ ID NO: 254118 - DNA, 795 bp, Cannabis indica
tgcatatgtgtaatggcaaagtcagtataataaataagaactaaacaaatttactttttttttttatatatagtgttagtcatattacacttttgtttaaacgaaaaacgtgcattgataaaattagacctcacggtcattacaaaaaatattatttcggagcgaagatacacacaatcgaccatactgattgttaatgaaaatctacttgaccacattatggatcataaagttataacttctgtttataaaagaaaaattacaaatattaaaaaactgagagagttgtttacaaaatttagcatagttatcaatttaccatcgaatatccaggtcgttgagcgaattgataactaccctagagtcactctctaaaatgatttacttccaacttttctccttagccacttccaaagccaagtagcaagcagtcgcttcaccgctaattaattataagacatcaccttacaatagtgcttgacacattggtaccctatagcaattcttttcaatttagagtcgcaaaatgtgtcataatttatgtgagttgcttttatatttcgtatcagacgtgtcgacttgttatttgacttgtgtctaatattctcaatcctagcttgtaaaaaattgtagcgtattcatattaatccactttaacctattttgctattattaaagctaaagttgtaaaatttcttaaaatattttcaatttattgaatcgctatataaatatatatttttatataattatattattattattaatttttttatttatttttatttaaaaaac

SEQ ID NO: 254119 - DNA, 1435 bp, Cannabis indica
tgtaagaggtgtgttcaagttatttcaactcttcccaatttatcgctaaagtgagtgaaataaaataattaataaattaattatttgaatattttccagaaatttctagcataaatgaggtagatgagtgtaaaatggtaaaatatacaaggtggaatttattggctgagagaaatagtaaaaagagccaaataaatgcaaaggaatataaaattatagtgtattttgaaatggcatttcttgaaggctgctggagagagaactgctgcgtggggggctaattgcagcaggtgggccacgtgtcgtcgtgtgaagggctggtggagagaaactgcaggcggtgggtcccatgcgtggctgaagctgccggcttggtgggagagggacaggcgcctcacgcgcccttatttggagtgagcagcacgcacgggactaggccatcagatgcgtgatcggacggctcggatgggcttcgggctgtgcgcgcgagtgggcttctacagctccaagaaaaaatctcatttttttttatatatatattttctttttccaactttaaaataccacaataatttaaattcctacaataaaaaaagacaataaattaaatctaagttaaatattttcaacataaaaatatatttaattaattccaagaaaatattaatttatttttaatttatcttatactttaagcttactaaacgtatatttttcaccattaatcacaacccccaactagcttattgctactccctagcaattcaagcggagaaaaataataatcgagttgaataaacaagtcaaaccaagcaaaaccatccaagcattttcaaaatattggtatagagtcaaaaatttctatcaatgttatttcagttgtaatttcagagttttgtatgtgtgtgcaccaaacttttatctattttttaagcattaacacaaatagtattgaaaaatcttaaaagtgtaaaggtctcaactccaatttcctcacgggtattaaaagtatttgtattgggagggagacactctttttggagttggaaatgtaacagttaacgcacaaatgagagaggataaatatttctttaggacaaacaatttgaacaagaattgatcacaagatagacacatcaaaccaatgaaattcaaatgataaataacctttgggatttatgtgaaatacttacaaaataagagctaaagagctaactaataaaaatagaaaaatataacaataaatatatgtatacatatgtatatatatttcttcccttttttttatagagaaatatgatgtttctctcctttttttttcttgaataaaatactaaattgaaacacttttttttaaagagagaataaaataatgttattcaagttctctctcaatttttttttattattattataatatatatattttttattt

SEQ ID NO: 254120 - DNA, 2125 bp, Cannabis indica
gtcagcctgagtggaattgcagcgcgacatttcacaaggccctaaatcacaacatttgtaacttcggtgagggacacgctaaaacgctcattggagattttaaaatcaaaactaagaataaccatatcgatgaatatgatggcagtaccctaaataacacaaaaacgggaaaacctagggttctgaaaaaatggcccaaccggcagaccagttcccaattggaagtccagttccctggggaccaaccggtcgaccagttgttacaggctcccctgaaccggttgaccggttcagtgctgggaacctcaaaaatgttccccacaactcaattcaagcccaaactctccaataacttccagaatgcatgtatatactccaatataaccaattcaagcaataaaacacaataaatggctcaaaaatgaaaacaccattaaaggacaagatttgagttcttaaactcaaatcccacctagacaccaaaacaaactcccaattcagctcaaactacctctaacaaccctaataaaactccagagtactaaaacaaacaacctaaacaatcacaacaacaaaatccccaaatacatgtataaacacctattttgagctaagaaaaacctaaagaagaagaaatcataattcataccttgaacttcagcttgaaaccttcccaaactcccctgaattcagttgagaaaacccacaattcttggccggtttgtgtgattcgaaggagagaaagagaaagaaaggaggttcatctaatttctaggtttttctctaattttggtatatgatgataatatgagttataattaatctgaataataatcttaaaatatctcacaaaaagacaaaaagtaatcttagcaaaatgactattttgcccttaagtaatattcaaatgtttaaaactatccaacggtagtttggtcattttcaaaccccgataaattcccgactctctaaatgcctaacaatgatgccccaccataaataaattttataccatacaaaacgtgactctctaatggcccaacatcgctttctactgccaccgagcacaatcacaaaaaatgagaaattcacatataacataattaatatatgttgaaattaaataaattcccacaatatgcaaatcataaataaataattaattctcataattaaaccctaattatttgatgagccaacatatcaaattaggcggcctttacagatcgagatcctacatttataggtgagatattctatcgatatctgcgccacattaattgtcaaaatattttgacaattaattcggaaaatcaaatcgagtaatgaatatcaaaatatgaccatatatagaatattacctaattaattttgtctagattcaataaatataaaatattcatttatcccaaaattaattcttttatttattccataaatataaaatattcgaatattctcccacttggtcagtatttagactaaaatattcacacccaacatttccaattatataataaatatatgaatcataacgatacattctcatgtaccatataacaatatactttatgtggcaatgtactaagcgaatataaatcataaaccttatgtttattaaggtcctctaaaaaattttcaaatgtaaaattaagacgcgcgtaaatatgagaaaatatcaaaataagagtttcattaataataactttatttgtataaattacataagagaaccaagtctcatgttctctacatgatctttgaatttatgaggtgacaacccttttgtcatagggttccactttattttcttgaacacgttctctaatagctaagcacttaatgtcaatgtgcttgctttgacttccacctttattgttcttagccatgaaaacaacagctgaattgtcacagtacatttttaatggctttgctataaaatcaacaactcctaggcctgaaatgaatctctttagccatacaccatgagatgtagcctcaacacaagaagcgaactcggcctctatagtagaagtagaagtagcagtcaaagtttatttttaactcatccatgatacagctccaccagcaaacataaacacgtaaccagatattgatttacgtg

SEQ ID NO: 254121 - DNA, 1134 bp, Cannabis indica
cataaatatatagtattaacatttacatattcccacatactacacaatatgagaaaaatcacaacaccatacagtcaacaatttcattgttatattaaatgaatatttaatcaatgcataaccacacattttcaggcttataaagtaccctaatcttacatttctataacacgtattcttacatctcgtgaggcactgaaactctgcaaaaaaatgagactaatttcataagtagtataaaattcattcaatcacattataacaaagatgtatctgattacagctcatctcataataacatgcttaatccatttcacatcatcgtaatcacacaatctcgatatttcataaagtactcttaccactcgttaaccatgagctacatatgtcactatcgttgcctgatacaacaaatgataagtaagaaatctatccacagtttcaggagtaattactcataacggtaatgatcgtttccaaacctcaccactagttatccacgagttgcgtatgtcattatcgctacttgataaagcggacaataagtaagaaacctaactgcagtttcaacgattaattactcttaacgataatgaccgtttctaaccttaccactcgttatccatgagctgtgtatgtcactatcgttacccggtaaagcaaacgataagtaaggaacctatctgcggttttaggagtaattactcataacagtaatgactgtatctcaattcattcacaacaacggtgataaccgtgttcttcctccaatcataaaaaatccacaaacaacaataatcatttctcatcattacctcgattactatcgagtcacaacaaatacatattattagtctcgatcaagatccagtcactacaaatagatattgttaatcttgaactcattcgagggactaacgattataaccaattcatatttagctacttaacaatgcattataattttcttacctcagtctagaaatttaacgtgcatgctgacctaagtggaatcaaagctttacaatcccgggtcctatgtcacgacaacaacattcaataaataacttaaatcaatcattccgggactaaccctaattcccataaccggcaaaccctaacttccattagctc

SEQ ID NO: 254122 - DNA, 818 bp, Cannabis indica
tagtatttttgaaaaaaaaaaatctgtatgataaaaaattatcccaaattctaatattttgtaagtgtgactttaatcgatgaggtgcattttgcaaattgcaaagcagccagcagcccatataataataatagagccaacccattttgtccttataagcctactttttgaagtttatctttcatttccgcaccagcctactattctaaaatctatctaagtttgtatgcttcatttcttcctataagaatatttacgtttaagatacttatatttataaatctcttatacgtaaatacccaaagtagtttattagcagtaaaagtatccaaacattgaatttgtgtattctataacaaatataaatagtaactttgacaaaacaaaattagtctctagtgtaaatacttttaagttcattttttttctctatctttactataatattttagattgtgtcatagacaaaactttagaagtactatgtttctcattacaaagaggaggctccgaacctccttttcttaatgtcaaaagaaaaagaaaataaagatgttgactacagtaccactcaagactcaagtggtagttggtcctctaatattagtagcaattgccaattgattgtggtgcacttatcccttctcatcgtaaagaggtgtgacacttcttcctttctaatagtgttcttgttggactattgtgaggtccataattgtatatataaaagggtaatttacggtaaaaatacttaagttttatcccgagtagcagataaatacctaagtcgtatttttgacagtaaaaataccttccgt

SEQ ID NO: 254123 - DNA, 784 bp, Cannabis indica
ctgtatgggcatatccatgatttgttgaaagttcaattgaacatgctgagaagtgtttgatgagaaggagagaactgactttgctgcatttaatctctgtcccgaggcactacagtaggtgtttaaagaccttcatatggcttcagcagatcgggtgttggctttgcatagaactaggctgtcatccgtgaagaataagtgagaaattgcaggagctcctcgagcaacacgcaaaccaaataagttgctagattcttcttaaaattgaaacaatcgagagagaccttcagcacatattatgaacaaatatagggataaagggtctccttggcgtatgcctcgagttggtaacactttcccatgggacgaaccatttatgagaaaagagtacgaaacactagatacgcagcggtagatcatatccactatcgtgtggtggaaacccatagcagtcatcatttcttagatgaaatgccattccaccctatcgaatgccttactcatatctaatttaatggctgagtaacctttacctcttttcaaatgtttaagcgaatggattaactcaaaagccaccaatacattatctgttatcaatcttgatgagagaaaagcacttcgtgactcagagataactggcaaaaattaggtgttttgcaaaaataaattatttatttttacaataataattataatatgttactgtaaaaatgtgcaataacgagttagttacttgctcatacagaaacagtactttttgttgaacatacagaaacagtacttg

SEQ ID NO: 254124 - DNA, 790 bp, Cannabis indica
tgttgaaattacaatttgatcactttctgcactttcaataagtgtactctttatttaattactcttcaattttgcagaatttgtgagggtgccattagcattgcctctaaaagcatagtatgaaaattgccacatttatttgacatttgagttcacaatgagagccacattcttactataattctaaatctagaataaaggcaaaatgtaatatgtggtacaactaattagatgaatatggttagtgtgaccaatgctcccacatagattacatactaaaatagtagttaattaatgatttataaaaccaaaatcttttgagtaaagaaatcatactattcttgaccttttaactaaaaagaactacataatagtttgatattaaattagaaaaataataattaatagataacacatggaaattatacacaattatgtaatcattaaatttcatatataatgtttgattcattgtaatggtaattataatgataatgaataggtccattatattgtttttgcttttccttttcaacttttgtaatccattacaatgtaatgcttattaaattcagtattgtaatgatgattacatactaaaatcaatgtaatccccattacattatactcctactacaaatttttttacttttagtcacaacaaaacttttgactaaaagtgaaaaaattgtgactaattataaattattattcctatattgtgactaaaaggtctgtggctaaatgtattagtcacaaaaattacaatttgttgtaattaaatgtattt

SEQ ID NO: 254125 - DNA, 3783 bp, Cannabis indica
aggggacaagcatttctccattgagatttgatgacacttttagagatcctttcacgattataatgacactgaaaagagcgatgctatcctgtttcatgaaaagatgttagcataaataaacgaatatgacacataggaatgtataagcttgaaatgaacatttatctgtcccttcggaatctgttaagtttgaacagatatggattctcagtcataacatgcagcacttttcaattggagaaagtttcttacaaggcaaaagataataccattaaaaggtacaaccaaattctttcacttaccatctactaaccaagctcatacatcaacctaaacatcaacagctcgtaaagaataaacgattgacaacactatcgtaaacttagctcagatacttattttttttaattaagctaggatcctcgcctaaccctacaatatttggggaccaagaaactataccaattgctatgtaggtaatcagtagggactcgaacctcaaaccttatagaagcaaaccacatgcctgaccatttgagctaacccttttcggtttagctcgaatacttttgtgtgcattgaccatcaacactatgacaaatctgttcctaacaaaatgagccatcttcattacattcctgtttgactaggctagattaggcttctactagttaaaaatggtctgttcaatccaatcaatgatccaaaaattcaacctctttcctatctcattctaaataagataataaacagtaaaaatccctaaaaccaaattttaaattgaacacctttccatctcatctcaactcttccattcaaaaaaccgatacgaaatttgtaaacaaacacacatcaataatcaattgcatacaacaacaaagcaatttgcactaataagataagaaaaaacatgattgtgtggatttcaggataaaatttcagtgcgcaaaataaactgtaaaagcaaacaagttccatacctggatgagattgaggaggaggttagcagaaaaatcgaagctttttgagagttgcaatggtgaatttgttgaagaaagaaagggtttttggattttgttaagagcgccaaggcaagggatttaagcataacaacaactcgtcacaactcacgagtcatgactcagttagtcttctctacctaactcctctatctctctctatcctattctattatcatttttaattaattttaattattattaaatactattttattagtttaggaaaaagttgtgtatgtatttatcatatttagaaatcacaagttatctggacccctttttgacccatgtctaatttttttttaccctaattcaactttgccatccctaatttagactttattatagcataaatatttctatgaattttaattattattattatgtattttgacactaaattactattattattattctctatgtaaacatttataacttgtaatttcttgatcttagctataatgatgagattttttttggtgaattataatgatgaggatttgattataataaatttggattggcttccaaacattgcctattttatatatttgttgttggaagggctatgatcacattatcatctcaattattttatgtaataaatatagatagattttttcataaaatgattgttgtttttttttttttttttagaaaataaaatgattgtgtttattatgattgtacaagaaatattagaaggcacttgtggcattagtgctcttcaaattgttatatcgctattaacctaattaaatattagatcttatataatttaatataataaattttatagaatatcgctaaccaatcacaaaacgtcacctctaagtactgatacctaatcctaataacatgttctttgctttgagaaatactaaaaaaatatcagtggcaccacttcaaaaaaaaaacataagtgatgcttagcatcttttaagctgtcatattgctattaatgcagttaaatattaactcttatataattttaaataataaattaaataattacagaataagcgccacctccaggcataacaagatcataaagtacaagatgcagggcgaccgaagctcaagactcctcatcccaagacttttttttaaattatgtttttttaatattagtccataaaactactccaaaaaattattagtagaaaaatagtttaaaaacttgttagaattttgttttatattttgtcctaaaccccataaaaactagaaaacagccctgcaaagatgtcaaaatccaaaacttctcaaaacaccatgatcaagaaacataccccacaaagaaacacagtaaatttccaataatgtcaaaatccaaaaccccacctcacaaatcagacaataaaccaaaccaactcaacaaccatcacaaccaccaaaaaaagaaagaaaaagaatccaatggctcaatacataaacaaatgcccagaaaaaggaaaacaggaacataccagtttcagatcaaataagatacttaccagttacaaaacatgtaattttcgagtaaagttctaatcttttcgagcgattaatggcgtcgatacacattacaactcatgtacttgaatagaattttcaaaataattaaactttaagctgtcccaacagtgttagttgctcaagtattgagccaacagaatatgcaatcaaatgtgagtaaatataagaaacaataaattaaacacaagatttcagcaacaagaagaatctttcgactttcttaagcttgtaaaattgtcatctaaggtagctgttgcctagttttaaaccttttgatctatcaaaagaagccactttttgaagcctgatttgttctctaaatttggctataaattcaccagctttcttatcaacttcattagaatctgatgttgcatcaatgacagattcagcgtcagcatcttctcgcgagcttgataaatttgttatccccatcttcagcttcactcttcgcatcatcttcttcagatcctacagaaacattctcagaagtttcctccctctctctatttcgatattcagcaggaactgtgttcattttcgtggctgaggccttatcaaggtttggcttattgcttccactaaccaggctctcaacaccttcatgtctcattgtttctttcctcccttcttcacccttgtcgtaagccttggaagttgttccacgagatctgattgttcgaactgattttccccttaacgaagcctttgtgggactcgacactttcctttctgatttcagttcactctctttgttactcaacatgtcttctcttctactctcactcggttcctgttgttcattccagtagtaatcttttgggctagccaaatcattttcatatgaagaaccaacactatgtccccttgcgtgaaatccactcaatgaagctttgtcattcactggtttgggtggtgatcgggggcgtccagcagaagatccttggaaactctttgttttcctcataccatgtttcactggctttggtagtaacccccgaaaaccttttggtttgctaccatcttgttctctttccgagctcattacttctaaagcttgatcatttattggtttcagtggcgaaggaaaacctgatgaagcaggagaccatccatagccttgtgttttgttgtcatcatcaacttccaattccgagttcagtacttctgaaacttcatcattcattttcgggggtgaaggggaatctgaaccagaggagccttgagaactctttgaatt

SEQ ID NO: 254126 - DNA, 596 bp, Cannabis indica
cttcacccccactcacctctctctccctccattggctgccattgcacctaggatcattaattaaaaaccctttttataatttgtttaagaccattgctattaggcactagtaatacttaatactttttctacatatcacattacattagctagtgatactctctaaaaattattatattaaattatatgagaccaattggaccaataacgatattaatacataaaagaatgctaagtaccactaatactctttaacatttctctttatttaaatatattgctattagataccaataatatatttaatatctttataaatagtaacagtattttttaattttttttaaattatattaaacttaaaacttaattatactaataacaatgtaatactacacaccaatactactttttaacaattttccattttgaatgggaaatttgacattttatgctaaaaaaatgcacatggtgttattttatacacagaaaatatacatttgataattattcttaactttcaattttgttccaaaaatacccccctcatttcaattccccccaatctctctaacttccctctctctcctctctct

SEQ ID NO: 254127 - DNA, 702 bp, Cannabis indica
tatgttatatattaattgtatatgtacctaattatattttctagtttttgttaagaaatgaaaatatgcatcagcccttgctatacattcctctgccatctgtcattgtggtcctgaattcaatatctgactgctcattatttctcaaccattaatctctgattttccatatctttctgttattaccttttgtacgaatatttccctttctgttattacgtttggtgaggtgtaatatttctagaatcatctttgtaacactatttaatgaatgaatgaaggcaaaagctcactgagctgaatattcaatcaaatccctttgtctataatttcttacttggtatcagagctagctctggcaagatgtcgactggcaatagatcaacaccaagcacaccccaaaatcgttcagctccagctggtagcaatggtgctaatcagtcttcaacagtctctgagaacacaacttccagcgtgattgttccacaatttggaagtacacttaatcaaccatttgccctcaagcttgacaggaataacttctccctgtggaaaacaatggtgactgccattgtcagaggacatcggctcgatggatatctcaaaggaaccaagccacggccaacagagttcattcatgcacctgctggtgcagatggacagccaggatttggactcgatgttaacccaaaaatttgaagc

SEQ ID NO: 254128 - DNA, 543 bp, Cannabis indica
gaaatatatttagtaaagtttaactaatttaatgttataatataagtattaatttattgatgtatattagtgaaaaatgctatggatagtagtgttcatttaattcaatctctattattttgcttaatgaattagattcacactaattatattagatttattactttttaataaattatttaatattatttattaaaaaataattattttaatgtagttaacaataaaataacataaattattattgttttatgtctttaacaataaattaaaattaataaaacagaaataacaaatttaaaagaataaatattgtatgtataaagaaatgtttaattttattttagattataatttctttaaattaagagtggaatatacatttaatctactaaattttaaaatatatttttgtatcatatgtgttagattaaatataaatatatattaattatatatatctttatatattaaaagtgtttatctaacggtaagaattaacattcttagtttaacagaatatacttaaaaataaaagaatat

SEQ ID NO: 254129 - DNA, 679 bp, Cannabis indica
tggcaaacgtcttcttcctgctgtttacaaagatcacaacaagtgtctaaagccatacctcttcttgtaagctcaatcttcgttggtagccaatgatggaacacccgccaaacgaaattcttcattttcagagtaaggatagacccccaaacaaatttctaccatgctttgagtttggaattatttgaacattcagcaactataggattgttaaaccgaagcccgtaaccactcacaaccgaataagcaccattaggagttgaatgccaagtgatccaatctgatttattcatgggaggcttaattccaaggacccaaggaatatcatcttgatggaaccagcttaccacttcatttactttccaatttccattcggattgagcagggaactaattgttattgcttgtggaatttgaattttggtgcggaggttgaaaggaggacttctcggaatccacaagtcttcatttactcttatcgtacgaccgtctccaacacaccatctagagcctttaattagaaggtctctaccccagataataccactccaaattgaggacccataatgacccaacttagcttcaaagaaactctccgaggggaaataaagagcttttaagattcttgacagcaagcaatccggagtagttatttgtaacaccctaactaccttaggcg

SEQ ID NO: 254130 - DNA, 1107 bp, Cannabis indica
agcttcttttcttcttattttataattttttatttctctttttttagaatatgtaaattttttcattattaattaatatatttaattcaagtatatatgtatatttgtaagaaagaaaatttaaaatatatatattttaacaattaatacttttttatattgaaattaaaattttaatttaatttaatttattcaaacaagacatattttcaacactaagagtaatatatataataaataaattaattaataatataaaatttatatacaatttgcttatctataaaatttatttaaatatttattagatttttatgtaaaaaaataacgtcatagcttcctttcctcctattttataattttctatttattttttttaatatctattttttttctcattttaaattaatatattttatttaaatatatatttttaaggaggcatattttaaaaaaaatttaacaattaatacaatttatattaaaattaaaatttttattttaatacagacttcgctccgcaccattagctaaatatcccctccaatattcatttatttaatagagatattcttttatatcatttctagtaagaaaggggaaacaatatatattttcaatactaagagtaataaatatatttataaataataaattagttactcacaattattaaattaaaacttatcaaaattttaaatttaatatattttcatgacttaagtattattaaacagacgatatctatctcttttgtcaagctttgagtggtgcaacccaaggtgttattaatctccttcatgagtttgaacttgcatctggtcaaaaggtcaacattgccaagtcttctatatttttcagccccaactctgatgatcaaacccggtctcaaattagctctattcttggaatggccaaagcttttgatggtagcctctacttaggcttacccaatatcattggccgcaacaaatcaactatctttggcttcttgaaaaataaatttcctgctcgtcttaacaattgggatggaaagtttctctctcgtgccggtaaagaaattcttctcaaaactatcatcctatctctacctacatatgccatgag

SEQ ID NO: 254131 - DNA, 1071 bp, Cannabis indica
ctcagattgatgggaattttgggggctgaaccagcgtttggggaaaccccccctagttccgtcggcagttgatctgttggggagtttatgttttcgttgatgctgctgtcaaggacaacatggcctttcttgcggttctgtctttggataacaaggagaggttattgaggccttttctgtgaagacttgggtgaagtctcctttggaagcggaaacgatggctatttgccatgcaatctcgaggtgtcaagagcatggttggatgaatgcctgcattttctcggactgcaaggttgcagtggaggcggcggctgcccgtaaagtcccttgctggaagagcacagcgtggtttcttcatctgttcaatcgtcttgaggtggcagtgaatactaaggtggtttggataccccgttcgctgaattccaatgctcatttgttagcgaaatgggctgcgtcccataatttcagtaattgcttttccctttctgttttgaggtcaattttggccatgaactaagcctggttgtggggtttcggctgccctggtgtgtttgtttttttctggttttgctttggtttaatgaatcggccttttataaaaaaaaaaacaatattgagccataaattttaatctatacatttatatacacatattctctcatattcaaagtcaaatggaaacgaggaatgaggaaagaatttgaaaccatatctttagctttactgagacgaagcatccaatcagagaagtttcgaatctacgatcttctctaaagctattctcgaatctacaatattttttctataaaataaaaacactaaaattcgaattgacacaattagtactggtatataggtagagtatcttttagcttaattgattggggaattactccatttattatttttttaactttttcttttaaatttacggtttgtatttttaaaatggttgcagttatagttgcaatagaggaatctataagatttttttttattacaatttaggttgtagcgctagttgtaattggaatttttttatgtaaaattccgtaaaaatagaaaaaaaaa

SEQ ID NO: 254132 - DNA, 1433 bp, Cannabis indica
cataaaacccaacacttccaactagaggcaagcttggaatggtcatatgtcttcaaactcgtgaatgtcccatctgtggagagggagaggaaacaactgtacatctattttgggagtgctattttgcaaaggctatttggtttggtagtctttggggaatgaggaccgatcacctgcactgcctcaattggttagattggatgctgtggtttcgtgaccgggtgcatagaccgcagaacttgtcctttgatgaatttatgacgggggctctctgcattttccaaaaaatttgggacgctcgaaaggaagtgatacatgggaaaagtctcagccctcttcgggagatcatcaactcagtcaaccggctacacaaagatcacatgtccaaatggagaatgcgcactgaagtgagagtaaacaagcggattactgaagcaggctggtggaattgttgcacggatgtatcaatccagtcaaaccaagctttcggggtggctgtgtttcaagatcatatggatcgaattgaggccatctatgcggagaggatctctgctacaaatcctacactggtggaagccacaatgctggctttagcagcagagtttgcaagagaaaatcacatggagaaagttgcattctattgcgacaatgaagtggcgatcttaaattgctcagccaactgcatcacaaacagggatatcgacatctctggagtagctgatcgtttcaagcactcgtctcaatctctgcaggattttaaactgggaaaaattgataggaaattcaattacatggcgcacaattcagctaaatgggcggccatgaatggtgcaactggagttcttgatctaggaaccatggacgagaacatcttctctgacttcatggaatggtaacctgattaatggtgggaatgagttttctttagaattaaagctgtgttttttctatttgttactggtagtttgtactcttggctttgccttttttttttaatgaatgggtggaatacaccccctctttcaccaaaaataaataaataaataaataaataaccaccactacaaaaaacggctactttaagtgacaatattttaatcacaacatattttttttgtaactaaatatgacttttactcacaataaaatgttacttatgactaaatatagtcattagttactgtcactaaataatttagttttaatcacaacaagtattatgactaaaaatatatttagtcacaacagattataatttttgtgactaatacctttagtcacagacttttcaatcacaacataggaatgataattttatagtgcatctcatattcagatagaaaaatgcgatgagctctaagggacaataatattccattaatttatgctattacaaaatacataattaatatatagactaggtgattgttacg

SEQ ID NO: 254133 - DNA, 748 bp, Cannabis indica
aacatctcatttttttctccttttaaacttaatgcgtacattcattgtctagtttatcattaatggttaatgtattcggtaatttagttttatctccctagctagatgttattcttaataaatcttttacagtttaaaagatttgtcaagttttcacttgaccataatttacaaaagtttgaaatgatattactttgaatctgtttatttatttaaagattattgagtatttttctttctcacatcatatgtccagacaaaatctcttctaagcataatgtagttgaactatcactctcacattatcttcttcatgctttatgctaactttaagattaactcaaatatatattgaaatacataatcttattataaagacattttctcaatatattgtacttgatttgattcaagatttgcaccttgccaaaaaagtttgttagttatttttttaaatactacttattttccaagcaaatatatgcataaaggcttcaattttcaaagtattttgccggacaactcaaggcctagacaagtttcaaatgactttgcccaacaacaaaatattccttctacaacactaagaacactctaaaaagaaagtgaccactttttatagagttcaaatactcctttgaatatttgaaaattatccaccaactccatggctatcacaaaatattttattggatgtttatgaacacaaataaaaagatcatatgaccaattagaacaagcaataagt

SEQ ID NO: 254134 - DNA, 1685 bp, Cannabis indica
ttaaatgttaagtcattattcacgtgtcattttcttattagtatagcttaaattatttttttaaataataactcagatattattaccgctaaagattaaacttaagtatttatttacaaccgaaagttaaacttaagtatttatgcccccaaattactcatattaaagcttatcactaataatcaatagcaaaaacgtaattaaaaatatgcatttatcgtgttaaatttgacccaatattgtattttgtgcaaaatttactacaatttttagcacgtgtcaaatttgatacaagatttagcacaccattggagaaataattttttttaaaagtataaaaatatagcattaaactactatttaagcactccattagagatgttaagatcaactccaatagatgatatatattttgggttaaatttcacccaaaatatatcataatgctatatttggccgagtttttatatttgtgcccgaatacacaaagtgcaaattagctataaaagtcaatactatcattaatgctcattgaaaatatacaaaacaattaatttatatacataattttaatatcttattgttgaccaaatttttcgataactacttaatcttgtattacaaaaattaattaagcgtagaaaaatatatttttacgtaattttagtgttaattaaccttaatcaatgagtcacttttatttatggtgaaattgttctcaattttagatgatattctctttatgatatttgttctcttttttgctcttgaatcgaatccccttaacttttacattctttgggtacttataggagagaaatgggatcttcagagaaaagaatacatctctttttttctactaggtttgttctagtcttcgtaataggagtttggtaagacaagatttttcttgtatgcatctgatgggacaacacaaggtctagttgtcacttagcatgtataggaaaatgggatgtcatgagtatggttcacagtggcattaagttagctttattgcatgcgttgaatcagtcacctacaatattttgtcttgggaattatattgatcacttaggcagctccttgatgatatgtgatctgggaggctcgtatcttctagaggccagcgtcatatgctctacaattattcttctacatttggtcgtatcctctcagacacatttcatatcttaggggggagtgcaaagaatttctaatgctaatagctatcatctccatgcatatgtggaccttgtgacaatgtggcttcttatttgctttccatgtattttggtaagaaaaatatgtataacatttactccaaagttctagctaacaatttttgagttgggacttgtatttattcttgactctttagttctctctcagagggtttgaagcgtgacgccatgtgcaggcgaaatactcctacttgtacgtacgcgccacatgctttattgcgaatggccttcgcattagcatgtcctttgttcctcaattttgatgatgtcgattcgcttccctaaccttaatcctcaagcaggtcatgaaatgtagtgtcagtcaaatatttgagtacccaaatgttcccttataaatgtgtttcttaggcttctttccaaccattggacttgcgtgtgtttcttggaatttgaagagagacgtaggatcatcaagatgccaag

SEQ ID NO: 254135 - DNA, 753 bp, Cannabis indica
taataagtaaatctgattatatcgaaaggagttttattagggcacaaacccaacacgtttccccttgcacgcctttgacgattattctcttgaggcacttgattgcttttaacttcccaatatttacttttggggggaaatcgaagcatctggggatttttaattgattacccttttttacaagttagcctataaatagggctgaaatttctcaaaaattactttcaccattttttccacaaaacaaactcagagcataaaggagttttctttcaactctatcgtgggatttctagcaaaagtatccgagcagctaaatcaggacaacacgcaggcttcaaacggtgagtaagttttcgatctttttctcctttaactttgtaccttcaattttttgggtttccattgtagaaaatgtagttgttcttgacttgttgtagaagatacatagaaaatctaggctcaaaactctgtaatttcctctgtaatagttcgtacagcctcgtcatttatgatattttgactttaatctcgcaatgttcgattctcaacttgctcattcaaagcttcgtgaaatttagcctttaactcaaaaatttcaaactcctgggttctagcttaacctttatgtgttttgcgtctttttaatctattgagtagtcctaatcggtatatttgcctattttttgttcgatatcctagccaaactctcatcttgtgtattgtcttgtgtagatgaaccctggtgagttt

SEQ ID NO: 254136 - DNA, 635 bp, Cannabis indica
tcgcaaatcagcgtcttccttggttccactagcttttcgggctgtccgtacttagaggaattaccagtctttggttgtggttgccataaaccatactaatttttcacaaaatcactctcactcccctctggttccagcctttcactactccaccaagtcaaagaaacccagctcagacgagtcgcttctccgagtaatcgagtcagaaattcattgcgccacagaaactgacgatcaggaccgggtgagacttcttattaatctattgcattgatggattgtttggttttaaataaaatgcatttttggggcaagaaatgtgaggttagcttttctttgagtctcagatataatttcagttcattacaagtatatctcattcttgggtcagctaaccaaacttttgaagtaggagaaatttttcctttgcctttagtgctaacaagctcagaaatatggttacttcttttgtaggttgaagaggttccaaatggtttcccttttgaaattcaagataatcttggactacaaaccataaccctgaagagaaaatatcaaggagaaaaagaagaagaagaagaagaagtggggcgtcggggggaaagggatatggaattagggtttttttttttttt

SEQ ID NO: 254137 - DNA, 662 bp, Cannabis indica
ggcacaaaacccaacacatgcatgagtttcgtattgtgatccgagactattatactttgattattaagttcgtcgagttaatttatcctctttgttgcacatgtgtcatgtaactaagcccattattaactgttcaagatatgagtgtaacaattgtctgctaaatggtacttttaaaatttttaagggaatttttaattattatctagataattgaatcgtcctttgtttggagttggcagcgcggctaccaataacctcgctgcggcagttgtagaaagttgaatttgaggctttctgtagccctctcgtcttggccataagtcatgctccccacagtcacgaatattagtcgcaaccaaagtattcttgcttcgacctttcttagtaaaacatgcataactttcacacgaaagctctaaacgagttgattcacaatgcgttggaaagatgaaaaagagatctaaaagtgctatgttttgactttttccaaatctgattagaacaaaatcgaattcaggcttaaaatttaagctttattttcttgcaaaattttatttatttgatagatcaccgtttttcgaaatttaacaaatttatacattttaactgtcgatacctgaaattaaaaaaattaagcgtaattctattcttaaaataat

SEQ ID NO: 254138 - DNA, 826 bp, Cannabis indica
gcggtagatggtgttctcatctcatctatgaattgtctcgtgcaataaaagttaagcccaaatagaggtttaaaagtttctttttagtttttgaagttggtaatggagcagaatttcgagttaaactacataaaaatacaatcaaggtaactattgatggtgtcattttttgttgatcaagcagcgtttggttatgcaatagctatttgctactaatttttaaaaacttaaaaattctactttacaaaagaaaaggaaaaagaaaaaagtacaaacctaagctaagagtacttgaaatttttatgtggatagaatcatttttaggaaaatctttttagagtattcacttataattatgtgttaaatagattagtagaggttatttagttgaacttctctaaaaataattagattacaacttctccatataccaataataaattgacactaccaataaaactcacatctaaatcttaaatctattatcatcacttcattttttccaattttatttgttgaaaactagtaaattattttccaagtgcggaaaaacagtgaatcagtctttaaagttgaaggctagcttttacatgtataataaatgaataaaagctattgaatattaaattattattgttgcatagtaggacgggtagttgtatagaaaataagattttgcaaggaacatgttggtgaccacaaaggacagaccaagtaaaactagggagaagttcgttaggacagttaatcaagacaagttctagacatcctgagaaagttttaagtcaacctgttcagacgtctgctgcttcttaagagtttttaa

SEQ ID NO: 254139 - DNA, 1421 bp, Cannabis indica
atttttattttttaaaataatacataagattcctgtactcaaaccaaacagtttaattaaattaacaagaatatgattacatattaccctacacaaccaaacacagtttacacatttccctataatcatattctccttcataatatttcctataatcaaattattttgaacacctcctaccaaacggccccttagttctttagtttgtaataaagtgatgagcaacggtagggtatccgtatcggagccaaatcatctgtccctagttcctgtcacactctctgtcccaaccagtaatattttgccacctcaattaaaatttcacccatacatttaaccgtcctctctaaaagctaactccgtttgtttggtttttttatataatattatttttagtttaaaaaaaatatcatcactactccgtctctcttatgatcatctaactttcattgccattattcttaccatgctctgtattgggctctcttcctagaagatatagagaattgtcaaattgctcttattctaacgtcaacaactccctcggccctatggatcccaccggaatcagtggtatctttgaagacactattcagttatcctcggaggatataacgttcagcctgaatccaggagaagtagatgaaccacaagaatcaaataaagtcctcctaggcaagattattagcaggtacaaactgggcaaagctgccattcaaggttcccttaaattgtcatggaatgccattaaaggatggagatagaaggaaatagatggtggcattatacaattcacgtttgccaggcgggaagatgcattgaacgtacttgcacggcgaccttggttcgtttgtggcgcgctgatggtcttaatgccatggcctgcatggcttaccccatcagagatacgattcgacaaaactcctatttgggtctctattgacagtattcctccattctattggaacttatccaatctgaaggagattgctgctaaggcatcacccgtttatgaacttccgaatggagtggaagacgctgttggaatgagcactctaagatttagagcaaccattgatctaaacaagccattattttctggtttctttctcagaaaacaaaaactaaaggatttatggttgcaatactgatacgacaaacttcccaagctctatttcaagtgtggcattcttacccatgatcaaagcacatgttttaaaccacctactgtggtcaaggatagtgtggggaatttctaccctctatacgggacttggctaaagaatgattctcagcataagtccacgttctctaccccccttgccaaatggtttcaagactaggtgctccaaaaacaaataggaaaagacccagtgctacgcaatcaactacgggtccagaaagctattagaaatggtgaa

SEQ ID NO: 254140 - DNA, 999 bp, Cannabis indica
actaagtatcaggtctcgtagagcttaatataaatagcttttagggagtatcgctaaccaatcgcaacgccacatattaagaaggtgatagacaccactagtacctattaatagcaatgctcgtaaaaataaaagctaaaacagaagcttttaggccaggctgtcatgagtgtgagaattaaaccaccacatagaaaataaaaattaaagtcataacacttgtgctgttttttcatttacatgaactgtgtctgtgtgtggcaaaggtaaggtagatatgaattttgaggcacagccgatgtggttggcacctgatgctgctgccatgccaccccagctgccgcaacagggggagttgcagcttcccttcttgcgggataagcgatacgctttccatggccagataatgatgcttattgtctttgccattttctctattttcatttgctttgttgcaatagttccttgtcttcatcgcctcaggaaagctgagatagaacgtcgcgagctcggcgagaggccgggctgttgtttcttcccgcccttggccaaacaaaccagccatgaagagaattcccatcctagctagaaagttttcttttttttttttgagttgtctggttagaatttattatagcttgagtggttgtaattgtgatgaaacttgtatattttgtttgttttctatggctttatatgttttcttagaaaacaactgatttgtgttatagtttattccataattagtctttttcttgcataaagatgtcttcgataaattgtatatagctctaattgaaaataaataaatcaagcatacctggacatggggagactgattatcttcatcggccactatacaagaatttatcctcggataaaaaatttagtaacatcacttcacatactcgcatactaatcctattggggcaaaagcaaaaaaaaaaaaatcaaatttatgagaattataacttttaacagacatgaaaatggaagaaa

SEQ ID NO: 254141 - DNA, 410 bp, Cannabis indica
tgaccgtaggaatggtgaaggtgtaaaattctggtgtcgacggggaagagctttcattcctattccataaggtttcacgatcagatggggaggtgtgtcaaatgtacgcggacagagcctctcggagtgtcccattaagctgcatataaaacagaaagttggaacactttcataacaaaatgtagcgtaaaacgagtcgccatctcgcttacgaaacttcattcttcgtttcagaggaagatcaagggaaagtgttacccgacccaaagatattctcgccataccccagtaaagttattcgggtctaatttgatgaaagtccctgcatagttcgcagcatccttagccaccttcatggtcatgaatccattttgcagatcatggatttgtaaccatagatcaagggtgtt

SEQ ID NO: 254142 - DNA, 1187 bp, Cannabis indica
attaattgaataattaactaagcaacactagattgcctataagaaaattacacttcatgtcactcattgcacaagattagtggatctgtaaatgaatgtttgtattgaattttatcatttttttaaagttgaaatgttataataattcataatcttttaaagctttgcaacaattttgttgtaaagtattcgattttactaattttgttacaaaattaacatacatttttaatttaaaattattatgaacagaaatcttaaatgtttattgcatatttaccaaggaataagacaccaatattatatactatttgtagaatgaaaatggaattaaaccgctttgtaaaattacactattttctgatagaattttttttttaaaaaaaaaaaaaaaaaatacattgcatgttcttgttctttctccaaatatttgattttgttctccaatttattcttttggtgcatccttgagagaaggtagtatcgaacaagcaaactaatacagcccaaaataaggcccaaaatgcacacaatatcacaaaggggttcacttacatctcggttactaagccaagaggcccagtacttgtcaattaatatagaatagggataagttgaaaactacttttttttattacaacaaattaaatataactctaaactaattttaattgataaataccctcttttataattaaagtatcaaatataacctcacaaaacttattaaaattagacttcctaatgcacataatgggaatataacttataaaagtgggtttttttataaaaaatattgaattttaggcaaaaatttataattttactgttacgcaattcgttttacaaaaatactgtcttattataaaataatacgtaaaacaacagaacagaactaattaaaataacagtggaacaactaaaaaataaccgtaaaaacttaacatacgtacacagtataaacttatactgtatttttgaaaaaaaaaattacagtatttttgaaaaaaattctgctcctacaataaaaaaagaaaaaagtttaaaaaacttcaatatgtggtgtaaaaactctaagaatattgtgtagttaaccaaactatgtgggcttattatgaaaaaaagggaatttttacaaaaatactagattttgagtaaaagtttacaagtttactgtcacacggaaa

SEQ ID NO: 254143 - DNA, 678 bp, Cannabis indica
tgaacctctaagctaccaaaaagtagttagaagcaagaaatagagagatacaatggatgaaaaaatcaattcaattacaaaaaacaacacatgagaattgggagccaactactcttccacaaggatacaagccacttggagtaaagtgggtgcacaaggaaaagaagaatgcaaaaggtgagctggagagatatatagtaagattggtggtaaaaggatatagtcaaagggaaggcgtcaactatgatgaggtatttgctccagtttcttgtcctaaaactgttagactgataatttctttagtagcgtaaaatatatggaagatccaccaaatagatgtaaagtctgctttcttaaatggtttctctgaggaagaagtctacatcgagcaaccatcaggctataaagtaaaagggcatgaaggaaaagtttttaattgaagaaggcttaaatggcctaaagcaagcgccgagacttggaatgctcaaattgacatgcacttccaagaaaagaatttcaccaattgtccatatgagcatgcactctatatcaaaattaagaatgaagcactactacaatttagcattttagaaaagtacgggtcactaaagagttgggagtgatttttagtgacatgcacaattagactctaaaaattcgatgttagtcccatataat

SEQ ID NO: 254144 - DNA, 533 bp, Cannabis indica
aaggtagttatggctagagcattatgattatatattgatcatattttttcagagtataatctcttttttaatattattaatattgttgaattcgagtgaatataatttacagcttcagaaaaaaaaacatgatggagcacttatttaatcaagtttgagctatatatatatttacaaattacttttcataaatctaataatactttaaatttacactgaacccactcctttggttaattaatataattttttttaatcattttaacaatattatattaattaatggaaacttcacagatgactttcttgggtatatgtcttttgagatggttttaattatagacttcgtacttggtttattattatactagactttgtacttggtttattattagatttcgaggctatatatcttctttttctaaaactgtaaatgtaatgatgtagtccataaatttgtttccaggctcttagataaaaaaatctcataactttcttaatttcagtatataagataattagagattaagaag

SEQ ID NO: 254145 - DNA, 687 bp, Cannabis indica
gcattttactgagtcatgtatgatatttttatggtggggtatgatatagtgatgttactgttgaatatataaatatcctatcctataataatggtagggttgcatgggtctaggttaatatatgggtagattagacttaggatattgtagggctaggttaggctcaggttatgtaagtaatggctattgtatgccaatgttatggtaatgaaatgattattttatagtattgatatgattatgttatgagtatgatattggaattatgatctctgtacatgtgtatggtgtgaacaattagtatggacctatatgataaaggtctccatgtgtacagttatttggttatggttataaaataaggtctatgatattgctaacacttaataaatacattaatggtatgtgtgatattgtatggtattgtatgataagcattttcatactgagcttttagctcacccccttacttccccctacatgtattagacagggaagtacgtatagtgagtagggtgattctggtacgtaaactgtgaccggctatggaagggaaaacgatctagaacggtggtggtgccttagttttattttaagcagttgataaatcacagtggaaatgtattatttaaaatcatttacttattatattttatttttcaaatgaaggatccttctctgttgcat

SEQ ID NO: 254146 - DNA, 606 bp, Cannabis indica
attttttttaaaaaaaaaaaagttcggtttgggcggtttaaaccgaccaaattgagattcaaaacggtcggttttaaaataagttctaaattggttggtcggttttatatttgcaccaatctagaccaaaaaccgaattctgaattttaaataaaaaaaaaccgaccaaaccgaccgatgaattggtcggtcggttttcggattgcaccaatctagaccagaaactgaattctggattttaaataaaaaaaaagaccgaccaaaccgaccgatgctcagccctacatgagaatttgctttgttgaatgtaggattttatttttattttgcattttttgatttaatagtcatttcacaaacagatatgtccatttttttcttttttcttattattattttgaaagagaactatcatgtctatttgtggtaagcattatcacatacaaattttacttgtttctactttccctggccattcattctgcttgtccttacgtccacaaaagaagttgaaacataaatggtgatgcgtgttgaaagattaaaatgtgagatggcgcaattttatacatatagagtagcagattctgaaaaaaaaaaaaaaaa

SEQ ID NO: 254147 - DNA, 608 bp, Cannabis indica
tagttcgatacaatttccattcagttccataacttattatcgtgacatttacgacctccccgccatgatccacatttccaaacccgaaaatattttatttgaattattgtgtctacgatacccacatattccaatacaatctccgtaattaataaattacgctttattactcattaattcatatttccctaatcaaatcatgattagcttaagtaggattataatcctactctaataacccataatcacatatttaataaaatatgtccgattaaaatatcaatatatttttcgggatattacacatcatgtctaccatagtactcactaccacgttcagacctgacttgctttattattttgctaagttgattctcaacttcatccttaaaagatttgaatacgtccaagacttaagacttttcatgaagtagatataggtacgcatatcttgagtaatcatctatgaatgatacaaaatgttgttggccattctataaaggtgtacaaaatggcccacaaatgtctgtatgtatcaacaataatacttccatagctccttttgcacctaatttcattattttggtctgtttgcctttgatgcattc

SEQ ID NO: 254148 - DNA, 947 bp, Cannabis indica
tttaaacaaactaccgtaaataattaggggtcagccatataatagacgttatatagccttgtaaggcgccaaagccataaaaatggcgcaaatatagaacaaaccaataacaaaaagattacaatatatcccattataacaactcaacattatagaacaaaaacaaaactaaaatcacccacatcaaactgaacgaaatcacccacaattaaattaaaattttaactcaaaaaacttcatcacgctgtgcaaacattcaaacaaaagtactaaaatttaggcatctttcactaactcaaaaatacaatcagaataaatcaacaacataacatctaaaaagaaaggaaattttaattcaaaatcaaaaaactcactacggaatcaaggattcggtccaaaccaatagaggattcgatatatccttcttcttgacccacatctgaatatcatcgccatcttcatcatcagcggccctataattaagatgagggctgttgaaattgcaggtataaatagattttatttaattagttaattacggggacgactgttaattagatgatgaccgtacgaactgcctctggtggaccttggaagatgtctgatggattaagccacagcacaagtagacttacaagatgaattattgtaaatattaattaaaccgaacctgtcacttaggcttttggatacctttgctgtagcaatattccaaaacttgggttgatgatcatggctgtggttgtcatggtcgtatataaacaatatttattaattatgaataatataaatattgtcaggtcattgcacaagtgtctcccgcagtgtgaatatacttttgtttaatatcttaatattatatcaatacatgaattaataatatatcaatctaaggtctgatggccagggctccttcgtcgcccctggccttgatttctctgtattgg

SEQ ID NO: 254149 - DNA, 721 bp, Cannabis indica
taaagagaaaatccatcgtcctggcaaagaacgtagggtatctcaaagaaccaacacatatgaaacaccatgtttaggaaggaacgatagtaatttcaatgttgttggtgatcaaatcctagagagaaggagtgaagactcctatgatcctactagttacgtaccacgggtagacttagagaataggcaactttgacaacgtttggctgaatcaaatcgaggaaacacagagttggcgtgagaagttgaagcgactagggttgtacagggaatagttcctcaaagccaacatgatccaactataaggagacctcaaggaagacctcgaggctctaagatcaggaggcaggaaaataaccaagggaatccccaaaatacctaggaggaacaacctgggaatacaagggatgtcccaatggataatcaacctaatcgaagtaatacaaggaaccaagaacatcgacgagatgtccgacaaacttctgatggatttgcaaaccaagggaatgaacaaactaatatgcctgaatcagctcgcatgattaagaggcgaggcaaacttgaccaacaaactaaggatttcctcgtgataatgaaaaaacccttgaaaccaacatagctctagtggtctcctcctgagacatccacaacacactactataaaaatggttgttcctgacattttgaaatagccgttagaagtattcctgtcagttttttt

SEQ ID NO: 254150 - DNA, 834 bp, Cannabis indica
aagcttaagctaatcacattagcactccaagatgtgctcctggatgctgaaactaagcaagaaaagaatccacagctcaaaaactggctctgtcaccttaaggatgtgttccatgaggcagtggatgtgctcgatgaatttgagtgtgagttactcaggagacaagttgtcaaacaatatggctcttctggtagaaaggtatgtcgtttctttcatggtccaatcctcttgtttatcgttttagtgttgttcatcgagttaaagagatcagacaacaatttgatgagattgttaagaatatggaaaagtttcatttgatcaaaactcagctgaatatggatcaaaaccctcactcttttgttaacccttcagatgttattggtagagatcgtgaaaaagaggagatcatgggtatggtattaaaggagcaagctaaagaaagtaagaatcaaataatagatgttatatctgtaattgggatgggaggtttagggaagaccacacttatcaaatcaatatacaatgatgatgcaattaaagaaaagtttgatttgaggatttgggtttgtgtgtctctagatttcaatgtcactagactagtgaaagatattattatgagtgcaactgataagaaggctgagattagtaacttgactaatttagatcagttgcaaagatctttgagtcagactttgatggataaaaagtttctacttgcgttggatgatgcatggaatgaggatcctttaaagtggcatgaatttgcagagttgttatttgtgggttctaagaaaagtaaaattatagtgacaacacgaagtagtaaagttgctt

SEQ ID NO: 254151 - DNA, 1364 bp, Cannabis indica
agaaaagatcttggttgcggttttgggagtagagcgtagactgggaagtgttacagtcaatgatttctgccaagcgagttaccctttggaaaaatcagtacgatagcaatcatagaagatgtaggtaatcttgatcctttcagttcaggtccaaaaggtaattcaggttccaatccattgtccaacttctcaagaaaaacaggacacttttgataaagatgcccaattagcccacattccatacaatagtttggtaaccgctcataacagaactcaacccaaactcatccttgatcttaggaagagtaatcatccggcccctcaagagtggtttagtaatatccattttgacccgaaaacgtaaaaaaggctcccaaccttcatttagagaatcatcgtggacatccaaaaattctcccgaaattaaggccaacgatttagccaaagatctagacttactcaagaaaggtagtctataggcttgcacccaaaaaggagaaaaaaatcatgatttcaggagtgattgtttgatgcaaggttggatcaagaaggacaatgtggtggttttggaagtgccacgactctttttctaatgctcgaattcgatctccttcacatttgaaacaaagcaggaacaaatcataatgatgttctttgatgttaactttgaaccttccatcccaatgttctgccatttgccgttgaaaagtagttaaccacacttttttacttgtaagaacacgagcgatcagaataaattcttctggtacttcagtatcaacgccatcatcagtaatagccaatattgtgctttcattatcggttaatgttattgtggatttcattttgtgcaagaatggattcattggtgagaaaaaaggtaactgatacaaaacaaagattgagataacaaaacaaaaaccagttaccaaatactggtgaataaaatcagagtgatacggaggggatcaggaaatcaaggagagtggtagagaatcataaaaatggggaaatggagatctaaaataactgtagaaaactgaaaaactgccacagagcatgaacatgggcagacgctctctgattatatagtttaattcttaaaacttttttcatcagtatacattatagttgttttagaagataatataaattgttcaagaaatttataaaaatttaacatccaaaaaatacccataaatgaagctattttctttctaaagaaaaaaaaaagaaaagagtactttcacaaccccattaaacaagtgatcctttttccaacacaaaatcttgatattggaaagaagttgtttctcccacacataaaaattactaagtttttatcaaaaaacaaacaaacaaaa

SEQ ID NO: 254152 - DNA, 1004 bp, Cannabis indica
atttctgcatatgatcaaaaaattatcttttaggaaaccaacaaggaaagttaaaagttattttcatttgtagccagagaagaatctgcatactaattttactagcataaaagtctaaaatggtcgttgtagtgagaaatgcctttgatgatatttaataataattttatttatgttgaataatgtagtagtgaagattagcatacttctttcccaaatcacttcatttttaaatagtttatactctcatattagtgattggattaaatttgtttatataatttacttacagtctagagtagacacattaaccaactaatttaccaccttaatgagagtaaatttattataacacatcatatttaattcttcataatttaatttttctttgttaaagtgtttatcctttttggtctttatagtaaattagttttaaatgttaaatattcaggggcttgctctatattcttgtcaaatgactggaattggggtttgttaaaataggatgttgtttagtactttgcaattggtatctaaatgagtgttctttgttaaaatggaaactttcagtttgttagagcgatttctattacctagttaatcttttttaaaaaccaataatagctgcaacctgcaacttaagttaaagtcttatttttttttctttttcttcatcaaattactaggcttaaatttttcagagtgttagtttgagtatatactactacagtaagagtgattaatgaacattgaagattcatgtgcgatagtggaagacttcaccttgttcatttagagattttattataatggaaagatttttactactaataattggtagcatactctctactttgacacattcaaagcaatgctagatgttaaaaatggaaattttcggatagtaagaatggtttattgtctaacttatattaatatttaatttgcagtttcataaaggctaaaagtgagttatcttccgaagatgtgactgctgttgtgaa

SEQ ID NO: 254153 - DNA, 859 bp, Cannabis indica
agtggtttgttgtgatcctatttctaggattaactattggttaatagctctatataaagggcaagtctttgtacgtttttttagtattcaagaaagtagtaaaataaagcttctttattaaccttgtcttttcttctacttcatatatatgtatatataagcatatatatatatatagttaacataaccaactaatttaccaccttaatgagagtaaatttattataacacatcatcattaattcttcataatttaatttatctttgttaaagtgtttatcctttttggtctttatagtaagattagttttaaatgttgaatattcagtggcttgctctatattcttgtccaatgactggaattggggtttgttaaaataggatgttgtttagtactttgcaattggtatctaaatgagtgttctttgttaaaatggaaactttcagtatgttagagcgatttctattacctagttaatctttttttaaaaaacaataacagctgcaacctgcaacttaagttaaagtcttatttttttttctttttcttcatcaaattactaggctttaatcttttcagagtgttagtttgagtatatactactacagtaagagtgattaatgaatattgaagattcatgtgcgatagtggaagacttcaccttgttcatctagcaattttattataatggaaagatttttactacttttaattggttgcatactctctacttgacacattgaaagcaatgctagatgttaaaaaatggaaaaatttcggatagtaagagtggtttattgtctaacttaaattaatatttaatttgcagtttcataaaggctaaaagtgagttatctt

SEQ ID NO: 254154 - DNA, 695 bp, Cannabis indica
cggaatgggtaaataacatcaaagtgaggtttgaagagttttatcaacaaaaaatcaatttatgtgattaagtctcacttattatagagtttaagtagttttatcgcgaatattttttttttacataacacacaatacattaaatataatcctaagaaaatttaacctaaaaatccctcatagccgcaagcaacccactgtccactccaatttctccatctccctccgtgatacataacacactacattatgggtccacccaacccgaacccaaacccgccacacgtgaacgggcagtacatgttcactttttttttcactcgaaattcaatcaattcgctcaatattcagccttaattacaacaaaacaggcaaatgacgagcaacagaagcaagatcctcatgtcacctaacagatattttaacatcaaaagtcatattaactaaacaatgagcgagaaaattaacatctcttcgctcaaaacaaaactcaatagatagttgtaaatagcctaaagtaattagttataaattttttcactgaaaaaaaaattaaaatttgcgtcataaatacttaagtttaactcccaattgtaataattcctaagttataattttagaacttttataggtacttagctgttaagtgttaagtaaatttccacgtgtcaatttctaattggtccaagtcatta

SEQ ID NO: 254155 - DNA, 1634 bp, Cannabis indica
ccagggacctttaacaacctaaatgggagcccttaaaacgatctaataaacgagcgtgattgaaataaagtttagcatgcataaaaaaaatgagtaaataaaagcaaaaaagtctacgactattacatagtgcctcgctgaccaggcatagaaaaaaatgtctctatgaaaattaaaggtgtgtctcaaaaaaggaagtaaattaaagatgaaagtgaggcacgattactgttagagaggagcgtcagacttgagattttggattcatacttgctcttcaaggttatccttctaggagtggtcatcttccctggaaaagacttccacgacctctccagattccctctctttagctctctcatccttagtctctctggtttcagttttgacctctttgtcttctgacacctcatcttcaacccagtcataagtgttgagatactcatcgacgttcctcttgtaaaccacaaccctgttagagaagtcctcgcatcttcaccaagatagctaaagatgttgggatctctctgtgacaaatgtgccaacatgaggacatgagccaggtttactgagcagactaaggcccagcgacgagattccttctcttgcatgtgctcttatctctcgttcctgagttccttactcatggatgtaacctccttcaaggcctaagcctcaccttgttgaaattgatcctttttatcctacaaatcttgtacgcccttagtctttgcctcaatgatattattcttctccttgataccaatatttagagcgatgacctagttttcaaaaatttggcagagtgcctcagctaagccagccttagccttcagccactttatgaagtcgtttttatcctaaaggtcttggagcttaatggacatctggttcttgagggcctccttggcttctttggcctccttgagctctttgatgagatttgcattggcattttctagctcagcacgtcagaccctaaactcttcctccatcgaagttttgaaatcctctttgaagtcgttgaacttctccaagtatttcttgtcagccttggagtccgcctcatcacagtatttcttggcctcttcgatattttttttatcctttccatggcttcctttttagtatttttgatttgggcctccagagcctttcgagtggccaaggaaaggtctagttgcactgccatggagcacacttctctacaagtttgctctgggagaactaccatctaaaataagaaggaaagagtcaagaaaggagcaataacttacaacaagtgaaaaagagaagttaagtgaaaggtcaaaatattccagcttcctgcttcctcgtagagttggctaataacacacgatcaatgctactacttatcacccaacttttagtggtcaactcgctcacactaattaccatgtcgtccaacagatcgacattgaatggcactaagtccctacccaggcgaggcactagctatttgccaagggcaggaaggtccattatggatccagaatgtcctagattaatgtctttagtattcggccctctttctgaggcagtcagtcagtcctatcttggtctgtcctatcttggacaacgtcgtcttcgtcagttgatgcttcagtactgta

SEQ ID NO: 254156 - DNA, 827 bp, Cannabis indica
aaaaattcggcagcacctccccttaatttcttcactacccaaaaatcaaaataacgccgtaataatccaacaacaataatatttcacaaatattcaacaatttctccaaaataaatccacaaattcccaaatgttcttgaaaattattcaaactttcggaaaactcgcttagctaatcaacgttttgacaagaaagagacttactaagcgggaatgtcgttcatccaccaccattgttgcatatccatggaaaactcaaggttgaagatgatgaatagtggtaattttggatttgggtgaaaaaggataatttgtggtgtgatttttgaaggaaaaggaagatttatgagagaaatttgtgtttttggtgatatagatggaagatttgaagagattttgaagaaatttgatgattaatggtggaatgagggtgtggggctgagaaaaggggaaagaatcaggtggcttttgatatttaggttaaatgggagttctatgcgattttggggtatttatgttgctgaagggggtcccgtcgcgacgggaattggcagagatttttcgaaattttgcttgctcttcccagtcgcgacgggcaatgccccagtcacgactactgtagtttgccattttttttcgtaggaggccaagtcgcgactggaatcactcccgtcgcgactactgtagcaatggccctttttttctatacttctttttttctttttttttcatgattttcacggttttactttacaactaaagaaacgcaaatctaacctaaatgcaatgaaacaaattaaaatgatacaaagcacttgtaattgtct

SEQ ID NO: 254157 - DNA, 567 bp, Cannabis indica
atttgaaagagagcttgcttaatttcctcagcaagtataggccgaagtaggtcttcattttgctccctagaaacagaacactttatattatccaccagattgttacaggtagttccattggcagtgaagattgaggaaacataacttgtaattagataatccaatcttgagccccattccttccaattatcatttgaatctttcaatctcagaatttggttgcttcgctttcttgaacttgccgaggcgtgaaagtatttgctatttttgtcacccaaatgaagccaatgttgttttgatctttgcttccaataaatctcttgttgagcaaggatttcaaaataattgttttttcttcatcaaaatcggcagtggagtattgatcatcagagcctctcatggtagataatattttcttgcttttattcaacctcttcttaaaattcccagtaagtttataatcccaagaagacaagcttgcactgcatttgttaattttatctgacaaggaaagatggctatactcctcccaacagttctttatgatttgcttgcaaaatggctcac

SEQ ID NO: 254158 - DNA, 1315 bp, Cannabis indica
aaagatcatcaatcctaggtaaacgatacttgtttttgactgtcagtttattcaattcttggtagtctatacacatacacaaagatccatatttcttcttgacgaacagtacaggggctccccagggtgacacactaggacctgaaatccctatgtcaagcaatccctgaagctgaatttttaattctttaagttctgctggagccattctataaggggccttagaaaccggttttgctctaggtgtcaaatcaataacaaaatcaatttccctttgtggtggtaaacccggaagttcatcaggaaaaaaatctaagaattcctgaatcaccttgatgtcctctggctgaattgactcaggccgagtggtatccaataccacggccagaaacctaagacacccatcttgtaacacttctctgactgttagtattgaaattattgggatccgagatccctaaaccgatccaacaaaaacaaacggttcctcaccctctggttggaagattaccatcttccgcttacaatcaataatggttgagtacttggataagaaatacattcccagaataatatcaaaatctattaaacccatttctattaggtcagcactcaactctctatcctcaattttgatcggcatagacctaatccactttttggagatagctaattctccggcacgcagtagggttccaaaccctgtatcataactatcatgcggtctacccaatttactaaaacttctggctgccacaatgtaattgagtttaaaatctggacaatatatctataattttgagttaatgtttgaatgtttagagttactatatacttagtacaaattagcttaacttagttaaataacactcattctatatatatgcgcgtctcgtggccatatcaagaaattatttaaaataaaataaacaaaatgcgaccgaagggagaattagaagtacaattatataatatcactataaaaaatcataattttaggtcacaataaaatttgtggctaaaagtaaaaataattgtgactaattattaattagaaattttacatcaaaaatataaaatgataactttattacctaaataccactacacggtaaactaaacatttatatccttcatctttattttattattattttaccacatgcatactcttcccatacatcaaacatgtgagtgaccactatcaatcaatcaaccatccatcattttccattctttttttcttctttttccttttattttccatttcttttcagttttttttttaaaaaaatttagttaacctccattgctg

SEQ ID NO: 254159 - DNA, 1610 bp, Cannabis indica
tgatagtccaaaccgcataaactacaaaaatcgcaccgtaccgcactattttttgcggtgcggtttttgcgggtttttaatttcgcggtgcgggtacggtttaggaaatttaaaaaactgtatgtgcgggttggtttgaaaaaataatcaaaaaccgcaccacgcgcaccgcgaacagccctagatgaactagaagctcacgctagcaaagaacaaaaaaaagaaaaacgtgctgacgagtcggtgatgtgacacgcacagagctgactcagtggctgtaattttttttgatatgaaactataaagaggggcgccactccagaatcgtagttcaaatcgaatagagagagagccaagttaactcagttaagagttaaaatggagggtgagcctactcgggttatgctggcagtcaacgagtcgaccatcaagggctatcctcatgcttccataagcagcaaaggggcttttgagtggactgttgataagatcgtccgctctaatttttctggtttcaagcttctctttcttcatgtccaagtccctgatgaagacggttctattttctctctctctctctttgataatatttatatgtgcatatagttccttattgtattcagtttgttctttattgtttgttttaagcatctgtttctgtttgggtgacgagaattagaagtaaaagggaaaattggatcagagtataaaacctgaaagagttaactagcatttgataatgattaggattggatattatgttaggttctgattcagagtccgtttttgattattgatgttgatggacgcctaaatgtaggtttggcctcattttaattttagaatggagcaatgagataatgagattgtttgtacccacagctagaataatttagggttttgaattttgattacttccattcatttcattagtctatatatgagattggtagagaaacttagtttatagtaaaatatacatggaaatttggtggtctactagctattgacattgcaatgcctcttcatttgaggtgtgtggtatgaagatttttgaatctttagcaataatgtctcagcgggtcatacattcagaatacgctgatttcagaatatgatccatgtctctggcactggcactggcattagcatgattgaatttgatttctgattattataatcacatcagtaggtgtgtggtttcctttgttcctcaaaatgacaatttcggcttcatacagcagcagtaatatggtctctgaattggtgcacttgaattcatgttcttgtggaatagctctagtttatagataaatatcatgttgtaaataagatggaaattttgcttttgaccatatcgagattttttctatttcacaggttttgaggacatggatagcatttatgcatcacccgaagactttaagaacttgaataatagaaacaaggcaaaagggctccatctactggagtattttgtcgataaatgccatgaaattggggtacactactacactctttaatatgtacgaacatatgcatattagctgtgattttctactccaagactcttatacctgcaatcaagaattaatgcaacaaaatgatag

SEQ ID NO: 254160 - DNA, 723 bp, Cannabis indica
acaaatattcaggattaaatctattgaagagcgaaatgtgtatagtgctgccaagtatagttcttttcaaactgaaacaaattagttggcttagcaccatacggtgaggagatagctattcgtgaatatgttgaaacatcagaacaaaacttagatgctggggacttgactctttcaccaaggcctttgaaagatggcaaagatgatggttctggacttccatgtgaagcttggtggaaaagaggagctgccaacaagaaaagttcaaagtcatcacataatggagataagaaaagaaattatgtgccccaaagtaggttttttaatggccatcaatgaggacccaataacttgtgcctaaaaattaccaaaaatcacatctcaaaactccacaaaagggatttcatgtttcttctaaaattaaccaaggtaccgatttccatttcccaatgaccaatatatgtagacagtacaagcaaccgtggatataaacttgcaaataaaaatgattaaaaattttaaacttgcaaatagattggcatcacatgtgatagaactataaattaaatccattacaaattggaagaaaaagtcagttaagaaacctgtcctatatagagctatttgttcaactaactctaatacaactctcagggtttatacaattcatcttaaggcaaattaataaacaatttacatttaactatttctatcttgttcaaa

SEQ ID NO: 254161 - DNA, 894 bp, Cannabis indica
acaatccataaacagaattaacaacgattcagaaaacgagtacctcaaatcaatatcaattacattctttaacaaataacaaatatttcaccatcgaaatagggtttcacgattttcatcaaactatttgggaagaagaagatgaaaaggtaaagttcgcaaaatcaaacaaatacaatgatatttacaaatatatattaaaaatataattgagcaatagagacatacctggagagagggaatggagaataaaagaatgaaccgccatggaaaatagctttgaagagctttttgccgccttaacagcggcgaccttcctttatctttctttttctgaattaagagaatatatgtgtgtatatatatatgtatagtgtagttatataaataataatatgtgtagtgggaggagagagagttcgtatagattctaatactattttggtgtttgaattttcaaggagaaaaagttggtaagaattggagttcttctattttaggtcaatgttttccagttaaatacttccaatttccaagcccacaaaataaattaataaaggaaaaaaaaatgagagatctataaaaatcaaacatttattcttagaaataaaatatatgtgatgagagagctctgtatatatatatttttgaaagggataaaaaaaaaaaagaagaaagcaaaaaaaaaaaaaaagtaggctcaaaatcctccaacgaaccttttcaaaaaaacgaataaaaaaaaaaataacctttgtattgaatttatattttttgtcatgttgtggggaagttttgtggtaggtagtttcatttttctatatatagtttcaaaattttagtatgatggtgttagttgcattcaataaatcttcaaattgaataaaaattaag

SEQ ID NO: 254162 - DNA, 697 bp, Cannabis indica
gatgacaattctatttctcaacagtcacacattttggaaagtgttattattgcttatcctattataataatttgctaaagatatagtgttgggaatttctcattacactttatcgaaaacgaggagtgcatctaaaaactcaatatttataaatgtataacactgagattacatgagaggagatttcatttataacaatatttataaatttaacatattcatttataacaatggaaaatataagagaggggatttccttcaactaaattaaatcttcatctaactctaaaacatactttgctaaattatgagtggctctattaaaatctcaagaaacatgcgagacaacaactctagagaaaatgaattaaaaacctacagcttgtataataatatctataaaagagaataccatagatgaagcagatggtaactgattgattgcagcagagacccgaagagcattagtacatttctactttagagattggtaactgcagttgtaaagcccaaggaagactatgaaaaagggccataacttccacttcatgacttttaaaacaccatgtaagtggcttgaaaagagaaactatcactttaccatttctatcttgaacaatagctccaatacttgtaacactagcctaaggatcaacaactgtgtctacgcttaactttagtccattagaagcaggtg

SEQ ID NO: 254163 - DNA, 649 bp, Cannabis indica
ttaagatgttttgtgttttcctttatattatatattgatattgatattgattgatattgatattgattgatactaatagttatattgagatgttgattttatttattattttaatagtgtatttaattttaattaattgtttttattatattaaagagtttctatttatgagtacggtgatggtatgtttttttatttgttttgttatattatgtgttgttacagtataagttttgttttattttgtttggtgataatgtatagatataaaaaaaatttataccacatcttaaattatttgtagcagataagttttttatgttattattgtggatgttattgcaatgtatattattgtgttaatatgctaattcacttttatttattttataaagatgatggtgttggattggtctttgacccatggttttcctccacttttttttaagattgacaattgatatcaaaaagattaacagttgaatttagttctttgtattctatacgagattttttattcgtattgaataaattacgatcttttttagagatttttaataatttacttactaatcttcttgaggcgttcctaattcattttcgtattcatgaattaacagtgcatgcacttagagtaatttgtgaacta

SEQ ID NO: 254164 - DNA, 1109 bp, Cannabis indica
aaaatggtcttgttgaaagaaaacatcgccacatttacagaaaaatggcctttactttatttggcacaagcttgagtttgtctcaatcttactggtggctttgcatttttagcatgttgtataccttttaaaaaggtgggatttggttgggaggaatgaaaatgtaggaatggaatggaataaaatttaaaatgcataaaaaaattgaaaaaaaagttattaaattttttcaaatcttgtattggagtggtctttccttctattttaaaatggaatagtcatttcatcaaattgatggaaaggccattctatcggaatagtattccaatagttttaaatgcaagcaaacaaaggaatggagtgaacattgtttcctttccattctattttattttattacctccaaccaaacgtcacctataagagtttcttaaatgccaagagcttcagcaacttcaagtgttacagttccttcaagacactaaatttgcatctgaacaatgctacaacaatgatttcgagctacacaaacacaacccatcgcacactggttctctcctttgaaacattactcaccacccactttagactcttgtataaacactaggtgatgggtgggtttgtagttcgatgctcaatacttgagcctagaaacacacattagtcaaatcaccattcacatttcacatacaatcccatacgctagacaaaatacaaagttattacaacatgaatgcacacataatgacaacatggagccacatatcactaaatggagggcttagacttgacctctcattttttttatttaatatatataattatattgatttgcctccaattatttttttccacaattagcctctcccaaattacatacgttattaggtcctgattcaaaccaagcttgtgacatagctatatatcaaaatgcatattctttctacagtggaaaatttctcaagtggaaaattaggactataatttccttcacgttctaattcaattaatatatatgtttcattttacataataatttttcttttttttttttctaacagaagattgatggatacatagataggtagaagtattgtacttaagtggta

SEQ ID NO: 254165 - DNA, 522 bp, Cannabis indica
tgaggaaaacaatgttgactataatgatctaatcttccaagatctgcaatacctagacactgcttgtaactgcccattctcactcaattttcttgatgaagaaatatgtaggggactctctatagctccacttgtctacaacaaatctactacatcaacaaatggcaccaagagaacaagtccttcattggcgtggcaagaagatgatagtgacacagatgaatacataaatctcaacccatcacatgaacccattaacaaaaaatggtaaagtacctaaaccttacaaagatacccatttgtgcttatgttgtgtttgttttatgtcaataataaggtggacatgtgactcctaagaaagttagtccattgttttgtgtgccaagacctttgactactcacaagaccaatagagattcctattcataacaaaatgacaactgaagacaagaaatcattcagacgatagagattcctctagccaactgaaaaatttatgtgtttgcagttatgaataattaa

SEQ ID NO: 254166 - DNA, 640 bp, Cannabis indica
aaaattttatttttattcacgatttcgttattggtattgaattcgatgataaaaatataatgaatagagttgtttttccataagctttgtagttggagccgtggtggactacgacgaagacaaaatttatactgaaaaaaagtgttagaattagacaacttcttcaattaaaaaaatgacaaacatagtttgattgattcaaagaaagaagaaaataatacatactaaaatatataaacaacattgaacaaaatagtaatgaaaattaagaatttacattttaaaagatattctaatttacaaacccttacatattgcacatcccaatacatgtatatatagtggtattcaatctaatagaagttttgaagtggaataattatattgtaaccgaatattaattatattttttatgaattgaatggagttaataataaaataataaataagaaaggggttataataataaaataatttagaattagagttataaaaatgaaaggtcattaactttttcaactaaataaaactacattattattgaacataaatgattaaatagaaaaaaaattaacaaaagaaaattaaaaaaaaaaaaaaatagaaagagcaaataaaatataaataaatatacatatat

SEQ ID NO: 254167 - DNA, 1837 bp, Cannabis indica
tggccaaacaaagttcaagtgtggaacaattttgacataaagccttgacatcaaaattgttgaggggaaagctagtaaaaacaattaatttttatggatatcaggcctactaaacaaaagaggaaagggccacttcggtgataatagccacaatcatttgaaacagaccaacaaacccaatactcactgtctggtctggcattatcacttctgaaatcagatgtttctgcatgaaatataacgtttcatactttacgaatttctttctgcttcgaagtataggcgcaaagcttaagcaaataaagtatttgttttggctacattaactagccgaaacaaatgcccaatcagctaaaaataactacatttaaccaacaaacccagaacatgtaatgtaatttgtcattgaactaactaaacacaatgcaattcaataattttactaaaaaatgtagatttcaaaagctaggaaagaatattagattagagatgaacctgtttagttttccaaagcatcgtgaaactcttggtcgtcctccgatttacgagacttaagatcagaagcaccattcccatccttgtcttgggcagacctaaccacaataacgggacaaacacagtgatgaacacagtaatcactaacgctaccgagcttagcatcggtctcacgcttggaggcgccgaagccccgactgcccgtgatgagggcactgagaccaaggcgctccacctccaagcaaagccgctccttcatatcgtgatccttcacaacatggatcttataaggaatcaacgccttctccagtggccgagcgacgtcgttggctttagacgtcgtaaacgcatcgaagtcgttagcgagcttccgcttcgactcctcgtcgtcgtcgtcgttggccaccgtcgcatcgacggagccccaatccgcaccgtataggacgttagtggggctgacgtggacaaggacgacggcatcaccggggcgaaggtagttctgaacagcccatttaacggcgaaggcgctctcatcgctaaggtcaacggctatgccaatcttgcgctgggctcccgcggtgggggtcccactagccgggaatctcggggaagatggttgaacgagtattgcagtggccgtgaggtctgattcggcagtgcttctgggggatgtcatggcttaaatttagtatttggattaaatttttaaaaataataatgtaatggattttcggattgggggtttgtagttgtacttgtttgttcttctttgaaggggtttgtttgggtgtcggtttttggtttgggttttgggtttaggaaaatataataatactaatattaataataataatattattattactatttattttataagagagagattgtgtttaggatatgataaggaccggaggaaggaaggaggaggggcctacttcattcaatgctgctgcaaagcctattctttattgttttatttattggtgctgctaaaactttttcatttgaaagtttattaacacatcaaaagaagaagaatttgagtcaatttaaagccctattattagccttaaggtaaagcaaaaaaaaaatcaaaccattaaaatgtcaaccaaaatgttaatgctgatttttaatggtttatcagtttgtctaatgtgaattctatgagataatcttaagtgtttggctggatgaaaacgtccttgccttgcgtaatttttgaaaattaaagtgccttcatttctgggcggtttcatttcttggtttaacagaatatactttaaaaataaaaaaatattctcttaaatttaacgataggtttgatcctcccgttaac

SEQ ID NO: 254168 - DNA, 1307 bp, Cannabis indica
ggtcaaattaatacaataaaaacaaagtaataaataagcaagaaattaggatagtcatataactcatcagctcgtgcgttagaatgtaaaaatttaagtccacgcgcaaacacataattaattaatatagattaattaaacaattaaccctttttcatacacaatttattttatatataatatatttattttgggacccttctatggataattagtggttggtgttcgacatgtatgaacttaatttactataataaaaaaaatttgccaattaagagtgtgttatgatgagtgatgacatatatttttaataaacatatatattcatatactcataattcactattttaaagcaaaattataataatcaataatatatatatactttcctccaacacctatttagctaggtctttaaattataatggggtttgtcttgatgctatatatatactataaatagattagtgatatgtgagggaggttttatgtggggtgagtatatatataaacatatttatatatgctatatctagttgacttctcttaattagtttttttaccaatctagtaataaactatttatatattccatacatatcttattatatatgttattagcatcttcaacatagcttaattggtttccctaggctatataatccccatctaaacctcctaaaaatccatttcatcatcaactatacatacaaatatatatatacacacatacatatatcatgatgaataataatgataatacaaaactatacaccaatttattatcatcatcaccaccacttgatcacaatcatgatcaaattactaatttgtctcatcaaatgtactctaatattaataataataataatatttcatcatcttcttcctcattccctcctcctccccggccacatgatcataatcaagatcaatactactcatcatcatcaaacaacaacaacaacaacaatctcaactccatcctctacactctttcgattctcaaacaaaaagtccaccaactccaatccctagcggccatcctcctatctccaccgccacttggcaatgataatgagcagagtgcaacaacatcagtagcaggtggatcgtcatcatcatcagctatagctagcacgaacatgtacaatacaattcaagatatcatcgcggcttcctcttctatgctactcaatttccacaacatgggacttttgtctccggatattatccacaacaacaacaaggtcatgaacaatattaatactaatactttctattcaagtaatgatcatcatcatcat

SEQ ID NO: 254169 - DNA, 1016 bp, Cannabis indica
aatttaatttaattataaaaaaattattaaattagattaaatgttaaaagttaaattttaattcgttcaattatcaaatgtcaatctcaaaatctaattgaaatcgatctaatctattaactacaatagttaattagcaagttagttaattagaagttgttactcttttttttgtttttttttaaagctagcaacattttactactgatataaataataaaattgcaattgcattcttctactaaagttttctttatttctttcggttcttaaacttttactctgcatcttgtttttatttttacatggtatcaatcgcctttgactaacgtctatggcttcttcaacatctaatcctgcaactagtttggcaacaatgactactgccactacacctactgctacaacatcgactaatgctcccattctttcctggaatccattctctaattctctgaattctattttcaccatcaaactcaatcacaataatttcatgtcttggaaatctcaggtgttttccactgtcataggccacgatcctgatgatattctcttcactagggttcctccacctcaaaaatcttgttaatggtgagctcaatcccatgttcatttaatggaagaagaaggatcaactcctcctttcttggctccgctcgtccatgtctgaggcagttcttgcctttgttgccaattacaactcttccttcagtgtgtggcatgctcttgaatagaagttctcgagttaaaataaagcatgtctcttgcaattaaaaaggtcattttctcatgttcaaaaagggaatttatcaatctctaaatatgttgaaaaagttcagaccatctccaatggtctagcagttggctctccaattcaagataagatcttgtggtagagaatagatggttgtctctcttgttgagaaaatcaagggaggcatttaagacgtcggaggtaatctgggataaggtgatgaagcttttggatctctgagctggagcttgtttcttgg

SEQ ID NO: 254170 - DNA, 679 bp, Cannabis indica
agtttctcatgaccattcaactttcgtaatgctaataaccatgcaaacacttttattttagagtgcatttggaagtaactgtttaattactaccctagtaattacactacgctcaattttaaaatacaacgtgtgtgaatgtcaagtagtgtttgcatatgaattcttattttcatatttggcaaatgagttggtaattacatagtttagtaacattaattagctaaaaatggtaatgttttgtaattacacccaattctcatagggggcatgagaattggagactgatccctcagttacctccaattacatggtcactatgttagtacctggctcaacaaactcgccaaaccttgtaatttctctgaattacactcagttccaattacatagtagctttccaaacgagccctagatggtttgaacttttccatttcgcccattttacctcagctaccaaatgatgagagctaaatctctcaaaagccgacttacaagattacatttccgctagtttccagtctccacaccctgctaccaaatgtttactttcaaatttgacattggaaaagagaagatttacacaatagcaaacaagaaagaagataatggatctctttgccttattcctattcccaaaaaagcttctggtaggtctttcattgaggaagatagaaat

SEQ ID NO: 254171 - DNA, 655 bp, Cannabis indica
agttgatttaggtaaagagagaaaacagagagaaaagaaagagagaaagtgaaacaaagtgaagatcttttcattgaatgaataccctcatacaataccagtatatataactgatggaaaggaaagaaccttaacagaataacagacaaaacaactctaactaactacctaactcttgacagttgttagttaatcacagctgtcattcttttcctcaacagtagcagatgatgcattgtaagctgttgcggcaggattcacaaccgagtaatgcatcgattttatgcccaatgagtgagccaacttggaaacccaataagaaaaatcgtaaaagatgaattggggtttaagttttcgtagaagcaattcaatttggctttcagttttgtccatggcagtgacgatgagaggtattaagggaaaaggaacatcacgagtggtctcagccccagaaggaagaccttccacgtgggggaaggtgattggatagaaagttatgagatttggaaagcgattcaaatgttccactttggatttggttatgggtgggattatgaaagagattgtgtgacctttttcggctagtttgttggaaaggtggatgaatggggtaatatggccaaaagcaaaccaaggatacattgctatgtgtaga

SEQ ID NO: 254172 - DNA, 640 bp, Cannabis indica
attttctacacctcctcaaattccagtcagaagcacatttaacatttcttgcactaatgctacacctgttgtcactaataatgttgtgccgtctatggtaagttattctatgcctataaaagaacctatatctctagcatcagcaaccatacttgctgctgcttcacagcaggcacctaatatcacaacttctactgcttcacataatgacaacaccaatgctggaacaacataattgtaacctgctactattgtcacatcagctcctagtggttaaactgaaccaacacccactattataatcacaccagcttcaattattgacactgctccagcaccagcacctactgcatagaaagaaatcaccaataattctcatgccatgcaaataaggggaaagacagggattcataaacctaaggcatatctcaccactaagattccaaaaaatgtcaaagaagctttgcaacaagaacaatggaatcaagccatgacagatgagatgctagccttaacaagaaatggaacttattctcttattccattacctgaaggaagaactcccataggctgcaaatgggttttcagggaaaaagagaactcagatggaacacatcacaggtacaaagctcatcttgtt

SEQ ID NO: 254173 - DNA, 508 bp, Cannabis indica
aaaattatataaaattagtaatgttaaattttttttaaacatccacggcgaagcgcgagttgttaattaattaatatataaagacgtatatatatttgagtccaacataattaattcaaagttttggaagcttttacgggtaattaaatatgtatatgattccgattagtaccaaatcactccaacctcaattgaagtggatgccgatttatatatgaattatttatgtatatattatataattattactttggaagaaaagtaacaatatatattaatatgacatgtataaacatgatacatttaaaatacttaatttttcattaaattcatctaaaacctgtcaaacaagacagatttacttttgttatttataattagtaggcatcagatatttgagttagggactagctatctatgttaattaatatttatacgtatcactttattattgagttttttacaaaaaaaaaaaaaaaaaaaaaaccaaaaaaaccagttttttaag

SEQ ID NO: 254174 - DNA, 875 bp, Cannabis indica
aatgataagtttaggttgaaagaccttggtgagctcaagtattttttgggaatcaaaattgctagaagtgatgagggcattttcttgtctcaaagacactatgctcaacaactcttagaaaaccttggacaactcggatgtaaagcagccaacacacctatggaggtaaacctaaaactcagccaatatagtgaggatgctcatgctgatcccaagttgtacagacaaataatagggaagctgcagtatctcactattactagaccagatttggcttacaccgtcaacaagttgagccaatttcttgttgccccgagagccacacacatatgtgaagggaacacctggacaggggtgttttatccaacaaagtctgaagtttagctccaaggttacacagatgctgattgggcagcttgtgttgacacaaggagatcaacaaccagttttggcattttcttgggcaattctctagtttcttggaagagtaaaaagcaatctatattttcaaggtcttcaactgaagcggagtatcgagcaatggctaatactacatgtgagcttgtttggctcttgtctatcttgaaggagttgaacatcgaacatgtaggacctgccattttacactgtgacaacaaggcagcccaacaaatagctgcaaaacctttctttcatgagaggacaaagcacatagagatcgattgtcacattgtaagagacaaaattcaagaaggaatgataaagactgcccacatctctagcaaaaatcagattgccaatatttgcaccaaggctttgcttcctagccaatttgaggttctcaagagtaaaatgagaatttttaacatatgctctccatcttaagggggagtatt

SEQ ID NO: 254175 - DNA, 729 bp, Cannabis indica
acgtgagggtcagttacattaatcttccgcatcgtctgttttgtgcgggccatcatcctcctccttgatgggtattggtgtatgtgccatgcaacagtcacggcaggagcagcgattggaatgcctaaggcaccagaacttggaaggcctataggaatagtgtcagcaacacctggctggacaatataggtccagtttgattagagataatgtctccaccccttcctaagctcccaaataaattgcaggtaccattctcctgcgatctgctcggagtaaaaatggtgttgcacctcgggttctggagtaggtgaactttcactactcacctcccaatcttcaaaactcgagttagaaagtccgtcactcgaagagaacgaactggcgcaaagacgaggtgggccctcgtataaaagttgaagaagatcctggttgatatagtttttgcctccccgaaattcaccagggttcatctacaaaagataatacatgagatgagtatttggctaagatattgcacaaaaacaaacaaatatactgaccaggtctaatcgacagatcaaaaaggcaaaaaatatcgtgaagggtaggttcacaacccagaatttctaaaatcttgaattaagggttaatcttcattaaaccatgaacgagtagagtgagaaccgaatattgcaaagttaaagtcaaaatgtcgcaacaatagagttatatgatctattacagtca

SEQ ID NO: 254176 - DNA, 2125 bp, Cannabis indica
cttggaattcagctgatgtcaaaccttatgttcttaattttttttctttcgccttacaagccatcttgattcattaacttgaatttttttttcattttttatggtaatcttagctatttattttaagaggcattttggcatttattttaatgttacttataagatgacattgaaaagtagcttttcctacacgctcagtggacattctattgggaagtctactctgtaaaaaattatcaacttttatagagccaagaagggagcgactttatattgtttcagaaacttttattttaaaatattttgctgtatagatatatctgttgctgtattttaattacctcttgtaccaaaggtgatcggacatgacaagggacaaaatgcaaggcaagttatcaaaagcttgattcatgacgagggctggaaaggtttttacagaggattgggtccaagatttttcagcatgtcaatgtggggaacttcaatgatcctgacttacgaatatctaagtaagcaccaaacctttattctatttgcgttcatttctatctggcacaattgtcttttgcatagtattcctgtgtttttggtggttatcatgaacctaaaaggattttttcacttatgcatcctttgttttgtttacatatgtattattttcagagcgcttgtgttcaaaagaatgatatatgcgagtaataagccatacgcgagattagcttctagctgtgcaagaggcacagatatttggttctttttactaggtaggatcaaacatgttctgtgggatactactacaatggttattttgaagattcattctaaagttcatattgcaaacacacttccaggaccaggaatgctggttttgaagcttctggttatattttggaagcccataatatgatttcataattggtttacttactcatttttggggaaggatttggagatcattaccaatttttttagtagttaaagttactttatcttgcacactattaattaaatttttgtactccttcagcaagtgtatatcaactaagcaacgaaatttgatgctttttcttcagcaataagaaattcaagaaaataacgcttttgtcttagcatcttgacccatgtatttgtttcttttatggttactttaaaaattaaaatggcatgtataaatatgaaatatactatagaattatgtcatagtatgttatttaaagttttttatattctaataagttactatcaaagaattactgtttatacttggcatgctaattatcctggaaactcttttttttttttttgtctaaaaataaaattaatcatcctgaaaactcatttgataccattctcagaatctcgagcaaaagatccatagcttaaccttgttatgctatctccaaatgcttcaactgataataatcaatgacaaggctgccggaattactatttaaaaaaaacaatgacaaaactttttaaactcttaaaaaagaagtgatttaaaaagagccttcgttgaaattgaagtagttgatgcagctctttcattatagctgtagatgtacaaaaggttgggttaaattcaaatttagctctaatcttctttgggtttaagcttagaacttgggtgaattattatgaggatagactcattatttggtatcaaatcaacccaactttgttgagatattgaaaatttgaaattgtatacttcaagtaggtcattttctcagtcgtgaagcatgttcttagtagcggttaacacccattagctattagtagattctcagcaattctccgaaaaataaggggaagtcccatagatcttatgaggccaatttttgggaagttaatctgaaatgaagatattttgtccactgaaaatcctcattcagaaacaataactgtcttctatgttcattcgtatatttattcacattgctttgttcatttcttaattgtcagagaataggtatgcttttcgaaagctttctaagacatgtgaagaacttgatcagaaactctggttagtgtttttggctatgaaattttttaaggagaatatttgagtgaaattctcaattcggtttgtggattggacaaatgcacgaaattcatcggaagt

SEQ ID NO: 254177 - DNA, 1209 bp, Cannabis indica
gaccaggcgtctcttcaattttttagctaattaatgctctgacttaattagtgcctcaaaccctggttttttctcatcacatttgacagttacacttgattacatttgatttcttgatatttgcttttggtagggaaccgatgcgtctaaaggcattttgaaataatttcccttttcacctctcagcctataaataaggctgagttttcctcacaaatctacttttacaaacttttccactaaacacacttagatcaaaaagggtttttacttcaagtctgtcgtgagatcctcaccaaaagcgttagagcagcctcgtctggattgaacttagacgtcgagcagtgagtaagttttcaatcttcttctctttttactttgcatgtttaacttttgggttttatacatgcgttttcaacttgttgtagaagataaatagaaaatctaggcttaaaactttgtgattttctctgtaatagtctataaaacatcacggttcatgacatttgcctttgatcacgcattgttcgtctttcaccttgcatattcgaagcttcgtgaaatttaaacctaaacccaaaaattttaaacttttgggttttgacctatttctgtacatttttatccttttaatctgttgagtactcttggtcaacatatttgcctgtttactgttcgatatcctgaccaaacactcatctcgtgtgttgtcttttttagatgaaccctagtgagttttggggaagcgaacaccgaatcgaccaggacttgcttcaacttctgtacgaggatcaacctcatcttcgggccagtctgtcctcttcgagtgatagactttctaattcaagctttgaacagtgggaggtgagtaatgatcgttctcttactctagaacccgtagtgcaacaccatcattactccgagcagatcgctggagaggggtacaaccgcttaatttgggaattgaagaaaggttggaggcattatctgtcatccaactggacatatattgtctggccaggtattggtgatactcttcctattgcttgtccaagttcaaggaacttcgacattccaattgctgttcctgtcgttacggttgcccggcatttgcaccagtgtccgtccagtggaaggatgatggcttgaacaaagcagacgatgtagaaggtcaatgcatctaactctcatgtggcctagctcgccaca

SEQ ID NO: 254178 - DNA, 826 bp, Cannabis indica
caagaagacaactgttaaacaaatgatactttattcaaacaaaatataacaaaaaatgacataataaaaaaaaatcacaaacaaagatatctgtaagaaaaaaaattgaaataaaacccctaaaataacacaaaaataactaaacattaccttatcaactttgagcaactgtaaaaactctagctccaactcaaaatcagagtctgaattttctaaaatagggcgaggacgtttggatatcctcttctttacagtttcaccaactaattttcttttggaaggaactggagatgtagtgacaataagtatcaaatcaacactttataaattctaaaaaaatatataaaagatatgaatgaaccctgagacagcacatgtaacaaaaaaagataaaaattggctttaaaaaataaagtatacaacagtataaagagaaaaaacaatacaatttaaaagtaattattattgtataacggtaaaaaaaaataaaaaatactgtatgggggtataaattttccttttatcaatactattatctatatttggtaacactcacgttgcattactttatatatacagtagaacctctatccaagaatacacttgggactaagaaaatcatattctaattgagaggttataattatatagaggtacactaggaaaaaaaattaaaacaccaataaatatcaatgtaacaataataacattaaacaatccttaatactatataattctagaattatttttgagtaaatataatatttatacatgtattacaatttagaataaaattattaattctacgtaaataatttcaaaaaat

SEQ ID NO: 254179 - DNA, 722 bp, Cannabis indica
tctttattatctacaaaagtaagaaacagttcgacaactatcaatatgatgtagcctccacgtcagcagaagatcaaagcctcacgagccgggccttatcaaatcgatacaaatatcattatattatttgtatttacctatcagtgggcaagaactcttgcaaaataaatataagaaacccattcatgcaaactgttaattagaatctcattctttgagtgctcagataaattctagggtttaaacacttgtgtaaatcataagatctttcgagacttatcataataatattaaatcgtggactaaaactcgttaacacccacaatcacataaaaattctaattttattctttgcctataatatatttctttaaactttattatattttattgatttctaaaaactcactaacacataattaacacatagcattctaatttttttctccatataaatatataatatgctccaaaacatttgtcaatctaaattatttcattattatttatggcaatataattattatagctatacagtactataattattataactatataataaatgttagcatttatttgggctacatagtttgttgccaataataaattttagaattgaaataaaaattgaattgtcatttaataatacaaagagtctaataataataataataataataataataataattataatattatctttataaatttttgaa

SEQ ID NO: 254180 - DNA, 802 bp, Cannabis indica
ttggtcgggggggggggggctacacacatagcactggccgggtttgaggtcataaaggaagccaccgggggattggcgaaattgagctgttcaggacacaacaaagcattagtggtaactttaactttacccatgatggttttgatgtcataccttagctccggggggaatggggcttcgtcacaagctttcatataatccatgcaccctttgttgtaactgtgtcccatccggccacagaaaaagcaaatatctgggaggttctcatattttaattcaagccagacaactttatttatccccgtgaaatggactggtatacctcgagggagaggccgagcaacctcaaacatgaccctaagtcgaaaatagggcccccaagtttcgcgaaaagatggccggtagatctctaagagatgaccgagagaggaagagaccaggacggctaactcttccgagcgtttaaggaacggggtgttgaacacttgaacccaaagcgggattttgagaagactatcaccattgagaacatccaaggagtttggaatgtccattaggatagcttgattaagataagtccagggttgttgcagcaaaacccggcgcctatctccatcacaaccaaactcaaccaaaaagagtccattggaacggtcagtaatggtcacgggacttcgagaaatgtggttccaatctctggtcattttctcaataaaattcttacggttaaaagatttaaccgtatgaactttgataaccagatagagggaacgggctggacctcattctcaggaacattggt

SEQ ID NO: 254181 - DNA, 1018 bp, Cannabis indica
acaagttttttcttactcttacactagttagtgttttattaaaatctcaccctacacatctcgaaaaaatgtgaaatttcacatgatgaagccaagaccgttgtgcatcactttttttttttggactcgttgagagataaagtagttttcatgcactaataattattttaatcgaaatagtaaaaatctcacaattctgatagtggtacccctttgagaaatgtgctccaaacccatcttagaatattttttgccactagtcacaatgaatttttactactaagacttgaatatgaagaatggatttgcaataaatttggttaaattggccccctaattcaaaaatttgaaaatattcttcttttcaatgtatatttttaacaagttttttcctatcctcttacactcgtgaaacttgtcaaggacgaaacaaagactgttctgcatcacttttcttattggtacgacattgtagagataaagtaagttttctatgcactaacaattatctaatcgaaattgtaaaatactacattctgatagtggtacccctttgtgaaatgtggccagcttccatctcgatatatttatctccactagtcacaatgaattcttactactaagacgtgaatatgaagattggattcgcattaaatgtagttaaaatggccccctaattcaaaaatttgaagggtaaattttaacaaggttttcccttactcttacactagtcagtgttttattaaaatctcacgctacacatctcgaaaaatcgtgaaatttcacatggatgaagctaagaccgttgtgcttcacttttctattagacactttgagagatgaagtagttttcatgcactaacaattattttaatcgaaatagtaaaaatcttacatttctgatagtggtacccctttgtgaaatgtagcacaaacccatcttagaatattttttgccactagtcacaatgaattcatactacaaagacttgaacatgaagattggattcgcgttaaa

SEQ ID NO: 254182 - DNA, 451 bp, Cannabis indica
acattacagagagatataggtcgaaagtggttaggcttttcggattttgaaccttgggaatcaagacaatatttgtagaattaacacctttatgcatacgacctgtttaggaaaaagtccacaaccgcttcgcagaagtcccgccccaacagaatcccagtagtgttttaaaagaaaagaacagacatcccatccgggcccggggctttgttactactcatagcaaacaatgtagttcgaacttcctcaagagagggtcttctaataagatcattctggtcttccgaagacaaaccttctcggactaattcgttgcaattaggcgccatgccagtgtccgatccagagaagatgccttggaagaactccaaaaattcagccccaacaagctcccttttcgaaatccacacattgtctttgttcaggatgctctcaatggcattccttctcc

SEQ ID NO: 254183 - DNA, 909 bp, Cannabis indica
gtatcatatccctagtgatctttaatgtacaaaaaactacatgcatgtgagagtcatgttgaatttttacgtggtagacttcggtttaagcgaggataggctaaagttgcataaatattcaagcgatgacttcgctttaaaagactaaaggttgaaacatcactgggcgtgtgatagacttcaataagtccttctcttctgggaaggatggttgaacattatcatacccccagtgatctttcatgcttgaaaaaattacgtgcatgcacgagtcatgatgagttattacttggcagacttcagcttttgggaggaaatactaaagttgcataaaacttcaagagataactttgctttaagagaccaaagggttaaacatcaatgggtgtgtgacaaacttcaagcagtccttctcttttgataaggaggtttgaagacgtatcataccctagtgatctttcactcacagaaaaactacatgcatgcaccatccatgctccgtgaaggtttatgggatgcgtataaataagtttgctctaggatctttgggtagtcattcactcagggggactccaaggaacctggtagttgtcaaggcaaagactcggacttccagcaaggcgagcgttactccggtagagatttcctaattggattataatgtcttgagttactttctttgatgtagctttaggggttaaactttcatcaaaatgataggaatccctgttagaaaccttcaccagaagtgattttcctgaacaacactgtaaaggccgcttagtttaatttggaaattagcagttaattaagtttaattatggaaattatttatagctatttaaataatttattatactgttatttacggaattcagaaatgcatgtttatgtcattcagtagttttc

SEQ ID NO: 254184 - DNA, 535 bp, Cannabis indica
atttgttagttgtgccttaggaagagcaacatcaagcactgaaatgattattaggaaaaaaaatattttattgttatcattataacttatatactctcgaagtgctttctttacaacgtttttaaaaatataactagtttaggtatttagggaaactaatccactaataaatataatttgctattgtgacatgactatcattttatccagaaggtctaaaacagtggaagtcagttaccaaaagaagtcttcttagatgcagattggtgcagagaacaatcattggtatctttgagtctcattaattacctctataaatcttattgttcattttctcatactgtcacttttctttgaagattgtctatacaattgcttgggcaagttttccaatcttgtttatgtgcagttttggagaagcttaattaatttcaatagatgagatgaccctgttttatttattttgtcatggttctgctttgtagttacaaggtttattctttttatcaagagcataggcagcaagataggacca

SEQ ID NO: 254185 - DNA, 2615 bp, Cannabis indica
agcgtgtttggtaggtgccgttgagtacggtttgtttgcgaacctcacccttagcggtgcaccattcttagtccttgtcaaatggagtatgcattggacgatttgcaagtgagctactatcagaggatgtgttagcttcagggtcagtgttgcaagggctacttggttgactcgaaggacgttgtgatggactcgaaggagttcatgttggggaagtattgtagtgcggaggcactactccattggtgtttctgaatagcgacagtagcataggttctttgatcaagtccaagagtgggcgagggacatcatcactaagagggtggttctacggaggtagagggacaagtgcagacttaggattcaggggaagcttggagtaagcttaggagtcgagatcgggaagattggcctgcggtttatcgatgagggcataaacatgttgaagtggggaagaatgtaacgtgcatgctaagatggcacgtcacaagctaagtgatgcccacaagttggccaagtggtggtcaagtggtggcacatgttgtggtgcatgttgatgcttagtttgtaaggcagtggcatttttgtaattatcttcaatattgtgtgaattgggacgggactcggtatttgccatttattttggtctacaaatagaatggtgcaattggtttggcgagactatgtgatttggtttacagtttggtcgtatgtctatagagccaaaatcatgtatgttcttggcagaaggctaaaagctcagattgctctttaagggggtaccttggtgtgtgctctccaccaccccttgcaccttggtgctaagtgagctactactagtcaacgagcctagtaggacgggcatatgaggaccacgaggggactcatatgtctccatgagttagagtactcatggaaattatcgggccgacccggtagtgcgtataagaagctgccagagattaacaggtaaaattccattagcttgccggtatgctgcttgcacgggacgtggcccaaagctccaagagatgttgtggtacacctttgccacgagtctcaacccgagatgacacgggtagtcattcgtgggctagtttgcatgcgcgcatgggacggatgctacatgttggtaagggacagaggtccaacgtatgctgctatattggtggcttgccgcgagggtctgccaacatgcgtggaggcatggcgccttgagtattggtccatggacgtatgggagtccttgggcgacgagggagactgttcggacagtattgaatggagcatgatacaagcgttggcacgctgacttggtgttggtatcttgccacacatgctaccttggtcacgggtgacaaggtgagcgtcggtgttgcgattttccttatcatagtgggaacctatggacagtgcgagtatctttgctagagagcctcgatgcatggatgccctcatggatgcttgcgagcataactcggcgggagttgtttgagggacggaagtgtgcacgaggcacacagtctggcaaaaaatgagcccattgttactcggatagtttgaaggctgaccttggcttagagaagtcaaggtcccgcacgggtgttccgctgcctaaaaaggtgagcccgtgacactgggcatagggccagccaggggtggccgaccagcatccgtttgagtgttggggtcttggtttgtgcaggtgctaacttgaccttccttttagtgtgttgtactgccacgtggcactgctattgtcgaagatgttgttggtttgtaacttgcctttgtagtatgtgcttgaattgagatgttagattaatttagttttcattagaatcttggtttatgcttgattattggaattattttggtatataaatgcttggaaaaacatttcaatttgattgggaagcttggtggaaagttatggtattttgaggttgagtttggtgcatttcgagcacctaaaagtgagtttttttggggttttaacccaggagccacagcatggtctttgagtgtcgcgacccgctcgaggttttcaggacagaatgtgttaaaacttattttgaccataacttttgactctgaactctgttttggactttcttggtaccgttgtaatcttgtttcaggctctatatgttaatctgtaaatggaatttaaattatgtgtatgtgtgaaaataaatttgggattaaccctattggtgaaatcccaagaatttgttactaggattactagcacttgttcaggagcatgcggggatttggaatctccacatacttgggataccaggtaagacagtagttagcacgtagagttaagcgtggtgacgctcatatttgatattatgattgtaattaaatgagggacttggattaaggttattaccctaaaatgtgcggttatattgcctagggttagtactctagtgattaaatgattttgaatacaataccatgttttatttgttgaaataaagaattatgcattcaaagcataattaggttagactcggtaattagaactgaaataaactattctaaggccttattgtaaatagacgtgtgagcgtaacacgtgggtctatgctatatagacataa

SEQ ID NO: 254186 - DNA, 673 bp, Cannabis indica
gattaatttgtggtataaatattaaagtttaatttctggttgcaaataaatacttaaatttaatttttagcggtaataatacttaagttttaattctaaaacttttaaggtacctagatgttaagtattaagtatattgccatgtatcaaaatttgattggtttaggtcattaaatttttattattttaaaaaaattagtttaattatactaataagaaaatgacacgtggattatgactcggctagtacctacatagttccacatatataatataaatatcgggacacaattttatcccgtgatgtactttcatggaatgtattccgtaatgtacgacagacattacatgggggagttatttgatctaagggctggggttgatctaggggtaattagggttaaaaaatggtaacgtaccctgagactcatctaatgtaccctgagacccatctaatgtaccacagaatacattccgtgaaagtacatcacaggacaaaatcgtgaagatctaatggctgagagatgctttagaataattgtcttttatttgatcatgcaaaattaccataccacacatgacacattaaagcactctataaattttcttcatgtttctcaaacttgcatgctatttacataacgctcctcatttagcttagttttctctcttg

SEQ ID NO: 254187 - DNA, 532 bp, Cannabis indica
atatcctacaaaattttaaaaaaccaaattaatttacaatatagaaaaaagtgttcaaacaatctattttacacgcgtataaaataaaatagtcacgcagttttcagcgtgttaaactttttcgatactaaaatagtttaagatgtattggtgcattacataattttccattttctatataaatcttaatttaaatttgagttagacattaatttaattaaataatcatactttataataaatttattagttatattgtttaaaatatctaaacttacttaattattttattatctaataaaattagttaaatataaatttaaaattagattaaattttatagatttaaaaaatataattaaattatattaaattatatatttgataattgagtatttttttttgtgaggaaagtacttgttatatttgataattgagtatacattttaacaaataaacaaacatcaataatttagacggattatatagtctatcgctgatttttttataaacaaaacgagcaaatcataaa

SEQ ID NO: 254188 - DNA, 900 bp, Cannabis indica
gagttgggctagtatgaaatcatgtttagccccgaacagcgattatgggacaggccttagcaaattttgtagtagaatgtacgggtaaaaaagaaaacacttcaaaaaacaacctggagccagtacaagaacctcagccaagcaaagacgagccaacctagaaattacatgtagatgggtcggccacagaccaattgtctggtgcagggattgcccttgtcacacctggggggcaacatctacacgaagcagtcaaattcgagtttagggcttcaaacaatgaggttgaatatgaagcccttattgtcggcctaaaacttgtttgggaactgcatgccgaacacattgagatctgtagtgactcgcagttagtggtaaatcatgtatctggagagtacgaagctcggggagaaaagatgatagcctatctaagcaaaatgcatgacatgctcgcacaattcgaaagctatgccctcaagcaaattccaagagaagaaaacacaactgctgatgcactagcctgacttgcgagcagtaacataaatgataaggctaatctaatccccatcaaattcctagaaaaacctagtatcactggcacagaggagattgaaatgattgacacatctccaaactggatgacgccaatagtagcctacctcaacactagggaactcccagataacaggaacaaagcttagaaaatgagaagaaaggctgtatggtacacatcgtagatggagttatgtacaaaaggggattctccatgccactactcagatgtgttacacaagaagaagttgctcgacttttgtccgaggtacacgatggattttgcgacaaccctgcggctggctagagtttatccaagaaaatcctaaggcaaggttatttctggcc

SEQ ID NO: 254189 - DNA, 2330 bp, Cannabis indica
aaagtgtgtgaaaagtgttttgttagattttaaacttgggtgcttttaaaatcactttaatatgtttggtatatgaaataaatactcacccaacattttattttgagtaaaaaatgagtttgtatagtgtaggaatgaaaagcagacgtttatagctattagtatacaactttgttggtatcacttctttcttcaactctcaatgaaagcaccaaaatatttactgagatattcaaaaaccaataaaatataataaacaaagaatggaatcaaaaattttacgtgattcaaggattaatgaccactaatctacgagttaatattattataataagactagaaaaatctatatttatagtgttagggttctagtatgtatgcattgtctattgatgggataaatataaataatacattgactttgggctcatttggtgaaacccaacccatgagtacattgatgttctactaactactaacgtggatgccacatcacgttaatagttgtcaaatcgtgacttacttttgtagataataaagacacataaatgtttaattgataattactttattttcttattcaaaagatacgagtcttgggtatgatcctaaaaataaaactatcgtattgtgaaatttgacaataaattgatgtgatcaaaactggatatcagaatgcccattaatcacccatcgaaagatctgttcgatgccatccaaagatacactataccagaggtgtatcttatttggacaagccatctatccaacattcgaaagacttgacttcgctaatagatctaatttattattttagttgagtctgcgattggcttagaactactgagttgaaaccattttggaattacatgtgtcctccgtctaaaaacacaaataacattatcctaaaattaatatatgtgaaacctgtaccaataactaaaagccatatgactaatgcaccttaacaagatatataatattatataaaaagaggggaggggagaggatagtcctccgttgccagcaaacaactattttataaaggtaaataagttcttattattgctgtttataatgaaccaaacaaaaaaaaactgcacaatccaaaagacagaatcttacagacaccaaataaaagggcagaaaacgcttaaacaacacaagtatatactaattattatccatagatagctgcaggtccaaccaacgtgcatctcattcaccaatcaatttatgcacagttgaaaggttagaatgacattcaagtaaggaaacagtgatctcccttgcatattgccctcttttctcacatcaaaagaagattttgcttttgttgcaaaacatttccaaaatagaaatcatatgcctgccagccaatgtcattgcagcagctatcagacttcacttgtataaatcttccctgaaaatactcagaacgtaacgcctctacttttggggttcataagggtccccaaacttcattccatgtagaacaatgcagtcatggaacctcttctttctttttcaaacttaaacagaacatgtcctctcctcagcacagctgccaagacatgttgagttgaaacaaatatcgtatcttttaaatgacaccagtccttgtatatactctactgcttaagaggctttaggtcaaaggattcgaccgcttaaacttgggaacggttaaaagcctcaaatgcaggtaatactatctaaaataggtagcctcataactgcaacagagaactgagattgattgcagtaggcgaccaccaccacagggttctatttctatagatctcccctacagctaactttgcaaataaaaaaggaaaaactaatactaaaactacacagataaatcgtacttcaacttacttgattcacgatctaatagttgccttcctagtaaactttcctgatatttgcaacagttttagttcattcaaaggcaacccatagttcttgaggtcaaaataaaagaaaatgctcctgcagctgtagctagattaaaaccatttcatcatcattaaaataagctcttgatttaatcaagcatcaacttctgtagctatatcagatttagtctctgcaagggtaattataataggttgccatcctgaatggtgatgattaatccattttttcacaccaattatcaaattcaagacctggagtgattcgcccaaggaaagctcttccaagcatgattttctaagaattaaagctgcttcatatctgtaaagaaagcaagatgacataattttatggccagcttatactcttagtaacttaaatacctacactctaaatgaatgctaagaaag

SEQ ID NO: 254190 - DNA, 1084 bp, Cannabis indica
gtgtattaaaactaaaacataagagggttttgccacaaaaaaaaaagataagagggttaagtgtattaaaactaaaacataaggaagttttgccataaaaaaaataaaagagttaagtatataaaaattaaaacataaatgaatttcgccgtaaattactctaataaatattactaaagagcgtggtgccgcagaattgcaatgctcttctgtgaagtgaagccaaacaaacaaggcataaggcagtgaagtgaaccatcaaatacagcacgtgcttcacaatgcgtcgttgattgtcttcaacataacacgaaaatatcgacggctgagattgaatcccttcttcttccttattgtcgagtataaaagcaccatcaccaagcttcctccttctcaacctactctgacatttgagactgagattttaccctctaaaaccagatcgattctgggttttcatttttaatcaaatttctttgcaaacaaaatgcttctacgaagctcgtcaactccgattttgaatcaatggttttcgtctcagtcaaaggattcgtgttcagaggctgagatagctagccatgtacccagaaaccgttccatatcactctccctttcatcttcatcctactcctcaccttcttctcaatcgtcgtattcaacatcgccggccagggattcatctacggcgaagatgacacgggctttctccgagaccgatctccgggacctctcggtgccaaagaagaagtcttacgacaaaatccttgatgggttttcagaggaagaggaggatgacaggtgttatgggcttaagtgtgccacgacggcgccattggataatggggtgggcttattttcgagctcgcaaaaccaagagtcttatattggatccagaggtaatgggttggtgagcgttttggtaggaggtggaattggtagtggcggtggggaaaaatctgtggtgggggtggtagtaatggtggatccaaacggtggagatgatgggaattctgggtcttggggatttcgggattatggggactgatgtgtattatcaaaaaaaatagatcgaaagccgaaatcc

SEQ ID NO: 254191 - DNA, 773 bp, Cannabis indica
tttggttgagcatgtttttctaatactagaccatataataaacacaaatcagagtttagatatgaaaaatgtaccttcattggctatagtttaaaacacaacggctataagtgtttggcttcttcagaaagaatttgcatttttagagatgttttgtttgatgagtatactttttccattgctaatatctctaataatgactgttccatgctcatgtgtttcaaatggtacttcctttataataccaacttctcgtcaagcaccaccatcaccacctattttctagaattagtaacctgctccttccgatactagtgtagatgaatctttatcagttgcaaatttatcatctatctgtagacacaactaatcttgttggttcataagatctctcatctacatttgctactgagccaaatgagcacaacacatctgtttctgcatctaattctgtagagtagcctgctccaatcacaacataacctgcaccttcaccaacaatcacccaatggtgactcgagccaaagtagctacttataagccaaaagttctcctagcttctcaaacagctcttacagtggctactactctcaaatctcataagtggaattcaactatgaatattaaaatagttgctctgattagaacaaaacttaggttcttttgttattggttacaaatgggtttttagggaaaaaaagaattcagatagcatagtagctcaatacaaagtaagacttgttgctaaaggttttctctaacaatatgactat

SEQ ID NO: 254192 - DNA, 491 bp, Cannabis indica
aggaagatgggcccaagaattgctcggcgtactttgggccaaccgaaccacgccgcggactagtacgggcgaaaccccattctcgcttgtatatgggatggaggcagttatccccacagaaacgcaagtgcctactttgggatccgagttaagcaacgaagacaacactttcctcagactacaagctgctgacgacgccgaggaaaggagggagcgcgccttgtcccgaatgcaaaattactattctgcggtggcaaagcaatacaataagaaagtaaggccaaggaatttcctcccaggagaactagttctcagaaaagtttttcagaacactgaagaagcccgagcgggaaagttgtccaccaactgggaagggccgtaccgagtgataagcccgacgagacacggggcgtacaggctgtccaccatggacggaaccgagatcacaagaagctggaatgcaaggtacctcaagaaattctatgtataaa

SEQ ID NO: 254193 - DNA, 549 bp, Cannabis indica
ttttaatgtcgcttttgaggtgtctcattaaagaagaatccaaactcctcatggtcgaggtacatgagggcttttgtaacaaccatgctgggggcaaagcctctcaaagaagatattgagacaaggttacttttggccaacaataacagaagactcgatggactatgtcaaaagatgtggcaaatgtctgaggttctcccaaaatacgtagggtttccttgaacgaactcaagagtatgcaaacaccctggtcattttctatctggggaatcgacctcataggttcgctacctaaggaaaaaggcagagttcaatatgcattagtggaggtagattacttcaccaaattggtcgaggcagagcccttagccattatcacgtcaaagaaattccttgattttgtggtcaagaacataatttaccactttggactcccacaaaagatagtgtcagacaatggaacacaatttaaaagtgatctctttattgatttttgcaccagacatggaatcattatgagtttatccgcggtttcctgtccacaagaaa

SEQ ID NO: 254194 - DNA, 680 bp, Cannabis indica
ttaaaaaaaaattgttggtaacctgtaatagtaggtcaccaaattgccacctaatcagttttttagtacccattaataggtattacccatttagaaatcatccatatatatatatttaaaatactatataaattaacatttaatattttaatgtgaaaatagtaatttaaaaatctaatacgtattgcaatatgaatatatttcacaacttcattgatcaaatacatattccatttttatttataaagagaatataatctaaaacaaaattaaatatttctttacacatttattttttaaaagttattttttatttattttaatatattgttggagacataaaaaaacaataatttaatttattttattgttaaatgttagctatgtgcaaaaatatatatatattttgtaataaatattaaataatttaatattaaaatgtaacaaatacgaaataacttatccaatccacaactttacaaattggaattaattgagtttgatctattatgtagattggattagattcaaattatgaaattatcacataatacaattagatatactatgagcaaaatagtgtgaattagattgtataaacatttctactaggaactacatcacacacatatgtgaacaaacacacatatttttatctttttatagatttaatcacacca

SEQ ID NO: 254195 - DNA, 527 bp, Cannabis indica
tgtttaaacaacatacttgtgagtagatctaagatcctggtagaataaattccaacacaaaggccccagctaaagcagcataccgattgtctcccctagaagttaaggagttgaagaggcggctaacagagatgttggaggcaggattcatcaaaccatcaaaggcaccttttggtgcccccgtgttgttcacaagaaggacagtaccttgagactgtgcatagactaccacgccctcaacaaggtgactgtgcacaatagataccccatttcccttgatggctgatctgtttgactagctaagtggagcaaaatacttcacgaagttagacttgacatcaggctactatcaggttcagatcgtagaatgggatgaaccaaagactacttgtgttactcgatatggggcattcaagttttgtgtcatgctgtttgggttgacaaatgcgccagccacattctatacactcatgaatgaagtcttccatgaagacttagaaaaaatttgtggtggtgtacctagatga

SEQ ID NO: 254196 - DNA, 784 bp, Cannabis indica
aaaaaaaaataaactaaaaactgaaagattaattatttttcaacttttcggtagataaggtcattaggtatgtattgtgtgcactatttaaattattacatctgtttttgtaattaatttgaacattacgtatataattaaaatatcccctattatataagttgaggtacaaaaataatttcacagagcacaaaactccaaattcaaattgtatatattagtataatcattgacaaaaaggaaaaaaaaaattaataattagattgacctataaaattaatatttggatatcaatttcatgtgattgtgtgagtgacaaaaagttagaaaaaaccaaaaaaaaaaatatatatgtaattgtttggatattatgtcatatataaaactcatttcaatggaattgtatttgttttcatcaggccttcttataaagatgttctttgtcttgtaatatattattaaagtaatgaaattaatgctgattcacttaaaagaaaagatcgaaaaaaaaaaaataacaatcaagaatacaaaaataaagttttcgtatcatatgttgaaaatggaaaaaatacgtgtatatatatacagtaggaaaattttacaatacatcccttgaaaatagatatattgataaacttttattctgttttagtatccgaaataattttttggttcaaattttttcttcatagtcatgtacgtatgagttatttaagacatcctgtaaaattttaagaaattcggaaaagtttaacaaagtcgaaaactacgttcaaacagt

SEQ ID NO: 254197 - DNA, 713 bp, Cannabis indica
tcatctcggcgtgactactagtgtattcagtatagttgactagaactaatcttggtcaaagttacttgttgcttggaaatcatcactatcgggtatcaatcatcattgaaagtctgtttccataattactaggggcattttaggaaggcgtgtacgatccgttatgcattccccgatcatcccgtcgtgagtactagtggattcactattgttgactagaaccgatcttggtcaaagttactcgttgtttgcaaatcatcactatcggtatcaatcatcattgaaagttgtttccataatgactgggggcagttttaggaaggtcatctactatccgttatgccattccttgatcatcccagcttgactactagtgggttcactatagttgactagaaccgatcttggtcaaagttactcgttgcttgcaaatcatcactatcgggtatcaatcgtcattgaaagtccgtttccataatgacttgtggtgttttaggaaggcatgtacgatctattattcaaccacgatcatcccagcaagactactagtggattcactataattgactagaaccgatctttgtcaaagttactcgttggctgcaaatcatcactcttgggtatcaatcatcgttgcaagtcagtttccataatgactaggagcgttttaggatgccacgtgcgatccgttatgcattcccgatcatacatat

SEQ ID NO: 254198 - DNA, 579 bp, Cannabis indica
ttttgcatggagtagctatactcattgcatcataccgccatttgatagtatacaatcagactatcaagctttttctctttcattctccattccgtttgatattttgagcttagggtttgcattttcttccttttcttctttttcttcttctccggtgtgtatgggaagccattgtcattcgaagctagcttctattttcagttgccgtgagttcgtgtgctctgtttttagtgatcttcgagatcagcttcttggttaagtgaggtatgtgatcaattcttcataatatttgttgtaatgtgtttagttttagtgattttatttatgtattgtgatgtttgttggtttttttttgtttttttgatgattttccatgatcggttgggttttttgggtttcttgttgtttttggtatgatcggttgggtttttaggttgtgtttggtgttttggtgtatgttctttctaattttttcaaaatgtgctcttattttggttgttgatcactgttctatttagtttttttttttcgttttaagtttgagtttgtgttgattttgttgttttctttgttaatttt

SEQ ID NO: 254199 - DNA, 727 bp, Cannabis indica
ctcgatggatatctcaaaggaaccaagccacggccaacagagttcattcatgcacctgctggtgcagatggacagccaggatttggactcgatgttaacccaaaatttgagcagttgatagttcatgaccaacttctcatgggttggttgtatggatccatgacagagaggatagcaaccgaagtcatggggtgtgactcttcagcagcattatggcaagctcttgaagccctatatggagctcattctaaggcaaaaatggatgaatacagaacaaaaatccaaacagcaagaaaaggatctcttagcatggttgattacctcaaacaaaagaggcagtgggcatatgtattagcccctgcaggtgacccctatcctgaatccttacttatttctaatgtcttgtctggtttagatctcgattacctccctattattctccagatcgaggctaggccctccactacttggcctattttgcaggatatccttttgagttttgacagtaaaatcgagaggctgagtgccatctcaggaatcaacaagcaacccaacacttcagcctcaccaaacgcaaattatgcaaacaaaactccccactctggtggtcatcatggttattcaggaggcaataacgattctggttataatggaggtaatagaggcagaggaggccatcacacaacaatcgtggaaggtcgaacaatagaggcagaggaggaaggtc

SEQ ID NO: 254200 - DNA, 746 bp, Cannabis indica
aatgagtaccacacaaacaaacaaacagtggaaacagctcatgtgaattgtgatgacgtgtaaataaaagcgccgctaaactccgcgtatttgccaagtgttatctatttgggtttgcctaacataacaagttgagttgagaataataccaattatcaaatatactagtgacctccctgagatcctttgtcctcagcttctcaattcttgcacttcattattattattttatttttggtgtgctaagcctaattacattatctttctatatagttggtttattactaattaaataataaagtcaatttatgatatgcttatttttaatacgtttttactttttatgttgtgatttaaattatttatgaatttataatgcagaaatttgtaaatattcaggaactttcttaaattagaataactcgtcatgtaactaaatgatatgttttgtcaaatcataaattgttaaaataagtgagcaatacaagacaaaactccttaaaaaaattttgacaataaaattataacattctccaacaacgcacaccaaaagagctagagtttcagcttataacatcaaaaaactacctctcaaagattagccatgggctccatcctttggatgacaaagtcacctagagctcttctgttttggttagtctcgtagaccgaggaggattagcaccattcagaggatttttctagtttctttcttggggtatgtcgattatctacgatgacgattg

SEQ ID NO: 254201 - DNA, 566 bp, Cannabis indica
agctgagatgatcttcttcttgaactttactaactaacattcttcattaatcagcagtgtttaatcaagtcgtctgtagtcattccggggccttgggcgattaaaatatatagagctttttgcaacaacaaaattgtgttttttttatattaagcaataatcactaagaaattgcatagaaattagaatttaaagaatagtattttggtaaaaatttgtaaaaaaaaatagacttataaaattgatgttttagctattaatgttcgttaaatactatattaatcaattttttaatataaaaaattcaaaataattttggagtataaaaataaagacaaatgttaattaatgtataaatctataatagaaatttaatttaaaaaattactacataaacgactatttgcagtttacaataaataaacaaattaataaattaatgtgtagtgtttcattttaaatgagaaatttacatggtatactaacttttgccattttcttacaaaaatattgctaggcagtattttttacttttttacttgtatttttttattaagtttctatac

SEQ ID NO: 254202 - DNA, 641 bp, Cannabis indica
ataaagttttagtacaaaaaaatttattatagtcttttagttaaaatatttttttcttaaaaataggttgtaacagctttaggttttagttgtagcttctacataaattcttcaaaaagttatttttttgactacttacaaaacacatttttatcacagcttttttaaaaagcaacttttagctttttcaaagtttgccaaacaggccctaagtaatcttaaacactcttttgtattctattcctagatgatccctgtgggtatcccctttagttcatgccatttcactagttaactggtggttcttgatccgggcttgatgtctagcttcatgttgactcttatggatttagtgaatgggcttagtttccttgatggcatctacaatggatcatatattagctaatctagaaacacagataacatttaccccaagcctttatggcttgagagtcacagaggcttgcttccttcatccaaatgtgagatcgtgtctggggccattaattgagtcggcttcttaatattctatcgtggaacattgtggaaatattctaaactcttggtattatgttggtgtagtccacatgtcaaatgatcgttggtgtgtgttcctcacatggtctattggagcatgtagc

SEQ ID NO: 254203 - DNA, 1012 bp, Cannabis indica
atttattacgaaccacaatcgaatcattaaacaataaactaacagtctaaattaatcagaccacccaaaacggtcttgccagttatagtctacaactgttcggattgtcagattgttgcgatccgaatttaaaccaaggtttaatgacttctatgagcaaccctataatctacaagcaacattaaggtatttagggttgtttatataatttgtaacctatggtattaattcggactatattatttgagaccggactaaataaagtttatgtgtaacggtttggtcaatttagattgtttatgattttttggttcggtcacagttttaaaattctcgataacgattcaaaccaaaccaagccacataactcttttagatatacttaatatattttatttagtgtaatattaatatttgaaaacaatttttgtacactgtaattatctacttattagggtgctagatacaataatatttgattaaatttaacttaatttggaattttttttttattgatgtattataaattttgaaaactaaaattttaagaaaaaaaggaatttttttttaaaaaataaaataatcatgaagttgagagttatgatcattttattttttctctgtcttttctctattgaattgttgcgaatggtttacgggtgtgtgggctttataacttggctcattgcgtatttagattgaaaagtttggaatagaaagttggggtttcactcgtgttgattgctctaatagattttctgtggcatatttcatttgagttagtagaaatttttgtatatttgaaaattattcttatactgttaaacatattagggagttgattaaacatgacatataaactagttttaattgtaacgaaaatgtattattgctaatattgtaaatagttggtacttggcagcgtttcattttctcctatcataaaaataataatattaataattatgaaatacaatatacattcctttgttcttaaatggattgtcatcag

SEQ ID NO: 254204 - DNA, 824 bp, Cannabis indica
tagtgtggaagattgtgaagaatccagattcaagagaaggacaatcgtgctcagatcttggtgatactctgcgcagaaacgatacaagggttagaaatctgagtggaaggagacattatattctgctgcaaccactgtaaggtttcttatactttatatgaacttatttgatatcattttagaagttcgtatttaggatgttaaatgacatacttgttagtaaatctaagatcctggtaaaatattttcaacaccatgctgggggcaaaccctgtcaaagaagatattgagacaaggttacttttggccaacaataacagaagactcgatggactatgtcaaaagatgtggcaagtgtctgaggttctccaaaatacctagggtttccttgaacgaactcaagagtatgcaaacaccctggttattttctatctggagaattgacctcataggttcactacctagggagaaaggccgagttcaatatgcattagtggcggtagattacttcaccaaattgatcgaggtccttagccattatcacgtcaaagaaattccttgattttgtggtcaagaacattatttaccgctttgcactcccacaaatgatagtgtcagacaatggaacacagtttaacagtgatctctaaactgatgtttgcatcagacatggaatcattataagtttattcgcggtttcctgtccacaagaaaatagacaagtggaagcagttaaccaaactcttaaggatacactaaagaaacacctagagcaagctaaagggaattgacctaaagaaatgcccgaagtactatgggtttat

SEQ ID NO: 254205 - DNA, 708 bp, Cannabis indica
atttatttataaataaagttgggatttaattaaaaatatggatagaaatcttagaataaatatactcttgatcactttaatttggaaaatacttgcattaaggttttttttaagtaatttatttatttatatagtttgtacttggtatacttgttgtgcttgactagataagagatcatatcaacataatttgaaccaaatagaacacaattaagtgaattattgccatatctttatataaacgatgatgaaataaaatttaaaataaaagtgaaacctaaaaatatcatgtaaattaatggtactttgttcatatatggattttcgcttgatacattttctaaaaaataaaaataatagtgataagatcatctgatgaatgttttatctttacaatgagacataattgaaccatatcagtttttaatcaaatccaatcagttaaaaacaggaagatggtgatgataaaaatcagctcaagctattgtgtattatttattatatagccactaagcaactaatagtacaatctagaatatgaacacctcactccaaaaaatacagataaaaagaatattctctctcacactaataactgaaaagagagagaaatataattgtcaaatcatgcaaagaataattaataaagtcattaatactaaatggtaaatggtaaccagtaactggtaataagtaatgaatatattt

SEQ ID NO: 254206 - DNA, 539 bp, Cannabis indica
ccttctcttttgataaggaggttcgaaggcgtatcataccctagtgatctttcacgcacagaaatactacgtgcatgcaccatccatgcttcgtgaaggtttatgggatgcgtataaatcaatttgctctaggatcttttggtagtcattcactcatggggactccaaggaacctggtagttgtcaaggcaaagactcggacttccagcaaggcaagcattactccagtagagatttcctaattggtttataatgtcttgagttactttctttgatttaactttaggggttaaaatttcatcaaaatgataggaatccctgttagcaaccttcaccagaagtgattttcctaaagaatacgcttcttaccaatagtaccgtaatcaagcctaattagaaacatagcaaacatcagtgatatcaaaggtaaactcccaaccattttcattacaggatcctgtaatgttagtttctaattaacttcacggctcagtgaaaaggcattggaagtagttttcatcaacggatctagtcccagc

SEQ ID NO: 254207 - DNA, 673 bp, Cannabis indica
catgtgtggcgcctgcaagacatttgtcctagaccgtatggtccccagacgtacgaacgcctttgccccacgagccagaattctgcgagtgggcccaaattcatttatttcatgtatttaccccaatattagacctagcttacatagaaaccctaacggatcacaagtattaccagatctagatcgtagcctataaatacccctttatactttcatgtaaggggggacaattcacttcacttcattttaggttctcttcttagagaagttagaaaaaccttagggagaaaattagactgtgaacaacatagcaagaagctagggttcttaagcttgtaagatcccattgtaatacattaagccatttggcttaatacaattgactcatggactaaggttaattaatacttaaactgtggaaaaatctccatttccatgtgcaacaaaccatttgaaccttgacgtgttaaattttttaaaatttcttaaaattttataaaatgtcttaaaataacaataacgtacacaatcataaaaaaaatactaatataaaactgcagattgcttgacttaaagtttgttcagactccaggtttctcatttttttattgacaaactaggtgtggtctctaacccacttaatttgagaagaggtattaaaaaataaatttta

SEQ ID NO: 254208 - DNA, 1117 bp, Cannabis indica
agcttgaagatgaaggcccgatgcatggcccgatggtccgatgcatggcccgatgtagggcccgatggtctgatgccattttggatttttaaatttttttctatttataggactggcccgatgggcccgatgtagggcccgatggtcggcccgatggtcagatgcccattttggattttttttaaattttttctatttataggactggtccgatgggcccgatgtagggcccgatggtcagatgcccactttattttttttaattttttttcattttataggactggcccgatgggcccgatggtcagatgactggcccgatgggcccgatgtagggcccgatgcccactttaatttttttttttttttataacaaagagagaagaagagagtggggaggcggtaatgtaaatgggggtattttagggatattctaaaatgtgtcatatcccacaaatattaaatgttatgtgttttaaaaaaaatattaaatatatgtaagtatagaaaatcaaatttcccttttctaaatatatatatatgaaattaaataacatttatcctatagaataatgacattttgtatagttttttgtcctataaaaatcaatattacaaacatctcaatccactttacattaaacttattctttaaacaattaattgatgtagtattatgatgttaatctgactcataatgctcacatataaaaaataaaaacataaatagcaataataaattttgaaaatatatatatatatttagagttaatatttatatacttaatgttaataaattatattttaaatagtttcaaattattaaataaactctcatactttatatatctcatgtccatagtttcgaggacatttttgcataaaaaaaataaggcaaaattctacatggtcaaaatcctatttattcttttattttaaaaagtagagaaacgttaaaaaaataatccgcaccatataatttaacaaaagaaaataagcttagcaaataggaatgctcttacaataattaattcaactaaatacggaattaattaataactaaatcgttaattaatgtaactaattaataaataacaatcaatctttgcaaatccac

SEQ ID NO: 254209 - DNA, 591 bp, Cannabis indica
tggaaacccctagtaaactttatccatgacattgtttaaattgtgaatgaaacgcaagcaaacatctgcacgttaaagtttaaacttaaaaatatgatgcattaaaaagaaaataaaaaaaaagcaaagttggccaaggggccattttcttaaagagaaaatggagataaataaataaccaagtctacatgctgggagacttggacagatctttttcttcttcttccccgaacttgccatcttcctcctcactcctggtgttctcacaaagggctaaagtttcctcttccttctcctccaagaagctggtgtccatattagggttcgccatccaggcccgatatatagtgtgaaaaccaaccttgtcacaccattttacggtctcgacttctatttcagcaagcttcttctcaaactcatcgactttggctttgacggtcttctcggcctcctcctttgccttcttggcttcctcttttgccttctcaacttcctcttttccttctcggcttcgtccttcgctttctcagcttcttgcttaaggcgggtattttcctattgggtatcatcccgatgcttactcacaacctt

SEQ ID NO: 254210 - DNA, 591 bp, Cannabis indica
gggactttaataatgttatggattagatggataagagaggagaagtgccttatttgtcgtggaggctagaagggtttcaatcagttatgagtaaggatatgcatcatacaaggagaacactgagaagaagaatgacaagaaggttgctcaggaggcaaagcataccgtatatggcttcgtacttgccatacaatattggggatatgaagccatagagaaagtgggaaataagtatgatgattgtagtgagactaggttccttaggatgataaactagaaaaccaaggagggccagcaaaacaggaaagcgagtgacattgcacaactgatcaaccaaagggtaagttcgtatatttgttgttgatattttaatctattttgagtttgcgacatagatcaatgttagtttgggacatttaacattttttatatttttatttacagttggttataaagaagtgcttatgcccccgtcctagtgaggatgagtattttaagtccatcaatgagggtaaagcccctttttgttttaagatggacaatgatgagatagtggacgatgatggtacatagaattgggtgtttcaaatg

SEQ ID NO: 254211 - DNA, 1068 bp, Cannabis indica
attattattaagatttatcttgataaaaaatcaattcaaggtcttatttgtacaattttaaaaaatatagagtctattttatcatttaacaaaacaaagagtaattaataacttttacaaaacataaggtccaaaatagtatttactctaaaaaaacacacatttgcttatacaagtgtcttttatttattatataaaaaacagacttataatttttttgaaattattaaaatttatatataaatctacatttaatttgatacacgtgtgtctcccagcaatatatatataaatagggcaatcatttttgtccttattagaagggaccttttgttttctttatatagagaaattttaattcaatttctttttcatatgatgttgtaattatatcattcatttttctaattttcagaaaatttaaaataatttatgatgtgaaaagaatagaacaaaatcgttagttacactcgtattaagaaatttgaaaagtaacacgtatgcaactaattggtcaaatattatttttaacactctaaaatttgatatgttttcaaaaagcagtggaatgaaatgtatgctataattgtaagatatacatcgtcatcaaaataaatgaattattatttctccacatctccaaagtaaaaagttcctagcaatagagacgaaagttggtgtccttactgtaatcgatataaaagataaaaatttgagcttaacttttatcatgattagggaagcatgtgaggaatatagtagagaagtggaaaaactagctcacaagatgctggaacttattgctctgagtctaggcttggcagcaaatagtctgaatgtgtacttcaaagaccatcaaactacattcatgagactcaatcactaccctccttgtccctctcctaccttggcacttggtgtgggtcgccataaggatggtggggccttaactgttctagctcaagatgaggttggaggattggaagttaggaagaaatcagatggagaatggattcgggtcaaacccacccccggtgcttttatcatcaatgttggggacattgtaca

SEQ ID NO: 254212 - DNA, 769 bp, Cannabis indica
tatatgtatttctaatttgaaatttgtgtagttttaatattattaatttattatttaattaatcatgtagaataataaatatggtattgaaatagatattttgagctacaaaacatgattccgtaactttagaataaaaccagccaagaataaaagtaactaaaaaaaaaaaaaaacaggtttttatacatggtattaacaatccttgaaaattgttactagtacacagatcaatgcccaaagataagattcattaataagatatcaaaaatacaatttttttaacttatgcataaatatactccatcttattatatgttgctagcttgatgtattccaccttcacgaatgaatcttgttgaaacttcaagtgttcgaactccatttgctttgcttgaagagtgcttgtttatttctgaggcaagacttgaaacactttttctcgaaagcttgaagagccttatcccgaaggcttgcacttttgttcttcttctttattgagttgattacagactcaaaataataataaaaacatatacacagaggcagagtcgaacatactctcctctacaaaataaagactctctttcttacaaatataaaatgaaatacaaagagattaaagagatggaaaatctaactattaatatgagtatttatagagattatactcatatgatacagctaatactcggactaaaacgtccacaactcataggaaaattttcttaacaaatttcttcaagtagcccaaaatttcgtattctgt

SEQ ID NO: 254213 - DNA, 673 bp, Cannabis indica
tgtatagccctagaaaagagaaaaacaaaaaactatgtaactatgagagaattttttccttcaaaattaatccaattcatgccaatttaccatgttttctgttgacagcatctttttatttattttaccacgatttcttctcttatatcaggccatggcaattaataaagctaacgtccagtgctcatttttgttatgtgatgtttccaaactgcaggtcttataatgttaccctcaatataggccaaccaccaaggccttattttctggatcctgacacaggaagtgatcttacatggctccaatgtgacgctccttgtgtccactgtactgaggtaaatcagattcaaaactcttcctgcaatgccctctaaagtttttcaaacaagtttcttgaatgattgtgattatacatcagattcccaagccaactccttttttagctctcttacaaatttgcaatgtcatgtgtgtgtttgttttcatgtcatcatgaaagatttttgaaactttgctatttacactggtgtccaaccttttcaacagtttggattgtcgaaaaagtcatgttacactcaaatcaaaacaattttatacattttgaattgtagttgattacaggttttaaggaaatcctaattggcattggttgttttgctttgcagtcacctca

SEQ ID NO: 254214 - DNA, 524 bp, Cannabis indica
tttttgccagtgctttttattttgtgctggcaaaagttctaataccaacgttgatttgccaaccccttttgccaacacatcagaaataaattctattttaccagcacaataccaaacttttgccagcacattttttacattttttgtagtagcatatgcgtgtctataaatttgataggtttccaaactatataatttttttagaaataaaataaacaacaaaataagttaattaatacagcctaattaataatttttttaaaaaataaaattatagtatttaaagtttaactaatcaaaataagtaactaaaatagtgtatttgaaaaaattaatcttaaaataatgttttaagtttgaatttagttttttagtggcaaaattagttaataaattaactaaggaaaatttagattttactataccttaaaaaatttaaaaatttttacttttaaacctaatacattttacactacaaaaaataatgacacttttttctaaaactccaaaaataaccccctcct

SEQ ID NO: 254215 - DNA, 911 bp, Cannabis indica
cttggcataaagaaaagtaaatcttgatacatacatgtcaaggcaataagaagatagccagggcaatcatatgtccatagtaaaaggctttaaggtttaacaatagtagtgtttgaaaacagagtgcctataggccaaaagcaagaacatgaaagccttgaagctgaatatgaataaaaaattacacggcctttcatattagtgtttgatccatccactctttaaattagtgtatctactgctcgaaggcaaagtttacagtttcatagctatcttactgatcatgatgaagaatgttggtgtgttcttacatctaccctagtgttgcccgaaaattctacaatttggtgtcatcaacggttgtccttcgaggatctataactgatggattttaagtaataagagaagtcaactcaatgtaggtactagtggttcaagtttcttgaatgcctatattgaaccccgccagaggagttgtcactgcttgtcctcctaattggggacctactggaggctgagggatgactggattaggatctgtcctaattggatctcatcgattcatagaagtttcaacattaggatccgtaaccattgcatcaattgtctcattaggattaccctacatttttgcaaagtcatatttgtgtatcctgcaaagattcaaaacaataaattgtgatcttttgctctctatgaaagtatcaaaatatctacctcaacttttgccaatgacaatgagtcaattaaagcgattagaaacaattaataataatgattaagaaactagaacactgagatttttatagagattcgaccccgtgatggtggtaatagcctaatcaccttttatttctattaacttgtgagaaaaagaacaaagaaattctgtatcttcctcgaaagctctt

SEQ ID NO: 254216 - DNA, 1000 bp, Cannabis indica
aactcaaaaacacaagttgttgaagtcctaaaaaaaggcaaacaaatctcttaaccaatccatgaatttgtttcgtttaagaacttgtcatctgacaaatactccaacaaaccacaaggtattttcggatctctacaagatagcacataacaaataatttataaaattttaactaacattgcattcaattttcaaatatcataggtttagctgtcaaaataaacccaacaaaagtggtcaacatagtttatggacagcagaccatacaagaattatatctaatcgataacaggtatataaaatataaaatataacatctaaatacataatgatcatcttcattataacacacctaataattaattatgaatttaaattgattatacatagcaaaacaataacgccatttctcttttcagtcaaagttgtagcttcaacccaacatgtttgactttttggggtgctttggtccaaaataatagtgaacaactatttgaagttgtcgaaaccaacccaataataatagaaacaaaactgattgttcaaactaagagaggtacttattatatagtaacaaacaccgtatatattgttaacaatattgtccactaatattggattaaaatattatttttaaataggattgccgttgtcaaatcgtgaatcaagtactatcgaaatcaatccagataatcctaaagcaacaacactacatgaatggtaatactcatacataaaataataagatttcatttaataatatttttaagagaatattattgaatgacaattactttattaactaatttaacattaaatttatactatcaagggctgaaaataacaaagaagcaataaataatattactattcaaacaccattttatccatattttccaaatttatttgccgcaaaataagaatatgtaaagaacaacaaaattaccgattttatgaagaaacttaacccaacccaagtatataaacttaaataaatatc

SEQ ID NO: 254217 - DNA, 1625 bp, Cannabis indica
agaatttactcaaagctagatagtgtctttgctaatgaggcttggatagaccaatttccaaacactgaagccagctaccgttgggggacgatctcagaccatagttattgccttattaaatcgattgaggttgctatctatggtaatagaccgttcaaattttgtaattactggatgctaagagaggggtacaaagagagagtgcttaaaagttggaaggatgtctgagactctaatctccaaaatagtgtgaagaaactctacagagtgaaacatgccttaaaaagctggcataactcagagaagggggacttgaaaaccttgtatatggagggaaaacaggagttcacaagagctcaagagcaacttgctagcaaccctgcttgccctattcatatgcagaatgacaaagaagcgcatcaaagttacctgactgcccaaaaacagtatgctagctacttacatcagaactctaaagtcaattggctgaggtttggtaatgagaactcaagctacttccatgccatcatgaagaagagaaaagcagagaacaaaattgtctcatactggaagggggaatcaattgttgaggattatcccaaagtagttgaacactttcttcaacatttccgtaactttatggggaagaaaagctcagctacaagaaggatagatgaggaattcttggattttgggaacaagcttgacattccccaacaaatccacttgatttggcctttctgcaagtctgatgtcaagaaagcgttatttgatattcactccactaagagctcgggtccggatggttttggctcaggtttcttcagagggttgtggaatgagattggtgaggatgtttctcaagccattttggggtacttccaatctggaaaaattccaaatgaactcaacgaaacaactatctctcttattcccaagattgatgacccaaagaatgcaagtgattataggccgatcgcctgctgtaacaccctctacaagtgtatctctaaaatgatttgtgctcggttctcagaagtgtttcctagcctgattcatgataaccagagtgcttttatcaagaatactcagctggctcataacatcccgatcttccaaaatctccttaaagggtacaccaggaagaatgtctcagctcaaagcatcttcaaaattgatctcagcaaggcatatgacactgttgattggaggtttatctctgaccttttaaaaggcctctgcttcccagccaagttcattgattgggttttaggttgcctccatggtgcttcctattccctaatgatgaatggtcgcacccatgggtccattaaaggggagaaaggtcttcgccaaggggatccaatgtctcctcttctctttgtgctaaccatggaatacctgtcaagagtgctaattcagagatccagcctgaaaggatttgggtttcaccctctttgtaagtccttaaaacttgtgaatctttgcattgcggatgacttgattattttttgtaaaggaaatgaaaattcggtcaggtatgttcaagaagcctttaaatcttttagtgaaactacgggtttaacagctaacaaaaataagtctctggcttattttggtggtgt

SEQ ID NO: 254218 - DNA, 653 bp, Cannabis indica
atgctgggtgagttgaagatatgaaaggctgttcttcatgaataagccaaggatcgcctaaaatgtcaacattaacccctgaccctatccgctttcgaatccccatcttgatcaagtccttagaagctaatacacttcgccaaataaagctaggattagctcctactttagtagtgagaaaatgaccatttggataatatcttgctctaaaaattcttgcaacaaggctttcttcattagttattaatcgccacccttgttttcctagtaaagcaagatttaaatcccgaagatctcgaaaacccattcctcctactcccttgtgtttactcaaattattccaactaagccaatgaattccattcttttgaattccattcttgcaacaaggctttcttcattaattattaatcgccacccttgttttcctagtaaagcaagatttaaatcccgaagatctcgaaaacccattcctcctactcccttgtgtttactcaaattattccaactaagccaatgaattccattcttttgagatgatttcgaatgccaccagaagttgcacatacttcttcaatatctttacatgtatcctgtggcagctgaaatacattcatggcataagatggtaaagcttgaactacaactttgat

SEQ ID NO: 254219 - DNA, 364 bp, Cannabis indica
caagttcctcatcttcgttcatgggctctagatgtatcctcgcccaatttttcaagcccagacacttatctttttttaatggctttcttttgcttcattttcaatgatctcggcaatagcttatttgacatcagcttgatcggaatgtatcttgcaagaattgtgagggtatgctctgatgaggagcaatcaagccaactcgcctgtggttctccatagtgactaaaccatccacttgcaacgcttttgagtttgtactgcagtgaaggttcaccatcttctccagaaaaggagctagctcaggacgagaaatatcatgttgaaggccagaaaaaggtaccctcatcagacttttaccaaaagt

SEQ ID NO: 254220 - DNA, 1506 bp, Cannabis indica
caatccactcaaaaaaaagtgggtatattttaataaaaaaacaatataagagtatttttgattaatggaaacaaaaaagaagtatttttcaacttatccccaggatccgacctgaattaaaatggattttacataatttttttttgtccttactataatgataaatagtacttttaacaattattaaaaaacatttttatatttggcccttaaaatgagtgggccctaggcgcgggattagcccgcctatacctaaggccggctgcgtatatatattttagttaattacaacatatatttttaaacaaaagtgatatttatgaatagggaattactaaaaggcaccactagtagcatcttcctcggttacatacttctattgatgtaattatatatcgagtttcatgtaacttaagaaaataatttttacgaaatattatttatcaatcgtagggcactacttatagaaagtgctaaggaccacaagggctcataagaatactcttatgaatataatacagactttgatataatagtaaagttattttatgaatatagtggagagtatttaaattttacttttttgaatttttactaataacatttgtatttagtgtcttaattattaaaatttaatatttttattgttatttttttatttatgttacatttaatattaaaatacaaattttttatttatgttatttttatttatgttacatttaatattaaaatttttaatatgttatacaatgtaaaaaaaaagaatatcacgtcacttataaaaaaaatgtcgcttcccctcaacttaaattttagatttgccactattagtggtgcgtaatagatactcattgttgttatatcgttattggtacaattgtattagattttatatattttaataataaaaaaaaattaaaaaataaatctaactaattacatagggcaatctcaaaaatgcctaataataatgctctctatatataaaaaatactaaagacatttttttttttgaataaaaaaaaatactagacattaattattagtataatcaaatatttaaattcatataatttaatatataacttttataaaaaaaaattactaacaatcacaatacaatagtaaataacaatacaaaaattttgtctgattgaattgaatagaggaaaattcaaagaagtgacatagaaggaatatgaatgtggatgtgtttgttgagtgtgacgtaagggaaggtgtcacctacgccattcatattccaagaagaaaggtcaaaccccaaacaaaactgactcttactgttactgtattattattattattattattattattattattattattattaagttagttataattattctatttatttgtgtgggcgtaattgctgactcaccttcatcagccttgatcgtcaagtttcactgctctgccacgtgtccactcctcatctgatacgtgtacctgtgtgtacatgtatgtgttcagtattaa

SEQ ID NO: 254221 - DNA, 1095 bp, Cannabis indica
tcacaagaaatgtgttaactttctttaatcatctccaaatgttttctgtaagcctctctatggatctatgtagacgatttccatcagatcttcaaacattcatccttctagagattttaattttatttattaacaattattcttaaacaaccgttcttgtctttgcacattcttaagtaatcaacaatagttatcatattctatgttttcccttgtgttttgtcgactttcccaattctctttatcacaattaacagttgcaaccataaccatatgaagtgaaactactacaggttaggtagaaagaatggcagtatcgtggttttttagtaaataagtgagaaatcattctttagaaactaatcggtttaataaataataaaagctaattaggaattttgttgatgaactttgacatataccaaattatgttctttgaacttttaaagttgttaaaaatgctcttgaactattgagattgttagatttaaatacttttctaattttagtaaaaaagtttaatatggatgaaagttcatggggtataatttagtttaaatgaaattagacaaaagtcctcaaatctaacaatctcaatatggggaatttttaacaacttaaaaattaaaagaacatggtacatgtcaaagtttaggagcaaaaatcctaattagccaataataaatattggaactttccataagaatcgttataacgggacctatgtagaaaaagagagaaaaaaagtgtgaacacaaagaaagaagtattcagttagctcattaactatcgttgtgcatttgtttgggaccttctagacattagtttatcttataatagttgacttggttctttcggttcaaccaacatatggggcaattcattaataaaaagaaaaaaaaaaaacatatggggcaaggtgaatatgatgggtgttttatatttggttgataaggatgaggactatgaactcttgtgactattcttttcatacgattcttccagtggttcttctttagtgcatcatcatcatcagcatcatattaatggccccaactgttattccttgttaaattatggaaagagcctgtatgt

SEQ ID NO: 254222 - DNA, 1800 bp, Cannabis indica
gaagccacctgggagttagagtttgatacgaggactcaatatccagagctattcaggttagattttgaggacgaaatccttttaacaggagaataattgtaatgactgcattagtaatttggactagaaaaggcaattagcactaatttctgatatttttataatttttttatgaatttaattatttgtgggccccattgctagaaataggcactatagttataatttctcaattttgaaattttattaaattctaggagtattatttgatttatatgtgaattatgtaatttttacaatttttgctcggcgacaacggaatatgcgatggattgctagtttaatcacacgggtaagtttggaatcttgtttcttattgggatatatatatattgaagaaaataaaataccgaggttgagcgggattatgatttttgaccattttacccctaggtttgaaatagcttaagattaagcaccaaagggcattttagtcattttaattaggggattaggtggctgtgtgagggtgtgacagctaccctttcttttcggttgagttagtgattgtgaaatgtattatgttggttaatgaaggagaattattgaattaagaaaattaaggaaaatacaaaattagagaactctctctctctctctctctttcattttcggctgaagcaaaaccatggggtttcatcttcaaaacctcgtgttttctaagtattaatcaagatctttgtgagtttaaagaaaaggtaaaccctagaacccttgactatgtgtttttagagttttgagtttgtttgagtatgcggatttgaaaattaggtgctgttaggatttgatttgtgtttgcttcgaattgtgagctttatttatattgattctaagctctgaatattatttttgatgtatggtaatataattgagcaagcttgacctttgaaactcaagtttaggtctttaatggcatgtttggtttctgtgtgttttttttgggattttcttgttggaatatattgtgtatctcctatttaggtactgtgaaaagtttggaggcaattggacaagttttgagcaaattggagattttttagggaagactggtagaaaccggttaaccgatttaccagtacctataaaaccggttaactggttttggcaagttccccaaaaaaactagttttctcaattttcgtccattacagtgcctttgatgggtgtttccctatttcctaagttaatgtaatccctagagagtataacagagccttgagttgtagactcaggtttcccgaattagggttttagacatgtgatttactcagttttaatatgtaattagggcatccatccagcacgagactttctgttcaggtcggccaactcacttgaatctgcaaaggaggtaagaactgtatataatgtgtgatatgaatatgcgaattcatgtatgtgttaatgtatatgcatgcttgttgtgattcatacactaccaacacttgtacggtagcggtacagagtgcattggtaaagtgtatgatgtctgaagagtacatcacggtgttaccagtactagtacagataggtacaaggtgtatgtggtacaacacttaacagtacttaaggtgcggttcatactctacctacactagtacgatggtagtactgagtgcatgtggtacattggtacatggtcgtatcttagttagaacgttcttactcatttgtaaagccttgtaaataggtgtatgggcgcctagatacaagtcgatattatgatatgttatatgcttt

SEQ ID NO: 254223 - DNA, 566 bp, Cannabis indica
atctaattattaaaaagacaagacttgatataaataccacaaattactcacacatgacaaatactcacaattttttttttaataaaatcacaagtaccaaatatgtattctatttaagtcctatttttgtataaataagtaataattttatattattagtattatatgtgtattggttgtaatagtcaaaataggttgtattaggaagaaatgaggaaaatgtgggcattaggttggttggaaagtaaaatattggtagttacataatgtttatgtatgagtgatgtgattatttgtaaggttatgttttgtattcatatatttgtgagtacaacattaaatagacattgacaatgcaaaaaatgtttatatcaattatcaatcaatatcatacataccaactcacatcatatttatagagattaaaaaaataattatagcaagaacaaaacaaaaataaaataagtattaatagttgctgcccaggatcgaactggagacctttagtgtgtaagtactaacgtgataaccactacaccacagcaacattgtgtaacataaatctt

SEQ ID NO: 254224 - DNA, 801 bp, Cannabis indica
gcttttggtcaaatagtaaacttttcataaatcaaaaaatatgctttggagcttcttttgatgaaagggatcgagagagacttgctagtcttatggaagttaaggttgtgaataattacgggaagtacttgaggttgctttcttttattgggagaagcaagaaagagttatttgagtcaattataaatagagtatggaaaaaggtgaaaggatggaaaatgtgtatgttcttagtggcggggaaagatgttgtcatcaaagcaatttttcaagcaatgcctacttatactatgagctacttcaaagttactacgagcactatcaatgtcctgcaccgtatggctacaagattttgggtgggctcttcagaacataacaagcagattcattggtgtaaatggacatatttgtgtaaaccgaaggagaaaggatgaatggcggtttagggaattgagattgtttaaccaagcactattggctaaggaaatatggaggtgcattcgattccctaactctttatgcaacagagttttgaacgcgtattatttactgaacaaagatgttttggcagcaaagagtggggctcttgcatccttctttttgcatagtttgacatggggtaaagaaattatcatgaagggctgtagatagagagtgggggatgagaatatggtgagggttctagaggatttgtggctaccgagatcacacacctttaaggtctatgataagctatttctgccagaacgattgcatattgttgacttgcgactagctgatggttcgtgggacactgacttt

SEQ ID NO: 254225 - DNA, 704 bp, Cannabis indica
tctaatgccattttggattttttttcaaaataggaagttgcgtaactctcttaatgaaacaatgatttccttaattcctaaagttgagaatccgaaagtggctattgacttcagacctatagcgtgctgcaacacattgtacaagtgcatctcgaagatgctttgttcaagacttttagaagttatgtcgttcctggttcacagcaatcaaggagcttttgtgaaaagcagacttttagctcaaaacattctcatattccaagatctttagcagagctataacaggaagaacatctcggctagatgagactaaactaatgcactttgttaggcaagggaagtttcgggcaaatctgttctatgcctctcttattgacaaccaggtggctgtgtatggcaaaacagtttgtcataggcttcttgttcctaagcatggacttttctactggcaggtatgtacttgtcaactacttactagggacaaaatggagaaaattttgcctattctttctaacctctgcccggtttgtgagcaagaaattgaaactcattatcacctctttatggactgctgttacactaagaggctgcttctagatattagcagctggtttggggttcatagctggccgagagacatccatgaattacaaagatggagtatgaacacctcttttgatttgaagcatcaagttacaaatgct

SEQ ID NO: 254226 - DNA, 895 bp, Cannabis indica
ccaattcagcagccatcagatcagatattcaaacaaatagtaattgtaaaacagagaagaactaacagaaattgtagcaaacaatgtttgagtagcagtgttatgttatgttgtgttgtgttgtgttgtagtagtgattttgaattataaaatttagaggtcaataatgaacaccatatcctgggatcaacgttatcacaattttaactgttgttatagatatagtaaaagcaaaaaaattcgttgattgtaattaatatatatcatcattcatcaaagccataattcatggtccattgctttggagtaattgattgatgagtttgaatattcattcagctgccataactgactgatgagtagtctttttctaaaatcacaatttgactcaatcaaaaatagttccaagcaattattgttttagttacaaagtagcacaaaagaaatttcaatcataagaaaatgtgaggttggaattacacatctcatcatcacacatatatataactaattaatgtcctctgataagagataatcaatatctaaatctgtaagtaataataataataataatacatatagattaatcaaaatcttgcttgtacattacatggttattttcatcaaccaatcaaaattgtatttggtattgattacattacaacaagtaattaagcaaattaagagatcgaacaccctttttggaacagcttaagtcaaatgacagaattagttacctctgtagagttaatatgtagttaatatgcaaacatttaaatataatcggaattaaatcattaaatacgataaaccattctagacttggttgaaaaactactcaacattctcatcagtaagtacgattaatattgcaaaacaaagaattaaatgcagc

SEQ ID NO: 254227 - DNA, 714 bp, Cannabis indica
gagagaatgaatgtttaggtttagttatcttaagtttatcatatatataatcagattattttttttataataataactacagtgacaacaacaataatagtgaaattagttaataattgttattttgccatttcttaatcactagaaatctctaatgttagggtatttagtcactccaagtatctcaaaataccccaataattctaaagctaacttactgtaacaatcctattaaaactactaactaaacccattgtgacatttttggcctccaatcgagtctccaatgtcgccaaacctaaaaatatttttatttcacatatagttcatattacattcacacatgctatatagatctccgtaatttaaaaattatgcttatttatctacttatagcaaatttataattttgtgttgaactagattagtaggatcataatcccacttattacctagttaactcataatataaatataaaccctaattattaactattaagcttattgggatattacatggagagtcaactacaaggaaattcgtctgtaggttgactccttctgcataaacgtggagtatgacctcgccgagtgaatgtttctactctccactaaacccaatcaatactgtgaacttgcggatgatggtggcctcgtcgatccccgtctccctgagagcattcaaaaataagatgttagcagagctaccgttat

SEQ ID NO: 254228 - DNA, 666 bp, Cannabis indica
taaaatcattgttcctcttcaggaagagggtccaaggaaaggctgctgcttttcctcatcataattataacttgtttaattaaatcattttttttgtttctcattttttggaaattaatatgtttcttttaggttgttttgtgtaattctttgtaggaaaatgatttatatatatatggtgtgagctttcattttgtgctcacttacttgaaattaataacaaggagagtattgtctcatgttttgaactcaccatctacctaaaatcttatttattgtttttttttcttaacaatgaatatttcattgaaaatgaaaaattaatagagaattgaatcataggtaataataagaacataaaaattctatggtggtccggccccaaaattaaaaatgacacgttcaatttataagctcactgacccctgcaggcgttttcgactggctatttaactcataaattacatttaaatgtgtaagcactaaaactccataattatatcactcttcaccagattagagatccaaaaatcttaaaccacaagtaattaatatatagtttacgtgtatacaatataatatatatccccaaaaatttgattctagacctcgacccgggcttgggtttgaggttagaggtcgagattggagtcaagatcgaggtct

SEQ ID NO: 254229 - DNA, 902 bp, Cannabis indica
gtactgtgatgctcacttagaatcccatttttcatgctcgaacaaaatagatagagcttaacttgtactttgtgagagaaaggtgatgaataaaatggtgtagatcaaacatgtcacatgttatatatgatcaaatagctaatggattaactaaaactattcccagccaatgattttttgacttcagacacaaactcaaaattgaagatcattcaattttgagtttgaggaaagatgttacaatagacagttaaggctgtttgtctttaagcttagttaattagttggtttttagtccttgtcatcattgttagccactttttcccaattctgttatggattgattttgtagctcagtcatgtatatagattgctattttcaatgtaatggataacaattcattatgttcaatattttattctatttctggctctttggttctatatgcggttctctccatctttctattattatggataaatgattaaataaacaaaaacctaccaacactctaatctcgtctcctactatacattctaaaatcatttaggcatcaaatataatcctttaaagttctaggatcaaacttgatgaaaatggtcttgaaaagttaaaacttatacaagttgggcttaaaaaatggctctcttgaaaaatgtgaagttgaccgaccaaagacacaactacaaaatcatgaaattgcgtcaattctgacgttaaaaaattataaaactgatgcaattaattaatgggaaaagtttgcatgggttgtgtaatgacgcagctttcgcgtcggttatgacatcttttgctttggttgtgcaatgacgacaaggccaatcctaggcataagaagggctaggcccgtgcatgcctaggacccacatttttttggggaccc

SEQ ID NO: 254230 - DNA, 502 bp, Cannabis indica
gattgtttcctaataccaattaataacaacattgctatgctagagactagagggagggtcgaatttgttgaggaggttgtacaaccttgatatgctggagagccaggggccaaccaagttgaggaacctatggttgggtagcctgtggttggtcgagatgaggaggcctagatcgggacggacagtgcgtctgaggttaaggaggttgtgccttctaggtggaagcacaagacttgtgatgtattctcgaacaacgccttggcttcgtatgatgaggccatgtggcctttgaacaactttcgtcgtctgtttgaggtcaggataaaccatgttatggaggaggctactaacccgcaagtccttgatcgcggggaccagctggaccggtggatatctccttcatcctctgtttccaccaagagacttgatgagatcaaggtagtagggctggtaggagatgtttgatgtgataggcctactagagactggctatcacatcaac

SEQ ID NO: 254231 - DNA, 778 bp, Cannabis indica
agttgttcatgttagatttcaaggataaaataggggataattataatgatcgcttagctttatatgtgaattagcagataattaggacttcttataaaaaataagctttaaataattattttttttgtattaatggagatatattgaattctaggtgtattatgtatgttatatatgaaattttatatttttcatattgtttttgcttagtaacagtagaatgcgataatttggccaatttgagtcacatatttacggtagagtatctttaattagcgaggtagtatagttagacatttagaatgtcagatttagtcgggttatggttttggactattttacccctaagtatttagatttctttatggttaagtaaaggggcaaattagtcatttacttgtttttgttggttagtgagtgtttgtggaatttctagtatttctttagtcttttttgagataaagttaaggttagataaaatcaattagattattaagtattaaatagaaaaatcaagaaaacatatatctatctctcttgctctctctgttagccctaattttttttttttttattttcatacctgtacttggaggattttaacttagaaatcaaggtctttgatagccaagctaagttaagttcttttccctttaaaattttcaagtttatgaattaggttttcatgtaattataagtttttatttctttatgaattgagttgagttggggttgggtattcttgttgctatatttttaaacgctacgcaagtatacg

SEQ ID NO: 254232 - DNA, 512 bp, Cannabis indica
gcaactacactttaaaaatccaaacggtaaatttaaaacattaaattaaaaaaatatatatatagaataattcccttaaaaacaaatcaatctctacttattttatatttctatttataaacaaaactaaaaaatttagcaaaatggaaatatatagaaaaagaaacaattgacttcttaccaacaactattgcttagcctctgatcatcatctctctcagtcttgttctagagaagtaaatcaaccatgccagtcgcgtccttgggatcactatctccccaagagagactccaataacaaacccgctaacaagtcccgccaaaacaaaattccaatcaatttcaattggagaatcagaatcaacatttttatttaaagcagatggtggtgggagcatcatgttttcacatttcttcaataatggttcaccacacaatccttgattaccctcaaatgagttttcaaacgtttggaattggttcccccgtggtataagaccagtgagattgtt

SEQ ID NO: 254233 - DNA, 1375 bp, Cannabis indica
catctaacaccaagcctcagccttcttgcaaccacgagttcaaaaatccaccatccacgaagaactttaacggcgtcttcctgcacagagcattacttaaaataaaaattctttgaaaatagccaacacaatgtatccctcatttaaacaaagtcctcccacataataattaacattcaccacaaatataaacaaactagtttgcatcattctaattcactcttaagtactatttatcaaatttgactcttcttctcagtaaccagcttcaacccaaggcttccagtattgaaaatataggaaaaagcataaaaataaataaaaacttgcaacataaataaggttaaattgataacctaaacaaaaaagtattgaggttaaattaaaaacaagcgacaggggtatgtttaaaatttgaaaatattgagaaatagagcaagagatactcacaaccatctttaagattttcttgcctgaactgtttcggaatatggtcgaaagatttggcggaggcagagacaaagatttggtgtcttgaatttaaagtgggcagaattcgagccagagcgaatcaaataaattaagacaaatataatataaaacaaatggaaatttcagcaattaaggaatatagcgtttgggaaggcttgctaaaaagggtcaacaccaaattcaacatgccaaacaatgatccattgcttatagagaagctcggtattttttgaaacaattaccatcttaataatttaccctaaagacagataatagggattgtaggaaacaatttcatttactaaattattttagtaaatccatttacgaaataataaaacatggatgatcaatggctagaaaataaaaataatgtgttctaacaaaactcatatatcagcagtacatacatacatacacgtatatgtataattgtatatgtatattataaatattaaaatccctaacacaaacggtgagactatataaaagagttctgaatttaatggttttaaaaaactgatatcagattaaaaaattttgattaataaagaaaggactaattaagataggagtagaattagagagaaaggaaccgtttttcagcatcttcggcagctctggcaccaacttcggcagctctgaaaatggttggagccacatagcgaggtgaagaggagggagtcgagagggatgagattagagaagtcgccatggatttgagggtggagggggagactctttttcgttctcagtaaccaaatcttggactggtgaagggttgccgtcggtctagtggagcgcagagagattggttttttttttgaaaggacgcagagagagattgttgaatatgagggaaaatgttgagtttggggcttta

SEQ ID NO: 254234 - DNA, 517 bp, Cannabis indica
gtatactatagtctgtacatatatttataatagtagaaaaaccaagaattaaaaaaattaataaagtatggcaagtcccactatcttaaattaatatatgtatttcaaaaagaaaaaaaaatattgaaagaagataattgttaaaataataaacggaaagttataaatagtgctaacggcaagttaggagctatgtaatgctgttaattcattaaatgtcgtggacctttttaattggttagacaggaaaatagacaggaataatagacagaggatctgagtccaaaaaattaatctttatacaagctagtgtccgtttaatatttcttgaaaatatactaatatatattagaaaaattattttattgctgactacataataaaataaaaaataaaaatagaatatttagtgtttaatcagtatcacgttagctaaaaataataataaagtaataaaaataacataaaactaaaatgtaaaaagtataacattggtgatgtaaaatatgggctaaaa

SEQ ID NO: 254235 - DNA, 662 bp, Cannabis indica
tctaggatagtgacttttcatatcaaaggcaagaactttcaatgtcattataaggatgtttttattgatttcattttttaaattgagttgtttagattaattaattttatttatgattactaaaaatttattgatgtatatatagatatttagctttgtttctatgtcagtataattgttgaaattttcttgattggaataatcattcaattcaaaggaaaacttttggtgaaattattttgttataattatttattgatacttgtgtaaaaaattatttttttctttatatcaatgattattatggtctaaaatttgggtgaaagcatagatgtataacattggcagaaataaatgaatttcaatttctgtaatttttttaataaaaaaatgacctattacggagggcttagcctgccgagatcgctcacctatttcggggggttaggcccgctgagattgcctatctttctcggtgggcctagcccgtcgagaatgaatctttctcaatgttggcattcaaattcacggtgggctgcgcccgtcgagatagaacaataatggaaggccggacccaccgagattggcctattttttgtagtgtcaaataaataatcatggcaaaataacggtaaaataactgtaaaacaatactaaaacaa

SEQ ID NO: 254236 - DNA, 758 bp, Cannabis indica
ccaaaatcagagggaatgtgtcgtttcaaaaataaaggagcatgacaaaaataccctttgtaatcattaaaaaactcttttttattaaaaagaactttttaaggggcaattgttatacccgaagttcggtaagcacatcagaggaggacacgtgtcgagctgggacgaactcaaacacacaaacgacaagtacgctaagcatgtaataactcgttggaaatatgattcgcagggtaggtttataactcggctggctgaatagccttttgcgagacagaaatattcaaactgctaatttatgtattgacgagaaaccatgtaagtgcatacgctcatgatgaggcctcaacctcggtgcgtgaaagagaaagcgacaatactaaaaatacttagcgtatattatacaatatacaaactgggtatagatagtatggcgagccaagataacagacagcgaggcgtttatctcgctaaaagatgttttgcatgcgaggaaggtcttctcgaccccagagagtataaccatcaaggttaagacaatattagtctcgagaagctaaaatgacaagcagctgctcgctatcaaagtggtcttggctccctcctcggcgaggcatccatatgagatacggcttaccgtatatctttaattatgcgctcatctcgaccccataaaggcaagatattcatagctgtgcaaaaacctcatttatttggcgtgatttgtaatcaaagcccacaattttagggataatagc

SEQ ID NO: 254237 - DNA, 532 bp, Cannabis indica
atacttatatcgctaaaaataaaaattaaatttatgtcacttaagaacttaaaaatttagatatttatgccactatttatcctattatatatataaatcttttttttctcattaaactattatatatattgcacatttaattttttatcttaaaaaatttatagcatcaatgctattgtgtgacacaatgcaaatttaaaaaaaaaacattcttttatctttaataatatagcattcttatattttaccacctaaactttccagcacatcaaatattctctaaaatgttactattggaaatgctctaaccactcattatatattaattagcagggatttttttttttttgagtaaatttacatactaaagagttattctagtacattgagcggaactttttaacttcatttttttagggtaaatagcggcaaaagtacctaaagttttatgtttgtaagcggcataacccaatgtttatttttagcggcataagtacccaatatttggaaaaactgtaattttcttccagtt

SEQ ID NO: 254238 - DNA, 1342 bp, Cannabis indica
attaaatacattgtaaagcatatcgctctgggacatctcgctgtgaacataacaataataaccctggtagcgagctagagcttttcccatgtctttctgaggttgataatgtaaatctcgtcgtttctgcgcttgaagacataactttccatctgacaatcgcagttcttggtgacaagatgaacttcagcagtctacatcatttgaatgtcagcttctatctgagagagctgactcgacggagcagtgaatctcattgaaagatgtctgaagctgattagtgaaggtacccagagtataccttcttatagcgagatagatgcctcgctattcgtcatccaagttcattcagctgttatgcttagtttgtataatgtacattatacgctaagtgttctaatagttagcatgtcttgcttgcttttcttcatacgtagagaggttggtggctcgctttgtattaatgatgtcatccttgcgatcatatcttcgtataagaaatggttttcacgtcaatacgttaatgaatagtttgcacatatgtgtcttgctcaagactttacagtcaacgagttatagatatactctactagttcagcatttaatgtgttattctattttaatattgtttcatataattactattatatttgttgattcttattctctcaagttgacacgtgtccttattttgaagtgccagccaaattttgggtataacacttgtcatatcacatgattttaatgtaaataaaagtgacaaacgcatttattataaatataaaaataacattttcactattatatgtttatatgtggatgacttactaatttttggatcaaatattcatgttgtgaacaatgtgatatctattttatgtgaaaattttgacatgaaagtgttgggttttgtgccctaaataaaattcatttcaataatcagatttattaattaataaagatcaaaaatcattttatgttgcatggttcgcattatttacttcatgattatatttaatgtataaactctattaagtccagaacatataaaaatatgtatatatttgttcatgattatagtgtcatcagcatagtggaatataatcatgattatacgttcaaaagtttaattcccatgatttgtcagttcactgaatttagactggcatgataatcaacgataaggtatacttacaccttagatagtgttatgtccttttctgggcattgacaaagtttatcagtatcggatgtatggagtatacattggaagagactgatattgatcttggataagatatcaaaaaacttctgtatatctttctaagtcaatatcaatggt

SEQ ID NO: 254239 - DNA, 949 bp, Cannabis indica
attaggctggttatgtccattgccctgtcttttgacatattgcttgaagtggcctcgtgcgatgagactctctatctcatccttcaattgacgacactcgtctgtcgtatgcccgatgtctttgtggtacttgcaaaatttggttgcatctctcttatgtctcatgtgtctcatgggctcagatttataaatgccaccctatgctcatgcgtgagattaatgtttttgcgagtttcattaagctcagtgtaaatggtgtaaatcggcacatacttgtcatgcttcatttgcttcttcttgtctttagctgaccccttagagttgtctttcctctttgaaccagaggttcctgggttatcagctttggtcgagacgatacttgttgagacattgctgggtttatttcccgagccagtctacaacaacttcatctcatttttagcttcctcttttcgaacaaatacttgggcattttcattgaactcaataatgtttttcactgggcgaccctgtagataatcctaaagttcacctccagtagtggagagattggtagtgatccctgcctggagagtagtaggctgggtactatcatctaggttcctcacccttgtagtggttgtgctaaaacgacttaaataggccttaagcgtctctcccagttgttgctttatgttggtgagcgagaaagctttgggtcgcctatcccttgcggcctggaactgtttttaaaagtccttagacaattgttcccatgaagtgattgaatgatgagtaaatttattgaaccagctgctcgctgctccaactagcgatgtggggaacaaaatacaacgtagattgtttgtgacattgctcgctcgcatgatagttgtaacacccgggattaagaaaaggattagcaaaaccctaattatataattatgagttaattgaggaattatattat

SEQ ID NO: 254240 - DNA, 676 bp, Cannabis indica
caatatagtgtgcttgccctaaaccaaaacccccactatgccttgtaactttgatacccaaagtagtatacacttctccaaggtttttcattttaaaggttgaagaaagaaacctcttagtttcttctattcctttcatgttatcactaaggattaacatgtcttccacatataagaaaacaattatcacattatttttacaagtttttgaatacaaacacttgtctccattgttatgcctaaatccatttgaaagaatagcattgtcaaacttgacatgccactgtttcgaagctttctttaatccatataaggatttcttcaacttacacactttatgttcattgtttggtaggaaaaacccctcaggctgttccatatagacctcctcatcaaggtcaccgtttaggaatgtcgtttttatatccatttggtgaacatacaagttgtgtaatgaagttaatgcaaacaacacccttatggtaattgctctagcaataggagcataagtattaaaataatcaataccctccttttgcctaaaacctttagctactaacctagctttagaggtttgaatagagccatcagtgtgatatttcattctaaatatcaacttacacccaattgctttgcatccttgcggaggatccacaacatcataggtgtcattgga

SEQ ID NO: 254241 - DNA, 1106 bp, Cannabis indica
agtaagaacgttcttaactaaggtacgatcattgtaccacatgcactacgtactgctactgtactagtgttggtagggttttaaccgtaccacgagtaccactaagtgttgtacaacatgcacaacgtacttaaatgtattagtgttgggaacaccgtattgtacctattgaacatcatacactgtaccaatgcactcagcaccgctaccgtactattgttggtagcatacgaatcacataatcaacatgcatatattacacatactcatattcatatataaatatattatatgatagtcttactttgtttctaaattcaagtgttctggtcgacctgaatagaaaattacgcactaaatggatgccctatgtcacaatcacataaatatagaaacaacttgctaaaacccttttgggagacctaaactcaaaactaaaagtttccctatcgataaaaagtatggaaatatcctaaatttgaacgaaacatcaaaattaaggctctaaaaatttcccaaacctgtaaattggattccccaaacagcttggtgaaacggttaaccagtcctatagtaccagtacgactggttaactggttcatagcaaaaaactttgaaactcaaccatttctcccaaatacaaccaaactttccagaacacctgtaatatcatccaagaacaattcccaaacaacaacaacaagaaatacatagagaaactcaaagtgctatagttgtgccaagtttgagctttcaaactcaaacttggtcaaccactccacaaatcaacaaaatcaggagaaactaaacaaattcttctcaaatataacccaaaaattgaactaaaacaagacctaattctaacaacacctaaaatcaaatttcacctgcaacaaccaactaaaagcttaaagaactcaaaggatacaaatttgtagagcctactttagcttgaatcactaaaaccactttgaatcctagctgagaattcaaaaatcaaaatgaagaactttgtgttgggttttatgccctaaataaaactccatttcaatgtaatctctattattcaatatcaataaagaataaaagtatttttcattcatttg

SEQ ID NO: 254242 - DNA, 625 bp, Cannabis indica
agctaaaaaaatataaaatataaggtttacctcacttgttggaagctcaattttataattttttctttataatttaagattgagctattttagctcatctattaggagtgctcttattctcttattttaatcacatacaatctgatttaatttcaaaactatttattgactatttataattgttatctatgatttcaaattaaaatttaaaaagtgaaatttaaatatgttttgactattatggatgcaaattgatttaaaatgaaagtatctacattatatgtataataattttgagatgctatatgtcaatgttttattgaactttgtcataggagtatagagagttttcacatatagtgagattgtaagtcttaaccatattataaactactaaatttgacttgtcaattagatatgaagaataaaaattgataatgcaattgacaaaataggatagttggatttttatttacttgataatgtaattactcaattttgtttctttttattcaattgacaaataaaattgggtaattgtattatcagaacattttaaatggagatgcaaatataaaatataactcattttatcaaaaatttactttaatagtgtgtcaaattg

SEQ ID NO: 254243 - DNA, 582 bp, Cannabis indica
tcgggatggtgccagtagagtatgcacagagaaccagggatcacaatagaccctcgaacgaccctcctcagacaacggcggcagcccgtggggaagcccgcggggtaaaagggaacaccctcccttaagcactcttccatccgcctctcgttagctaaacgctccctctccgagtcctcatcccaggcccgccggttccgagcttgcatccgacggttatcccggcgtcgctcagcacgtaggcgaagagcatggaattcagcaggcaccctagtggtagcagagatgttacgtccctcattctcaaagaaattctgcaaccattcttcatcagaagacgaagatgcatcgttgcgcctagccctgtaagccctcatcatcctaccaacaatagcttcaccactggccggtaataacgtgaaaaaatcgagggacttgggggggatcgatccccaacgtcggagtggaactcatccccgcttgaagattcaggaagaggagaacttgggggattcgacatttctgaagtaggaaaaaggatatatatatatatataaaaatgtgtgtgttcgtatcaaaaga

SEQ ID NO: 254244 - DNA, 564 bp, Cannabis indica
caagcgtccaggtgatttataatcaggtgcctttttaatacaagttgaaaaggtgatttattgttgagaactggtgtgggtaggcaattgattagatctactgttgtctaaaaagcatcccaccagtacttttgaggaacacttgattgagcaagcaaggtaagtcccatctccacatgtgatgatgcttgcattcagctcttccattttgagctgaggtatgtagacatgaatgatcaaaggctataccactttcaataacatcaggagtgaaagctttatattctcctccaatctatgtggagacttttaattttcttcctaaattgattttcaactaaggttatgaaatgtcgaaaagtaatgatagcttcagatttggcttgtagtggataaatccaagtgtacttactaaagtcatcaataaaaaatatatatatataataaaaaatttgtgttatcaagctggcaagcttcacagaagcttagttcagtggaatcgattcttacattcattttctttaagagaacatctaagacatgtttggatggatgacctaacct

SEQ ID NO: 254245 - DNA, 732 bp, Cannabis indica
atgaattggcctttgctatttggaacgatctcaaagtaagattccaacaaaaaaacggtgctcatatctacaatctcagaaaagacttgatgaacttgaagcaagaaagtcaaaccgtgagcacgtacttcactaaactcaaaaccgtttgggaacaattgaccaatttcagacctagttgtacctgcaatggatgctcatgtgttggagtcaagaaattgcaagaccattacaacatggagtacattatgtcatttctcatggggatatctgattttttatgcccaagtcagaggtaatattcttgttatggatcctttacctgaaattaatagagtttttcacttagtttcacaggaagaaaatcaaaggggaggacaaaatatatcttcagacccgaatggtagtatggcttttgcctttcaaggagaaaagagtacatgaaaaccagattcttcgaaaaatcaaccaccaaaacgtggcaggcccttttgcacacactgtaatttgcatggacacaccatagaaaagtgttataaaatacacggttatccaccgtgatataacaaaactgggaagtcgaaagaagctacaacaaatcaattccatgcttccaatgaaaccagttccagcactaatgagaacaatgctgtgctgccccagttaactccaagtcagtatcagcaactgctgagtcttcttgctgcccagacctgcaatcagcagcccact

SEQ ID NO: 254246 - DNA, 545 bp, Cannabis indica
aactcagatcaccacccccttttcatcagtactctgaactaggattccaaaccttaaaagtctttccggtttgaagcctggtggaccagggaccctcgtagtgtcttggttgtggagagtgcttggggctcattgtcccatagatgggccccgacgaggattttcaagaaggtggggaccactcgcctggcgcttagcaagtggagtaggaatcaatttgggaaattagacaatcgcattgctcagcttgatcgccatctgaaccttattcagggttgtccagctgggacaaggatttgggccgacgagttggaaaccagaaagtctcttaacgaggctttaaaacaaaaagtcctttactggcaacaaagatcctgggtttcttggatcaaggatggtgataagtgctcgaagttcttcttcactatggccacaatcagaaatgaaaaaatgtgattgagacaatcttgaacaaagatggggtgtggttgagtagcagatctgacattggaaaagaattgtctagattttttgggaagcatttt

SEQ ID NO: 254247 - DNA, 731 bp, Cannabis indica
ttagaggcaacttaggtttctaggctagagttaaggcctttatataggaggcctaaatcctagattacaagtttaaatcctagatatttacataggttgttagataaatacaaaagactaaagtgcccttggatctagatattattcagccattctgttaggcttttagggctcaattcacagcccatgccttgtgtccacgttttgggttgtaaagagagtcttgccaggttaatcctgccatccataggccaacagggaagtttcaccggccataatcatgtcaggtcaatattggccggccatggtcctggaggacctggtaggtcactatagcttcaccaagaggaagctagcctttgacgatggaggtcagccttttgcaagttgaggaccactttgcacattgttttcttgaagaggtcaggtttccctggtcgaacggaggttccttgggtccagaagtcacttcttaactggccagtttgtgcaccaatcctggctggcctataggctcaccctagccagcctataggctcctcttggccagccaaggatgttggtacagctccttgtgggctcgcttcacactctttagtcgctgcttgaaaatttcgctatatcttgcatggaggctctgttctgttattggcggggttgtactctacctgtactctatctttgacttatgtggacacgccatgtcacatggacaaatttgggataacaaa

SEQ ID NO: 254248 - DNA, 827 bp, Cannabis indica
ttcgcccaaatttcgatcagggacgattacaggacagagggtttagctttggatttgaacaaacaaacaaaaaatggtcttctctattgctttctctctcgccattgccttctcaatctcgtcatcttcaacttcctgcaaccactaaccaataatggatgatgaatgaaatcgtggcttctacaacagtaaggatggtgcagccacactgtccaacaattatagtcttccttatcaattgtaagtatgcttttatatatgaatttctattttattgattttaaaatccctaattccttaattttttcttttatcaatacacatataaatgcaacatatataccttttacattgttaatgtatgtttttattatattaaatagtaagctttatcaggtgatcatgttattgacatatatactctttacattgttaatgtatgtttttattatattaaagaataagcttttcaaagtcaaaaagtccaatagtcaaaattaacagcatagtagtgcacgtgtttgtatttctcatttctacttttttattaagtgtattattatattaaagtgtacttattaccttttaaaactctatttatttttcttaaaaaaattaacagatactttttttagctttccttttccctggctcagagtctcttgctctctctcgagatttgtttcatcttgctctttctattgttaggtttttttgttgacttacactttttagctttgatttttcctttgtagagtctcttattctctctcttgatattttcatcatctctacaactttcctttgaaaagtctaattttcctttt

SEQ ID NO: 254249 - DNA, 810 bp, Cannabis indica
ttcttgccttacccttcaaaccataacttcaacacccaaaaataattttagaaataaacgatgagagaattaggttattcaatgaaaaactcgaccgagaagatgcctcagcccactctaaacattttattgacgaggttatcgatgggaagcgtcacttcttgcgagttgcagcttggccaaaattccctagtttaacaaagtatcctttagagggaccattatttttacctgaggttaccgttgctttttttccatgtaatttaaactttgacttcatgtctccaaaggagcgcaagtctaaattaccccaaaaccctttagtccgattcgaggctcaactgattgagtctaaggttaggttaattgccccatatgcgggtccatttctaaggtcttgtggtatcaagaacgaggaaggatgtcgaatttgactggtcacacaaggcaaattcagttgctttcctccaactcgctcgtcgaatgaagagggttgcagcactagtggttcttcaaggataggtgcttggagtgttgagcatgttaaagctggggttgtccttcctctcaaacagtactttaaggacttttgtaattatgtcaggttcgcaccctttcaactcatcccaaatacatataggatcctagcctgcttgaagtcaatttaccacatcttaggataggagtatccaacccctttgagatgatgtgtttttatgcccttaaggcatgccctacgaggaagaattgctcaagcggcttctactatctgggtactcactctaatgataataagattactgttagact

SEQ ID NO: 254250 - DNA, 343 bp, Cannabis indica
tccaacccctttgagatgatgtgtttttatgcccttaaggcatgccctacaaggaagaattgctcaagcggcttctactatctggttacttactctaatgataataagagtactgttagactctcaaataaaaaagagttcaagcatgatttttttggacgatcgggcttcatccaatcaacaccactacagaattatatgtaagtatttcattatttcaaactttaattctaagttagaattttatgtttgaattttactaaaatttttttttgtttttctttgagctctttcaaaaagactaattccaactactgtcctccaaagacgacacgagaccctg

SEQ ID NO: 254251 - DNA, 621 bp, Cannabis indica
aaataattttcagttatgtgtaatcaaataagtaaatttgaattcagaattcataaaattttagactgttaattgtattgataaaattttatcaaaaaaatttgaatttagggtaccaaataagtataattttaaaatacaagatagcaaataagtattattaaaaatacagggtaccaaacttgtatttagacaaaacacaagatactaaatgtgtacaccctatattttatttacataaaatacactcttttaatatatttttatgttgtacatatttttttatgttatattttgatgttattttttttttgtatttttataaaatactgtaaaaatgtaaaaaaaaaaaattaaatataaaaatgtaaaaagtttataaaaagtagtattttatgtaattagtgggtcaatctatttttagcatgacaaggttccctaaagaaaatcatgtagactcgtatatagcccttctctctctcagaggaatttcgtttagggtttggggtgttggtgatcatagtgtatctgaaacttcactcacagtagaggtatgaattcgaaacgtctactccatctgtctttcgctgtagcattattcatttatatatttattttttt

SEQ ID NO: 254252 - DNA, 829 bp, Cannabis indica
ttaatgtgtttacaatatttttggcaggaaaccctaactctacactcttagtttctcttgaagaagaaaacaaagagtaatattggttaagttttggctatgcaggttgtgatcccccctcgtatggaaatagaagggtatatataggctaagtggtaggtaggacatgcccatgacttgcctagggtttccgctaaaaggccaataatagggtaaattacatgaaaaagaaagagttgcgtattgggtcctttgaaaataattgtgcttgtgcatgctgcagctggacaattggggaccattcgtacgctatggagacgtggtgctcaaagctttaacctttaaaagtagaagccacatgtcaccaaaagctttcacctttaaaagtagaggtctgtaatatccatcttgcttaaaggtggtggaggtgtgcgcactaccatgcctatacagagaggacaagatctgttcctatgttagaaaaagaataactgtcattgggctaatcgacttattccaaaggtagacgtccaggacactcttcccagtcgacatccgcaataggctctttgagtactcatccgagcatcaactggacagacttccatatttggacccttccaggtccgagagagacgacatgccttccatgcccggaaagctaggacgaggcaagggcgactaccatatatctttcagtcttgaattgctcctggctccatgaggcttctccacgacaagattgtagtgcaagagtttaattaggaaaattatgatgctaattccttcctttaaatgccatgcgtcacatgatcagaatatggataac

SEQ ID NO: 254253 - DNA, 1519 bp, Cannabis indica
tagggcataaaatccaacacaaagttcttaccttgtgcgatagcactgttacattggatgtttgcatccaggaatgctgcaaaatctgctcgaatctcctccaggtattgaattgatctcagtgatgatttaggtgttagtggagcttggaaaatgtcctcagctgggtccaaaatctttgctccactacgagttcctttcccttcaatatcatcctcatccatgaaatttaatggctcaataccaagaatcgaatctatagacttcgttttcttaatatcagttgtagatgttggtcccctcttacgagttttctttgatttcgtaacaatttgttatctccctttcaccttggatcttgtttttgccatggcaccaactcaagagctgcaacagcaaagagctagagagaagtttggaattcatgaaaaaaaaattaatagtcaataaagttcaagagatataatttattattgttatacccgaaattcaactatcgtttcaaaggaggacacatgtcaaattaaggaggatatgaattaatgaatgtaatggtaatcacatttgaaaatggaataacttattaaatgcagaattgacagagtatatttacaacttgctgactataaggtcttacgcgagataaagatatacaaactgttacatcgtgcattaacgaaaaactatacgacattaaatgtgcaaggcgaggtgtcaacctcgttacgcatgagtagacgtaggcgaaatataatggatgttaagacacttaacgtataacacacagtatacaaactaagtataatagtcgggtaaacccaaataactaatagcgaggcgtccatctcgccttaggaaggcatgctcgtggtaccttcactaatcagctttagacatctttcaaggagattcacagctccatcgagtcagctctctcagatagaagttgacactcaaatgatgctgactgctgaaggtcatcttgtcgccaagaactataattgtcaaatggagcgttatgtcttcaagcgcagaaacgacgaggtttacattatcaaccttagcaagaagtggaaaaagttctagttcgctgcaagagttattgttgttatgttctcggcgagacgtcttagaacgatacgagttgcaacgtatttaatacacgtttacattgacccagtaaaagcggaccaatcacagctgtttgatattcaaatattaaccacatacgtggtatgtaatcaaaccatatgatttcaggggataatcattgtaagatatcagtcaactatgtaattaactgtttgactatgtaattataaatataggcaagacagattgaaaaaaggacgaaaaaatcataagagaaaaaaccctagaactgtatcagaaatataataagattaactcgtggactatgcataattttaactgtaaaaccacgtaaaaaaatcttcgtgttcatacttttttttctttactgtgttttatttttctgtgcaagtttatcaccatttag

SEQ ID NO: 254254 - DNA, 661 bp, Cannabis indica
aaagagttttatttagggcataaaacccaacaagaaaagggaaggtggtggtggtggtgtggtggtggtggtgcggatggtggtggggatgtagaagacagaggaagaagaagtagaacaaaatggcaaaaaagaaagggcttcgaccttgatatatatagacttttatcgtcacatttcgttgcaccggtaaaagtctatattgcgctgataaaaatttaataagttatcctaaattaaaacacattgttttaaaatacattttccaacacacatttatgccagcaaaagtctccccacctgccatatttctacccgagaattttctcactttttttagaacttttgccggctcatatctgcatcagaaaaagtctaatttccctgctaaaaagttaaattttttttcctgatatccttttgttggcgcaaaaatgtgctagtaaaaattttctcccaacccattttttacatggcaaaattgccgccaaattattttagaccttttaccggtgcataattacgtcagaaaaaggtttacgaacattgcaaatggctcgcgccataaggcagtttattctgagacttttgccagtgcaattcatgaattgtgtcggtataggtaacctatattagcgcactattgcgctgacaaaagttt

SEQ ID NO: 254255 - DNA, 604 bp, Cannabis indica
caaaacaacgtcaacagctagcatactctttttatcccagaccagtttgtttcttgcgttccatatagcccacgctatcatcaaaatctccttcaacaagctgccattttttccagtaacttgtgcttcgaaccagtcgctaaaagagacaaacgcatcagtagaaatactgatgcttgatctgatccagcaagagttggcatatggacagtacaccagtacgtgaatgatagtctcagctgcaacattgcagaaggggcaaagattgtcgaccggcacatgcttgatttggagttggacttttgtaggaagacaaccagtgatagccttccagccgaaatggagaattttagaagggacttctattttccaaaaatccttccaaagagcagagttttgttggccattgttctttgattgttgtaaaaatctgtaggcacttttgacagaataaatacctgatttttccagcaaccaactccagcagtcctcacgattagcctgactaagagggatgcctagaattaaagctttatccctatcatcaaacaggtcattaattatctcagagtcccagctattttcacctacacacataagacta

SEQ ID NO: 254256 - DNA, 718 bp, Cannabis indica
ttcactttttagtcacaagttttgctgtgactaaaagtaagatttttcatattttcatctttgtgaggagaaaatttattttgtgaaaacttaggatgttcagctaggttttagtgtttgttttgttcttatactgttcgtagaatcggatgaagaacttgtttgagcaagcatgggtcttcgagagaagatttttctaagtctcatttatggaggaagtgagtatatatcttcgggagaagatttgtttaagccttacttgagaggagtaagcacacatcaatagctgagagggagttcaatacttagtgtattttatagatcagattagcaaggtggattacaaagggttgcagaaaattactagagggagtctaaatttatttaagtcaattgcttttgtaatctttaatactttactaattgatttcattctctgggggtggccccgtggactaggagtgtttgaacgaacactgataccacgtataattctcttgtgttaagttattttaaattctacatttatttatttctggttctggtttgatattttgtcaaatctgtattctgcaaagacagaattgtaatctgttagactgttacaattttgttttatttgaaatttagtaaaattattggcatttgtaaaaacacattttttctaattggtcattagagtgggatactaaactcttagtgtgatcctttaatattt

SEQ ID NO: 254257 - DNA, 516 bp, Cannabis indica
atttctatttataagaaaaggtttacaagggagtgagccaacggctcttacagctgtcagtgcagcaatccaaatagagatttgcaaaagggaatattctaacaacttgcaattattacacaataacagaattaggacaacacagggacacttgtcacagcagaggaattcgaattgcaggttgttgatgtaggaacatggggccttacagtagggaggctgcataggatttatgtcattcctcaacatataattgtttcccaaagagtattgtggttggacaaaacaagttggattgttgataatggagctgttttgcttgaagatgtaatttggagttgaggagagaatactaatatttgcatactaaattacatcgcattagggttgagacatctttgactctaacaaatatttgtaaaagtatgtcattgccaaaaaaaccattgtgttattatcagcttcatcttcatcttcatcttattgataaccaacttgtaacccttattgatcttc

SEQ ID NO: 254258 - DNA, 601 bp, Cannabis indica
gtccttgcggtgcatcaggtggaggctggccatagggatgtggctctttcagcctgttgacaaatgcgatgtccatcttgcgaagtggcaacaccgtgctgtcatactcaaattggggaacttcatatgccccgcagaattctgttacaactcccgccaaagcaaaaccacctcccgtggctccttgtacaatctgatcaatgctatgccggatgacttgtccaatgtttatgttgtaccccttcataatggcgtacacatatttcaggcgatccatttggacaacggagaagttcttatttggcaccaaccgagcacttacaaagtacagccatgtttttgccaccgggttcaattcacacctgtataggaagtttggcaacccctctgtgccatcgttgtcgtggaacctcaaccctggaaatcccaccgtctcagctacatccaccatatcgaactgctcttcctcctcaataattcggaggcgttgctcttccctagagaaatcttggacagagaacatcacattaaaagcatcagcagtagcaggaaccttctttccatgcacctttacttccctattctggcgtcgggccatttg

SEQ ID NO: 254259 - DNA, 568 bp, Cannabis indica
gtgcttgaactcaagaacttagaactttaaggtttaacctagtgctctttatataggagagagcttacagaagatcgtaggttgatattccttaaaacgaggagatatcacctatttagtacatactaaataaataagaaaataacttattaattatttctaaagaatcggtaaataactgaagttaaacccttatttttcgtgggttgttgaagtcaattcgtagttgaggatgtctgtccaagttgaaagctacagagacaccaaacgtgtctgcaagaagagaagttggtggcctatgttgcaccatgcccgaccaggggtggtctggccagacccctctagttggccattttgttgtctctttgtcctggttgggtatttggactcttcgtgaactggtacgttgtgcatggtaacttagtcttcttgcgaacaggttgtactccacgtaacatcaatcttgcctatgtggacataccacgtgggcaaaaattaaagtagagtaactatcttacttaatctctctatctcaaaatgatacctttattgtgtttcaatttataat

SEQ ID NO: 254260 - DNA, 600 bp, Cannabis indica
tactagattaggcacgttatcgttttttctaattactgtgcacttcctttccaatcaaggggtttgttgaaaaatgtgaataattaaaactttcataaatacacttaaacttaaatacattagtacaatacatattataggatcccgttcactcccctagctggacaggggtgcagccgtaggtggctggctgaccaaagattagccaatggggattgtttttgagcctaagatccttggccagcccctaggctgctgggtgttgggatctggctgttcttgccattagacctttgtggcaaggcctgtcctcctttgtgtaggagaaggtctgtcctggttcttgaagaacttagttggacaacttgtcgatagaccctacctgatctgttgactagtcttccttggagtggatctttaatgagatcttggcctcttctagtagttctttgattgaactaccttattaggtcattggattttttgttgtggcgatccagctctgcctggtgagatcaaaggatgtactcttggtcatccatccatctctggaatttgcgtctttactatacgaatccatcgcaattagtagcgcatggt

SEQ ID NO: 254261 - DNA, 864 bp, Cannabis indica
ccatcgacaactaccacttgcactctgtaaatccaccgtattatacataaatatataaagagaattgttaaaaggttacattaaccataactttttttatccgtatcatactgttataggagtaattatataacttataaatataatttataaaaaatattattaatcaatcgccacttataaaatatatactagtcactacgggtgcatcatagtaaatgctcatataaaaatttatgtggaaatgattcttatggtagatataaatacgtgccagttatatgtgatttatatatttgtacgctttgagaaagcgaataatttaatatttcagagactgcagccagggaccaaaactagccatactttaaataatattaaatatttgtgagagcaaccttacactttatctaagaaccactttctctaatcaaaatatgttatcaaaattttgtaaaataagagtgctaatggtaattttcttacaaccttttagttaatttctatgtctgaaatcacgtatcgaaatattattttaattttcttcatagcgatattcattatactattacaacattatccctataaatttttaaaaaataccaattaatttacaatgcgaaaaataaagttcctaatattctaatataccacgtgcgttcgaaaaacttcaaacttttttatggcactgtaaactatttaaaatttttaaaaaatttacagggataatattataattataacgaataccactataaaaaaaaataaaaaaaaaatatttacaacatgtgatttcagacatggatgttaactaagaggttgtaattaacactcctcttgtaaaagtaataaaaaaataaaaat

SEQ ID NO: 254262 - DNA, 767 bp, Cannabis indica
ctaatattttattaaaaaaaatttaaactaaacgtattttattcattaataagaaaatttattttcaaatttcttttaaatctgcatatatatatatagcttattaatttttaaattcccatattattcatttttaactcgaacactccatcacatgcatataataattcaacttattattactttttttttttaaaaaaaaatcacatatttttttttttcaactcaagtgcatataactcaaatactatattattattttagagtttcgaatattaacccataagccatagaggcgatatgcatgaaaaagctttttcttgatacactgagagctagccatggatctatttatcatttatattcaattagtattgataatttagaatacattaaatatatactatggcatttttttattatgtgtttgagctttgattattttgaagtatatttctcattattttcttatatactatgacattttttctattatatgtattttagctttgactactttggacatatatttctgtatatattatttttatctcttagtctattgtttagagttgtgtgttttgtatattttttctgtggggtgctcctgcaagaattcgcatggtcgtcgtattgtttagagttgtgtgttatgtatacatatttaatatctatttactatttaattttaattattatttcttataatttattattgggattttttttatatatatagttcttaattatatattattttgaaagta

SEQ ID NO: 254263 - DNA, 748 bp, Cannabis indica
gaatcatcccacttgatcttccctaaaagatgtggaattgcacagcttacccggtatttccccttatgaatcacaagattactgacagtcacatgccttttcccaaagtgattcaagtaaagcatgataaatcatgctttctaccatattcttaagttttttttgtttcttctctcaacaataccattcatgcaaggttgccatggcattgcatatggcaggatgatttctcattcgtctaagaattttgcaaaaggtcctggacattgttcatttgatatgtcatatctacaatagtattcaccacagctagactcgacaactttaatcttctcacctagttaattttcatcttaggctttgaatgccttaaaaatgtccaacgcttgtgacttttcatgtatcaagtataagtacccataatgagaatagttgtctacaaacgtgataaaatactatttgtcattccaagaagttgtaaggagtggatcacacatatcattatgtatcatttgtaagatgctagaactcctgttgggacttaacttcctaatgtttttctgtttccctttgatacattcgatacacacatcaaggtcagtgtaatcaaggagtgaaagtattccattcgacgcaaatctccctattctctttttggagatttgtcctaagtgtgtgtaccataaggtgataaaattctcatttgataatttttcattttgtaccttctttgttttttttttttttt

SEQ ID NO: 254264 - DNA, 643 bp, Cannabis indica
gaaaacacagtaaactgtgtaaatttcccaaactaaataactcatcattctcagttgctgtctcttgatccatgctcatctcttacatggtaagttttaattcagaaaaatcactgccacaatacaatatttattgttttcacgagtaaataaaaaatcattatatgttaatttgtttcaatttttgggacgtggggaccttggtagatgaagctttggtttacaaaattgtaatggctttaaatgagtgaagatccttatattttagaattatagagttttaaaaaatacattgagagatgtcggtaatttttttgacataacgaccaattgtgattatatatagttttatattatatgggcttgtttggtacgccgtattgtaatgtattgtattgtattgtgttggattgtgttgtattgtattgtattgtattaatattatttaatacaatataatgtttagtattgacttgtattgattgattgtgtaaaattataatatatttttaatacactcgatcccaacaacaactgctagtccgggtccgagttcgggtctcgagtccgggtccgggtttgggtctgggtctgggtcggggtccaggtttaggtcggagattggtgttgaccccaaattctt

SEQ ID NO: 254265 - DNA, 1514 bp, Cannabis indica
caccttaaagcagaaaacgaaagcttaagctcaaagcaccgatcaacctgcacacacaaaattcaatcaacaatcaagccaactccgatcgtccctgtcaacaccgatcaaaagaaatacaggtacatttatatatattatgctatgaatattatatgtatatatataaactataaaagaaaaatacactgaatatgtgcatttgcaatttaaactttaaaaataaaaataaatctagattgaaataaatttcataccaaaactatatcatcttgcattgcttcataacgaaattttcataatcaatctagattgagactatgaagtttcacaaacaaaagacaaaaagaaactgaaaatgaaaattatgataattttagttttagacatacacgcttgaaaatgaaaaaattactgaatattatgaatataaaatcggttactataaattatctgttacacataaacaaaatataaagaaatgttggaaaccagtttctcaaatatatggtgaaaaaaacacatataatttgaaaacaaaataaaaaaaaaaaaattttaactaacaattttcaaatacttgtacaggaatggactcaataatgtgtgtggtcaaatatggagggcaatggaaagaggataaaaagtatgaagactacataatgactggactactaataccaacaaactgtgatctaaaaagtttgttggaattagtaaagactgaaatcaaatgcaacacaacaatagaaatgcattaccagttatgcccagactcaccaccaatgaaaataattagtgacaactcactgatgttctacttacaactgagaaagacacaaaatgcagttagtgagtctccactctgcatcacaacagtagacgagacaagactccagatcattgctcaacaaaaaccagaaagtgaatctgtaagacaagatacagatgttcagaaactggttttacaaataaccaaccagccaacatacgactatatggaatacgatgatgaaacctcagaaataagcgaggtacttgcattaccaaacatatttcaagtagctgatagtgttgctgattgtatcattgagaaaacacaagaacacaaaaggaaaagacaagaagaagaaagacaaataataacagatcataaggttttcaacattgaaaaaggacagatctacaaggacagaaaagtattgaagactgcagtgggtttttttgctatgatcaacaatttccaatttaaaaccaaaagatctgaaccaagagagtatgtggtgacttgtgtggatgacaactgtaactggtttctgagagcttcaaagttcaagagtacctcaacattcaaagtaagaaaatatgtccaagatcacaactgctcactggatattgtaatgggcgaccacaagcaggcaaactgcaacatgattgcagaaatgataaaaaagaaatttctgtcaatcaaaagaaatcacagaccaaatgacattatgatagacatgattgat

SEQ ID NO: 254266 - DNA, 680 bp, Cannabis indica
attaaaattgaattagcaacataattagttttaagatatatgaaatttatttttcattagattattttaaaattaattttaaaaaaatgcttagtttaatgagatatattctagatagttatttccagtaactaattatattatttaatatttaattaactagaaaaaaatattttgttgaaaattgatttattaattaattttagatcaacttatattagaatatttttcatagatattaaattaaaattaataattaagttaattttattctagatacttaattatttgtttcttgtaatttttctttttgatcaagaaggaacaatcatcattaatcataaacaaataccatccatacaaaccaaagctaggtagcaaacccgctttacataaaaattctgtctatgcatctcttttcatgaggttttaggcttctttttttagctatttgtaatctatagtagactattttcttaatttcctgtgtaatctttgttgttgtactcgagtaattattgaagagccacttgtttctattgctccaaatgttgtaaatcatggcagccattatcgagatatgaatccgatgtttttttatctctactgttctacagcacccactgctaccaacactggcaaccagtcggccatctcctaattcccagccaaacactcac

SEQ ID NO: 254267 - DNA, 570 bp, Cannabis indica
atatggacccaaagatgtgtatggaaatttctaggttattctggtattgttattgttatttgttaatattattattaaataacttttcaccaggtcctctcagcgcctaagcaatgcaaattatgaataatataggggcatatttgaaattaaggcaatttcgctgtactagtgatttatcaacctcaacaataaacttcacggccttgataattttctatgcgggcccatccacacacatctactctcttttatgggcctaaagaatataggcacaacgcttccttaaaaacaaaacaaaatattacataaaatattattttttaatttttttttacatttttatatgtttaatttttttttatatttttatggtatttataaaaatacaaaaaaatcggataaaagtaataaaaaataacatttaaatataaaataatatacaaatacaaaaaattaataataaaatagattaaaagactgtattttatgtaattaaaattttaaaaactataaaattgttaaaaattcgattatatttttataattttttttgttatttgtgtgtgt

SEQ ID NO: 254268 - DNA, 652 bp, Cannabis indica
taaaattattgaaaaatatatactttattgtaatgtcatggattccatgtgtgggagtgggagtgggagtgggagtgggaggaggagtagtaggagagtttcagaggaatgtttgatgagatgaatatatgtatttattagagtgaaaataatacaagtaaaagatacttcatatggggtatgtgagttggtattggtgcaaactttttaatcttaagagtgttttcattctaaacacaattttggatgctataaaaaggagaagatttcaggttaataagctttagaactctcttcttaccctttatgccaaagttgataattataaaataatttagtgcagattatccatactaaaatataaatttattctctgccaaagattacctggtagcaataccataatttctattagctttctagtttgtgaggttggtgatgactgtcataaccattttttcttttattgttcttttttcaagcatctcatgcgtattactatttggcctgagtcttacctgaattggcttttttgttgttgaatactaatcgagattgcagtctacttcatagagttgttgcagcttcttgtgcgacaacaatttattttatttgatggaatcataatgcttgtatctttgagcaaaaggtt

SEQ ID NO: 254269 - DNA, 1881 bp, Cannabis indica
ttctatcaattgtacttcccgaggcgagtcatctggatgcaattattgatgcgtaatttgtgctggtttgtattccatctatgttacacgtgtcagcaccatattgtttctcaaaatatgagtataccgatttccccctaaaagttgctttttaaaatataaaggactttttaattaccttaagggtacgatcatacttttcccatttaaaaattgcatgcttttattttggtagttcaaaacatcgaggtaaatcatttcagcatttaatactttgacctttctctttccaatagttcccatctgttcgatctatcatcatcgtgatcgaacggttgtcaccttttgggtataagtttcaaaatcccttcactttcgccattctcaaccacgaagcccttagaacttgaaaaaatatcagccactttcttttctaaaattgcatgccctcactgtctcttacttattttattcaaatttcaaccaattgcatttctcaacctcagaatcgccaaggtccaggcttctcaaaccaggagtttttattagaaagttcttcgagacccaaatttttccgtcaaactagtaagtggttttcccctatttaatctctttatttttttccatttgtgtaacgccttgaatcttaggaacgccacgtgtgtgctcttacaaatttattatcactaatcttctagcttaggaaaaagtgtggtttaattaaaatttgataacttaagatatacatataatttttttttaaaataccactaagtatggggatcccctgtttataaaaatttccttaacaaatttcaaaaccattattaccaaaaaataaagttacattttcaaacataaagaaaagaagttgatcctgcttcccagaagccaatacaccacgattaatatgtacattgttgggaaacctccaactcatggccgaacacaactcctaacttccttacctgcaccacgaagcacctgtgagtcatagtgactcagcaagaaaagctcctaaataaagaaaattatggaaagtgatggcagatttcattacaacagattatgcataccaatagatcatactctttcaatgtacacttacaattcaatgtctatacaagcaaacttattacaaaattaagagtatttatagctatacataatcaacaaccttagtgtttcataaaacaccctaatcatacattattataaacacttatcttcagtggttcataaagcactctagttcacacattagcatatccacacaatttcagtgcatcataaagcactctaatcattcatcattataaacatgtgtttcttacatccctaggccactgagactgcaagaaaagtgaccaattttataagcaatataacattcattcaatcacaccataacacaatgtattcagttacaactcatcacacaataacatgcttcatagtttcacaacatcgtaaccacacaatttcggtacttcataaagtacccttaccactcgttaaccacgagctacgtatgtcactattgttgcccgatacaacaaacgataagtaagaaacccatccgcagtttcaagagtaattactcataacggtaatgatcgtttcttttactcaatcataattgaatctcaaaagataataatcgttccatatcattacctcgatcataatcgagtcataaatgataataatcgttccttaatattaccttgatcataatcgagtcataaacgataataattgtaacgccctaaaataattaggcacgctacccaaaaatgcttatgaaaccctaatcccctaatcgggattactaaccaaaatagcgcagaatttaaacttttatattaaaaaaaatgaaaa

SEQ ID NO: 254270 - DNA, 576 bp, Cannabis indica
ataagcataaacaataatttactgattaaactttcatcacccataaaattgagagattagactaatataagaattgacatcactcttcaaatataacaatactttaaaaaaggcatattaaaatttcaacagaaagaaaatgatactcaaaaatagtattgtaatgccctgaactcttagggacgccacgtgtgtgcttttataaacttattattactaaccatttaatttagtaaaagtgcagtttaattaaaaaccttcaattgaaattaaaataaaactttacaaatcaaatactgttggaatatggggatgccctgctaataaaactcttttacagctaatttacaaaacgactaatacaaaattaaggttacatatccaaatatagaaaaagaggtcaatcctgcttcctagaagccaagacaccacggctgatatgtacactattgggagacctctgactcatggctgaacacaactgctattcttcttacctgcaccatgaagcacatgtgagtcacaatgactcagcaagaaaagctactagaaaatagtatagtaagtactagcatt

SEQ ID NO: 254271 - DNA, 1054 bp, Cannabis indica
tagttactgcctcaaccacgtaaaaatcctgagtgttcttatttctttcatttgtgaattattattcattggcccatacatttaactttcaatttctaaaaaattcgataaaatattttggtactttcattgagagctaaaaatagcaatgatacctctaatgattacatattgtaatcatggtactcacccaaaccaaatttggccttcactactaggacacgtcgagggtgaagttgatcccaacactcaaagaggaacaacaatcaatggagatcctactgaggcaactagtcattgatcaacatgatgatcgacgtgtttatgatgatcctatcgatcaaggagaggaaactgcggatggtgaacctactaatccagaagatgacgaaattggtaaagaaggtgaacatgatgagtgagattctcaggttgttgaaatggcaaaataattggcagcaactaaattgaaattggtggcccaagaagagttccctcgtagaatgccagaaactatggcgtgattggaagcaacactgacgtaaaaaaacttaaatcctaatgaagaaaatactgacgatcctattccaccagaggacaatcccaccagaagagtgaatcctcaagaccttggaacttgtgatccaaacaaggacagaggaaaatgagtcatgggggatcctccaaggagaactactcccgatgctctgtgtaatacataaatgtcgccgaccaacctcaaaggagaaggagggtagccaatgttccagggcgaggcaatcctacagatctgcgaggaagaactacgcagacagaaaggcctagtgcttaggtacaaagtcctacagagtgaagaggtgggggtaaacctcaataatcctatggaccagatcgataatgatgcataagaaattccacaaggttctgatgaaagtgagactatgcaagacctttgtgcacgattaaatgacaaggaggtaaaaaagctagaaagacgaaagagctagacctcgcagaaccgatctcaaaaaatcacactcaaagatcatgttca

SEQ ID NO: 254272 - DNA, 548 bp, Cannabis indica
tttaaatcattgttatttttttttcttgtctttgtgtgtcgaagaagctctttaatttttattttgacgatttttgtgtttctgataaagagttaatcatgactttggtgacaaatgcacattttttttaactaagtgtaacaaattcaacacaaaaaaattactggaaatacatatatattaatatttttattatatataaataaatataaatatttttaatataaatttaatttaattaaattaaatcaatttgtaattaaattttaagaacgacatttaataactgatataatttaattagaattcaatttttaatatttaatttaattcaagtattattagatttaattagattaagtcttgttcatcactattagtacacatataaatactcttaattaatacatgacataatttatgatgttattatatcatagtagtataacgtgaaacgtcaaacatagtctatattttatagaggagtactaattacaatcttttattataattttttagtcaatttttgcgtctgaaatcacatgcca

SEQ ID NO: 254273 - DNA, 572 bp, Cannabis indica
aaaaaaaaatatacacacattatatactcactatatcataaattataaatgagttcacttaattcagctacttgttaactcacccatgaaaatttcccgtacaacaccatgctcggaatgaaggacctccaatgaaataatccaaatccttactgctcatattaaatttccgtataagaaaagtgtaaaacatcaaaaaagggtatcagtataggagcactaatgaaatttaatttaagaattaaatatcaacaacaattaagtacagttctggaagtgcattgattatgagaccgtggtccaggcgaacaatatagaactatttctttttcatcgctataaaacaatatgtattaatctagctgtaatttcttatattttagaggcatcagccgtgactcggctcaaggcaatggcagtctttgaacctgatgggcgactcagctgcttgcttatgaaatcccagccttcatgagcttcggaagatccacatttgtcttcactcaaagtccattgagcatgtatacaacattctcggtggcaacatttcccgaagctcctttagcataagg

SEQ ID NO: 254274 - DNA, 661 bp, Cannabis indica
ttcccatgtaagaatgctgtcttaacatctatttgatccatttctaggtcatacttggccactttagtcatcatgatccttatagatgtttgtctaactataggagagaaaatgtcattaaaattaacaccttctatttgattgaatccctttgcaactaacctagctttaaatctgatttcttcacctggcaatccttccttttccctaaaaatccatttgcagcctatcaatttctgcctggtggtcttgttacagttttccaagtcttgttctcgtgtaaagaactcatttcttcattaattgcagcaagccatttccttttattccttgagttgattgcttcctgatatgtacaggggactgtagtgtcaatttcttctgctgatgcaagagcaaaagctatgcaatcagcaaagccaaatctctctggcggcttaatttgtctcctttctctgtctctagccagtagatattcttgtgaattatctactaagctttcttcttcactttcatgctcatcaatctctgaatgtgagtgctcttgagtatccacctgatctgcagcaccttcatcttccctactgttttgaatttctaaaccagttatatctctgccagatttcttgtagtttgcagcaacaattttcatagccatttc

SEQ ID NO: 254275 - DNA, 626 bp, Cannabis indica
tgaaatatcaggaactctgttttaatactgtaaactattttaaaatttttaaaaatttacagggatgatactaattataaagaataccgctatgaaaaaatattccaacatgtgatttcaagcatgtagattaactaagaaattataacaaaattttataattaacactcctcttaaaatactacacctgtgctcatcaaacaaaagagcaaattaatgaggtggcaaccatttattggtccaaaaacaacctaagggtggagtcatttttagagaagaaatttcaataaatatacttaaaactttatcccatatctataaaaatatttctcaaaataatttaatacaaatatatccttattttattttaacatacccattctatccttttcaattaaaaaaacagctttctctctctatcgctcattctctctctttagatctggagagaacccccctcccccgaagccctaagttcccttcttgtcatcgtcgccaccaccggaagcccctccccccaccaaattcctaagttcttccagcgccacctcttctttgtccatatatcgaagctccaaaaccttggaaagcacaaatgcctcgtggttcttccgtgtcctcacaat

SEQ ID NO: 254276 - DNA, 1159 bp, Cannabis indica
ataatctcaccaatgagccctaaaccgtttcgtgaacctagccaacacccttttgctggctcaccttgaggaaagtatctccgatctttataaccatctgtgtaaggatgctgaggagttttcaaaaagagtcaaggtttacaagcacaatgtcgatgagtatctcgatacttatgacggggtcacggtcgtgaaggatggtgaggctgaaactattgcccaagggagtgagaatgcaccagctggtgaagatcaattgctaaagatcatagacattcccttaggagagaatgatcctttgccccagaatacctcagaagtgccagctcaggatcccaatgccaaatcgaatgctccatcccaatagtgggcccctcgatccatccattaatttaaactgaaaagttccttggcatactttttcaagtatttcatatgggccttcccaatttgggccaagtacccccagtcccaattctggcaaagctaggaatactcttctcaagacgtggtctccaacatcaaatgtatgactcttcacctttggaaataatgtgccaaacaatattgccttggtacattttaagttgaacctgtgactgttctcagagctcttcaattaagtccaactattcctggagcagggaatggttttgagaagggtcgtaagtgtcttgttgatgataagggatcgtggcctccatagggaccactgcttcacacccataagccattgcatatggcatgtgtctcgtagaagttttctttatggttctataggcctaaaaaactcgcacaagttcctctgaccaatgagctttacgggcttggagctttttcttcaacgttgtttttaagattttgtttatggcttctacatgtttgttggcctacgaccagcctacaactgaaaagttcttcacgattccttgctgggcacaaaagttgataaagtgctcgctgtcaaattgctttctgttatcaaagatgatcttgtaaggaagtctgtatcgacacacaatgttcctaataacaaagtccagggctttctttgaggtgacaatattcattggttctccctcaacccaattcatgaagtaatcagctgagactatcccttatttgacttctccttttcctgtggggagagatcctacca

SEQ ID NO: 254277 - DNA, 1083 bp, Cannabis indica
gtatggttttttttatttaaattgttaatacttaattgttttatttatttgatttcatgatattttgttatattttattacttgatactatcttaattattttgaacttttaattgtattaaatttgtcaagatgatattttatagaggattaaactaaaatgaagggtgatatatactttatatcatttttcatgttttttaattaatattaaaaattacgcgtataatatctaattaagaaaccgatctaatcaaattagtagttggattggattagattttaaggtctaattagaattgataaaaaactactacaaatttgagttttaatgacattgtttagtgacccgcaaacaccctcctaactataggtgtgctatcgtgatttttttattaattgtgcaatttgttgctaatcaacaaatttattaaaaaatcaagtttaattaaatcttttctgaaattaacttttgcttaaataaaataaactttacaaagtcgagatcctatattcaaaagttataaccacaatacaaaatactaatacaaacttgtcgccaagcgactaatcaaaatgcagcctattgtcccgaagactgaacactccaggtttaaccgccttgatatgtacaactttcatccgctcgaactcactactgttcagccttagctttgcccttacctacacacacaaataataattgtgagtcgatagactcagtaagaaaagcatatataatcataacataaatataaaccagattataattaggcgcacatacacctaatcataattctaaccccgtgtcccacgtgatactgagtctagaacatttgtacgatagtactattgaccataatatcagcctatatcggtactctaatcgtaccgatgtgatagcgtcaatcagtactcaagccaaatatacattattcggtaaccaatataattttgtgtatactactaccgctatttaaatgtcatctaaaaggcaatcataaacatgcatactaaatatgaagtcacatatgcatataatcatatcttacctcaatttcgaattcaagtgtgccggtcaac

SEQ ID NO: 254278 - DNA, 552 bp, Cannabis indica
tttttttatttttttttcggtatcttagttgttgtttatgttcttgttttgtttattttctaatcaatgttttcaggatattgttcatgttgttaatcctactattcaactacaggatgttcaacaaacaatcagtgggtctgaaaatataaatgataaggtatataactggtttctttgtttattttatgttcattttttggtgttaattcctgtcctttttttaaatacttttgttttaatcttttttttataatcggttttatcttatttttgttaaaaggttgatgcagataatcctgtaaatgttccttctatatttggtgattctggaaccggttctgaggttcaagttgatgattctaaacggcagagtttaaaaaaactcgtgccaagaaaaagaatgtgagtatttttcttaagttctattcttattttagtattataattgattttttctattagaaacggtttttcaaatgtttatattttgtaatttagcttttataatctttttataactggtttcttttttttatgtatgttgaccga

SEQ ID NO: 254279 - DNA, 1251 bp, Cannabis indica
gggctcgaagaaagtaaaagaaattaaagtgatttttgagccctccccaacaaaaagatttatattagtttatatatgtataaatgcgacttaataataggcatttgtacaattaagttttttttttgttttttttattttttatgaagggatggattcatggaagagaaaacaaatgcatagccatttctacagggttcctgatccatttcgtaatgaggtaattttaattaatttcacttaatgcttttgaatatatgatataaattcatatctacatgtaaccattaataattaataagatgtgcaggttgtggtgattgttggaagctcactaagtgggcaagatttatcaatggagcttgtggaagtggctaaggaagtgtatctcagttctagatcgatggacataactgaaggcttctcaaaagtcatagccaaacatcagaacttgcatcttcgtcaacaggttataattaactaccaatagatacctctttaaatattttaataatatattcttattataaaaattggtaattaacaataattacttctattgcagatagagtccattgaagaagatgggaaggtcttatttgtagatggctcttgggccatagctgacacaatcatatactgcacagggtaaaagtttaatttataatttcatcaatatttggtgactagatatttttcatcaaatggaataagatactataaagaaaaatcttagtgaaaaattgtaatttaaaaaaaatattataatatttacgttattattgaaaagttccgacaaaaattttaatttgttgtgattcgatagccgaaaaaaaaaaaaaaaaactgacaatttgtaaatatgtaatgacaagtaattttatgaggccgttaaataaaaaaaaaaagaaaattatagtaaataactcaaattatagtactatataaataaaaaaatttattttaaaatttgtagagaaattaactttttattattgtcttttaccatataaaaaatcaataattttcttttaatatatatatataattttttttttgaattagaaacaaattacataatctatattagttttgttaaaaaaaaattattttaaaattacgtcaatattctatgagttattgtgtgttgttggtatataaattttgttgtacgttatattttcattttattgtatggtatattattattcttagatgatatttattttttatttagctatatataatagt

SEQ ID NO: 254280 - DNA, 1227 bp, Cannabis indica
tttgggtatagcatcaatcaggtgggtttaaattgactgatgaaaataaaatgttacgttgtttaataaatttgatgaaactcatagagaataaatctatggagatttatccaaccacacaggatgatacaaaagttgtagcaacactttaccaacttctggttttcctttctcttatactacatacatactcaaaaacattgctaacaccacaaacataataatctatgtagagtgaggcaattttaatacatggggtggaacaagtgtggtggaattgaatttaaatttcattaattcttttatatgatcaggataagattatcaacactgattcattagaattgctatatctttaatggaatccattactatatcaaacaacacccaaagtattaaatttatgaaccaaaagcaaaatcagcaaattcagcaacatcccatggtagggactcacttaatggtttccaaagttatggcccagtgacagattaagaagagtattaacaatgttattaccttgttcttgttgtttgtattgcaagtctcgaaattatgaccctctttcctgccgccagaacatctcatcttatggaatctcttcctaagtttcttggtacctggtgcagcaacatgatctaattcaattgcaagtcaatgacagaactcaaatcatttgcatgaatattcatatgcacacactaagtttaacattataaacattaggaagagtattaataatgttattacctggtgcagcaacatcatccaattaaattctcctatttttttttcttagcctgcctggttgtacttttccaacaggcttgattagttctaccttcccagtccttggccattcatctagttttcttaatggatagatttgtggggagtaagctttcctgtagtattccttagtgtaccacttgctaacatacttctctggatcctctcaattacaccaaattgtagcaatggcatgactacaaggaatcccatttaattcccactttctgcaaaaacaaatccagtgattcaaatccaccgaaaacatgctacaatacatgttctccacttggtaaaccaaatttcctgaaagtgttggcaaatgaccccctgcgtcaatcttgttcttctcgagttgttctgaaacttttggtgctatgttagacggccacatgactacagagcgtctatttttagaaagtctttccattaagtaca

SEQ ID NO: 254281 - DNA, 856 bp, Cannabis indica
gagaagaaaaatgtaaccactttatttatatatctatatcaatactattctatatatgtaaattagtgttacatttttatttttacgtttcaacttttaatcttcttaattggttgcaggattctggaaaagggaagagagtgaaaaacaatacagtaaaagtagaagagaaactaaaggaggttgttcatgttagagccaggaggggtcaagccactgatagtcacagtctagcagaaagggtataattattataataattaattattttcttctataagccagtaaacgtacacatttgattatgaattgtaacttattgattttttgtgtactacatctcaggttagaagaggaaaaattaatgaaagactcagatgtttgcaagacattgtgccaggatgctataaggtaaattaattaaatatcaatattttaatttttattttatatgttattatgtttatgtgaaatcataattaattttagtaacatatttatgaaattgcagactatgggtatggcagtgatgttggatgagataattaattatgtccagtccttgcagaatcaggtggaggttagtaatttattttaatatatgtttttttcaatggaattaattgtaatcatttttaattatctttttctttttaagaattaagattatatctgataatatatatatatatattacctttttttttggttttcagtttctctcgatgaaattgactgcggctagctacttttatatgacttacaacttccgagactgatgccgtagaaaagatgcaggtaattattaatttataataaatttaattagggattatataggctatgtttggatatt

SEQ ID NO: 254282 - DNA, 711 bp, Cannabis indica
aatttgtaagaatcgatctctaacttctttctgcgatattattatatgctcaattttacttttttaattattgataaatcaaaaagcaaattaatttacagattttctttcagtgttgaaagaaaagcaaattaaatttttatgtttaattttatttccatagatctatttatatatatacgtatatttatatgtttaatgaaagttcagcgataccagaatgcaaatgcaaaatttcgatatctttgaagcatcttctactgttcttctgttttgacaaaatttagtatattagttagatttttttgggtggaattgatatctgtttctaattgttgggatggaaatgaagaaatattaattatatgaatcatagaagtgcaggagtaactctgttcttagtattagagaaatggtacttccattcactgaatttggtcttcatggtatttatatttgttcttaacttacattgttgatattactattgttgcagtcattgcctggcaaaaaggagggctcaaatggaatcatccatggctgatgaggacagaatttcgaaattacctgatgcactgatcactcacatattgtcttttcttcccactgaagaagtcgttcgaacgtgccttctttcaaagcgttggaaactcatctggtatgcagtccccactatctttttctccaatgataaaaatagggatgatcttg

SEQ ID NO: 254283 - DNA, 575 bp, Cannabis indica
tttccgttttctgccatataatatgccaaatggcatgccatgtcattaaaataaatgccacatcactcccaccattaacaataaacattgccacatcatataccttaaaaaaactaataaaatattttcaaaaataaaaaacactagtaaaaaaataaaactcatgtaaaaaaagaaactaaaattaattaaccactctctttctctttcaccattttcgtctcttgctacctctctctctctctctttcaaaatatctcaaagtctcaaccctaaaatggaagagacgatctgtacccagtgggtatgaagatcattaatggccatttctctatgtcggtgagtcaacataggtactggccttatcattgtcttcttctcccttcctcaccattttcctctttctatagttgttgctgttgatggtgggcatcagagtttggtgtgggtgttcgccgacggctggagacgagaagttcgacatcgacggtgccgacttcgacggaatcggcatcgacaggctaagaagatcaaagccctaattttttgttgaagcctagatcttcgtcttagtc

SEQ ID NO: 254284 - DNA, 1302 bp, Cannabis indica
tgtataaacaaagtagagagaccacaaataatcacaaaaaatcaagtgtcaaatgaatatcacaccgtccactagacccctagctctcaataccaatcatagaaaatgacatccaaaactgggtagtcgcacctaataaccaccataataccggagctcagattcaattaactccctgtacaaattataggtctttcacctacaggtgagtgcacacctgatctacctatgatgacacagagactaggtcgtgaaataacaatatgcaccgaacatgatcaacatgactctcatcagtataaccaaagtaagcaaataataataataacaaaagaacatattcttttttattttctaaaaaattcagcagcataacggtttattttgaataaaatcaaaaatcataacttgcataaatatttgtcaaaaatatatttggcagtgaccccagaacagtctagaaaaatatgcagatgctaatttttaattttttaaataatttgcaaatcaaaaaaatttagattatgtttaatgttatacaacacatatagaaatcaagtccaataatcaagttgagtccctacctcagttgttaaactttgtccaaaagacaatcttaagctcttaagtcccgagctccaattgtttagtccaatcttagatattactctcacatgtactattaaatggctaaataattatcatcattgcattctacattcaaaatagtgtcgatatataatatgactatatttaaagtttacagtttcagagcctcacctaagcggtgcacattaactattggtggtgataaaaattagttaccaaaaacctcgccgaatataggggtagtatatatcaaaatgaccacctcgacaagtaaatcacacccatgccaaccgtttgtcaaaataatacacgatattaccgaaaagttgccggaaaggggcggagctacaaaaatgtcaccgaaaaaagtagcaagttgagcgaaatggtttagtgtaggttgttctcctcgacgagctgagtctagttgtgaagacgactcgtcaaattgacactggaggtggccgaaaaattcattcaaagtttgaacctccaaactttgacctgcaattccaggctaacgacggtaaaaggagcggcgccgcttaggggttgaggtcgtcggcacctggggattaaaatagttcggcgcgtggggtcgaatggtgcccggagatgggacgtcggagtcacgccagtgatggggttttgtgggttttctttttttgtcatttggagagagagagagagaga

SEQ ID NO: 254285 - DNA, 828 bp, Cannabis indica
tatctcttattctcattatcaattaagattggtagcattgcttttaaacttgagtatgaccaagttcacattgaacttaggatcagaacaagtataattctcgtgtgttgattgtgtctgacaagcatctagattcatctgtttttatttttctagtttaatgtatttgctgattttttgttcttgatttatttattttgatttaatttttatttgtttatgtgtgatcttaaagttaaattacagaagttaatttctatgtatccgagctaaaatttctacaaaaacttataaacctagatagaaaccaaacaaagatttaatttgccatatagaacaatcattagaagaaattatatcactttgttatcaaacaatttttaaatttaaatatattatatatatatatatatatatataatttgagttgtcagttgaagagttgtttgagtaaaaaaattagtgttctgaaattcaaatagtgatgttatgtttaaatcaacaaaaaaggtatgagtttttatgaatttttcaaatccatttgttttagccttctccttaagatctatgaattaaagttgcttagcttatgattttgatacccaataatttttctaccaattaaaaattgcttagactatatattttatttcttattgtgattttttttctgtgtttatgaacacaattcaacaatataaattatactctcaaaaataaaaaataatataatttaagtatatcttaaactccatttttacaaaacaataattaaaaaaaatttattactcacgaatgagatgtaaaattagaaaaataaaaaaaata

SEQ ID NO: 254286 - DNA, 693 bp, Cannabis indica
aaatatgaaaactactgaataacataaccatgcatttctgaattccataaataacagaaataaattatttaaatagctataaataatttcataattaatcataattaaccgataatttccaaattagctaagcgggctttacagtaatttcctctaaggaagtatgtgtattttttttggggaacttattttttgtgcatgtaccattactcttaaaaaaaagtaaacagtgcactataaaagtgactatatctctcttatattaaatgtagctatttaacggaaattgttggtttaataattttatttcgttaaaattagatgttaaaactaacaatgttaaatcaatcaattaatcattttttttaaaaaaaaatatttgaaatatctaaatttaatttaaatataaacaaaattatattattattttttatgtaaatctgaatttaaatttgaattagatgtaattcaattaaataatcatactttataataaatttattaattatattgttcataaatttatcacttattttattgtttataaaattaattagatatatttttttataaataaatttaaatttaattaaattttatacatataaaaatataattaaattttatttgatttaatccatttattattattattatgtaaaataataattaagaatatctactctaatataa

SEQ ID NO: 254287 - DNA, 602 bp, Cannabis indica
ataaaaattgaacaaaaataaaactagatccatcaacaacataatgaaaaatacaatgcaaaaaattataacctaaaaataatacaaacttttaaaaccagtatcaacatcatttaaataaactaaaattttcattaaaaatgcaaaataaaaaccagtttcatcaacaacataatgaaaaaaaaatacaaatgcacaaaaagtataatgtaatacgataccaactttaaaaaccagtttcatcaaaattaaaagaaactaatcatttcattaaaagcaacagaaaaaaaacctatttcatcaataatataatgaaaaaatataatacaaaaaattataacctaaaaacaatagaaacctttaaaaccaatttcatcaatattcaaataaactaaatatttcattaaaagaggcataataaaaactagtttcatcaacaacataatgaaaaaaatataatgcacaaaagtataatgtaaaaacgataccaactttaaaaaccaagtttcatcgaaattaaaaaaaaaaaccaaatcatttcattaaaagcagaaaaaaatactcgtttcatcaacatcataatttaaaaaaatataatataa

SEQ ID NO: 254288 - DNA, 545 bp, Cannabis indica
tgtaaatgagatcaactcataaaaaactcacatgcggagttgaatatttatcgactcgcaatgttcaggtgtgtattataaacgaggcacgaaaatgccttgtaaaataatacttaacctgaaatatgaatagggggcctaactttcatatgagcaatcaaaaatatagaaaatagtttataagttgaattattcaaagtatgtttaagtttgcttttaagttatatatggtagatttgaactgctcacataatatttggtagatagtaaactactcgcgtataataaggcagactataactgctcgggaatcgaaaagcatatgcagaatataactgctcgcacatatacatagtagattaataactaccaaaatttatcaaaggaaaagcgagaacagtggaaatgctttctcaaagtaccttaaattggatcaaaatataaacgttgatttgtgaattagaatgcaatgaaaaaatatagttacttcaagtataaggtacgaggcattataagataaacatagatgcatataaagcaaagtt

SEQ ID NO: 254289 - DNA, 614 bp, Cannabis indica
ttctaaattaatcacaaccatttaatagtgatccaatggctaaaaaaatgtaaccatgatggttacaataaaaatgtaaccattgaaaccttctccatattgtatattatgttgttgtaacatttatttaatctctttgttggtccttgtattgtattacaatagagttgtaatattttgattttcttccattataataatatctctaacaagtatcttagaggggaggaacctttgaggccaatagatttttgttctctaataaaacaaatattttaattttgtagtaacaaaaatttgaaattattattgagttactttaaattatctaccttcgtttatggtttattacaatatttatttgtacgcgccaaaacaaaagattattattggtcaataactcaagacacggatcgcgatccgtatgaagacactaaattaaatctacaccgttgtttgaaaagaaatctaacgctccaaattgacactcactcctataaataccgaactcaaatctagtcatttccatcactcaattttcccgagaaacaaacaatttcatctctctttcaatccgatatatttgattcccaatggctcgtaccaagcagaca

SEQ ID NO: 254290 - DNA, 978 bp, Cannabis indica
atttaaataagcagcagaaccaatatatttatataatcttgaaaaattattattattttttaaaatatatatatcttatacttatataagaatcacatagagattatgtgacattctttatgtattttgtttactattctttgttttcttaaattttttagattttattatttttattaataaaaacctttcatttttttttatcctcactccctattaattaataacaacattttttgttcaaaaaaaaattaataacaacatttatgtatttatcaataataaataattagaagaccgaagaagaagtaactattaaattaaaaacataataaataaaaattattttataattaaacatataataataataataaattaattcaaataccatattcaataataataatagatagatatatgacaaattttattatatattatatatgagaaaatactaagttcatgtaagtttatataataaataagtcaaaatttagggatggacaatattcaatccaatttaattataaaatattagatattcaattacagttggattggattgaatgctaaaagttggattctaaatagattagattggttatttgatgtcaatctcaaaattcaattaaaaatcgatccaatccaattacatttataaatgttaaaaaattatttatataataaaaaatattgaaaaatataatgtatttttattagattttttttttgtgtgttgaatttgtaacatttcgttgttttgtgtatttattttcacgacattttgttctattttattacttagaaatattgttgttttaattatttaaaacttttagttatattacacttgtaataatgatatgtttatgaagtattaaacttaaataaacagtgatacttagtttttaattatttttcttcatatttttaagttaatattaaaatgtaagtttgtaattagatatccaatta

SEQ ID NO: 254291 - DNA, 432 bp, Cannabis indica
ttcacccaaaaaatcattcaagacattttgtcctgtggttacttcagctggccaaacagcattagaaattagttgtctaggccttcaaacaatgttagggagtaggtgttgaatgctattgttttagcaaccctgtatgcagtttggacaaactgtaatagttgcgtgtttcaacaaaaatgtaagttggctgagattgtaagcaaagaggtcaaatctgttgttaaattgagacttttaaactataccagtaggaggaatgagcctcttctcaagtatataatcaatgtaatggatggctggtaggagggtgcggttgttgcgcctggttctggtttgttttgttggaaattatttatagcattcctactagggtttagatttgaattatatggcattaaaaataaatgaaaaaaatacagtttaaaattt

SEQ ID NO: 254292 - DNA, 2826 bp, Cannabis indica
tcaagtgctacttaataaatatacattgagctatataatcactttcaattaaagcattgtaggcagctattcctttctcttaactgatacatgaaaaaatgtccttagtagtaccattagtgttacaaggcactatatgatatagttggcatatgttgaatggtttgtattgcaattgaaaatatttgaacaagtaaatgtaattactcataagatatggtgttgggaacatatgattctatatagcaatgctcttagtagtatgttgttctacattcagaaatatagattatagatagatacatgctacatttgagtacttttggtattatgttttgtctcattctaatacacatttatccataataatgtttaggtattcaaaattccaaagtgtgggaaatatcacattacatttccctgagaatttcggtggcgatgcctctcagattcactacattggcttcaaaggtgaagctactcaggtaaattcattttccaagagaactctattataacatttattggtgaatgaatgttaatacttatcaagttcatcattaactttgtgttttctgggtgatcagttgaagagggatgttgttgcaacgattgtgtatgaaattacaccaaatccttctgatcacaagtaagtattcttgattatcaaaatttgaattgaattgaaaactccattatttttaactttattgttttgcttttaattattttgttcaggacaaaggctgatggaggtagtggtctttctcatgtggaatgagaaatatattatatatatatatatatgtctacattttatggtattaataattagatatatgatatgaccaaaatgagctatgtttttggctatgaattcagtaccagaagcaattatcaagtcctgttgtcctgtattattcagcacagagtttacaactaaatagaaactacattgggttttttttttttttcttacctcaattatccatttattttgttttcaatttttgtatgaaaaaaacttttgataacaaaaaaaaaaatgaaaggaaatgattttgaaattgacttattaaataaagagaataatagatagagtacccatttcactatcttaattctcctcatttgtaatcgcaagattcctcatgtaggcatctatctttctcatgcatacatgcaacaaatcaatatatccttatttgctattaattaatcaaaaaattattatgtattatttaaaataaaatccatagagttcaatcttacaatctttgtacattctaaatttatcactcaaaaaatctcccaatcttggaatatgaagaatttcatatgaataattatacaaggacaacaataaattatagaaattctcgacaaacgcaacatataaaacaataaaattacaaaattcaaatgttacgagctcaaaatgagaagaaaaaaaattacacatgactccatatcaaagaaaataaaattttatgtaaaaatttaaacttgaaaacggatccaatcctacgcgagcattttcaaaatgaacaaatcaagattttgaaaagatctcaagagggctaagtatataatagtattgatgtgtaaaaacttccaataatatcacatttgagtacttagtattctggtttgtttcatctaatacaaaatttaataaatccatacacataatgtttagaaaattcgaaatttttaagtgtgggaaatatcacattatataaaattgttgttgaatacattttataattttattattaattaatattattatgagatcaaataattaaggaataatacaggacaagaagaggaattgaaagcaaaaaacataactcattttggtcatcataatatatctaattattaacaatttaacataaaatatagccatatttttttcccttcattattctaataaattttatttatgccatatatatttttttaattataaaaagtacaaaacataacttttttttaaagcaaaacttcataataaaataatatgtataaaacaacaatatacacagcagtagtgatagtcatacataataaattcgataaggaaagccttcccatttatcaagctcaacaacataaggatacttgcaactcttactactctttttctttccattattattagtacccgaattcgaaaaagacttgacaaaagcttgctttactttcttcaccttactataaaatctcgaaacctttgactttgacttactcgaaacattatcttttttgagtttcggagttgcttggtaaaattttggtggtgggctccaaaaagagtttgaataataggaggaagaggagtatgagcttgaatagtgtgaaggggtagaattagttgaactgaaaaagaaaccatgatcaaattctaacttggattttgtctcttccatcatacaatacaatttttatatctatatagagcaagagagagagagatattaaactataacaaagaaattgggaatgaaagaaaaactgtgtgtgtatatatagtgttggaatgaatgtgaatatgacttggaattttaaattgatagtgaagtgagctatttttgcttattaccttaatttcggacataattagtgttaatagttaataataacttaaatatggtatgatattagtatattacatattattgggttttagtttctcatataataaattaaccaaattatatatttatatacatatattgggggaatgcaattgattatattatatatggtattccatcttttattatgcattaatgttaattcatttttcacctattgatc

SEQ ID NO: 254293 - DNA, 440 bp, Cannabis indica
ttccaacctaattaattagttctataaagtagacaactatccactttcaatagataatataatagaacaatctccgattaagtaatgtaagttttattatctaattttccattttggcattattaataatatttgtatcattgaaactttttaagaggataatagcacttgaaactttttcagaggctaatgaaattttcatattatactttctttaagaaaatcgctaaaggtactattggtgtctaatatttttttttactgttatattgttattggtgtaattaaatagtatgttttatataatttaaaaaaataacttttaaagaatatcgttgactaatcaaaaattaatacttataaatctgtccaataacaatgctctttctttaacactatttttcgtccatgaatggcatgtggtcacgtctatattatat

SEQ ID NO: 254294 - DNA, 998 bp, Cannabis indica
cattcaagatctgacatacacaggtctcaattcttgaatttttccgatgccaaccttatcatatattctttagatttcttaattaaaacattatcttaaggtccactccttaattgggtgtgaatatcataggctggttttttttaataaatcaccattcaaatgcaaaaaaatcgtattaataaatatacataacaagtcttccattgctagtagacataggaaattcaaagtactaaaccagccatgtattccaataatataattaaaagtgcgactcatatattataataattgcaaattactatccaataatttctcatatattataataattgcaaaaaaaaggccaaccttatcatattggttacataatgtatttactgggtgtgatattcatgatcgaccaccacacaatattaccaataaagcatacttaactaaagcaatgtaatctccacttaaattttcttgctctctaggggctgacttcatggaagtataatagagtattgctcttctctttcgattctaaaccagtttcgtctgcaatatcaacactttcttattctagtctctagtgctacatggatcccaccggtgtatgtaacctctttgaggactctgtgcaaatctcacatgacgacattacttttgctctcaacccgggagaggttgatgaaccccaggaggctaaccaagtgctactgggtaagattattagccgccaccgattcggaaaagcagcaatccaaggttccttaaaactgtcttggaatgcgataaaaggctggaagtggaaggaacttgaggatggaatcatccagttcacgtttgcccgaagagaggacgcactgaatgtactggcacgaaggccgtggtttgtatgtggggcgttgatagttatcatgccatggcctgcctggctatctcccatggaagttaggtttgacaaaacccctatctgggtatacattgatcgaactccccctttacgt

SEQ ID NO: 254295 - DNA, 668 bp, Cannabis indica
catcaggtaactttctacttatcttagctatctctagctcaacaactgttgcttacaactctaggaaagtcaaaattgaattaaaaaaagtcaaagtaacttgggaggaaattttcaaggcactaggagagtgttttggatttttacaggttttagaaaaattatttcaaggcttttggggagtttaaaaatccttggagtaagaccaaaaaaggaggagaagaataaaaaataaaacaaatcagggtgtcccaagaaaaaaaatctttttctgccttggaatggagaatgcttggaggcttgatgaagataaaatcccaaagtgctcttaaaaagctataggcatgtgggaatgaagatagaagtatgaaaattttgttgccaactcacttatttatagttgagttcaatttcctaagtcgaaagctaatgtgagtcttttaaatttaaaacgttctaaggaagagacaaatgataagcgaaagatataattatgcctttttcctttttctttttaagcatatttcgaaattcctatacaattaggaataggaatacaaatttaaaaggtaaaaataattcctaatgctattaagattaagaaaaaaattagagaatcaaaggaaaaagatatatgataaacaaaaggccaaagtcttttctcttct

SEQ ID NO: 254296 - DNA, 1413 bp, Cannabis indica
tagctcaaatccaatccaatccgcataagtgcggattggaccggttactttggattggttactttttaatattaaattatttattatttatgaaaaaaaaaatatttttttcacataactagcaacaaaataaaataaattatagtcattttatgtctccaataacacattaaaataaataaaataacaaataataaattcaaaggaagaaaaaaaataattatgttaaaaaaaatataggaatagaatatacattttatttattaagttttacaatataattgtattatatgtattagacttttaaattattattttctttacatcaaaatgttatttgtatatataatttttttaaattttttataaatatgtgtggattggattgattggttacttttacatgttaatcaacatccaatccgcacaagtgcggattttgaattttccaatccaatccaatccgcaaagtgcggatatccgcactttgcgtgcactttgcggattggattggattggatcgtgcggattggattggatcggttattttatgaacacccctagtaatctttctctttcaaatttgaaatttcccctatataattgttccctccactactcctctgcttccccacgctggtgtcagccccctcccatccgctcaaccagctcgatatcccccatggattcactttcgaagaacatacattcaaccctttctcttactgatgaagaaagatccatctttggtgtccctgaatataaccccacgccctctgaatgtaatcagcccactcttcttgccaaagttcttactcaccaaaatgtttacaaacagatttttatcgaccaaatgtctggccactggcaaggtcgatttcgagttgttatcactgaatataaagaagatgatggactatttcatattacatttggttgtgaaggagacaaacgacgggtacttaacaaagagccatgacactttcaaaactatcttattggtcttctcacgccagatgctctgcaaaatgtctcaaaggaagacttaattttcactccattttgggttcaaatctaccgacttcctttcctaagcaaatcaaaaattttagctgaagcacttggtaatattataggagaattcatagaagtgtttgatgattccactaatgaaggttggggtcccttcttgcgagtccgtgttaaaatctgcacaaataaaccattgctgcgaggccaaatgatcaggctgcccaagattaaggatgagttttggattgacttttgctatgaaaggcttcccgagttttgttttaaatgtggtcgtcttggacacccttatgagcgttgtgttgctttcatggaacgtatggacaacagtaatgatgacgattttcaatatgggccatggat

SEQ ID NO: 254297 - DNA, 630 bp, Cannabis indica
aaaatattgtataaaatataatttaatataatacaatacgactttctaaaagagccataattgaacaaagttgtgagaatctgaactaaatgttgaaacacttgaatgcaggtgtccagttagttttcttcatcctcattttggttgaggtcatcggagtgatattgacatttaaaccatttctaatagcgcgttcagttgcttaatttaagttgcaattttcatatgtaacatataaaaaaatatatatttatatatatttaatacttaagcatattgtgttttattaattttcaattgattgtgttactttctatagataatagatatatggtatcaaaaattaaattggaaatcattaaatttataaatgtttcttcgacaaggctattttgttccattggatttggagaggttttttttagagaataattccattaaaaatatacaaaagctaaaaggatcaggactcttaaagtcaataacggtataacatattaaagaagcactatgagtatcttttaatatttttctaaagaaaaattatcatatattttgtaatatgtaaagtataggtgttactttgtgtttatggcggatcatattacgtattgtatcaaaatttaaata

SEQ ID NO: 254298 - DNA, 582 bp, Cannabis indica
accatgttataaaactaaaacacattagaaatcaggaactaaattccatcactaatcaagataaaaatacttacaacaatttttgtgtcgttctcaaataagcccatatatttttgcagtgcaactttgcaagtgattttcccttccatgctatccacattgtaattctctggaagaaaattatcttgggaaggatcccaggtagagctatcaaatccaaaaggagaaatagccagcttgtccctgcaaaaaatgatagaaaaggaaaaaggaattgaatgtgattgaagattttatttacaaattccaattccattactggaattcaggtgttacttacttgtgaatgttcaatgtgggttccaaaccctgattttgactactaatgactttgctttttgactgtatggatgacataattataattttgttggcgtaaacaattccaccctgcaaattatgaaaaacttcaatggacgatgcaatgctaaaaaggccagagcctctaacaaataagtgattttgcagcatgtgctgtaatataaaataaatggaaatgagtttgtatccccctctgtcata

SEQ ID NO: 254299 - DNA, 909 bp, Cannabis indica
cttgatttttggaggtggttgaaatttgattcttgtggtaatataccactatttttgtgggttgcaactactattgagctttttacaggatttgaatcttgaatgaggtggttacggtgaggatacctcctgggatatgacccaaacatttagctttattagggggtaagagtcatttacttcggggtggtactccaaaaccacttactctcactcttcatgttgtgtgtagtcttgatactaggatgacatacttgcttcaacgatgccatgtgtagctagagtgtgatacttggcccataagggtgtagggggtaagggatgtacccctagactaacccctcacccttagggtgtggtgatcctttaactcattgtcagagtatttatccaccctcccttgagggtagccaccttgcttacgctagggggaggggtgaccgttaaatttaacaattgtgaacaatagtaatagtcgtgactttacatattccatgttaacttagtcttgatatttttgtgccacatgtcatcatacttaccatgtcatcttcgttaaaatttgggttaatatttaccttccaaatttgtagcagttgactatacggtagaaactttcttgtgtagtccgcgcttcaattttgtttttaatgacttggtggtatggtgccaagaatgccatgtctatactagtaattatatttcaaacccaaaatattttttccactctttacacaccactccaataataattgggattttttctcaaatatacagaaaagacctaatatttacatttatacggatacatatgcatatttaaacttttatacaaaagaagttttctttttttttttttctaaaaaatacgaacatattgttaatgaagaggtgtgttaatcacaagaa

SEQ ID NO: 254300 - DNA, 657 bp, Cannabis indica
acagactacgtggttgcaaagattatttctatatcttctgttaggatagtaaatgctgtgaactttgaggcattctcccaaggatgttgtttggagttgccactgaacatgcttttctttccattacactgcctactgtcattatttgatctctgaccaccttggtttaagctgctgtgattttgtgaattttggtctggctggatggacgtatagactgtagtggtgtgttgttgatttttctttactccaaccgtgtccacacgtcgaactacttcttcaagttttataaatgtgtctgcacaatctaagaattctgccattgaccctacagtaagtctttttatacattttcataattcacttagaggttcaatacgtcctaggatagcggccagcctcccttcctcgatcaatcctttcacttttgtagctttagtcatgaatctattgatgtaagctctgaagggttctcctagtatttgcttcactctaacaggttttctaagtgagatgagagttaccgagaagaggagaactgtgcatgaaattttgacatgaaggagttccacaaattaaacttccctagagctaatttaaagtaccactggtgggcgacctcagccaaagtagctggaaagattttatagcgtacat

SEQ ID NO: 254301 - DNA, 6454 bp, Cannabis indica
gcatacatgagatgagagatggaaggactctgggggctaaccttgaaccccgagacaaggccatcctcttctttctttaagagcatcctagagaggacttcattgcacaaaatgaacaggtaaggcgagataggatcaccttggcggaggcctctacccggtcgaaactgtttcaacggaccaccattcagtaaaatcgaataggacacagagctgacacacttcaaaaccaacttaataaatctcggctcaaaaccgaaggcttccatagtcttcttcaaaaaactccattcaatccgatcataggcctttgacatgtccaatttaagtcccacaaaccccgatctcccctttaacttgttaaaagaatccaggatttcgtgagccattatgctgttctcagcaatccatctacctgggacaaaagccgattggaaaggcgagatgatctcctgaaggagaggtctcaaccgattcgccaagatcttagagattattttatacgtgaaattgcacaggctaatagggcggaactcatcaaagcaattagctcctacctttttggggatcagcacaatgaacgtttggttaatctctttcgcaaactcccctgtctcaaaaaaatgagccacagtggccaccacatcacctcccaccgtttcccagtggtctttaaagaatttcccaggcataccatctggccccggggccttaaggggtggcatggaccaaaccactttttggacctcctccgccgtaggaacccgaataagtaactgattagcatcctccgaaatggatcgagaaaccaggtcatcaagcagaggatcagcaggggagaccgacgacaagatagacatgaaattagaccagaaatactccccaacttgttgtctaccttcaatccactccgtatcattcacccgaacaacattaatgaaattcctcttgcgtttgatcacggtagcagcatggaagaacttagagttcctatccccatcgcgataccaaagttccctggatttctgtttccagatctccgcataccgggtttccacttcatctagttcaagtaagatgtccgcttccaatttcagattgtctttcgaaggcatccttcgttgcacttccaccaagaagttgttgagggtcttaattttctccttgcacattccaaagtgggttttattccactttgccaagcaacgacgggtgttatccaaacgagttacaagttgtaagctcacagttcccctcacatcaatggcccacgcctgttgaatgacagctttgcaaccctcatccctagaccaagcatccaggtacctgaacggggtgtgaaacctctcacgatcaaaaaggagatccacaaccaaaggagcatgatccgagtccttaatagcaagagcacgcacaccggccttcggataggacatcatccactccggatcacataacgctctatcaagtctctctttaattaagtcctggaagcacctcccgttagtccaagtgaaatgattccctacgcaacccagatccactccacccgtggaatcaagtaaatcattaagatcgcttgcatcactctcctccacctctcggcccccaaccttatcatgttggcccaagatagtattaagatcccccatcaagagccaagggtgattcaaggccaaaacctccaaggttctttcttcccaaaactctctcctcgcagctctagaaggcgggccatagaaaaaaagacaatgccaaacaggaccattcaggatgttagaaaaaaccgcattagtgacacccacattctcagacatcacctgaacatccaacccagctttccaacaaaggcaagtcccaccagctgacccaacagcctcaacaactgaggcacctccaaagcccaaatttcgccacaccccattcatccttgagccacttaatttagtttccatcaagaataaaacatccggatcttcccttgtaaccaaagctcgaagagctttcttagccgacggactcccaagtcctcggcaattccacgaaaggatcttcatggggctttggggggcatgcatcagcccgcctcctcggccattgaaaaatcttgtatcacagctcttggttcgacaccttgtttccccactctataagtaacactggcatcggacttagtagctctagcatcagattccaaggactcaaaacccctctcagcctgacccatctgcacaaccggtgccctctcaggtccactaatcaaagctctcccatcatctccatctttgattccttcaaaggagccctccaccgatctcaaggaatccaaaaacatcctagctcgtttggcttggtacccactatcttctaggttatccgaatcaccagggacattaactccacttgtctcagcaaatacatctttgactccggtcttctcaacaataataaggcaactgttcccacgactttcatccgtgaatttagactcaaactcccgatttgcctcaactttcttgcgtttagagccagccctactcccgggctccgggatagatttcccaaagatgggaatcttcgggatccctctaggtcccacaacttttgactttttaagcttcttaatctttcctgagtgatccttacccttctccccatcctctcggtttgctccaaacttaatcgggcccaatttctcttgaaacaacttagcaacatgcaccacatgttgggaggggaatttcgacgtgtccacataatcgttgtaagcaacattgaaagaattatcagcacgttgcgagaccaccccttccattttatccctctccactctagtgtggctaccactgttagcaactaccatacccggagtatcttgttctcggccatccttaagaggcatctcatcaagaaccggatcaaagttctccaacctattacgatcatgcaaactctccacttccaacaacgcaaaaccattctccaatctcgagccatcccgcagccaagaaccgaacaaggggatatttctcccatcctggaccgtaaccatacacttcttgccagaacagtcagtctcgacatgaccaatcataactccacatttaaagcaaaatataggtagtttctcatatttaaaaagactccagactttcttttgaccatattcaggtagagaaacccctgccaggagagggactgccagattcaaacgaacttggaacctcaaaaaatcattcataataacaccatttttcctaaccttattcgcctgaagaagctttcccatccgacccgccatctgttgtatgcaagcctccgtcataaacgggagaggaacaccccgagccttgacccaaatgtccaagcatgacaggtccgccgattcccactttccatcttcagggagagctgcaaccagcaagtatccactgcagaggttccaggggccattgtcaagaacatatttaacttcctttgaactacccaagcggaagatgaaggttctaggtttcaccgtttgaaacctccaacctgggttgagtttccacagacccgagagagccttccgaagagtcccattggagaccggctttttcgaatagaactttcccaccatcgagtgagcaatcgtctccttggccaaatcgttatctggggtgacttcgatggagaaatcatcaagacaaaaattctcagtttcctgggtaatttcgtccacaagaggagcaatattcaacgccgccattatcgatatacctgagagtaaaccagaggaaataccacaaacacaaaaaaaaccaggcagagcaggtatagtaactttttccctgaataagctaaggtgactgcagcaaaataccacactaaccttcgacagatccaaaaggggaagggtattaaaccctaagacacatgggctcgtgtctgtaggtagtggccgactacccatggccaaaaatggccggacgtacggtgcgtcctccgtcatacttcgcacagcccagacgggcccagatgaaggagcttcaaattctcacagtacggtaaggaaccagtacggtgacggaacagtacggagaggattaaaaaaacgttctcataaatctaataatagttgtatcattgttaaaaatgacaactcccagacacacattcttacgtggtgtgatcttgaagttatcaaatggaaagaatgttataaatccattaattaggtacgtccatctttatagatattagatacacatgtgacactgacaccgatagtattatttttttttaaataaaactccaccttttattaaattgaaaaatcagccaaagaatttgcaactaactcaagagacacaaaactctccgataatacttgactacatatggaaaataataacgcgcgtgatatgtttaattgctacaggagtaagagctagtctaactctgctaactatatatataatatgagaaatgctaaaaggtgcttggtactctcttacgtgttaatatcgttattggtctaaatgagtatcgagtcacatataatataatataatataatataataatttttagggagtatcgttagccaatcgcaacgcgacataccgagaaagtgctaggcgtgcctaatagcaattctctatatatatatatatacgtgcacattctaattgtgtttgtggtgctcgataaacgattgtatataccaaaaacattaataccaaagataaaccatgcttatttcttcccgaatatatattttctcttgaaacgagccatctaattgcaaatacactaaaaaatgtgccaaatgtatatatccaaaactcagatatatatatatatatatatatatttaaatattattcactcgaacaaggtattactattttttggacaaatacatactaataattttatgtagttctgcaattctaaatttgtgtaggcacacctttatcaaccaaccgccattcacatgcacaattaatactatattttgaaatgggaatatatctatagaaaagtataataatgactattacattttcatactagttttatagctactgtgaattaactcaaatgagttttcttattattttatttagatttttgaattttactcccattttcaacatattattttgaaagtttaccacaaaattatttgaatggatctcattattatagtaatgtcgtcataaattcataaataattatgtagctcaataataacaataacaaatacattgaattacaaaaacgacgtcgttacgtaccttgatcaactgagcaagtggctcccgacgacgggggttggcctcgcggtgtgggaatcgataatcatggcgacctttctgtctgtggtgatgcttcgcaatattcctacttagcgcgtgcattacaagccccaaagatacactgtaaagctcgctaacctcaaacatcaccggctccgacagcaccaccaccgtcccatttccaatacttcttcccactaaaactccgctcttagcctccaccagcccctcatagcaagtctcttggttcgtcacaatggcgctcagccgcgatcgaacctgctcgaccacctcctccgacgtcggaaactcggctgaccggagattctccgatatggactcgagaaactcgacattgagctcgaagagctggcggcaatcctccacggcgccggcatctctccgggagatggagttccggtggcgttccggtggcggcggaggaatcggttagttgctcgggtcattctccgtgccttctttaagcattgcttgacggagaactttccgtaagtgtagggatcagccggggtgtactgtgtgatggaggagagaattgagcggcatagctttgggtagagagaagagttgcaatttgggtcaagcggagaggtagcggtggcggtggcggtggaggtgatgaatagaaataagtagagagagggtttgatgaagatgatgagtggtagagtcatggtgaaaattgaataatgagagagtagctactactactagctagatatgtagacatttatttatgttatgtggtgttattacttcattcatatacttgtttgtttgggaaaatgaatttatacaggaaggtggtcatatatagctgtttaattactacatggaataaatgcaatcatgcatgaattagcatgaaaagtcagtaaaaaaaagaacttgaaatataaggcgaggagtacaaagatctttttttagttaccagtctccatattatatatttgataaaataggtatgtgagataaaatgtaccaataaattatacagcattccatcaaaaaagaaaaagaaattataccctttagcaattttttgtttcggacaaggtgcgggtgggggaaaacatttatcgctggcacatttgtttgatatttttttttttattttatttatgtatttt

SEQ ID NO: 254302 - DNA, 1224 bp, Cannabis indica
tcactgtcacgggtctcggtctggttctggttcaggtcccatttctgagtttgggttcgggatcgagactggggtgtggttataggtctcggcctttgttctgtgtccctagtctggttccatgtttgggtctgagttcaggttgatgtttaggtctcgagtccaggttatggttgggatgcgggttccgctcccaattcgggtctaggtctgatttggagttccggtcctggtcccgttacggttctggatctatgtccaatttcagttatgattccaagtttaagtcctagttccagtccctgtcaacttccaattttggttccaatttggggtcaccgggtacgggttcgggtccatatttgggtttgggactgggtttaggtctcggtgagggttcgggtccttgttaggggtcaggttaagggctgggtcccaaatctagacaccggctacgagttttgtcaaagcccttggtcaaggtctggatcccaacctcggttccctattcaggtccatttctggtgccgggtgacgagctcggtcctatgttgaagtttgggtgtgggtcgggtactaggtcccggtcctagttctgtttcccaggtcaatatcatgattctaggactaggtcctggttattgtgtgggtttgggtcccggtgtaggttcgggtttgagtcctagcgtcggttcgggtttaggtctctatctgggttttgatctaggttcggatttggctttgggtctgattctaggtgtgggtgtttgattttgggttcgagtctttgtccgggtttgtgtctaggactggaccccgatatgggtctaggttcgagtctaggtccaagctcgggtcccgagtggggatccaagttttgttttcggttaggatctcgatccagatctaggtccatcatttcgatcccagactgggtcttggtccgagtccaagtttgtattcggatccctatctcggtccaagtctgtgttttggatcgggtccaagatttaggtctaggttcgggtctcagttctggtctgggtacacgacaggttcgggcgcgagttccagtctttgtttaggtctaaggctaagtctgtgttcaattctaggtctgtgttcgggtcctggtcacggtcctagtcttgttctagggtcctggctcgacgattcttgttcaggttctaattttgtgtcccaggtctaggtctgggttcgggt

SEQ ID NO: 254303 - DNA, 808 bp, Cannabis indica
accttacatatcagtactaacaacattttctaaccaaaattatctattatgtttgtctaactcaacattaatgtgccaacgatcaccgaatcccacgtatgattcttataaaagtcagctttcacctcagactaacagtatgtcaaatactcaattctctctaccttttcacatttatattgttattattctacaaagttcaaaccaaccattaatattcctaaccacatcttaaaacatcatttatctcaaatatccaaagaggcatatttctcaacaatccaaatctcaaaccatttattaacacgttttccccaactaaaagtgatgaacaaaaatcttataccacttctctgtccactacttaaatattgacacattgttcatttatatccagtatctagttctttttttttttaggaaaataaaaataaaattaaaatgacagcagcttcttcacaatatggataagaatgaggttgccaaaaggtacggatattaattaaccatataggaccagtcatatagtgtgaactgtgaagtgaatttattttgagtttttctagtttaggcttctaaagaagaaaaattgcatgatatggtaaatggagaacggttattgggtcccgcagtagaaatagctgaggagaagcttacctaccctaccatgtgatatctacttacactttacaagggtaattcaatagtagaccaaaatacccttaatctccccaagcttttatagaattactaaaaagaaaaaccccatatatgaaagcatgattagaaaagaaaaaaaggaaaaaaa

SEQ ID NO: 254304 - DNA, 1181 bp, Cannabis indica
tataactataaaacacagcgtaccaaataggtatttatcctttattttattgtagaagtacaccaaatagggggtacatatatattgtgtgttgattgtatttattatttaatttttaataaataattagataggaagttaaaaagtcacctggggcaattgcccctaattacatgtaggttcacatgtgatgataaagatctttgtatgaaataaaaatatgtaaataaattattgttatttagaaaacatgtatgattgtctatgcaatataaattcgtaaattatatgttgtaatagactcttgaaaagttttttattatattataaatgattgaagaacaatttttttgtttattgagagatattaaatgtatatagtttattcataagtagagaagtcttgaagtacttcatatgtaagaattatagatatatgattatttgctatgaaaattatgattatacaacaagaatagaacaaatatatgattttggaatactatcattatcataaatgaatatttatattatcattaatatgttatgttcatattactgacaattttaaacttcgatatgaacaacattgtatataaatacacatgaatgattaataagttagataaatattgatgttacaagaaccctccatccataatttaatagtgttcacatacactctagaagagatagtaaatatatggtcatagataatatactgtgatattttaaaagtgataacaataatcttatgatgtatattatcaccaaaactattatggatcatacgtgcatgaaggagagttatattcatgttgcattctttttcccttagttcaagttttgtcccactaagttttcttgacaaggtttttaaataggcaacttgcaaataattatgaatattccccctagctcaggttttatcctactaggttttcctgacaagatttttaatgaggcaactttatatcacgctaatgtacttgtactttatgaagtaagttgagaatgtgtgcagctgagatcattggcataacatattcgggaaatattttactttcaataaagcaatatcagcattaacagttctctataaaagataattgcttacatcactcaagaaatagtaaatggaaggagatagaaccaatttcatcaaaattcttctttacaca

SEQ ID NO: 254305 - DNA, 699 bp, Cannabis indica
tttttttatatatattttgtaaaagtttagttggaaaaactctcccctgaatacttgcttggtttacttctgccatgatctaaccttatcaaccttactacagattgtggatgagaatgtggttgttaaggattttagaggaaaggaaattgaatcacagttcatacctctgtctcatgtttctgtggccataagaaaataccatgcaaaggcctatttgggaaaacttccaagagtgacacctcgctattggctcgcattttctgccattgtaccacctcttggattcagtacttacactgtctcaagtgccgaaggggcagcaggtattgaccacttgtattatatctataatacataaatactcatagaacttataatagttagattagagtctccatatgtatatgctcaagcatttttttgttccatattcacagctggtggtgtttctgagaaagaatcagtgaatatgtcagctagaaatgaagatcataaaattcaagtgggatcaggaaacttaaaacttgtttattctggaaagaatggacaacttacaaaatacattaacaaaagaagcatggtatactgttatgattgattgttctaataaaacctggttttcttttcttaattatgctacatcattaaagttctacttggcttaatttttttgtgctattcaaggtggatgagtca

SEQ ID NO: 254306 - DNA, 588 bp, Cannabis indica
attgtttcttttattatgtctttgatctctatgattagttttacctcaaaaaatcagaagtccttcacctcctgggtcaaatctctcttttgatcttttctaaattttattcaagctcaaggttgcttttacttctcccattggaagagtatcttttcctacaagatcgtgtctacaaaatgttcataaaatgtaaacaaagaactgagtaggattatgccatggtcctcttcttcaagctttactcctatgttgtgtaattccaagattttgttaaaatcatcaagatgctttatgagttctttagcatcatccattcgtagagtatacatctttatcttcaaatataatttgtttgccaagaattcttcaagtagattgcagcgcgcttttccccactactaaaaaaaggagtttaggcgaccgctattaatagtcgaatattgtataattgtcaattcatgagatcgacacctatgctaccattgcaaaacatgatggaatagacatcaattccaaagagaaataagcaaccattttaaaaggtctctaaggaatgctactattttaaacagtcgctacaccttt

SEQ ID NO: 254307 - DNA, 621 bp, Cannabis indica
gctatatatttgttaaatgagtatatgattaattctttgtggtccataacaaagcattaacaatcgttcggcgtcatatatcaccacgtatccaacacattattggttatttaattttcaataatttttcttagtattattcttttaagaaagaaaaagaaatcgataaatagcaacataattacttaaagttttaaatttataagtaacataacataacactcaacgttggagaattagaaagtgatcgagattgacgagagggtcgagtccatgatccgaaaagagctgtggtgcggtctgccttacctaatgtttcttcttccttgtttaattttctctaaatttgtttccttcttatatataattatttataattcatattttttttttctctattttctaattttgtaaaattatgattatgatatgagaggtctcttttaatttgatactaatttgatttcttgttagtgcataaaaatattgttatacaaaatgatattatgttatgtaaacatttattgacaacagccatagggaatacattttatttactgttatataaaattattatgtatttaagtatttttttttattatatatttactgttatataaa

SEQ ID NO: 254308 - DNA, 1057 bp, Cannabis indica
tacagattgtggcacgtaattccttgtggacatgatgggctaatggacatgatgggttgatgtcagaaacataaaataaaaaccaattaaattaaaaaacggtattaaacggtacaattttagtattataatggacccactgtatttttgaaaataaattataattgatgtacttggatgtaaattttcccaaatgttactcattacttttttttttttttggtaaatttacagatatggcttcttttgccatttaacgtttacaaatgtatatgtaaatttgttagtatttctacgatttttttgaaaaaaaatatccagagataatatagttgttaagtgcgtaggtaactatttgggatccaatattttgaaaaatatcatttctcaataatagtcacgatcaatattacatgaccactatttaaagtagctaacaaagcaatatttgtaaaaccatcttactagtcaaaacgagactagtaaaatctgataattttgaaaaagttgtcatttgcaagtaaaaatgaattgagattagtaaataggaaaatttgttttttttatacaaaaatatgttttttagaaaaaaaaaaaaaaaaatttaaagtaactagaagaataaccagttaccttataattgttttttttctttacatttttgttttaatttttccgtataaaataattttttgtttgtaataaaaccatatttttactacattatatagaaacctgtaaaaaaattagactaataaatgaatagttatatacattaattaaaagtgagtggatgatgaatactagtttggaattatgatcagggagcaagccagcaggtatgcaagtggaaagacgtgataacaccagtaggaaacctaaacgtgagttcccaagaaatagaggagtattgcaagccaggacagtgtgcagccacataaggactaatgttcttacttgtatctatttggtcatgaggaacctcaacatagctgtcttcaaaaatggtgcatccattcaattactcaatgataccattaatacaggatgctccact

SEQ ID NO: 254309 - DNA, 661 bp, Cannabis indica
ccctcagctaatcttgctcataagtgccttcaagaatcattcttcttttctgatcaatcgaatcaaggaagtactaatcaaactagaggatctgctcctccatctgcaagagctccttattggaatccctatgctacaggatctcgaaatttccctcccaacaatcagggccaaggttccacaatgtcttcaaccaatcccagaggtccctctcccactcaatttggcaacaaacctgtctgtcaattgtgtggcaaggctggtcatgtttcctcaaaatgctatcaacggtttaatctggagtttccaggccttggtgctggtcaaaatgacaaatcgtctccgatgcaagccatgcttgcctctgcatcttctgtcaatgatccaacatggtatccagattctggagccaccaatcattgtactttcaatgagcagaatctgatgcagaaacaagagtactatggcactgatcagatccatgttggtgatggcactggtcttcccataaacaatgttggtaagactttctttcatactaatctcacttctaaaaccttcattctcaataatcttctccatgtacctaatatcactcgaaatcttctcagtgtatctcaattttctcatgataacccagtttattttgaatttcatcctg

SEQ ID NO: 254310 - DNA, 535 bp, Cannabis indica
aatttcaaatcgcatttttttgcttgcatcattaaatgcaattaaataactcgttacaattaaatataagtttgatagaaaatgttcaaactcgttgtctatttagtctaatgcgagataagaataataactattaaactaagattgacgagacacatatataccttgggacaaacaaagtagtaaaatgggcaagacaagacatgcaaagaccttaaccctctcttgagaagagaagaacttatgatacttaaccgcctcgtgttactcatagcataatgatcacctcccattactaatacaaatgaagggatataacgagatgaaatattttcaaaacttcgcgttttttttttacattaagatggacaagaaggagaattcatgtttgacgagatacaacattccaagtcagcataccgttaatgaataaaataagagcagttagtggttattagatattatctcatgtgtgaataatgaatgtgggaatgtcacatttcattaacagttataaatgaatcaatcctaaaaa

SEQ ID NO: 254311 - DNA, 680 bp, Cannabis indica
cagtcccccatttcacaccctattgcggcaactagattggtaaccacttgctcctccatacataagcccaacagttggctttgctcatgttaaccattaagccagataccgcacaaaatccttcaactaatctgaccagttttttaagtgactaactcgaatcctatcttttccctctaacagcttagactcaacagctttattcaccattcttcctagaacatccgctaccaaagtgagaagaaaaggggaatgggtccccttgtcttagtccccgagacccgttaaactttccccttggcttcctccacttttctccaaaccctttattttccatcacaaggtcaaaaaattccattctacccgatcatatgctttttcaaaatcaatgttaaagaccaatcctttcttccctctatttctatagtcttcaactgtttcgttatcaatcaacacagtccagtatctatctaccctctacaaaggccgactgagtgtctaggatagtgtctaccaacactcccttgagtctgcaagcaccttagcgatgaccttgtacacacttgttatcaggctaattggtctaaagtctcttactttgcaactgttaatcttttttttaaaattaaacatatgaaagtttcattgatgcaaccttgaatcgttccatcttcctcaaa

SEQ ID NO: 254312 - DNA, 708 bp, Cannabis indica
aaactattaagaaacgtttaaatttatttcaaaaactaaccatttgtccaagtgttttctctttttcttatgtccaaaataaattcctgcaaaaaaatgaattaaactattatgaaatgatgatgcaactgtaaatcaacttgaaaaaccatgatacttaactcaaattaacatagttgttatccttgtgatttttcatcagttttatttgaattatatcaatttccaactattataaaactaatttgcaactatttacataaatcttaccttgtataactgctatttgttggtacccgtcaagtgaaattcctccataatttgtaaactattataaaacgataatacaactgtaaggcaacgctaaaaaataaaaaatagacttataggtaacgtgtcgttccttaatttgaattagatcttgctattgtgttttaaaaagctgaattgcccattgtaaactagaaatcaactagaatgcaactatatatcacatagatttagttttttaaaaaaattctatatcataccttgttttggtttcagggggggagctctagatctgtttaatacagatctacattgcatgaatctagattttcgaatctagagggagttatttgtaacgattagatccgcaagtcaaatgttaatttcagtttctccctagttttgtggttttttttgtttgatttttcgtattttgat

SEQ ID NO: 254313 - DNA, 544 bp, Cannabis indica
gttgacaacaaagaaaataatcacttctctccctcttttttctatcaaagaagccaaagaaaaaatagaaaaactgtaacagtagaaggctcgatgacaggagcagaaagcggagatgctggagcaactttgagggaactacgggcaagacacctcaaaccacctcaggcactcttggttttcaccattgctaactttcaagcttaaaatcctagaaagaactctttaacacacacgcacataaaagagaaacaaactttaagagaaatttaagtgaatgagtgagagagggggtaatcgtgagttaaggggtataaagagaagaattaaaaagagaaagtgagtagttacttaagataaatacaattaatgaaatcaaatccataaaattagaaattattcaaaaaggaaaccaataactcttcctttaaccaattcaaaaaaaaaaagagagagaaatgaaaagagttcaaaaatgccaagtaacacatgtttccaaaaaaaaccccataaacataggacgccccaaaaaataataaaatat

SEQ ID NO: 254314 - DNA, 3485 bp, Cannabis indica
taaaataatgaaaaatataattgattctattataaatgatatgcaaatgaactatcctaatctgaaacaagtcatgttaatacccaatatataccaatatatatatatatatatatatatatatatactgcaaatgtgtataagaacaatactgtgtcaatgtcaaggctttttatctatggtctcatagtatgaatcattgtcatcatgatatgaaatttaaaaatgaccaatgatgactttacagtgatgcaaattgataggacaccaaagaattcacaactggcaataaccaaatccatacttctttcttcttcccttaccctttaagtctcagaaataactgaagacagtttttattttaaactataaaaatgtggatgagaaattattttccaactaacctaaaccagaaagaaaagaacaaatcttttcacaatgtataaaatctataagagctgaaacaaaagttctcaggttgtagaatgatgctaatactactacaacatatttacataagcaagtaaaacaagcttgaatgagagaaataagttagtgagttagcttagctgcaaggattcatactcacaatcatgaggaatgacgactcattacgtctagtaatgtttatatctcaacattcaatttgtcatgtttgctcctacagacaaaaataaaacatgaaacaaaatggctttcgtaagtataacaagagagatccatgaaactagttacacctacaaaatgtaagagaggatgccaaaccgaaagaattaggacccgaaaatgaaaacattaaacatctctactgaatgcataatcaactaatgtacctcatgaaagtaagtcttaataggtaaatttatttcaactactaatgtccatatatgactctttaaactatgaaacaacaatacccacaaaaggaaataacaaaacataaatttaccactttcagagcagtatcagttccttgcttgaaacaataagcatagatgtataatccactaaaaatcactggtgactcgttaaattccaaagccttcttaatgagcaaaaacagtgtcattacgcctaggtggtctatcgggaatgcttcccggcttgaacttagaggcctcgtgtttcgccagttcatgtgggacgggactgttactcgaaatgagcatttgcttgagatcgtaaaagacatcagtatcgtgcatagtcaagaacgttgaagcaaccccagtctttcctgcacgaccagtacgcccaatacgatgagtgtacatctcaatatttccgggcatgtcatagttaatgacatgagccacatcaggtatgtcaataccacgcccagcaacatctgtggcaacaagtacgttatatctcttggttcgaaacccttcgaggcttatttctctctgttcctgtgattttccaccgtgcaaagttgtcacacgatagcctgacctatccaaattctttgccacatgatcagcattcttcttggtgttaacaaaaacaatagcagtcttatcaccgagctcgtcaagcaacctctgcaatctattcaacttctcagattccttagtcataaccacattctgggtgatcaactcagtagcttttccagcagtaccaatagtaacaacaacaggatttcgcaagtacttcctcgcgagacgctcaacagcaggaggcatagtagcactaaacatataagttgttctgtaaatccttttctcatcaagctcttcatcctcattctcgggtttcaaattactcgaaggcatagcatccaacacacccacaacttgtggctcaaaacccatatcaatcattcgatcagcctcatcaagaacaacatagttacactgatttagaacagcataacgcctttccaagcaatcaatcaaacgccccggtgtagcaataacaacctcacacccttgtctaatcttaaaaccctgttcttcaatagactgcccaccaacaatggacacaactttaatgcccatgtaatgagcaaacttcatagtctcatcctcaatctgctgagcaagctcacgagtgggcgccataacaacagcataaggcccttcagcctcattctcttcgcttatcggtggtaatctcgaaatgtaagtcaacataggaagaacaaaagcagcagtcttaccagaaccagtctcagcaatgccgataacatcgcgctgttgaagcccgagtgggatcgccgccatttgaattggcgacggtttcttgtaaccagctctctccacagccttgagaagatcaggattcaatttactctcgggccaactcctcattgggcgaggtaacctcgaacccttgtatgaaatattgaaatcttctctgaatattctccaatctctctcagtcatctcttcaagctttttatcgctccaatggcgatcaactctcatatcaaacgtatcatacatatcagcagcttcttccttaagcttctgagcagcagcctcctctggtctctcctcaataccttccttcttcctaatctcatctctaagctccttctcattcttggcagcaagcttcttctgctcacgacggtccatcccagccctaaaacctcttccaaacaatagctgagcttcgtgaggattctgatagagagaattcatgtcccgagaagtgtcttcagtgttctcccaatcgaaagagaatctgaacttctcactaggcttaataactctcttcttaggcttcttcgatccaagatactgctctttaatcgcttcaagctccttatcgcgctctctttcagccaatttctcaatccgagcgcgatctctccccttcgtctcatcttcccgatccctctctctattacgccggtccgaccggtctcgttcccgctcccgttcccgttccctatctcgatcgcggtcccggtctctatccctatccctatccctttctctatctctatccctatccctatctcggtcacggtcacggtcacggtcgcggcgatcgaaatcggagggtttatgatggtcgttgttgttattgttgttggcggcggcggaggaagaaggagaacctgagcgagcttgggagagaagcaagtgttggcggcgtttttggtcctcgaactcgtcttggcggcgctggagagctaattgctcgcgttgagctttggtgaggaagacaggcttcttcaagctgccattgacggcggcggccgccgcggcaaccgcgccgaggtcgtcgacgggggcacgtttcatctagggtttgaaacggtactgaagagaagagaagtttccggaaattttagagttacagaaaaaaatcgtgagataaatctttattttctcgtgaagtttttatttcattttagggataatataagtatttatttatttttttagaaatgttttttttttaaacatagtattaaaacacattaaaattctaaaaaatttataatattgacatccgctctcgaactg

SEQ ID NO: 254315 - DNA, 842 bp, Cannabis indica
aaaaaaatacattaaattaaattaaacctaaaatacacacttaaaaagatttgttaaattattataattctgcgagttaccatgtgtcgagatagaaatttagccaactcgttcgtatttatagatgagataaaaattgtaaagagcacacacaagaatttatagtagttcactccccatgtcgcggtggataatggagctacgtctacttcgagtttttatttctcacgagaattacaagaaaaataactaagtctgcaaagtctaatttctaaagagagaaactagagagatactctgaccttatgagtacttttttcaatatgaaaaatgagttagaggacctcctcttttataggacaggggccctattaaaataataataaaatattctaaaaaatataaaaaatacatttaggctatttttgaccgttgatgatgatttaacggtgaaactgactgtaaaggtcagtcgtcaatttttgaaacttgagtcgcatccgcgggacccacttcaggtaacttgtggcttaaattcgtaactttcttgagggcgaaatttggagttgccaactttagaattgtgattggagtgtgagacatgacttgatagagtattgaaataactttgaaatgcaagttgaatcgcgtcaatggaatcaattgagtgagttatgactgtttactcaaggttgttcagggaaccagtgtccaggttgacatccagtgcccaaggttgacatatgacgtcaacctggatgctgggtgagtgggaaaatgtgttgggatgtatttttgatgcctaagtgatattttgacatcacttagctagtttcagtgtt

SEQ ID NO: 254316 - DNA, 704 bp, Cannabis indica
taaaaatcaccaaaaaattaatacaaattcacttatcaataacttttgtgatatgcaagatagacatcattttgtattttaattttaattataaattcattatttgtcacttaaatttatataatagtctggcccgtcttactcttgagccgaccatatcttaaacctcatgcagcataaactttggtagtgtgataagatatgtacaaacagtagcaatattgttcaattcttcgagtctaataggctctcaataagaaaattgtaaaatattttttttttctaaagttcatctaataataagaagactagattttatggtcattaaaattgtgaaatactttggtcgtggatataattttgaaagatattattatcattgatatattttttgtttggctttgaattgactaattaattatgctaatcacaagagctattgagctaaacttgactaatcaattagtaatctttaagtaataataaaataaataaataacgattagctagaaataataatgagagataatccaaaatagaaagtagaacacatcattttgagccatgaactttccccttttaaatttaattaaagctcgggcattataattaaaattatttctattggagaacattgtcccacatggattaaatgtaaaagtattgagccatatataagaacatgggctactccactcattgcc

SEQ ID NO: 254317 - DNA, 507 bp, Cannabis indica
tgactatatgtcaaccttggcacacattacggcttcagggttccatttaatgttgagtcatatccacagtctaaaacttggctgaggcatgtctctcatgtatcttaggacaatgtctaagcatattgcccataacaagttgataggaacaaaaactaatgtgtgacggtgcacaggatgtcaacctaggtgcccagtactgttgtttgattaggttgagccctgggatgtccatgtgacatcctcagcttcacggttcattgatttagggtcactataggatctattcacttgaactttgtcaaaggatggcagctagaaacgtctttaataaatcatagtgcctacttgggcgctgactactgtcaactagagcagctacacagtttcaaatgctcaaattgaccacaattggtccattagtcccgatttttagggcccaaggttgcttccttctttcaacatttcaaaattgttgcccatgtcatcgggtcaaatttttgggta

SEQ ID NO: 254318 - DNA, 447 bp, Cannabis indica
cgtgttatgtgtacaagagtgtacacataaacaactcatagtgacagtattaactgaatgacaccttaaatttgctactagtttagtagtttggaggattttgctgctaaaatttcagcttaaaaggctaaatgcaagtgaaatgacaatttggaagattttgccacaaaaaactctttagttaaacctgagcattgccaacaacttttttactttattatttaaaatatatcattaaaattataacttatttattttacctcaaatttttatattacaacatacattaatttctctattttttctctatatcatttaaatattatattttaatatatttatacagatatatagaaaaattgataaaataatattaaactcaataaatagttatctctacatttagctaaatactatttagtgagttaaaaaaaataaataaaataa

SEQ ID NO: 254319 - DNA, 698 bp, Cannabis indica
ccaaactacttgtggctaaacactcaccttgtaaaattatgcgcaacaaaattacaagctctactaatactaaaaaagatacaactaacaaacaagggagagatcctattatataaaaagaagaatagttctacaagcgtccaactagactccttcccattgagagtattaataaccactcttgagtttgcaactggtattaatagccacttccaaagccaagcagcagggcaactgcttcccatacaaagcatcagaaaactctaaccatgccatctatacccacaccatcttgccaagatggttcctaacttgtcaccattgtagttttctgatgcttcccgaggggcaggttgccaaacatctaacaaactcagagcatgagtagggaagagagaagcaaaaggatctgcataagagatacgaatagagtcaatacactatttccaattgtctagcttatgattttgtaccttgtcattgcggacccgctagatagtgtcgacaataatcgaagcctaaagaaaaacttcatttgcattaatgttggacttttaagtcccatagaagtttaatccagtcccacatttgaatgcctgtaccaactataggaaagataccccacagcgagaaccaccacaaatgatcataaacctcactacaaccacccaaaatagattaaatcaccacaaataaac

SEQ ID NO: 254320 - DNA, 532 bp, Cannabis indica
gtccatttaaatattatttattttctgggatattacatcggtcaacacatataaacaaaagtcatatttatattttcccttttcatctcatgtgactcagcattggggtctccagaaggtcaaacaattggcgactgaccttcgcaaatccattcaataacgcgaagttgttgccaaaccatggaatggctcccagatggagattacacgactgaccaaggatgatgaggagttaaagaggaaccacaaggcagagcttgaggtagctcaaaaagaggccaaggacaaacgcgaggtcggccgaaaactccaagaagaacttgatatggccaatttgaaccttgagggagccgagggcgatgataaggaaaggtgcaacaatgttgcaaactgattcatttacaaagcctggctggctaaccctgacatggacttgagctcttgggtgaaggtgcgaggaggttttggcttattgtgagaaaactaaaaaagaagaggaagagctccaaggaggaagaagaagatccatcca

SEQ ID NO: 254321 - DNA, 594 bp, Cannabis indica
aagccataagacaaagacaaaacagaaactctataacttcaaaaacttttcaaaactttttactcatgtcacaggacaagactggtcatgtgaggtttgactttaaatatttttctaataattgaatgtgaaaaggaaaaaattaagattaaatggtgttggattggatttgcttgggttgaaaggcttgagaagaggagagagcttagtaaattaatatataattccatgtatttataattaaatattaattttaaaaaatattaacacataaattttacttatgtaacactttgcttccaacttctatttgggcttatgacttgtgactcttataagtataggtaagtagtcattattttagggaaatttacatggtatactaatttttgtcattttcttacaaaaatactgttaggcagaatttttaacttttctactgtgttttttcataagtttcatactgcagtatactgtattaagttttcactggtgttctactggtgttttactagtgttctactgttgttttgagttgttctgctttgtgttttactgctgttttacaaaaacacagtatttttgaaaagattt

SEQ ID NO: 254322 - DNA, 646 bp, Cannabis indica
gatgttgcattgtttgacgaagagggaagacatagttttgatggggttatttgggatcacaagggtcaggtcatggctaggattataggactgcggattgggtaagttcttccagagattattaaagtcgtgactcttaaggaagtgttatcatagttgaagcgcgatttttagggtattaatattgtcgaatcagattgcccggtattagtacaagctgttaaaaatttgaatgttttatcatttacttttggtggtgtcattgaagattgtaaacaacttttttattcttttggtgatgtttctttacgttttgtcaaaaggtatgttaattagtgtgcttatcttatgactagaccagcttgtttatacgttatcgtattttttcgaagtatgatgttgttgataatattgaggccaaattggtttagctcaatgaaatttaccattcaagaaactaaaaattgatttaattaaattatgaagtttgtactgatgtcaactaattgtaagaaaatcttcattaaagaaattattggaattctaatttcatcaattttatttttccaaaaagatcctaaattattcattatatttttatatatgttgaagacacattatctttacaaaagattgtaaaaatctt

SEQ ID NO: 254323 - DNA, 886 bp, Cannabis indica
tacaccgatcaaccgctgcgacacgttttggagaaacctgcagcatcaggctgactactcaaattggccattgagcttggcctatttcagatcacatgctaaccaagaacagccataaagggtcacagaatttgtggctgagtgcaccaactaaacttttgagatcgctcaagacttaggagaaaagcaagagccagagaagtagcgagaacaagagcaacaataaaatcccaaagaactaacatggaaactccatgttgatggaagctgcaatgaccaatttttttgtgtaggcaatgcccttgcaacacctggggagaagcaactgcacggagcaatcaatttcgacttcaaagccttgaacaatgaggctgactacgaagccttaatagctggtctcaagctggaacatgaagtacgggctaacttcttagacatattcagcgattcccagctagttatgaatcaagtcctaggtgaatacacagttcgaggtgagaaaagggttgcctacttcaggaaaataaaagacttgctaagtcagctcaaaggctaccaaatcaggcagatccccaaagagtagaatgctacagcatatgcacttgctcatctggtaaagtcaactccatttgatgacaaagcaaactttgtgcccatacaattcctaaaggaacccaacattattatcctagaagaagtcaacatattgaaatagacaactccaacatggatgacacctatcgtagcttacctccaaaatggatccttgcaagaagattaaaatgaagcaaacaaactgagaagaaaagctactaggtacttgatcctagacgggataatgtacaagcagagcttatccatggctctcttgaggtgtgtcaccaaa

SEQ ID NO: 254324 - DNA, 1056 bp, Cannabis indica
tctctctctctctctttttcccttggagctatataattttttattttattgtattttataagtttcgctaattaattgatgaatcaattttatttttatttttaaaaaaagtatcaaattattctaccatctctgattatttttacttgtactagaattatttttatttattataataagtactagttacatctctggtttattcaacagtgagtttaatgtgaaaaagttttactatgaactttgtatttatgtattttgtaaattataatttaaaattttatataatatagaaataatattataatatttcataaaattttaattaatgtggtttgttaatatttataattaaaataaagaatataaaaatattgaatatttattttgtaattatttccattttttgacaaaaaatttcaatacacaaaggttaatgtcatatttataggtatagttcctaaatggacctgattgatacggatctattagggtaattttttagggtatgtaaaatcttactgatggggtaaaatataatataatttgagctatttggtcgagtaggtgaggcccaaattggattgagttgcatttcgtacacagtcgtactattgacagtggcaggaggggcataagccgtcgtggggaataaggaatgttaaagtggtgggtgtttatctaaaaagatgattttcttttcgttgtagcctttccaaggatggggacaagccacttgatttttcgaaatcgtgtcatagaagtgccatgtaggcaactttcgggacacctagtgatttcgaacgtcttttcgtattctgttctcgaatgaccccctaggggtgtccaccttgagatcacgccgttttcctgttaagtgtagattgttgatccgaaacttggtgtccagattcgttgctggggaaaagattatggaaatcagaccacccaactagctttgtccattcttgatgaataggttggataagttcaccttcacgggctagtaaatgggatcggtataatggttcatgtgctagatatatagaaagataa

SEQ ID NO: 254325 - DNA, 1077 bp, Cannabis indica
caagtgcctgattgagggaatttagtcactacttctatggctttacgtcatggagtagtgtaacatgatcgggtggaatgtccaggatttaaaataaaggtagtaaataaaaaactatccttgatatatatagattgaataagattggttttagtaccttttttgaaaccaaaatttgtcatgaaaaggttgctgatatagttttgaataatttccctaattgggatttctactctagttctattgtctctagtagaattttacttctttagcagagatgctttgtccaagttcaggttatttgtgaagatattcaatttttgcaatgtaaggttaaagtagttgggcataactctattctctttattattgctgtgtatggttctaattctgctacggtaaggaatatgctctaggaaaagttggctagttttggctgtttgagtcatccttggcttgtttttggaaatttcaatgctatgttcaactataatgatagagttggggaaagacagatcacgactaatgacattctagatgcttaaaattggttggctcaaggtcaagtggaagagcttaaatgcttcgattttagcttcacctggaccaaaaaatatgaaatgggaaataggatctattctaatttagacagagtttttatgaatgagctctggtgtgatcgttttcccaatacaaaggctatttacaagtaggatgatatttctgatcacagttactgcattataaaaaaataatgatgtttttattgttggtgtcaaactttaggtataattggtggatgcttaacagtaactacaaagccaacgttttagagaaatggtacttacctatggataaaagaggttttggaggcattatatacaaattatacaggctaaaacatgctcttaaggatacttttcaaaaggttttgggtaaaattcttgctatgtttcaagaggccaaagagaatcttagcttggctcaagaaaatcttgctaataacccttcttgttcgttgctgcaacatgagaaaaggttaaagtagcaggattttaatctagccaaattgaaata

SEQ ID NO: 254326 - DNA, 629 bp, Cannabis indica
cctctaaaatgtttaagacggcctggttttatcaatagttgtaatattattttattaatattattgtccttatatttcttgtcatagagttgtatttcttggtttagtatttctattgaagcataacaattttcaacaatcaaaagcttatccttcctacctagcttcaatggaaggtgcaaccatcaagatggtgaatcaagacctagtaaggttgggtaggtttgatgaatctaactttactgggtggttagagaaggtgagatttctcttgaccacaataaagattgcttacattcttgagtcaaccttggagcctttacccgctccaattgagaaagatactcctgagatggtgaagaagagaaggaagagaaaggaggacaatctcctatgtagaggtcatattctcattgcttttctgatagactttatgatctctacaataatactaaaatcgcgaaggagatatgtgatgctttggaagcaaaatacaaagcgcaagaggaaggtacaagaatttttttaatttctcaatattttgaatttccttttagtgatgctaaagaacttcttcctcaaatctatgagttgcaaatcattgtaaacaagttaaaggttctcaagat

SEQ ID NO: 254327 - DNA, 527 bp, Cannabis indica
aattagcatggagtttggctagtatggaagacaaaccgtgggttcagtgcctctctaagaaatattgcagcaaagaaagcttttggagtgttcctcctaagcagggagattccttccaatggaaaaagattattgaagttagaaatataatccagcaaggtgcactcacaattgcagcggacggtcgaaatattgatctgtgggctcaaccatggatcccttggatggagttcggagagttcaatcatactatgcaacaactaaaggtacactttcctcttataagatccattgctgatatctcccaagaaaattcatggtgcagaaacaaagttcttgaaatcttcggagatactttgggaaaccaaattcttaacatacctaggctgcctccttctcgtgaggataggttggtttggaaggcctcccaaaagggaaatttctccgttagaaaagcatatgagagagatcaatgccatagatttggtgatcacaataaactgtggaagatgatatggcaccccaaa

SEQ ID NO: 254328 - DNA, 1028 bp, Cannabis indica
atgcaactcctctaaggactttaacttagcagccatttcgtccatagcctccctggcttcccgaagctcgcgcttggccctagctgtaacctcgccctctgccttcagctcctcctagtgccttgcctccgcccgagcctccttcttcttggcctgctctcggtacttcgcctccgcaagggcctccctttggagggcctcctcctggaacgccttcctttcggcagacaagtcccgcagtatcctcacggcctcgtctacgcccccaaattctgacatgacgaacccatgatcgatcagggtcttcgaaaggcagccgatctcggcagttttctgaaaaaaaaaagaaacaagaatgaaatcagatgccttagacgaaatataaaataagggaataaattacaagtactcaccgcggccagagcagcgctgatgtcttgcacctggtatacggagttcacggaggcacaagccgcgtatctcttggctgggaattgagtcaggtgggagacaaattggctagtcatctccgaggcaaagggagctagggtaggcccaacaaagcggttgaaccaatctgtcaaagggtccatattcaggtcccaaggattctagaaggcgtcctcgtgcaaagtgttctgctgctcctcccacagaatcttctatagggcctccacctcagcgtgcccccgactgaactcgtctagggcgtagttgtgtttggcaactcggagcatttgcctctcctcatctgtagggaccggagtcagcacaatgccgtgcagcacagtatactcctccgcttcggaaggaatcccggagtcagtactgatggctggaatgtcccccctccgggtctgctttgaaggcttggtctcaaccatcttgcccttccgcttgcgcttaagggcggccgcaacctcgacatcatcctcctcgacttccctctcctcgtctatcaaaacaatcatgctcgaaggggcactggacgaggacctctcgggggtcaccaactgggatggagccgg

SEQ ID NO: 254329 - DNA, 691 bp, Cannabis indica
taacgtacatgaatataaaaaaattaaactaaaatattttttttgaataccgggtgcaactcttttaatggggtacattattgaagcatctatagtttttctcaagtaaatacaactaagcatattgctgcacgtgtgtatagttcacacgtatcctctaacatacatttatttctagccaagctatatacatagacttttcgccaatatatatatatttatatatataatataataatatatataatttaataaataaaaaattatatggtggactcatcctatttgtttacgaatgagcaatgttatttgatactagtggtactcaacatcttattgatattctctaaaatttattttcttaaattatattagattcgatatttaattacactaataatggcatgacaccaaagaaaatactaggcacaataataccttttagcaattctctttacaacaaatatatatatatgggtgactattcaatgattacatttttattgtaaccatatggttacattttatttttgacctgcaataacaggttaccaataagtaataattccatttttagaattaattaattataattaactattttttaagtaattaaataaatatttaagaagacattttttagcaattaaaatttataaataacttttttttatttatatataaatctctt

SEQ ID NO: 254330 - DNA, 925 bp, Cannabis indica
aaaaaaaaaaaaattactttgttatggcatgtcttccggttgtgacctttttagccacatttgctacacatattctatttttttgtttcccatgcacctagaaatcttcttttccttggtcttctggatcacacacaatgaataacttgtgaagtcatgttctttcaatttgagttgtatgtggaagagtatgcttggatcgtcttttatcctcaacggttggtatccctctttcacttggtattttagttacattttgagtgttttcttagttgcattctaccacttgtttcagcttgtgtattagttcttcatatttgcaatcaattgagatgaattgtctactagcttcttaatttgcttaatttattccttcatcaaactgtccgttgtaaaatatgaggaatagaattgcgtcttttttctgagagtatataagtttgagtattgtaagtcaacttcaagacaactgtaatgcaacagttatatctgttgcgagccaactaacatcaaacctcaaaacaactaatataccctatatgtaatacaaatgaaacttaccacaatcatgttttatctattcaagtcgtgtattgccaatttcgagccctctttttataatactataaaattatagtagcacaactattattcaactaatttataatttatttacaactagaaatgataaatgtgaatgtgtatctataagaaactatttttctgtggtattttttcactgttcgataattaattgtaccttaatagtaatatgtggagaaacaattattagacctctgtaaactaactttatatcaactaatttagtatattaataatactagtcatgttataaaaatttctttaaagagttttgtattgtattgacgatatgaaacacctacaaatatgataaaatctattg

SEQ ID NO: 254331 - DNA, 801 bp, Cannabis indica
ggaccgcctaaaaaatgacctaagtgggaaaaataaaaggtcttggcatgatccccccaccgagtcgggggcatcctaaatttaagaagacgctcgtcgaattttataggcctacaccgagaatattcttggacagaaggaaaatgatgaaccgttaagggaaacttaccggagcccattgtgctggcgtcgggagccccagtattggggacctagcccagcgatttaggcctagaaggcgtccgatctttgccagcctccagtcgaagggtcctcccggcagcagccttagccttgatataggccaactcctgttccctcctaaataggtacttttggtactggtcctcttccgaggctatgatgtccacccggagtgcctttctcagcggccggggtacgaatgtttgggcagagaacctttgagaggttgaagtcatccactgactgactcccagagatatgcttggccatccggcagttctccgttgtgaccaagtctcccacattaagacctttcttgtcataagtggagaaagtcttggcatgctgaaggaacagctgggtaggagcagtgcggagaagaggaggaatcctaacccactccgtgagaagctccgggcggtccacggcttggaagctgaaagagaagaaaaaacgatggctgtattcctttacattcttttgaaaattaaaagggattgggccctcattagaaggatgggctcggagagtgaaaaaatcgtctttaaacttgtcccccattttggggacagatacaagttcataaaaatataaaat

SEQ ID NO: 254332 - DNA, 648 bp, Cannabis indica
ctgtatttgtcatatccagaagtaggaagttttgatcctttcatccacggtccataatcaaaatcatcatcgtttccacggtccattcgttccataaaagcaatacatttttcaaaagggtgaccaagtcgtccacactcaaaacaaaactcaggtaatcgctcataacgaaaatcaacccagaattcatccttaatccttggtagactgatcatttgtcctcgagggagaggctttgtaacctgaatcttcacacgaattcttaagaaaggcccccaaccttcagcaagtgagtcttcatggacatctagaaattcaccaattatgtttccaagtgctttagcaagcgctttcgacttacttaggaagggcagacggtaaacttgaacccaaaagggagtataggctaaatcagtggtgcagacattttgccgaacgtctggtgagtgtaaaacaatgagatggttctgaaaatgccacggttctttgttgaggactcggaacttatcaccctcgcaaccaaaagtaatcttgaacaaatcatcttcaaattcagtgatagtgactggaaatcttcccttccagtgacccgacatttgattgaaaaaaagttggtttgtgaacaaaagaagcagtgataaccttggc

SEQ ID NO: 254333 - DNA, 896 bp, Cannabis indica
aaagattttccgtgtgacagtatttttataaaagttaacccaaattccaatatttttgtaagtttccctacatatatatcaaacaaagaggcccaaaattaagttaatagaagaaagagatcattctcttataataagtccaatccactaataaattatcaaatttaaattaaaaaaagccaaaaacccaataatccattaagaagcccaaaatttaatagttcattaaaaaagcccaaaaactcaatagtccattaagaatataatgatgtcatttatttttgaaagagtcttctacaagtttttgtaatagttctcctccccaagttcccaaattatttcagcttgggaaacaaattgagagggaggtcattgataaaaaaaaaaccaaaaaaatagaaagaagaaggaggaggataaagaagaagactaagaaaaggtactcttctcatcctttttatttttattttagagtttacatttttttctatttgatattttaatcaaccttcaatcttgtgtgataaaccctaaattaaatctcataactttaatcatgtgctctaatattatatctcatgtgtgtatattttttttttgacatatcatgtgtgtatttgaaatcttttaattttataatttgatcattctaatttttatatcatttaattaagggttgttaatttcttacatatatgaatatgacttttattgaattagaagttttcttcatttctttatttgtaattttttaggattgttaatttcttacatgacttttattgggggtttctcttattttctttatttgcaactttcttgaatatttttaatttataatatcatgatctaactttatttatatgttgtattttaattataggtctatgaggtat

SEQ ID NO: 254334 - DNA, 645 bp, Cannabis indica
ttgatttttttttctttctaaaatgtggtaatttttagggtttgagtactctaatgagcacattttttgtgtgcccttattcttggggttatcactaggccctctcttttcttggactagtggggtagctaatccccatagtcatcgagagtttttttgctagcattgatgcgagtagacgcttgaggtatgtggtgttttctttagaatgttttgcatgattgtctcactaaaacttgtcataccatatatgatagcaaaattttgagttacatcatattcaaattacataggaatgtaagatatttcaaatctcttccttgattgaaattaaaggatttaaaaataacatacttcttatttcgttttcgataatggtcatcacagtctcatttgtaatacttcctcaagtacttggcgttctaggcttgcggtaccacgatgttgtccatgcaggctagcttatacgttccaagtggaatgaactgagctatgcggtaaggccatttccagtttgttcccagcacacccgcttggggtcttttgtatttggaaggacctttcttaacactagttccccaacccgaaaggcatgtattcgcaccctagagttgtagtattaggccactctctgctggtacacgg

SEQ ID NO: 254335 - DNA, 574 bp, Cannabis indica
atttttcttttcgccttctctccattttctttttctttttctatttttattttttttttcagagaaaaatcacaatccaaaaacacaacaaaggaaaacaaatcgaagaaatcgatacccacatttctcaggtgtgtttgtagtatataaaactatttacacccatgtatcatcttctaaattacttttaaatttacgattctgctccctattaatattatatttcactctattttcttcaacagtcaaacccctaatttgctcttgccttttcgtacttcctgaaaatttgggcttcttaacttttgggggagagatcggtttgtggcctctaactcgaactttgctgcattttcctattattgttttatgattaactcttagttctggttcttagtttgaattattagtgtagatcttttgtttattatgtttgaatacttgaattttcggtagctttaagtttccatgtgcttttagtcattcaaaatgtttttttttaattcactggaggttttaatattatgggttatgattgtgttataattccagtttttcctttttcctttttttt

SEQ ID NO: 254336 - DNA, 995 bp, Cannabis indica
aaaaaagaaggtaaaaataaaaaagagacaacataaaaagggtatagagtctaatttttcctttccaaagatattagatattggattatatacgtgagatggaagttgagtaaaatctataaaatttttacaaaaattaattttttttttataaaatactgtaaaaataacaaaacaaaataatcaaaaataatagtggaacaattaaaaaataaccataaaataacagttaaaacttaacacaatatacatttaattttttgaaagaaaatttacactacaacaaataaaaaagaaaaaagaagtgagaaattacagtatacacggtataaaattatatatagttttttttaaccaattacaacatttaataaaatttgtttaaagaagaatcttatatgacatttttgtgtaatggtattttatttatttatttattttgataaaatcacaccaaatttatctaattatcaaaatcttataaatactacatttgtagctacctcataaaaataccacacattacttacatatgaataatgtgggataaatacaaagttttttttttttttctttttcttttttaataaaatcatactaaacataacattcatctaattaccaaactcctattataggaatatggctcaaaaactattaagtattatggatattttaattatcagattttcaagcgaaagctcttattcggttggtatgatcaaggctagcctgagcatatggtattttggaccattgcacaactcctatattaaaagactctattttttattatcgctttatatatataatataataaatgttttttatataatatatagtatacataataaatattcataacatcaaacatgtacttagcatttataaaaaaaaaagaataattacataaggcaccattttttgtaaaatatttacatttttacgttcaaagaatgttttttttttttatatatttttacggttttccaaaa

SEQ ID NO: 254337 - DNA, 645 bp, Cannabis indica
atgatgttgggacgatggtaggtcgagatacaattctttaggtccgatagaggatgatatgggcctgattagtagctttggtagtgtttgtgggtttttaattttgtgatgtgtctgatgtggtacgagtgagtctgatagtaggttcgattataattgcaatgttgatgtttgatattttttacttgtagttcgatataaattaaggacgataacttgatggtagtccgattattattgtatgttattatattttattaacttgggatattagctcgatgtgtgtctgatgttggaacgattttggtccaatacctttaagtaggtatgtctaacttttttttttctaattaatattttctttgcagcaacatgctagacctccaaagttgttagtcttgatagaaacttcttctcccaaagtaaactaaagacctctatttatagggttttgaggatcacatttgaaaatcaaattctttcatcacgtggactgttaccaacactttaattggtgtttaatgggataaaaatgttggacaagagaactgaaaacaagctcaattaatttatatacgtttatgaatgtttttcaaaaatctggtttcagatgttcgaaaacaaccataaaacaaatataaaaat

SEQ ID NO: 254338 - DNA, 628 bp, Cannabis indica
atatatatatataaatttatagggatatgattttgtcccgtgattgtactttcacggaatgcattccgtgatgtacggcagccgtcagatgagggacttatttaatctgacggctgagattgatctaggggtaattaggattaaaaagtagaaacgtaccctgacactcatttaatgtaccccgagacccatctaatgtaccacggaatacattccgtgaaagtacatcacgagacaaaatcatgtccctatatttatatattaggtttctttttctataaaaatttgccaaattgaaatatttaatgccaattaagtaatttatatgttcttatttgacaactcaataaatggatccctgctaggtgcgtctggagactgattgtctagtgttggtaaatgctattattaataacaggcaaattctttctcctcttagaaccaagcagctaattggttagctcgttcttctggttcatgtcctgaccgtttttcctgtaagggatctgtccatattgatttggaagctattttattaactgatttgcattaataaagttgcaatctttgtttcaaaaaaaaaatgaattttaccaaaagaaaaattttatgggaaaaaaataggaag

SEQ ID NO: 254339 - DNA, 669 bp, Cannabis indica
tttaaatttgatttttttattatgaaataaggattataacccaaaccgacccaactcaacccaaaccatgaagtaaaaaatgggttagattagacaaaatgtagtacgtggttgggttatgaatctccaaccttatgttattgggttgggttaattaaataccttaatccggccaactcagtccatgcacaactctagttataaataatttaaaacttatacataaataatattttaggagcttatacaaacactatagtctagtcaaacattattaaataatgttgtttggtgtaatagtaaaagtaattttaaagcttaaggatgctataagttcgaaattttatatttttattttatttaggtagtgtttggtaacatttcttttaatcagttttttatttttaaaattgaaaaagtgaaaatatttttcaaaagcatgttctataaaactgtttttattttttaattttttaattgagaatcaaaattttgaaaataaaaaaagttactttcaatatttttttcaataattcttttttcttaattaatatttttgactctgaccagactcggacccaaatctttctcccacggccttggcgctgaacccgacctctgatttgaattcgaatctacttacagacagaccagacttaaataaaatca

SEQ ID NO: 254340 - DNA, 721 bp, Cannabis indica
attaatattttcatttcaattgcttttaatttatttatttgaaaattttgaatattatttgatcaaatagaaataaataaaaaaataattgactggtaattggtaactctgtccttgaggacgatacttggtttcactaattttattataaattatgactgtgtgcacttgcatagaaaaaattttgcaacaagtttttggcgtcgttgttgaggactaaaaattatcaatattagtctaattaatctttattctaatttaatttatttttctcttatttctaacttgtttagttgctcttcttgcctatctgaggtgaagtttttatatgcgtaacaaaagaggagccaacaatcttgttcatttgagtccgtagattgagaagtcttgtaagcaaaatagaaagaataagaggaaaatctagaagtctgtggtgatggcacaaaatgatggggatcacaggaatgatctcattcctacagttatacaaaggggtcaggctcagaataatgttgaaaggagcttgagagactatgtactgcccactctgacgaaggtacaaaactgtataagaccaccaagggttgaagccaataattttgaaatcaatctagctattttacaaattgtgcaatcttctattcagtttagtggatcgtctactgaagatgctcgtgctcgtctatctaattttttggagctttatgatatttttaaatac

SEQ ID NO: 254341 - DNA, 826 bp, Cannabis indica
tagtacataaacaatcacttaatagttcaggaaaaattaaataaactatttcagtgattgtttatatattaaattatgctctctaaactttgatatctactaaatcatgttcctcgaactttactactaaatcatatccttgaactttcaggcttttttactaaaattagaaaaaattcttaaatctaataatggcaatagttcaagggacatttttaaaaaccttaaaagttaaagagacacaatttagtacatgtcaaagctcaagaaacaaaaattcttattacctttaaatctatttatatgggttgcagaaaaataataattccagtaaataaatacttaataatatgaatattcaatttatatatacatgcagatgatgcatgcggagctacaaattactaagtagatcaacggaattaacaactactaattattatggtgaataaaggcgttttatgtggaaaaaccttacaagctgatcagatttctgatattaattattaactgcatgatcagagttccttaagtagcttcaaattgaaagtgaaaaaagacaaaagaaaagacattaatgaataggaaggatatatagaatctattgaagatcaaaaactgtaaaattaagagagagagaaaatagaaaaagtccaaaaagtcaaaaactgcgaagggtggtcagataacaaaacacgagatctgaaacacacgtgtgagttctgacgtctgtgatgaatttaagagggagagatatgcacgtacgctttccaaagtgatgcattgcttttctatataagtatagattataggtaggtgggtggag

SEQ ID NO: 254342 - DNA, 1499 bp, Cannabis indica
gaaaccttggaaattatttagatgtgtttgttttgtattttcacatgtctttgttgtttgctaaatgcttaataatttttgaattgtgtatgaatttatattgaaccacattgttttctgttattaattgactttgacaaggtcttctacctgtgatggtacaagtctcgaggaagagaattgtgtatagaattctcgtgaaaattttgcccaagagtttaatctcccctgtaagaatgtaaagtatcattgcagtgctgtgtttgataatgtggatcagaatatacgacaacacacatcactagtaaccttctagagatcaagttgcatctcaaagtatttgatgtgagccaataggttttttcgtctagtatacatcttccatatcgacattttgaaattcggaaagggcaaggcctttatgtatgttgagaattgtaataccctcatatgatcaagtcaaggtctaaaaggctttgggccagctatgccctggatcatgtccttgagttggtctaactatgcttgcacaaaagaatttgttactgtggggacctgattgactggccctccttagggaggctgcagattttgatgatattagggctagcttgccataccctgggagagtgtatggtgaagattagccagaccctgcaaaccctggtcggcgattcccaagtacgagagttggcttaggtcggccaggtttactcctagttgttgtgctttggcggccaaacttgcattaggtagggtctggccgcctagtactcctccatcgtagccagacctacaaagggtagcatctggctctttgtgatgcttccttggccatccaaacatatgttggacaaggtctggctgcccgtgactccacggtcgactggtgtttgctttgtgtcgattgtgggtagatcacactaattactagaggttggtggatctagatgcctaaagtgatgagtttcacttctcaaattgccattttgggtgtttccacccactctcggtccttgtcgatcgaagatcgacctctatgcacctcgctccctttggggaggaagtgatgtaccctggccgaccatgggtactcctgttgatagctagctggccagtggctgcacaatgggggttcctttgagcaagagatccctggctggccccccatgttgctggttgtcgagatctggctgttcccaccgtttgacttttgagggaagatttgtcctccctctggcaggggaagatctatcctagttcctaaggaacttatcggtagtcttcctggaagtggatcttgttgttgaaggaatttttacaacaccagacataaataataataataataaatagggaatatacgcgagtactcgacccagaatggtgagtattcgaatcagaaacacaaaatacttagcaaaaactggaaatatatgaacaaaggagagtatagtggctcaccagatcacggtctgcttaatccactgttgcaagga

SEQ ID NO: 254343 - DNA, 1072 bp, Cannabis indica
gatgttaatgaaacatacttgttagtaaatctagatccttgtaaaatatttccaacagtccggacataatgggacctggcaacctcacctttcccattggaataagcgtacttccattgaatcccatgagttgggaacaactagatgaaagatcccggtctgtgaggcctatcaccgtgaaggcttctttaaataataaatttacagaactcccattgtcgatcagtattctagccacaatcttgttggcgatgggagtctctatgacaagggggtcatggtgaggaaaacgcaccatctttgagtcttcttccgtgaatgtaattggttgatccatgagtcggggcctctgagctgggagctgagtaacttccgaaacctcgctgtgtttaacggccccggcgtagcgctttaaattccttttcgaatggtccctcccatataggggccctccaaagatcatagccactcttccattgggtctcggtggcaggccaagagtctactgagattccccgggggagcgaccggtgctaacgctccgggcgcaccccctggcgttccttggggcaaaggtcctactgccagaaccgggttcagatggggcagccagttcttgatccactcgatctcatctttatggtttttgcattcattggtgttgtgtctaatgtcgttgtggtactcgcatcttttgttgggatcccttcgggagctatctctatgcagaggaggcggtgtccggtagtgcgtattttgcctggtggcgaaatacacacgttcttgggagtcccacagctccgtgtactgggtgtattggctagtatcccccctttcctatcgcttgtcctccgtccagttgctacctttcaaggacctcttgctccgggagccgtgagaaggtcctgctaggcttgcagcaggagtggagtgagacgggacctgtccgctcataccgttcattggtggagtagctgaaggtagggttaccgagagttggactctaggcacgtatcccgctgttaggttctatgccctaaattaaactccatttcaatgtaatctattttat

SEQ ID NO: 254344 - DNA, 608 bp, Cannabis indica
gcttttctccaataatctctctgctgaaagacaaaatgagattctgcatgtactcaatattaaccaaactcaaggggaggaaagacacttgggcaatccttttgtcttcaatttagaaggaaaaaggaaaactacatgaagctgagggagagtatgttgctgaggctagagggttggaagatgaggttattgtcttatgcagggagattaactctaattaagacagtagcctcggccatgccgatctactctatgagtaccaacaaaatcccaatttcaacttgcagagatctggatgcgatgattagaagctactgatggcaagggagtgtgggtaaaggaagatacttagctctaaaatcttgggattcaatttgccagccacaagagtcaagaggtcttgggattagaagatgcgaggattcaaacagagctttaattgcaaagcttgtgtggagtatagttcaaggcacaaggaagtcgtggatagattgtctcttaagtaaatactgcaagcacgaatcgttctggacagtaaagaaaaagagcactaattctagtttatggaagtgcatcctggatactcgaaacataattctcaaaggctc

SEQ ID NO: 254345 - DNA, 784 bp, Cannabis indica
attttggtggaagagttcgtcgagagaaaataaaggtataccttggatgtcatgggatcggatgtgtaatagcaaaagcaatggaggacttggctttcgaagtcttcatgattttaacttggcgctattgggaaaacaaggttggcgttttctaacaagaaccgagtctctggtttctcgcattttcaaggcgagatatttcccacatggaacatacctctcggcctctattggaaacaacccgagttttgtgtggcgtagtatttgggaagctcagtctcttgttcgggcgggagttcgctggagcgtggggaatggctcatccattaatgtgctgaatgaaccatggttaccggatcatcaacaaccattagtgacttcatctcatccggcccttcaacaagccaaagtgtgcaacataatgtcaatggatttgtcttcctgggatgaggatattctaaaggatttgtttgaggaacgtgaccagagattgataaagcaaataccattgaatataaaccacaattcagattctctttgctggtttaatgagcccaatggtatgtactcggtccgaagtgcttatacattacaacaaaaattgaagggacttgggaatgatgtagctgcctctgatttttggaagtcgttatgggcattgaaattgccaccaaaaatcaagaacctgatgtggagagccggctccaactgccttccaactctctctcaactcgcttctaagcatgttacagtcagcacgatgtgtcctttgtgtgaggagatg

SEQ ID NO: 254346 - DNA, 830 bp, Cannabis indica
tattttaaaaaagttgatgtatggtataatattattttttttgaggaaaaatagtagaaaaaattgggatttattgacgtattttaaatgatagggtatagagaaattattgagagtaatttgtttagactttttacgtcttttttaatttttttctttacaaacaatgtttatcaataaacatacacatacaatcggtactaaaatatatacacattttttttttggtaaatactattttagatcgtgtattttataaaagttaccgatttgatttttattttgttaaatgataaaatagaccttatatattcaaaaatagttaaaatatgaccctaaacttaattttcgacaaacttttttttttttttaatataaccaacttgaatacaattcctaacactaacagatacagaaaatgtaaacagttttatcataacacctttagatcagattattattaaattttattttgacaaaaattagttcagggttctatttgtaccattttggaaaatacagggtccattttattatttaacaaaagcaaaagtctaattgataatttttgcaaaacacagaatccaaaataatatttactccatatttttttttataactctttatgaagtaaagcttgtaattaacatattcttgttttctaaaaaaaaacatattcttatttgtaattgtttgggtgattaaaacaattcttagtgatttaccaaaaaaaaaaagaactcagtgtgaagtattatggggggtgtttggtaacacttttgttttttaattttaaaacaaaaacaaaagtaaaatttgtatttttaaaa

SEQ ID NO: 254347 - DNA, 672 bp, Cannabis indica
actccccacatacttccaaaccaaattgccgatgcatagtgacattcccagaacaagtgtaaagtagactcctctcccgtttcgcaaataggacacacgtaagactgaagaggtatagcaataccaatcttttgccttgttgggagaacatctcgcattagttgccaccaaaggaactttagccttccatggattggtgaattccatagaatcttccagtcccaagtggattggtcttgcaacgccgagtgtgtcaccaacttatacgctgatttaaccgagaaagtgccccgaggatcacctaaccatctccaggcatcaggttgggtttgagcaggcagcccaatgttgagaatatttcgagaatccctgtcgttgaaccataatctcactcttccttcattccaagacatgttctcgtttataaagtaacttactagattagctccttgagttgcgtccagcagaggctgcggcatgtgttctccattcggcacccaagcatcaaaccaaattgaagtagtagtgccatctccaatttttctacaaagaccttctttcaataacggtctcgactttagaatagctttccatagcatcgactctgttcctttcatctccacatcaaaacaagttcctccctttcagatatttctcgttcatgatggaaca

SEQ ID NO: 254348 - DNA, 590 bp, Cannabis indica
tttgctcaccaatcttgaatcaccttatcacaggccatgccatttgctcgcttatttttgttcggatcttaagtgtcttttgcaccatctggatctcgtgcggctagctaaccatctggataggtgtggatcgaaagcccgctaggaatatggctttgatactatgaaacagaagcttatcaatgcaattcctaactggaacaataaagcttatcaatgcaagccaataacaaactttgtaagaacagagtacaagtggcaagaaaacaaataacaaccttggtgataggggtggggataatgaagattactattatggaggaaagcaatatcatgtaattaaggctttaattacaactagtccattaaccaataatgatgagtacattgttgttgtgatatatggacaactgtttgaattggcttgcattagatattgggaaagacacaatatggaaaaagattaaagatgatcaatttcctaaaggatttgaagatgtagcgcattataagggcaagttctatgcttttacattcaaaggaactcttgtatgttttaagtacccgaatccaaatgctgaaataacaac

SEQ ID NO: 254349 - DNA, 2820 bp, Cannabis indica
gctgggcttggctcacgggtgctctattgtgcaggaaagggtaaatctgtttgtaatcaaccatgagtttgagagcttggcgatggattgtgcatattcgggccatactagaccaaacgggttgggtctaccagcagttatattttgtattcttggattttgccgcttagtcggcatgtaaaataacttatacttttttgtgataagttttatgggatcccgaaacatgttttctttttggattgattgtaaaatttaaattattacaagttatgttttttttattccattgtaattaaagtttaaattttttctcgctcttattttctagtaatcctggtttagcaggattaggttatattactggttgtcgtagcctgcctaattcttagggcgttacatgtggtgttcaatgaacatgaatttccctttcgacatggttttctaaacacttgtcatgctgaagtccatgtatctgttactgtcccatgttggtccactccttttccgcgattaccaccaagctaacactcctcggggttttcaaatgctgatgtttatcaggaagatacctcagatgcctcacatcagcatgtctctccagcccctacattgccggatcgcctaagtcacctttgtctaattctagcacaaatcagctaagaaacagtggttattttgatgtttttgccatgactaatctctttgaaggaagttcagccgagtttccagatcctactcttgtccctaaacttgctaatgcaatagacagaagtaaaactacagttgatattgcaccatgtgcttctagtgctatgggaaaagacaccatgttgtagcctactcatcctatgattattagagcaatatttagcatattcaaactgaagacttatctcagtagtacaaattgggagaaaataagcaatgaacctcaatcatttgaaaaagctttaagtcatagtgattggaatacgaccatgaaagatgagatacttgttgtagttcgaaacaagacatggaagctactgcggagaagaccttacattcatagggaataaatgggtttacgaagaaaataaatgtgttgatggttcctttcaaagatacaagactacgcctagtggcgaatgaagtttaaacaaagacgtggtgtggattttggtgaaacttatagccccgtaattaaggcatctacagtgcgcattgtgctaactttagctgtaataagttatgggattttcaacactagacatcaataacgctttgaggataagacatttataagacataatcattggactttgaggataaaacacaaccagttgttgtgtgcaaattatccaagtctttgtatggactaaggcagacaccaagagcatgcttcgatcaattgaaggccactctaatctgactaaaaatttaaaatctcaaaggtagtttcattgttctacttctatcaatcgccgtcacttgtgattcttgtattggtttacgtggataatataattgtgtcaagcaataacacagaaagattaaagcaattcagttcaaagctgaaccaaatttttactctaaaagatcttggacctctacactatttcttaagaatagaggttcaccgtgatgagaccagtatttatttgaatcaatccaagtatatagaaggactattgtagaagatcaaaatgctccattcaaaagtcaatccaattcctatgtcagttgggaaaatgatctgcattagtgacaacacactcttgaccaacccaaatgagtaccggagtattataggtggattgcaatatttaacgtacataggccctacatcaataatgccataaataaactaaatcagtttctaaaagctccagcggatgtacatctcaatgcagctaaacaagtattgagatatatcaaaggatcaccacaccatgggatgcacattccttactcagacagattggttttgacaggttttttagatactgattgggcatgcttcttagatgatagaagatctattgctagctattgcgtttatcttggtaatgctcttgtctcatggtcttctaagaagtaatttgttgtgtttcgttcgactaccgaatctaaatacataacaccgctcaagtcttagcaaaaatgtaccggattcaagctctcttgcaagaactatataatttttctcttgacagtattctaattaattggtgtgataatatgggcattagtgccttaacctcaaatctcgcttaaacaaaacaaatcgagctagatgttgattatatacgagagacaaggtgttggaattttttttgaaaatcaaatacattcgttcaagtgacaaattgtagattgtttgaccaaaaatctatctcatgctcaatttaattttttgtaaccaaacttggtatgctccaaaccccacttcgtttgagaggtgatgtgaaaaaaataaatatacaagagatgcattttagtcatttatggaacactccaaagagggcaatttatgcttttgtaatgatggtacaataccattagaatattatgatttatgattttgtacccctgttttgttttagattgtatataggtgtacaaagtctaaaatattcctgcggaacaagctgagtaattattcatctaatattgtgtgctttttccaattataaactcataagcaacttgcatatttattagcttattgaattgtcgttgtttgttttgagtaatcttaaccttttacttgagtactactcgtatcagtcgccgcagctgctgccaccaaatacgacaacacatgcacaattctaa

SEQ ID NO: 254350 - DNA, 632 bp, Cannabis indica
ttctcatttcacacaacttcactcgaggtaatgctgataatactctattcattaagcacttacaccttggtatctttatggcacaaatctatgtagatgacatcatttttgggtccaccagtgatgaggaagtgtcaaaatttgtcagtatcatgactactgagttcgaaatgagtctaataggggatcttagtttctttctagggttacaaatcaaacaaacagatcagggcattttcatatctcaatcaaaatacataaagaaaatgcttgacaaatatgggttagataaaactaagcatgctcctacccccttgagtctgtcaactaagctgagtaaagatgaggctggagaaaatgttgatcccacattatatagaggaatgattggcagctttactatatctcaactgccacgtcgtccagatatatcttttagtgtaggtctgtgtgctagatatcaggtccgttacccaaaacagtctcatctcaactacggttaaagcgcatttttaaatacctgtctgggactgttgattttggcctatggtactcaagagatacaaacacatctcttgtcgggtacagtgattctgactgggctggtagtctagatgataggaagagtacat

SEQ ID NO: 254351 - DNA, 507 bp, Cannabis indica
ttcttaaaaaaaaaaaactatcaattaacttacagaaattagttacattgaataaatgaaacataaaaactagtttaaaaaaatagatgaaccagttacattagatagctaattaaacaaaaattaacagttaatatagtaacaaaacaaaagaagccaaaaattttacatttttctctaaataaaagtccaaaaatataaaaattttcgttccctctgctttctccttccatggcgaggaagaaaaaagtaggaagaaaaccagtcactcgtgttccagttgaagagatttttgctgagagagatgatgaaacggaggatgttgatgaagttcattcaactgaggggctaaatgagattgcagagatggttcgagcacaggacaatcttgaaacagagaacatgagcaaatctggtagcgttcgaactcagagttgggcggaggaggttgaggacgaaatgaaaatgaatttggagaaacaacaaactccgagatctgctaagcaa

SEQ ID NO: 254352 - DNA, 872 bp, Cannabis indica
tttaccatatttttccatatttacgaaaaaaaacccatataaaaatgttaatgtgttgcgagttataaaacttacattattgtgtggtttataataattacagtaatttgtgggtataaaataattgaaagaatattaaggactgtttggaaagagtattatttacaaagttttccttttcatctttaaatactgttttgtatttctttagggtgcgtttggaaagtcataatataattggatttgtgtgtaattagaggtaattacacaatttgacatgtttgtctgaccatgtaattacactgtaattgtgtaattggaagtaattgaggggttccaattacacattctcatggcccccatgagaattggatgtgattacactgtgtaattactaaaaattttccatattaaacattagctactaaaaaatattattttcccatgtaattactaactattttatcaaacaagatattaggaattcatatgtaattactaccttatatccaaacacaccttgcattttaaaatataatgtaattactaaactgtgtaattaccaccttagtaatcaccctacttagtaattacacagttacttccaaacacaacttattttcaaaaattaaaaaaatataactaaatcattggtaggtactcattatttgcatattgtccaagaatctatacacaattttggtgttggttagtccactcgacccaccaaacactcatagacacccacaccgctagctcggttacaagccgagtccgatccattgaagttaaacaatatatataatcactctattattaacataccaaaacttgactaggcctctgaaatctgaaacataatcgaaacagag

SEQ ID NO: 254353 - DNA, 678 bp, Cannabis indica
gataactaatcagattgtaaagagttttatttagggcataaaacccaacagaaatatttgccaaatcctttctgatcctccaagacatgcgactcagactgtgggtacgaaggatgcagaagggtctattacctcttctcgaagtattggctcctggagtccccaaaatctctttttcctcaaatagaggatcgggatggcgcaacatccaatcaaagttcagggtattgtcattttgggctgctttggtaattataacgaccaagtcagtggcaagagcctcctttacttccctgggggttggcgttgtcctcagaggttgagcatgtcaatgctttggaattttgtaatcaagccagatctacggagaagttaggtcatcattaagtccccaacctttaattgttcctcagagaaggtcctgtattgagcttctttcttgactatctcctcagttctagtgctctagggggaagctctactgcaaattaggcacgttagtaggactataaaaacataacagaatcagaaatagatgaaattcaagccaaataattagaatacctggaaaataaaagcttagacgaagagacgaaaccctattggtaggatatctagaagaaaagaaccaatactctcagaggtcatgagtgctatctgtatggcagaaagagcagt

SEQ ID NO: 254354 - DNA, 1394 bp, Cannabis indica
ctataggagccatccctccatgaacaacagtgttccgtacattccaaacattccaagtaactactagaaaaaaatgcaaacctgttttgtcccactgccgagccattctcatcagaaaagaaagcaaatcctcacccataattcgctccatatcatccatcaacccgctcaccgcccaaatttctttactacgtttgcactcccatagcgcatgagctgccgtctctaccacatgcccagaacaccgcacacaaatgttatccacagccactccccttttaaccaaattagcatttgttgggatccaattatatacaagtttccacacaaaatgtttaatttttggtgggattttaagacgccatagagctttccaccagtccacacacatttgatcatcggattggtactgttcagaagccaatgaggtcgccatcttatatccgcttttgactgtgtattcgccattcttgctatagtgccacattatcttatcttctatatcccaacccgtgctaggcatagaaagaatgagctccgcatcttccatattaaacaccgagcggacaaagttttcatcccagctaccatccccattcttcaaatcggctacatacaaattctccggaagaggaggcttatcataaatcttaaaagaaaccggtcgcggaagccaaggatcttcaagtacccgcacattctccccattcccaactctccatctataaccattattaatcactttcttaccccacatcaaactcctccacacaaaggacgcatgtgctccactcttcgcttccaagatatttcgcatgggaaaatacgaagctttaagtacttgactacacagattatttggataccgaatacatctccacacttgtttggctagaagtgcttgattaaacaaccccaaatcacggaagcccaacccacccttctctttcggtttgcacagatgtgtccatttacaccaatgtatcttgttctccttattcgaagagccccaccaaaatcttgcggccattcgatgaatacttgagatagtcttcttggataatcgaaaacaagacatagcatatgtcggaatagcttgaaccaccgctttgataagaacctctttacccgccattgagaacatagaactcttccaccctttcatctttgcccacactttgttcttaatttgatccaggaatttcttcttatttctgccaacaaaagaaggcagtcccaaatacttaccatgatgttcaacctcactgacccccaagaaagtagcaaggtgttgccgaacccccctatccacatttctcccaaagcacacttcagatttatgaaagttaaccaattgttcagaggcaaccgactataaatctagaagtcctttg

SEQ ID NO: 254355 - DNA, 833 bp, Cannabis indica
cttttgctatttttttacgaaaaatactaccagacgatattttttacttttttactatgttttttataagtttcatattgtagtatactgtgttaagttttcactagtgttttttagttgttctactgttgttttgagttattctgttttgtgttctactagtgttttataaaaacacagtatttttgaaaacttttctgtgtgacaatatttttataaaaattaactcaaattcgaggagttttataagttttccaaaataattacaaaaaatacatccaactaacttatttacaataatatttctgccacatcaacataaaatatcagattctaaaataattaataccaaaacttgatttttgtttttttggaaaattcaccttttgtttttagttacttatgacaccaataaaataccaaatggttacaattggcgccaataatacacatgtaattagttacacatgttattaggtgcaaatataatcaattgattactatgacagtagaaattgagaaaaaataatgcaactgatgtggtgggaccactatcaaagtttttacaattagattcatagacttggtaattagttactcctaagatagtaaccagttttattaatggtaattggattacttactgtagtaactggttaccccaaatattctaacgagtatcatgatgactacttgtaagatagtaacaagttaccccgatggtaaccaattacttatgacatgagagagagagagagagaatggatggaggatagaatatgtggagaaaaataaaaggaaaagatatggaagataaaaaaaaaaaacgaaaa

SEQ ID NO: 254356 - DNA, 818 bp, Cannabis indica
ctactccaaccttttgatcaaaccatttatctctatatttgagaatattttttctaacattattatttatttcataagtattatacatataaaattcatatatagaagacgaaaataaagagagaacgacattaattaattaaggttatcatatataacatgtatatatagaagatctgcaagttgaaattgggtttaagatgaatattagttagttgcaaataatcataataatagaagaccatcaattattattcattgatcatactaagaacctctttctgtatatttacaaacaaccataataatggaagaccatcatttatgatccattgatcctctctaaatttatcttcttatttcatagatctcaattaaagaattgaaggggccgtgtcaatctcatgaaatgataaacatgaattatttttgtaactattattttctattattaaataataataataataataataataataatttttaaaattgggtactttgggaatattaaaattttacatatattgagggtactaaagtagtaatttttgtaaataaagggtactaattgttcattatctaaaacagagagtactaagtatgtattttaataaaacacaaggtaccaaatgagtatttacgctaaaaaagaatagtttacattactgaaaataaggtctagataattgtttccacacattattattttttcttataagcatggtaaacaacttctttaactttatttttgaaactataaattatgtgaatttctttaaaattagcttgtagtattaaataaagggattatttca

SEQ ID NO: 254357 - DNA, 4314 bp, Cannabis indica
taatatatatatattgatttttatatttacatattgagctttatgcgttttattttttttatttttaaagacctataaattgaaagtaattaataagttaaaattgtaaatatatatatatttatatgtaaatattcataaaattatatagaattatataattatgtatgttcttttttttttacatttttttgtcatattgtacatgaaaattgcccttaattatttatagcaataatcgttagtttcctaagagacgattgtatgatgtgacaaaacttgagataattaaagacctataaactttgggctgcatgtcaaagaccgtaaatgagacttgaaaggcacaagagttattaagttttagcattagttttttatcttccatttctataagaaactgcaagaaacgttggtgataatagtacagattacataaaagtaaatgttatcgtttctagtttctaccatgaatttgctttcctccgtagcggtagtgccctgaagtcttaacaatttaatgatacaatacaaataatgaattgccttcctgagaaaatagtgaacgtcttgctgatggaagaacctggccattctaaagccctattattctccagctcttgaggtcttgacaaaaggaaatagaatatcagcacagcacaatcagttgcaggaaaactggagaacaagaaagaagcaagtgtaggaggccaattattctaaggctcaagactcctgaacccacaatcagcggtagcagatccattcggaagaaccactcccacagccagaaatgaagcagcatattctcctcctgtccatgttgctaagtttcatgagcaagctgtgccagattattacttagatcttttgtttaagaacatgacgcaactggagcttttgactttccatccttgcctctaaaagctttgccttcaaactgtgcttctgtccgctgcgaggaatacatcctttcattcctcgaatgtgagaatttcctgagtcaggagaactccattgccctggcaactctgaaggactaaagccccctttccctgagcctctatctggagacatggtacctgcgttagacagccttccatttgaaagtcggccatttattccctccaccgagattatcttgtaattttctccattgttagagcatgatctccaaagccttgttatcgaggatcccttcttaaactgctttgtaggtactaaacagacttcagtgatctcagtgattggtgtttcatcaccaacattgtcttcccattctgtcccactccctgaaacgttactatctcgaagattcttgttgaccgatggggcactttcacttccttctggcgaatagctcgaaccctggtcctctgcatggcttacagtttcccatccactttcatcttcttctaaatcaccattatgatcagcaaacatcatatgtcctttaatacagttcttactaatcccattaacttcaggactaacagtatgaattctagaggcatggctaacaggactataagcaacacatggttcaatctccctttcatttgattcaccaaaattaacttcttcaaacacagaaaagatatcatcagggttgggaggctcatatgaaaaatccttaatttcttgaatatttacagaagcagcagcctgtcgaagcaactctgcttctttcatctccttcacatctggggttgtacttcttaactcgaaaaatttctccagatctgctacaagtttgttcatatatgaatacttctcttcaactgcaacctttgcatcaacgagcttcatttgaacacgttcttcacgccagacctcagccatctgcaacatcttcctttcttcttcaacttcctctctaagcttcatggattctctcttcaatgcttcaacttcagctttgtcttctccaatttccttggcaagctcatcacatacttcctcaattaattctctggctttcctttctttatcataatcctgtagaaaacgcttagctgataacttggcatcagcgagctcattaaccaatttagaatttaatatttcaattctttggcgattcttcctttctcgatttaactctgttttcaggtcatcaataaatgcacgaattttgtcatgctctctactcctccatgaggctttttcctcactaactttccttaagaagtgctcgagtttctttttagaggatcgccgttcagtctcaagctcctgaattcgagcacgagcctgctctaattccgcctcaagtgcagacaccactgatacagcactgacttgttgatcaagcagcttcatttgtcggtaaatctggagagcctcatcagatgtttttatgcatacaggatcccactttgttgcgccttccatggcagtgttgggaaactgaaaagaaggctgaagctaaagaaaaaaaagaagaaaagagaaggaaagaaaactaagattagaatttgtgacacgaaagaaaatggtttttcttcataatcataaaaccaagagaggaaataatgccctttgctatgaaaaaaagataattgctaacagggacttataaatataagtgcagcaatacaaaatttcagtactttagtattaacaagaaatcaagaataattaagatgattaaaagaaaccatcaattcaaaaaatgtaaatcgttagagaatttaaagttatttgttaattcatagatgtacagaagctttaattaaagaaacaaaactaaaatgtaccttgcaaaatcctccattccttgaaaaagaactggggatctgtagatactcctttccttcagaaccatgtaccttgttactgcgagggtggacaaacgataacccaacatggccaactccgggcggctgtaaggaaaacaataaaacacaatcaattctcaatatatatagcagccaaaaaacttcaatggataaagtagcctgtcgttttgtattgcttaatctagactaatattagatggaattttcaagcctaacttaatatcaccaggtaaagttccacagatttagtcacagttagcagctttatttgaatacatatttcttgaacttcaacaataaaagaaaaataagaaaaaggggaagagacagtgacagaaaatttaggcattacaacgccacacacacacacaacacacatgtatattagataataatgaaaaaatttccaataaccctaataattaatttttcgtcctagtgaaatgaaactaactaattaagggtttgacgaacatttccttctttggtactgagaaccctataaagcaaattttgattttaagagacagtcgagtacttttctattaagagcttgatccacaatgctaatttccaaaaggagattcaaaaggaaaacgaaagaagaaaaaatcacatcaagcaaaacccaaacttcaagatcactcacaacccttcttagttagcagctttaactttacaatacctacacaaattatcactatacgaagaattctccctctttagtaacaatatgaaagagaaaaagtcaaacttcaatcatcttaggtcaacaatgcttaaagatcgcacatttaatcaaaccttccaactaagaacacccaaaagtttcagatcttcgaaaaccaaaacaatccagaacccttaattagcaaccttcccagagatgaaatagagctcaaacatacctgaaaccctacctgactactccttttgccaccggacgaagccacctccggcaactgcagccgccaaagtccagcggcgagctttctcgccgagaccgcagcttccctttccctcctaacttttcggccatgtctccgaccatcctcaaccttctcgtcctcttctagaaactcactctcactcttcactctctccacaacatcatctatcttccacttcaatagaggcgtctcgggccggctccgcctcccattcgaagctccggttattttgaccctgccgaatcccggcgtccgtggctttctccttccgggtttccgggtactgggtttaggctgaagatccgaatccgttcgtgggtttagacccttggttgaaagggtggcagggaatgctgccccaaggtgagacttaccggataccttcatcttccccggcgagactcagccatttagatagagaaagaaggaaataatgatgaaatgaaagacaggtctaacgagaaaatgggtcctgttggttgttcgtgatgtgtgtgaaatggcggaaaagggaaattacaaaagagagagagagagagagagagagagagaggagagagaga

SEQ ID NO: 254358 - DNA, 561 bp, Cannabis indica
cagcttcaaaccaggctggtaatatctcttctaactcttttcaatgggttcttgatagtggtgctacacaccacatgtgttctaatttttcttgttttacttccttcaaagatttaacttttcctaaatatgttatactacctaatggtcacaaaatttttgtctccaaagttggtacagtgtgcattaatcataatctcacccttcacaatgtactctacataccagatttttgattcaatctcctctccatcactgctttggttgattaattcccttactatattttttttaacaccaaagattgtgttatacaggatctttctcggagtgtggtgattgggacagctaaacgtcaaggaaagttgtatctcctacaccaagaacctcctataacagctgctggtttttctggtttagttttaaataaatcaattgtagatcaatggcataatcgccttggtcacccatctttgtatgttcaaacattttcaataaaaagattggttcttctattgttcaccatcctcatactcactgtcatatatacaatgttgcaaa

SEQ ID NO: 254359 - DNA, 1133 bp, Cannabis indica
gagttgatcacatcatttccatccacatgtggtgtaggggaactgaaacccttgtagcacacggtaacagtattcaatgatcatgatcatcaacgtggccaaaccctattgtaaaatggattggaaatacatagagaacagaagcatcatctatttcagttccaaccttgtgcacgtgtgtgtcaggtgaattgttcagttgcacacgtgcattccctcggcggttacctcacatttatttcaatcaaacacttttctaataaactatcacatatattatatataaattagtagttactaacttcacttgttgttgttttatgcacatcatcacttatcatagtattagtaaagtgggtttaattcaagagagacaaggtcatgcaaaatatgactccttcagtggaatcatcatcatcatcaaattaaatgttaaaatattttttaatcaaatcaattacaattaattaattattgatttcaatttatttaatatattatatttatttgttaatcgtagagttatttattagaccaaatttaagatatatatattagatattaatccgattcaattaattctgatcaatctaacattccttagatatgtatattagattggttgaaccatttctatccactaaaaatatttcatgtatatctattacattgttcccatttctttaatactttagattagtgtattttttgaatcagattagatatccatctaatgttttagatttcatccatctaataaaaaaaggtaaaattttaaatttaacttttatatatatttaaaataaaacaacataaaatctaattaatcatttaatgtattaaatttttagatactccaatccgatttaattggatatttaaaaataacatccaatccaattctgtcacaattaaatatatttattcacaattgtaattagattggattaatttatacacctagttacccaatttagttttttaattggttgtgaaaatattctaaaaataaattgtgagtgaatgtaatgtgtcatgtatataaatataagtaacttatccctaattttgctgttagttttctatctttcagtaacagcttaattagaagcccgaatactcaatttcctttt

SEQ ID NO: 254360 - DNA, 656 bp, Cannabis indica
tttttttttttgattattttatgtcctaaaagattgtatatgtattattttgaattttgttgtattttaaaatggtgtgttattaaaattttaatatgtgtatttttattgtgttggttaaactttaatatattgtttatttatttatttgatgatagtataaattattcatactgcactgtatttttatggtattattttcgcagttttgagattttgtggtgcggtcgcggtttgaaaaattataaaattgcatttgcgatttggttcaataaatagccaaaatccacactgtccgcacctcaaacacccctaaaaagtagacatgaacttgttcccgtaaaatttagttttcttacaaaaattaaatttttaatatacttttttataattgaattgattttttaataaaaataattaatttttcaaatcatttaattagttttatttattttttattttcttagtcattcaaaacgatttttttaaaatctaaattaacttttaagatttactataaaaaatattgatatttttttatttgaaggggtacgatttgatagttatttaagtttaagaggtaaaattgttaatttacaaagacacctcaacatttaaaataaataatgggacaaaacctaataaaatgactaaat

SEQ ID NO: 254361 - DNA, 1420 bp, Cannabis indica
tcaatattaataggagttattttaaacatttagaaatagtatcaaccttagcttacgtagcaatgtatctgtaaatataccatcaatatttgataatattgggtgagtaatattataatagaaaaatcaattatgagttaatatgacttctgaacattgagattgttttattccaatgatttaataactatgtaaatgtagttgacattgttgtttcagcttaattaccacactactagcacaatatcttctgcattaatgtttaaaacgtttctcattattgactgttattatgttttcaggaaattgtgataattgccttagttcaaagaatgagcgtgacatgtccagagaagcattccttctgctggcctgtattcgatcgtgcaaggggagatggggcttgaatatgcctgttgacattctccgcggttctcgtgtaagtttcatcagtagggaatagaatggtagatttgttataatttgaagtgtatattggtacatattattcttatccactatacttatatgttatttcttttttacttgtaatttttttcacagtatttgcttttgattctaaagtatttatcgttggcccagtgttgcatgttgttatttttatggagtctaaagtttgtttaccttgggggaatctttagtgcttagaaactaacatgtctagacacttttattttatagctttgaaggttgccctgttatttcctcccctcttatttgaatcattcgcactataaaaaattgtttgcttgcaatttaaccaatgcagaacttgccacctttaaagaaaactagtcaataatttagtcgctaatctggcatatggaaaatccttgagcaacagaagttatggggtaggctaactttgaaaattattttcgcctaaaattagatttatccatgagaagttttgcaattcaattttctactagctttttttattttttatattttttaactagcttgaaatagtgtaatgatatacatacctaggttcatactgtactgttccttaataaataaaggtgtacaattgatgtattatgagtttcccccatcccctctttttctttgatttgtccttgtactgttggtgcaggcaaaaaagattttggatgctcagttcgacaggcttccacttcatggccttggcaaggattattctgcaaattggtggaaagctctagctcatcagttaatttctaacggtatagagattacacttctaatactgtagttgatttgggttgaccaccattataaaatactcagagctttttttttttatctaatagattgcttgaatactgcagtagcttgataactatcaaataattagcaaagcatttgtaaattttttgaaactgcttacatcatattgcgttgacacttgccctga

SEQ ID NO: 254362 - DNA, 687 bp, Cannabis indica
gatgttaatgaaacatactgttagtaaatcttgatcctggtaaaataattctaacactttgcattgttcgtcttattttatttttaattatttttttgctaatcctatcatgaaataggccttattgtggttatcaaaaatatgcatttacagatgttattctttattgtcttcttattattttttttcttatttgtgtttatttattaaattttagcttttatgggaagatttatgcatgtctacaaaatctaaagtgtagatttataatgatactctaattttttaaacatgcattttacataaaagagatacagtgatgacataaactttgaatataatagtgactataaataaaatacggcgatgatagatgctttgaatataatagttactacaagtgaaatacggtaatgacaacattgactttgaatagtggcgactataagtgagatatgacattaatgacaacaatgacattaaatatagatgatgagatacgatgatgacaacagttttgaatgcaggtagcgactgcaagacgattacaataattttaaaatatatgatcattttttatagatttatttattgtcttttttattagatttttatattgtttaaggattcttcaatttttattctctttttcaccataacaattgaagatatctctttattttcttt

SEQ ID NO: 254363 - DNA, 812 bp, Cannabis indica
cgtatacttgcatgttaaaaatacaacattaagtttttggtgttgttgccggggattgatagttaatattaataaaaataaatttttgttctaatttattttttttctaatttttgtactaattttgtttgctttaattttttctcttttttcaggaacaactagtttatgcgacgtcaatgagcaactgccagattgcatgttgatcttgaaattgagaagacttgcagacagaacaataggaggaaaagattggaaaaagttgtaataggggttgaacaagaagtagttatggttgacaacgccaacgtcgacaacaatggtaataatggaggtgttgtggaagaccaagctaatggtcgcaatcaacctgatcatagcctgagtgactatgtgctgcctaacttgacaggtgccaaatcttgtataaggccacttgtcgttggtggaaacaatttcgagatcaagccaaccatactgtagatggtccaatccacagtccagtttggtaggcttccaacagaagacccaaacatgcatctctctaactttgaagagctttgtcagacatttaagatgaatggagttagtgagccattagactgaggctgttcccattctcattaagggatcgagccaagagttggttggtatctttaccacccaattctatcaacacttgggaggaattggtcctgaaattcctttcgaagttctttcctcctgccaaggttgccaagctgagatttgaaataaacgacttatccaacaagacacaaatctcttatgaagcttgagagaggttcaaggac

SEQ ID NO: 254364 - DNA, 693 bp, Cannabis indica
atgcacatcgacccactcaaggaggcaaaggcagaggtaatagcaacaacaatggagggagacacttcaacagaggaggtggaggtagatctcgtggccgaggaagaaccaacaactctaaacctacatgccaagtgtgtgggaaatatggccactcagctgccatttgttataaccgattcgatgacagctttatggggtctgatccacactcctcaaaccagaacaaaaccaaccaaaacactaacaacccttcggctttcattgcaacacctaagatacttgacagtgaggcttggtttgtagatagtggtgcaagtaatcacatcacagctgatccatctgtaataccccagaagcatgaatatggtggtaaggagaaagtgacagtaggaaatagtgataaacttgtcatttctcactttgggaatggcaagttatgcactaaaacaggacaatatcttaaactaaatgaaatgttacttgttcctactattgctaaaaatattcttagtgtttctaaactcaccactgataatgatgtgattattgaattccattccaatttttgttttgtgaaggacaaagcaacaaggagggttctacttcaagggatgcttaaggatggactttatcaacttcaagtgcctcaaaacaagtcagcctatttcagttttttatcacctaagtcta

SEQ ID NO: 254365 - DNA, 3248 bp, Cannabis indica
tattaagagtgagttgttgagaagaaaaaggaaaatggataagagaactaatgttctcattatttaagtcaatacctttaccaacatacacttgttcattacctacataagatgtgcttgctacaaggttcatggaatctggtgtcaagtggtaagtcacaccagaatcaggatactagcactcatcagtaaaagtttatggagtagcacacatgacttccatctcaactaagtgagcggtggcaggaaaattagtgaatgattcaggacctatgaataacttatcaaaacgatagaagtactgttttacagcgtgaccaattttatgacatagttggcactgaggtttctgagaccattactggttctgaccacgaccaaaattaaagggaccaccacgttgagcaggaggaccatcgggattgtaaccataaccaccacgagccataggataccttgcatatccatctggtcgagggggaccaccatgaccaaagccaagtggtacagttggtgtaggataagcaagacaattgtatggattgaatccaatgggttttgtgtggaagagattgtcctatgctttgagaatatcaagattctttgatgtttatcaatgcaaacagattgagccattagaagcacttcaatctcaatcacaatgtactcatcttttaactgaggtgaaaaaaacatcatattcaaagggtaaatggcttcaatatgatcttgtagcgtctgtttgtgatcgatggtagcaagaagatcaacaatccctttaatcttgagaagatagtcattgagtgttcctgtcatcttcgtattttaaagttgagttttgtatagacctatattcgcaacattgagtacagtatagtactcataggagagcgataggtttgagcagtggtatcacaactggtcatacgattggtggtcttttctgacataaatgacaatagccaagaaaccagaagattgtcttgttggctcccaatcttcaaactctagattgatggtgttggatctttcatcttcagctgtgctccctttgatcaatgccagaacttgatgtctccatgataaatgggatgcaatctaagtaaaggaacttgttggtcgttttgtggttgagcattgttaaaccttttctgacataaatgacaacaaccaaataactagaaaattgtcttgctgctctcaatcttcaaactctagattgattatgttaattctagatcgattgtgttggatctttcatctgcagcggtgagcggagctcgagcatgatcaagatacttgtaaaggcaatgctccctttgattgatgtcaaaacttgatgtctccattataggtaattatgttcatcaagtttgatagaaagagaatgtgtgaagaatgagatacaatctaggtaaaggaacttgttaattgttttgtagttgagcacaaggttgcaagaatctccattgacgaaagaaaaaggaactctgacaccatgtgaagtttcaatcttttgagaggtaaaattgtatttggtgtattgattgtaaaaaagtgcaagaagagtttatatacacgagttaaaataacaggaaacatagcaacccttctaacaactaagaaacactcaactaacacctctgttagtaaacagaattaactaaccagtatccttgacaagaaccaacacaatttttaataagcagattgagctacatctacatgataaatataataactcaacatacagagccttttatcaggttggaagtacaaaatttagcacttcgcaggatttcattctaaggtcctttccataaattaaacataaaaaagagcatgtacacgtttaaaattcatcatctgattcatcttcatccgaccaaccaaaagtagtgactgaagggggcttatactcaggcaagtttaccggggtattgtcggattgcaaatactgctttaacacaaaatttccagattgatcgagaatttcaacgtcaaacgcaggtgccaacggcaggcccagtacttgaatgtgggacacactgcagaattcattaaaattgtaataagaatgcataagtagagcagtagaaatatgactgaaacatgtagtcatgtgattcactaaaatttctagcattctaggtttccctgttttttctggtcagatagaggaatactactggtaagtattctaatcaaataaacagattgtggtaatgaacgttatcaaaagtatcttatcctcaaatgcaattgatgtatgatctatcttgaaagaaagtctgtagacaaagactaaaaactaaaacaaagaaaacagttctacagggatcctattttgtccactacatgtagcagcaaaaaaaaaatatttgacctagaatattagcatctcttagactcttaccaacagagaccgtccacatagaatagagtccaaaacaacacagtaaacatcattggattatgctatttcgcatatttgaaactaaaatgcgttctttcctaatatcattttctgatccattccattaataattcatcacataatgacaagttcatactaaggtcttcggatagtaactaataagtgaaacctatgggtgcaagcttctccaaaggctcgtggcacttaaaacattttaaacccactcatgtattgaagcacatgttatgcaggggaatctttaagaaaatgacaattgaacaccaaatacatggtgatacgttggctcacagcatattaagaaatgaagaaaaagaatatggaacaaaccatatatagtacaagccatccaattcctgtgtctgtatcctacccagtagctcaatttgcaaatatccaccaatgcaaagtactggttttggaagcttgaacatctgtaagctatttttctgtaaatgtgtggataggataaaaaaaaaacaattaaaacaggctaaaacttatgatccaaaaaaaaaaatacacagctgcataaaaaatgaacgaaggcaaaaaaaaaaaaaaaataaactgtaattgtctaaaatacgcagctacatttagaacaggtgttcattatcttctaaaaattagttagaactagtattgacaaaggccgaaaaaaaaaaaataaaagacaactaacataaaaaataagatccagcagctagttctatgttcaaaagaacgaaagaaagacaaaaaataaaataagctaaacctgtaacaccaaaaactaaaaaaaaaaaataaa

SEQ ID NO: 254366 - DNA, 8837 bp, Cannabis indica
aaagtgtccaacaccacgatcgatgaggtgaaacattataattaattaactattttctataatttttattaaaataaaataaatatgactgaatattaaattacactaatagtgatattacaactcacctctaaacactatagtgctctttagcatttctcggcaattctcagtccaaataatattaacccataatatttttccaattataaattaggagatatattattgtagatatcactaatcattttctttaacactaacaactttaacagaaaaaatgacatgggatattctattcgtacacaatattctaaattgtgtttcttttttgtaatcaatcacacataaaaaagcaacagtttgatagaactaaaacagaacaaaggccttgtaattttgagattcatgcttgtaaaactcattcacctagttgagcttatcagataaagttaatacaaaaaccagaagcaaaggccttatgtttttggctctcacttttattaaatgctaacatctcaaagtaacaaaaagcattccttaacgcctacttttatatttttacaaactctatatagtttttaaggaaatcaacctcattccaaatcatggtctttctcattagcatcattaccaccattaacacttgaagcaagctctgtttcgaacgctttcgaacttgaaggcagcctctcgtatattctcgatgcagatggaagaagtctgaaccgtccgaaagtaagacactgactgagcttttcgtaactcaacttctgctgaacataaaccaaaattgcaagaacaaccgcggtcacaggaatggcaatgtctccaaacttcgagtagaaatccatgtttggatcaacaaactcgtactcttcggggaagtaaggaatgttaggagctctaatgtaatcatagagatgtggaagaagtctaacaagagtgattccaaagtagtagagctttccaagtgattggcaatcaatttgccatatcaagtttccaattacttgtgggagaaggaaaaagtcttggacaagaccaacatactcttcaagctcagcttcccattcactcataatatgagagttttctcttatatattcatagtttctcgtcctttgatcacctctcttactatgcatcatcagaacaagtagatagccaactacatgtatcgccactgtactcagaagcaccttcttgtcacttgggacacgatggggttcgagaggagctcgtgttagcaatctcactcgagatttccacactttttgacaaagccttagagtcagtatcaacgagaccataacaagaagcttcacagtgtaatcaagtacgtggaaccatcgactgctttcgagatcatatgatgattggtaagattcagaactagccttcttgaagagagcttcagcacctgtgacaagaggaatgctgtatccaattgcttggacgccaagcataacaagagacatgtatggaacagagtctgtattcttctgagtgtgaaacaattgtgctgtaatacaagcaatcgcgaatgaaagggtcagaatcctgaggattccctcgattcccctacgagatagaaggtcttccctctgcttcctgtaagttattgggaaagtttggaacttgacttgactgaaacgaagagggtcatcgtcgtttctttggctggctatggatattttggcaagtggatcaactaaccaacgagctgtagttggaggatacgatacaatcacatcaataaaacagtccaacccggcttcaagatcttggctgtcatgtaatatttcccaagaggcccgcacatccctgcagccaactaagtacattttaccaacgcgttggtcatagataccctccaagaagagcaccgaaatatttttgtattcctctccagcgacagagagctgagctgatacattcaaaaggagctggttctcagtgtactcagccttagtgtggaatggaatctcagtccccccttcaacagagacgaaattggaatcatttcgcgaaaagtagcgcccaaataggggccaaccgagagaatatccatctgaatatttgttctttgaagccgagatttaggagtattcgaatctagggtagcaggggtatggaatgtgagatcttctgagagaagagaaagactaacttgatagtcttcagcatcctcaagtttcgggtatttcagcaatgatttcttgatcatagttcgaagactgaactcctcatttctttccaagattgcatcagctctagtaatttttgagtaactgtaagttggatgtgagcctctgaagtagttccagagatctgaagggtggtttataagcttttcaaatgaaaggggaaagtatgatggagtgtttgtactaatgcttgataaagtcccatacataatgcttctttgctttacagtaaatgaggtagggatgtacaaacagatccgggaatcgcagccactcccttcgtgatcaacgattccaggacaaccaatcatgcaaagctgtccactggtagacttccaaattccctcagcagcaacagtaaggtttcccatccctgatctcctggtggcagtatatcgattctctgatggaggagaagctctaaactcaactgaaagtcttgctgaactggtattgctacggccatttgattgatcacatttaacaacttttacataaagactaacacctttgaaaccaccatctgttttgttgatctctttgtttatcccaaatggacccaacttgctacaaaattcatctttcccactacacttccagttaggcagaacagtgaaaggttgattcgaggtgatctcttcgaaaatttcacaaaactgattccctttgtacacacttattcctggtaccaacaacgatccatcagttttgttataagggtatggatcacacgctttcgaaaccagcttatcagaggtgaattcatacattgctgaactttgtttccccaactgtgacactatgtgaacatcatcaaagtacttttggttcgatttcgcgttcaaactcctcatttcgccctggattgctctgctagtcaaactaaacttctttgggaaacgaagaacaagcaaaatcctatcatcctgggccaaaggagggcgctcgttgctataaggtaaagaagcattcacccattcccatggattagaagactccgaatctcgagatggcaacattgcattccccaacatacaaaccactctttccccaccattcttttcagattcagtgtaaaccccttcgaattcaataacaagataagaagtcccaggccaaattcgaaattcgggattcccaccatacccataggaatcacctcctgtagtaatggctaagttgagagtaccactaatactaacagacttctttgatctatgagcaaggctcacatccctaacctggaatgaaaccaagttcatgggatcaccctcctggtttgaaagggagttgaacagagttgagtccttctcaattcgatatctaacatcaaaaggcattattggggcttcacccttgacctgaacccaatcccctttctcaaaaaataggtctctttgtatactataaactctactatcatcttgtttcaattcagatgcagaagatagtacagatttacactcttttttcacttcatcaactcgatcatagttatatgtaattgaagatacagcttcaaaatcagcttctaaaccctcaatcgccggtgctaaagaaaaccccaaacccagaaacccaaacagagcccaagccacaacaacaaaaaaagctgaaggcttcatgcttttgttacaatagtgtattaatccacatgaacaatcatactataaaagccttttctagttctagtgagtgctaaaaagggtaaattgcagaagaaatgctaacctgaaatggagcttttttgttatgaatcagaaaccccagaaagaagtgagaaaacccagttgcacaagtttggatcttggtttgaagacttagacaaaaagaaaaagtctttctttttgggtttctagaagaagagagagaggtaaagagagcactggacttggactactgatgttgaaatggtgggagtggaattggtttattaccaccgatgccagccttgtacactaagttatgatatagaaaaaagaaaagttaatctctgtttaaatatcaaatacttatttggtccaattttctaaatttgtgctttttttctctgtctccatagaaaatttgggtcaaacataaatcaactggtctataatttgtatcaccatgagaaattggttattggttggaatggatctatcacctatctaatctgatcaagacttttataagtcatttaagtttctagagctgacgttgacttcaaacccaccttccttcaagtttttatttttttattttttcctttagtttcagaaaatatggattagaagaaagaagaagaagaattcaagggcataagcgtgaaaagttaatagctattcattgcagtgtttttgtacttaactagaaataaagaaggtttttaaggaaaaaagaaagcaaaattaaatgagaggcattttgtaatcttgaacctaacttctagttaaatattctaaatttgtattcttgagattcgtagtccatgttatgttacaacaagtacaactgcttctttagtttaaaaatgtctattaataattaattggtttttctatatgaaaactaagaatcgttacttgttctttgatatattaattgattccctattcaaagaatctttagtcaaatggaacatgtgaaaaaattattgtttttaggcaaaggttttgtgacaaggataaacttacattaatttggtgactggattgtaggattataacttttgctttttccaaataagaattttttttatttattttaatccaaatgttatagaaaaattttatggtaaaaaggtgttggagctatttaagaaactctcttaaatgtcaaaataaataagaaaacctacggacctttttttttaagagtactatgaacatacccaatgttgtggagaatggctagagctattcatcgaacgtttgcggtgtatttgtaaaagtcgcttatttcaaaggaatatatacatatagaggtctttcaagtaattgtatgtttctaactcctttataaataaaggcctgttcgctcgcagtatcagatcactcatttaatagtctcacaaaagggaccacaacaaaaccataacaatggaacaaaaacaaccgataaggcagacaacaaacctataacaggtacccaaaagtggcacctaacgaaaatcattacatcttactagattccagaactgacagtccaaaacttaaaccattttgaaaccatggtacccaaaactaaccataagaaccttgccaaaattgatggaaggaaataatcataaaacaaaaacaaaaactcatgtttgggaatccaaataataacattaaaacaatatcacagatttacgtcatacaattaaagtttgcatctatctcaacagaaaagacaactaagaaaaattcgaatggaaaagagagtaaaaaaggaaatattttggggtcaatgcccttgttttttaaaattggttgacctttaaagttgtattgacacaagatgagacatccacacaaacagctgcagtaataatataatataagttatattgaaacgctacagacaggcaaacagagttcatatagtatttaatgtcttaaatctctcaacacagttaaaagaactacaattattctattcaaggaaaaaagaagcaagtttaactcacacatcaaggctcttgtgtggacaaataaaagcatgtaatcagctaagctttaagctgattcactccccgcccttggagaaccatgattatcatcctcctcctcaatagggctcctgtcatccctgcggattggagtgggactgcggcttttgaccattagtaggactgcgactgcgactgcggcttcgaatatttgtaggacttcggctgcgtccatttttgccaccattacttcggtacctctcatctccgttgtcttcaccagcaccattgattgggcttcgactctttcctcctctgggactagcactgtagtctgatctacgatctcgaggagatgggctacctctcactttggggcttctctcatcaggtgtggcatcacgctgcttccttcctttggatggaggaggtgagcccctcaactgcttaggacttctgctatcatgtggactccttctgctatcatgtggactccttgatcttctctcggcactgcgtcctcctctcttaacaggtgatctggatcgactgcaaaaaaaataaaatgtttcaaagataactcttaaaaagctttgattagaacaaaatcaataaaatttcttcagcagaaataacaaattgcagacaaacctgtaactgcggtccctgctataactacgacttcgactcctgccatgacgtggactcattgagcgtgattgactccggccacgtctacaatttttgttcaagaatttataaaattaacatccaaaatttaaaagagcagatacttagaaagcaatgaagtgatatgagacagtatacttagataacatacttgagtttcttcggactgttctgacaatttctttcaatgtgacctcgctctccacaacggtaacacttattcttccaatccccagccttacaatctcgagcccagtggccatcaattccacaattgaagcagcgccctgatccaggaggaggacctctaccaagatactcacgcgatccacccggaccacgtggtccctaaatgtaaataaggcacattcagtacgtaaatataataagtatctccaaagaaaacttttaaaaattataaaacacaaactaatcaatttgacttgagcaagccatgagatatttgaagagggatataaatcatacacttaccccccgggcagcttccacaatgaggcgagttccttcaaagtctcggccattcaaaccatatcttgcatcatcagcatcccgtgggtcactaaactcctgtttaagaaaacacaaagcacaaaatatgcaagacaaaagttgaaaaccctatataacaaaagaacattatgaactacaatattacttaatgagtgattgtgtgtattttgcaagagaaagaataagttaaggacatacaacaaaggcaaagtcacgcttcatatccacatcacgtactctgcataaattgggtccagaaacagtaaggccatcatgacaatgtatcaaagggatgatgatacttcgctcctcactaaacaccactttgggattgttgccatttccatttaaaacacgcaataacattatagaaagactcgccaaatccaccaatgagaccctctcaccacagacctccaggtttggcaaaagccaaaaaaccttcaacaagatcatcatgttaaaccatacagacacgtggagggggtacacattctcacgaagatatatatgtcatttcaacataaagcacaaggaatggattggcaaaggacatacacacctcaataatggacatgctccaatgacttattttggaatagaaggtataacaaaaagaaaaccagataaagcacaaaagtcatgcttaatgttcgcaaaagggttgctgaacattaaaggttctacatgattttgacacaataagaataaaccccaagaagattaaaggactggcacatataagttgaccataaatttacaagaaaaaaaatataaccactctcataataccataaagcctagcctatattcaaagtgataatctaaataattgctgaaaaataaataaactcaaacagaaattggttaccttccatatctgctaaacagatcctcaagatcacgtcctctaactcgagaaggcaagcgaccaacataaagccgagttccaccgtaacggtcatcataccgaggcatctttattctttacctaagataaacatatcaatcaaccaagaaaattcaaaaacatatattacaagtttgcacattattcattccatatattatacagcactacacgtatgcaagaattctttttcaagaaaaaaaaacaatattttcactttacaatcgaggagctcaaatcacatttaccagcccactttacccgaaaaaagaaccctagagagagagttttggttttgatggggtcaaatgaatctctaaaaaaatatatacaataagttttaatactgaccacatttaaaagatgttgttcaataaattttagcaacatttacgttgaactctgttgtatggtaatagcagagaacatttcagaagaagacatccatgggttgagacaagtgttcaacaatatggacacagatgaaagtggcacaattacaccagaagaactgaaaactgggttgtccagcttggaatctaatgggctgtttggcttcataacttaaaaactgtttttagtttttaaaaatagaaatcagtttttaaaaactaagttttaaaaaactgaaaaacagaaaacatcaaaatgttgttttcaattttcaaaaacaattctttttgtctaacatattatattttatatttttgctcacatattcggatcctatacccggacccgaatgagttcatattatggtatagtgttaaaatattgatttttttagtaagataaaaattaaaaataattttaaaaaacttgtgccaaacaccattaaatttttaaaatgacaaaaaactat

SEQ ID NO: 254367 - DNA, 824 bp, Cannabis indica
actaaaagatactaattatgtactaaatattggtattagtgtaattaagtatgtagtctcatataacttaatgtaaatatcgctaactaatcctaaaacaccacctctatatgatcttaaatactattagtacttaatagcaatattctatcttgattttggaattattctttgaaaatgtagagcatggaatccatgatatatatcttccgaaattcaaaactacggccctctaatttatatgtccatcttatacagtctaagggaaggaaaattattgttgcagaactaattcagagtttagaatatactaatttaattagtttatgcctagtttcattgatagacactaattttttttgtgatttgtaattgtgttaattataagcaacttgttgtccgttgagtgtgttgttcttatgccatccttttaaagtagtatattaacgattaccgtgatagatagacacctcttatcctttcaaaaagaaaaagtaatagacacctcttaccagttttattggttgtcggaattgacaaagctttttaaacttattatctcatcatattctgtctttgcttgggtagaccaaactaaaatggaataagaacaacttaaattttggaatccacgttggaacaaaaattactctatctgattagatgtaggaatagagtaaaattacaatatttgtaaagaaaaataaaagtgtaaacataaaattcatttaaaactttaatttactccggggatggaaagagaactggaactttgtttccatttgttgaattatgggtatttcacttaaaagtaattttttttt

SEQ ID NO: 254368 - DNA, 658 bp, Cannabis indica
tgtctttattatatttctaatcgcttaataattaactaattgtcgttggctataagcaaggtcaacaccctgtgtactgataaatcatagtaatacatttaatcatataatgttgattactttccactgtgttaacaatataataaaaaagaatatcaatgttataaggatttggatgaatttataaattaaataaagaaataaatggtcacatgaacgaaataacacattaaataagttatgaaaataaatctgtttctttactgataaatgaatatagaagattacatttaaaataagtttaatttatggcacaaagcccaacaccaagtgcctggtagctttggcaagtgttggccaacctttgtacaatattccttgcaaaggccaggcttccctttttttgtttgtcaatatccctttggccggccaagttatgctccatccctggcttgccatacaagcttctcctggctggcctatgtactccccttggcgagctagacaacgttgtgcagcttcttgacagatttcttaactctttttgcttgttgcttgatggttatgccatgccttgtaaggagaatttgccccgctattgacaaggttgtattccacgtgtctttagttttggcgtacgtggacatgccacgttagg

SEQ ID NO: 254369 - DNA, 555 bp, Cannabis indica
gtaagttgttggtatataaattttattgtacaatatatttctgttttgttgtgtggtatattattattcttagatgatatttattttttattttgctatatataatagtggtatataattttgttagcataatacacacatttgaatgtaggtatttatttgcatgttacatatatttaattattattttttatatattttatggatgtcacaaattacattttccattatcatacagtcaattaccccatccagttcattaaaaatactaaacttctgcaatgcttgtcgattagagaagagtcacaaattaccttttccattatcatacagtcacgccagccatgatagccaaccccttgaattgattcacattgatttatagggaccatctcatatagcctctatagatggattcaagtaatacatactctttatggatgacttcaacaagttttcataaatataccctctaatacttaaatctcaagcttttgacatgttcatcaggttcaaaagtatggtgaaaaagcagtttggtctcccaattaaaag

SEQ ID NO: 254370 - DNA, 749 bp, Cannabis indica
ctctctctctctctctttcactcaaaccctcttgattttcaaagcttgaattgttgaagaaaagcttggttttggctgtgtgaggcttgagtttcgaggaaagaccatcactctggttttattgtgaattaaggtagctttctatgatttttaatcttgttttagttgctgaattgttatgtttgggaagcatgaacttgatgatgatgatgagctacatgttaggtaaattggtgttaattttggttgaatttgagttcgaatttgttgtatgcttgttgttgagcttaggctgtgatcatatggtgtttctaagttggaatttcaggtttaaatttagtgtttgttgctgaaaatgatttgatgagcttgactttgaagctcttaagtttaagcttaggttttgttaatcttaagcatgatctttagtgttttgagcaatctgaattctggattttgatatgtgttaattgagtgtctattatgtgcttataatcctatatgttaatttgtgaattggttgtgaaattggagtgaaaagattgagttttaggttgaaaattagagttgagcttgctggttttctgggttctgcacccagatgccgcgacatgctctgagcatgtcgcgacccgctcctctgaatggacctgggaatttgtcccaggtgccgcggcatggtttgggcatgccgcggcccaccctcgtgttttgggcagttttgagttgattttcaaaagttcgtaact

SEQ ID NO: 254371 - DNA, 524 bp, Cannabis indica
gtcctacttacaccttagaggtttttcttattctgattgggcatcttgccctactactagaagatccaccacgggattctgtgtctttttaggcgattgtctcatctcatggcgcaccaagaagcagcccactatctccaaaagttcagctgaagccgaataccgcgcccttgctgctactggcagtgaattaacatggcttcaataccttcttcaagattttcaaattccccaacctggtccagccttcatatattgtgacaatcgctccgccattcacatcgccaacaacccaacatttcatgaacgcaccaaacatatcgaacttgattgtcacttcattcgtgacaaaattaagaactccaccattcggctcattcctgtcaacagctcccttcaacttgctgacgcctttaccaaaccgctgccttctaccactctctcttctcacattgccaagatgtccgtccatgacatttaccgtccaccttgaggagggggtattagaatatctgtccagttca

SEQ ID NO: 254372 - DNA, 939 bp, Cannabis indica
cccaagcaacaacagtaagaaaaaaaacacaaaaactcaaagttccattgttgagtcaagtttgagttttcaaactcaaacttgctcaaccactccacaaaccaacaaacaagcacaaccgaacctaattcaacttaaatataaaccagatattgaactgaaaccaaacccaactcaaacagtacctcaagctagaaattgaataatattatccaagtaaaagcttaaaaacttaaagagtaataatttttagggcttccctccacaaaaaccacctataatcctttctatattctcaaaagaagaagttagcagttggttcctcctggttttgcttcagccgaaaaagggagagagaggttcaataggtttgttttgtcttttgtcttttctttctaagtatatcttaattattttccttaacctaagagataaattcgaagtttatctctacttaaaaattggtcagttgtatcaaacaaagggttaatccacttaataaccaagcataaatgactaacttaccattttggttaagcttaactaattaaatagcttaggggtaaaatgttccactacaataacctcgcctaattctgatatttcaattatcacttatgtttgccccacaaagaattaggttctaaacttactcatgttacttaatggccatccatcactttttccatcgttaccgagcacaaatcataaaaattataaattttacatatgacataaataaaacacttggagtttaataaaattttcgaaatcaagaaattataacactaatgcccatctttttaaaaatgggacccacaataaaagtttttgtatataactataaaataaaaataattaatcctaattggcctactaatccatatttttagtcatgcagtcattgttgggttttgtgccctaaataaaacccattac

SEQ ID NO: 254373 - DNA, 568 bp, Cannabis indica
tttttttacaaaaaaaatagtactttatataattataccatttctatttctctatttcctttttcttcattttatttatgccaaaatgcgacataattattggaaactaaacatattcaaattaagtattttcaatataaaaatataatacactaatttcatcaaaaactcatttttttttttaaaaaaaaaagaaaacatcaataacttcaggtttatttgtaccgtaagtccctaaattatataagtgttggcaagttggaccctaaactttattttttgacaaattaatctcaaactatataagttttaacaagttaatcctcaaattttattatttaacaaattggtccctacacttttattttcttaaatacataaagtcccaactcttaaatattggtaatttatttatttatttatttagctttgtatttgttatagtgagatttctctcacctagaaactcgagaccggactcctctttaaaaaggacacgtgtattcagattcccaatgaaagctgaaatgtccctgagagacattctcgaagtttagacctcgcccag

SEQ ID NO: 254374 - DNA, 904 bp, Cannabis indica
aagtcgcatttattaccgctaaccatttataggatgctatctgtgttgggcaccacgttgcttaatagcaacgttcaacccaaacaagcactaccatttatgcaagaagcgacatgaaataatcatcaaactttggcgtgaattaaagaagattgttcactcacaatgtcaaagagatccctccaacccatattgttgggaagatatctatcaaaagaatgctgcatcatcttgttggtgtaatgataatccgagttggtaattagcagaagttttttaccagcctgagaaatgagaatgacagtgtaaataagacttgatttcacattccaaaagaaaaattgttgcatacctccttttgatccaaaagagctagaggtagttccggatcaggctccacaaacaattcgggtttggacattatctcactctgtaatattaccataattagttgactctgatcaaatgaagacaataataaaagcataattgactaatatctcaattaccttaagctgaccctctacatgtgccctgaagagggctcttccaacagcctgaaaaccacattggaagttaaaaggagcatacataactaatactaatagtctaataaacaaaatctctaagtatagtgccttataaagccctttatagtcaagtggaccaagttctgcagttatggttccatcatccaatctgtcaaccatctgcaagaaatcatatgatataactttaagtcaattatatttttcattataaaagggagaacaataagacaagtatgaataatcttaaaccatcatccttatgaattggaaaagacatcaagtacaatgtagtgtcaaagtaacaaagtgtaaatgatacagaccctcaaatatcaataaactgaaatcttact

SEQ ID NO: 254375 - DNA, 1360 bp, Cannabis indica
tgtatttaaaatataaacttgtagataaatattatttatcaaatagtttaagtaatcctatgaatttggcacagtaatgagatttttgatatactttataacataatatccacattgtaattcataaggttgttgacgatatttgttaccaatgaattttgctcatcctattttcgtccatttctttccaaattgtatcctaagaaagctagtacttccataaaactttgatcactccacctatttttagctttcataatgtataaaatagcatgtaccgataatttagtaaacctattacaattacgataaatagactttttagcctttgctaaaatagtttgaagttttactaaatcaacattggattcatattgtgcatcgtcaattatttatgtaatgtgatattcttcataatctaaattaacatacttttccttcttagatggtccctcacctggaattttaattttttcccgtgatgatacaaaaatttataactcttgtctatataattcttaaaaaaaaaaaagttcatatatctagaaaattttcatacactcaatgttaccatattttttttgtaagagtaaccgttatagtttatagaaaaaataccaaaagtcaaagtgaagagatttcttccataaaaagaaaattactatctatttgaagggtgtgttaaaccgatttatgagccacaacattaatattgcaacatacataagatgtccccgaaaaactagacaataaaaattaaatatcataaactagtatcaaatcaagtaaatatagtaaactatttaagaaataaaattataataaaatttatctttttcaagttcttatctcttagaatgatgaagtgagtgaaatgaaaaatacttatatatagaaaatatatcaaattaataactcacttcttaatagtaatattaaattaaaagaagaaattttatttaaatgttaaaaaacaatccaaaatattattttatgaagaaaaatttatctttgatatttgtggagaggaactgatgtcagtgctatctcaactcattattaggaaagacccacaacaaatcaccatatatggcaaacttctatatatggtacaaagcaagtcacattaaccacataaaatatactaccatacatggtacaaagcaagttacaaaattacacacaaacaaactactaaattcaaattacaaacttatcaaaaaagaaaattcaaattacaaaataatctttaataagcatcataatataattaaattaaataattaattaaaacttgtttaataaccgtaaatttaaaatataaataacataacaacgaagtcagttatgtccttctcac

SEQ ID NO: 254376 - DNA, 640 bp, Cannabis indica
agaggaggaaggcaacaaaaggcaagagggggacaaaaaattcaccttcaccaaacctcttgaaacgaaggaattagtaggaggcacgtcgattaggcctccgatcgtaatccctgttaatcgccaaggtcaacatggggcatctgctgagatcaacgaacaccctatattagatgaggggtataggacgcctttcttcttcccaaagaaggctaggagtgacaatgtaagggttcccaaagcaatccctaactcgttctgaaaagaacatggtgactggttattcctacagggataccgaccaacaagggtcacttcacatgctaagcctacttcctacacgggacttgtaacttgatcaagagcttgtgccatgcgtacaattcctgttcaggaatcagtgaacccctttgtccaaaaagtttaagaagaggggtgttgcacatctaaacactctttagaagacactccctttatcgaacacaataagggggtgtctcttgatctcattactcagttcgaagcactaaccattggcaatgataaaaatataccagtgttagtagttaggacaatcagtgatgaagagaaaattcaagaactacaaaagattattggccgaaagggatgacgaagtagc

SEQ ID NO: 254377 - DNA, 609 bp, Cannabis indica
attgattcaacatattctaccagtgagtatctgttctgtgttgccaaaagaaagatattgatccaatttccttggggtctaatcatttgcaatcgttcatgaagcttagacattcttcacgtttcatgtttaggcacatgagataataataaataaccgcataattgctctttgccgttatctataaacggctatgttgactatgctttgttgttttcatcattcaattaatatttttcttaaacatctccatgaaataatatctaagtgtataatcatagtacatcttacactcttccttaaatattgagtgaagtatatgcgagacgcttacttcaacgagtcaagagcgagatgaataatgttgaagttgtctttattctagttacatactcacgggtatatgggtcaatgagctgcaaaactcattatctatccttccaaataatttcataatgtattctttttatcctgagatggacttgttcacctcgttggtctcatcagtcggtagcttttactcatgtctccctataatctatgtgatggcaagttcaagtatttctatcaactgtatttcccaagacaagtcatctgaatgcatttatt

SEQ ID NO: 254378 - DNA, 563 bp, Cannabis indica
cttctaaattctaaaaaaaataaaaaaaaattaataattttgaaatgagaacatttactaacatagtcttatgatttaaggtcatttgctatatttttttaaaatgaggacataaacttaacatagtcctataattttgggccatttactataatttctcaataaaaatctcaccaagtgtcaaacaagactcttttcttttgctcaaaaaaaaaaaacaagactcttttctttacgacattgattcggcccatacaagagaaaaacagcccaacaagaaatcaatttctctctccaatcaagagtacaaagaaagactccgccttcacaatagtggttcggtcaaagacaaaagtcaatcaatgactctcatcatcttcagattcggcccaacaagaaagaaaaatagcccaactaaatgcaaccctgagagtgaaaggcctccgctccgatctccgatgtccgatcaacgatcaggttattattagggaaatttacactaagtggtttttttttaccaatattaaacatttatacttgccctatctttttttttacttttt

SEQ ID NO: 254379 - DNA, 538 bp, Cannabis indica
tctcataccaacatattgtctatacgtcttgtgtttttggctcaatcgagttctacattgaatcactctaaaaaaaagctcatggtgtaacattttatgatgagctaaagtcaaaaaaagaaattcagagtttcaacatagtgaattttctcatgatttttcttctttaaaagattttcacttaaaaatatttaatacatgattaggtgtgcatttcaacgggattgtttctactacaaaatcgagctgtggtaattaccttgtcttaaatatactttgataaatgtttgaaattaattttgtctatatatttttaacattaattttaatgaatatttgaagggccaaagccaaagaggagtagcaaatggcgtatccatggctgccatgtctctattcaacgcgatcggtccagctggtggtggtgtcatgtaagtttcttcatttaaaaaaaaaaacctaactttagccccccgttattttttttgggtaggggggcggtcaactcttcgtaagagttgaacgattcaatctcggt

SEQ ID NO: 254380 - DNA, 667 bp, Cannabis indica
gcgtgtgattagagaaatatataataacctaatcaattgttattattaagctaattatttctcttaagattaaagaaatagttatatattatatataccaaacattggaagtcttctttttgaaatacaatcttaatcatgttttataatttggatttggaggtacagtagtaggtactattggctattagagtctgttttatcaatagcttgatgaaattaggtccagcatatataataatttagtataacatatcttaaggtgttaagcattaaaaaaaaaaaaatatatgattatcggaacatttcaaatttcaatatcatttctcataaattttgatatagtaaataatataaaaatcgttaactaattaagagataattaaccactttaaaagtaaaatgacaacccttatcttttgaccaaaatataaagattatttcataaatgcttaaaaataacaaaaaattaacatttagtggatttagtttttttttttttacagattattttagttttattttacaaaaatacgattcattatttttcgattgctctaaacaaatgtctaaatcttatttttacagtaacattatatatatatattatgtttcttcaatttgaaaataaccttgtttctaaaatatataatccataaaaatggtc

SEQ ID NO: 254381 - DNA, 568 bp, Cannabis indica
tcttatagatccaaagcctttgatttaaaaggtctgattattcactatgatcactttacctcctttagattctctgcaatcaaacatgtaagctttatcattagtcatatgaaaagtacattctgaatctaaaatcaatcatctttaaaagatgatgcaacaatataaactttaccactatctgtactatcataaccatctccatagttggcttggttatccttaaatgaattagatttggggttagaaatatctctctgtcctttgtatttcttaggtttgcctttgttcagaaaataacaatcctttttttaaatgtcctggtttgtcacagctgtagcagccagtaggatcaattgggcctttagagtttgatcttcccctattatgattgttttctttgtggtaatctctattgtggtttctgcctttaaagtgtccaggtttcctattattaggtctcccttactgaaattcacttcttcattagaacctccatgtttctcacttttgatctccaagtctttagacttcaaggctgaaatcactgttggatatttattttacc

SEQ ID NO: 254382 - DNA, 650 bp, Cannabis indica
acctaagaataagtagatttgcatagagggacggggccatacttcatttaaggagggagaaaatgacagtgtcatcaatgcctagagcttagtcaggactggtcctgagtttgttggacattaggaaaatagttttctggaccttaggtgcagcctagcctgtcttagttcagggctggcgcccctgagcttgggagaatagaaatcgctcatgtaagccgaaagagttaagtggttgacaaaaaggactgatgagatccaattttatcaatttcagccaaaaaggactaaatgggagttggttctgtctcttgttataagttattatgcatagaaatttcagtgttttcttatgactagttttaatagaacactaaaatacatgtcaatgataccagagatgatatgagaagaataagtagatacctttgcaaagtacttggcaggattttcagcgcttcgcagaatagccaaaaggccttgctcgaaatggcctgatgtttctttcttgattgcctgcaatgcaacaagtataaaatatttgcataagtggattggaaggatcacaaaatgttgaagatgggactaaataaaataatcatgctgtaaaactgtataatgtaatgtaatgtaccttttctaaagaagta

SEQ ID NO: 254383 - DNA, 543 bp, Cannabis indica
tgtatatctgctatgatcatctatgaaatgtatgtaataccttaggtttgtgtttgacatcactcgtgcaaggccccagacatcctagtgtatcaattcaagaggagttttagctctggtgtttaagagtttaaaagggagtgagtgagattttctaaagtgacaagcttcacagaaatgttgtttttcattcattgaaaagtttacatgtgcattgtgtagcacttgatttaacacttttggagatgagtggcctaacctcctatgccacaggtctcttttggacagacatgacttagagacactcttttcaaaaattgcaacagagggatgagagacaatatttacagactcaagaatagactgaaaattttgattaaaaacacttagtgcacttggactactactgaagtttatgtgtggactttgaaactgatacaagccatccttaagcctccgatgcagcaccacctgctttgtttccatgtccttcacaaacacaagtctgaataaaactcaatgtaaacttgtatcagatgtcaa

SEQ ID NO: 254384 - DNA, 546 bp, Cannabis indica
gttcctagtttgtcttatttgatctcaaaagtcaaaatcagaccataaaccaaataattttatgtataacctttgaaccaggcactgggctctaaaatatcactgtaactaattcttttttattctttcaaaaaaaaaaaaaaaaattgtcgctcaaactgctcactactcttcaatctgatcgaaaccaactttcatatccatgacagaaatcctcttcaatctagtccctctcatttctcctctccaagatttgtcaaagattcttatttaatatttttttgtcaagaaaatatatttaatattctgtcttttactgcatggtattattatactcttccactactaataatataatctgaaaaggcagaccatgcttcaaacattgaccacgcacagctaactatgcatgccaacctaacaacgtacagaaaatataataataaaattaaaaaggtgagaatttcaatgatatgtatgagttgtatcactatcagtagtgtttacttacttgtaaccaacatctgaaactctctcttcaatcac

SEQ ID NO: 254385 - DNA, 1327 bp, Cannabis indica
taacatcatattctcatgtctatcaatgcacacaactacttaaaaaatatgataaatatatttttaaaaaaatcggacagcatttttccaattttattaacctaactatctgtcaatttcgatcacaaacaatcagataatacacaagttttcatccttatatcaccgcagcacataaatttcatagatcttacttcactaaaataggcaagttatcaaccttcaattatcaccgcagcacacaaaatcacagaacctacttctctatggatgaatacataaaatattcaaactcttctattaaattatgagaaattcaacattttgaacatcaaattaaaaatataaatggattaatatctacaagttcttaaataaaagaatgttatattatagtaaaagtaccttaatctcatccacaagctcttgaggtgcaaccatggtgttcaaaaactcatcaacttgttttagaatttattcctatcatgtaaatccaagtttttaattttctatccatttattcacacacaaatatattatacatttgaattaataaaagagctaatttttcattgtacgtacctattatcgaagcaggtggtacaatgccaacaactagagatttctggattctctctcctcttagatctgaaaaacgcgacaacaacaacaacaatttgggagaacaatttagattatcaaaatgctatacatgcttccaataattaagtaaaattaaaccatattagattattaactttgacaacaatactagcttaaccaaattatattcgtactacatacaaatgataaattatagagaagagaaagacctgttttgctctagacatgccaattgataacagttcatgcataagttcttcccatataagttggccattgaaaaacagattgttcccagtctgcattacaaaaataaataaataaataaatatagcagtatcaatgattaaatatttatcttcataaaccaaaaacatacttccagctcagtatcaatgcacacaaatataaagctactgaaccaattatagttaagacttaagacacgaaataggggcttgcacaaggattttaaatatagtaccatggttctatgatgattaataacaaattaaaagaaaagatgattaataacaaattaaaagaaaagatgattaataacaagagaaagcaagaaatacatatgttatatttttttacagagatattgatatcgacataatgtttaattaattatgcagtagttttagagtacaaccattattatttttttacattataatatcgttattaattcaattaa

SEQ ID NO: 254386 - DNA, 1021 bp, Cannabis indica
cccattctaagtatcataagccttttggaggtccagcttaatcatacagctaggcttgtttgctttcctcccataatgtctaagaagatcctgacaaaccattatattgtgtccaatataccttcctctaacaaagccccttgattctgagcaattaaatcagggaggataagtttgagtctagtacaaaggagtttagtagccaccttgtagatcacattgcaacatgcaattggtctaaaatccttcactgtattagggcatttccctttcggcaccaaggttaagactgtagaatttatctctttcagaatctgaccagtttccaagaaggatagcacagcctcactgactacattccccacaatttcccagttatcctgaaagaagtaactagaaaatccatctgctccaggagccttaaccccagggatatcaaacactacctgtttcacttcctcataagtaaacttaccattcagaaactctgcttgctgttgtgtcacagtaggccccaacttcataatcttgctttgtacttttcttctattttccaatgtagaccccaacagatccatgtagtatgccaagaatgcatcagtaattttaccaggctcctctattctagtaccatcttgttgctctatagacagaattctattcttccttcttctccctttgatgttggcatgaaagatggctgaattatcatctccatgcttaatccaagtgattttggatttttgctgaagcatggattgataatcctcctgcctttgcataaactcctttctgacttcaagttctttgctttgtaaatctgcattaagaggatcatttctgagagaattctggcatatctccagagatttcctggcttggataatcttacagcatgtacatccgagtacccttcctggttgatgtctttgaagaccttctttagttctttgagcctacaaacaagttgatacatttttgtgccatggtagtctaaattccacacttctttcactcttct

SEQ ID NO: 254387 - DNA, 533 bp, Cannabis indica
gcataaaacccaacagataaaggatctccccgtcgcaacccacgttttggaacaaccgaccctttaacggctccatttacattaaatgggagagccgcagatgtaatacaagtcatcacaagattcacccaactgatgttgaaacccattttaaccataacctcatacagaaaatgccactcaactctatcaaacgctttgctcatgtctaactttaatgctgcataccccatcctgcctcgttttttattcttaaggcagtggactagttcaaaagcaaggagcacattgtcggtaattagacgattggggagaaaagcactttgattttgtgagatcacatggggtaaagcctccttaaatctagctgcaatggcctttgataccaacttgtataaaactgtacataaactaataggacgaaagtcactcactaacttgggttgatcaatcttaggaataagagtgataagggcagtgttgatagaacccatgtcttcaccgtcattcaaaattttgagcatactttgagt

SEQ ID NO: 254388 - DNA, 520 bp, Cannabis indica
gctaattgcctttactaatccacattactagagcggtcattacataccacatgtatgtttttagaacataattttgtaaaagtaggttaattaatcaattatgtgataatagtaaaaacttcacgaaaataaatgcataacagtgaacaagatgacatcgcgaaaatttattttggggaacccctcttacaaaagttttaaaaaagagctatatacaaaagtaaatcaattacacattaggtgcaactcaaaaaaactcctacaactcgactacagaagccgaataagtcgatatgtacatttgccagagaagattatcatctcatggctaccctaattttcccttcaccttacctacaccacaaaatacccgtaagtcacaaatactcaataagaaaagtaaataatgaaaaaaatacataacaatgagataactactagggattattttatcacgatctagatatactaccatctatgttgtttaatatcctaaatatgaatttctaaaacaatagaa

SEQ ID NO: 254389 - DNA, 1435 bp, Cannabis indica
gtaatgggttttatttagggcacaaaacccaacattcaggcctataatggttttaaaaaagaattatttaatctgaaagtagtgttattgtggagtattatttattttctaccttacagtaatttattaggcttaagaacaaaaggttacgaaggttgttcaatttgttgcactaacacatgggctcgtcgcttggcaaatggacacaagatatgttatatgggtcatagacggtactatcctacaaatcatcctgatagatagaagaagaaagcattcgatggtactaaagagggagaaatggcttctttggcactgtcaggggaacaaatttcctctaagaagtagaactagtagaatggtgatcgtaagagaagatgtgataagtaattaacaatttaaaaaacgtgcatcaaaatgtaattgtactcatataatttttataaagtaatgcagaaaaaggacctcgaggttcaaaattccccaagccaccatgtttggatcaaatctcggactaagagaatgaaacttgtcattgattacgacaaggaaattaccgaaaagatagtaagtatatattaatcgttgattaactaagaatagtgagttaatatatataaatcatatactaattgcttgaatatgtgtattaggctcaactagaggagcaagttagtcagggacaagttcaggtctatggccaaaatgacattttgacgtaggtgctcgggacaccagagtatcctagacgtgtcagagctgttgggtatgctagtacttgaaaaatgttgtttccttagttatacaaaatagattatagctaattttatctattgatttgcatgttccttgccaagacatctaaactgtttggcaggaagaaattgaagtttatgatgttgtggctcagaaatagaggacgattgaaaaattaaaagctgaaatcaaatcccttaaacagaagaaaaatattgctgaacaagagcagaataaggatgaggatgagaaagaatgagaggtggctcattaggcatatgttccacaacaatatactcatgaggatgagggtcgaccaaaaaattatgcttaggagtttgtttccctaaatgagccacctctcgtgtacaatttcgatgaacaaagggtagctaatcagttagtatatctccgctcagacaatatcagcaacatagtggcctgagcttatttgtacgaacatgagggtccaatcaaacttcacaacaaacactatgatgattcacatgcccgggttctgatttcaaaaatgctgcaagaggatgctgaaattgttaggttttgtgccctaaataaatcccattttaatatgatcacatttactaattaataaaagatcacaaaccgttttaagttgcatggttcacatgatttatttcatgattatgtttaatgtata

SEQ ID NO: 254390 - DNA, 542 bp, Cannabis indica
ctacgaacactcctaatgataatcggaatatgttcttagtttaaacatgtgacaactttgtatttataattcttttttcttagtgataaacgagacttatatttgtttattagggtaatttagaacaaattttaaaggggaaatttgaaaaaatatgcataaaatctcttaatttttttttttctaaatcaataatactccatatttcccatatatgaccatattaccatattccccatattgcccctctcatttgaaatcccaaacccaaactgcctcctctctcttcctctcgcccaaacccacagtgaacccatcccaaacccatcgatttaaacccacggtgacggcgcctctgctatcgacagtggacccaatctcaaaccgattgtgatggcgcccccttgctcgcgatttggacctatgattttcgtcgggcccgatgcagtccgatgcaggcccaatgctagtctgatgctcatgtgaatgggttggagaagatgaagacccgatgggatccgattagactatgtctatttgtg

SEQ ID NO: 254391 - DNA, 922 bp, Cannabis indica
tcagggaattaaacttttgaacatataatcatgattatattccactatgctgacgacactataatcatgaacaaatatatatgttctggacttaatagaatttatacattaaatataatcatgaaataaatcatgtaaaccatgcaacataaaatgtgatttctgatctttattaatacgtaaatctaattatattgaaattgattttatttaaggcacaaaacccaacggtttgaacatatttttcttggtttgttaaactatatatccataggttatcgacatattatctatggtttgtcgatatatttgaacaggattatttttaaatattgtttatcgataggatgtcgacatattatctatggtttgtcgacatatttgaggaggtttattcttaaactgtttatcgataggatatcaacaagatatcgataatatgtcgatattaaagcaaagacattaaactgggttaaatagttttcatatcaatattttgtcgataggatgtcgatatgatgtcgacaaataggatgatgaactcttttttaattctttccttggatgttgatgcaatatcgacatattatcgatatgttatcgatatcattgctggtttttttttctctgttgcagatggctccgaagcttatagttccattccctgagcattttgcaggtcgtgtgacctacagaggaagtggtgtttttagcaagttgatcaaaccaaatttgagaagcacagtttgactgatagggcaaaggcaagccctttcggtcaattttggcaggctggtactctatcattttcgtcagtactattccaccaactgatgctgcataaaatgattgtgaatgttgagaaggatgacaaaatgtggttttacattgcacgaaacgagatgaaatttggtgtggtcga

SEQ ID NO: 254392 - DNA, 690 bp, Cannabis indica
ccttaaatgaaaaacgccattaacgtccgaactaagctttaaaaagttccaaacttgatttctaacccaaaatcacctcattcaattagtaaacattgaaactagtcccatagctaccaaggaacaattttacaaagtcagaatctttataatcactctaaatcacaaagccactatataaaactaattatttcttacttaaaacgaaattaaagtataccttaagctttcgctcttcaaagatttgctatcgcgctactaccatagcttagatcgctaggtttcgggttaaaaatttaagaaaatgaatagaggagaatgagaaattcatttaattgagagaacagaatttcatttcatttcgtactgttattattttaaacttataaaatataaatatataaacttatcaaaattgataagttttaaaataataatataatattatcaataatataatattaataaaaactttattattaatagttatcttattatttttttagccctaagaaacttttacttctaaggtatttggtcaactcttagtaccccaaattatctcggtatttttaaaatcaacttatctcaataatctcatcaatatttctaactaataccattgtgatatttttaacctccaatcgagtctctaagatcgctaaatctaaaaatattttatttcacaaa

SEQ ID NO: 254393 - DNA, 703 bp, Cannabis indica
gtggactcgtttattgagtaagtattattaaatatatatctaataataatgaaatattgaaacatcaagtaattatgtttaatgcttattcattttgtagggagcatcacaatatcattacacaaggaaattctcgtcaaagagcaatgactgtagatcagattcatagccaattatttccttcctggtttgctggtaagtttattttaaattcataattttgcattaacttaatgagttcacaagcacattgaatgtagtcatttattatatttttatttattttttgtcaaattaggtagaagaattatatgataatggtgataatcgagtttctgaagatctgcgttatttggctaaaggaccgaacaatactttctttcgatataaaaaatatttaataaatggttttaagtttcatacaaagaaagtcgaaaagaagttaacaactcaaaatagtggggttattatgactgccaaaactcaaagtttttcaagtagtagagatgcaaaccctattttttaagatgttacattttatgagatattaacagatattatataactagattattgttcagaaaatcgtgttgtattatttaagtatgattggatttcaacaagtggcattaagaaagaagaagattgcacaagattaaacttatcaaaattgatgcgtgaagatgatctacagtcattgctc

SEQ ID NO: 254394 - DNA, 700 bp, Cannabis indica
gaccgtagcttttgaattgtgtgagcagatcatgtattttggtcaggtatgctatcatcttttatcttcgagcctcgtattctctggatacatgatttaccactagctgtgaatcactgcagacttcaatcagagattcatactcgacgtcgtgattagatgctttgaacccaaaatttactacagcatgtaggtgttgccccacaggcgtgacaagggcaatccctgcaccagatagctggtctgtagctgacccgtctacatgtagtttccaggtcggcttatcttcactattacttggctgaggtgtttgtatcggctcggggttgctttctggtatgctttcttccttgcttgtgcattctaccacaaagtctgctaaggattgacctttgattgttgtttgggtttggaaagtaatttcgtattagcccaactccaccgcccgcttgagtagccacccagaggcgtctggcttttgcaatatttggcgtaatggttggtcagtgtacacccgaacaggatgagcttgaaaataaggccttaactttcttgttgctagaataaggcaataagcgagtttctctatcaatgggtatcggccctcagcctcaatgagtcttttactgatgtaatagactgggtgctgtatgatttatcttctctgattagcacgacactcacagcatgctccgtgaca

SEQ ID NO: 254395 - DNA, 664 bp, Cannabis indica
tcaaccctttaataccctaaaccaacaattctctctcaaactcgatcgcaacaactacacactgtgtaacagactcgatggtttcatcaatggcagtcgcccctgtccaccggagttcataccagcaccaacctcaactgatgaaaaacctaaagtttgtcttaaccccgactatgagcactagattttcagtgaccagctgctcatgggctggatttatagctcaatgactgaatctttggctaccgaggtcatgggttgtgcctcatctgctactttgtggagtgccctagaaaatctctttggggctcactctcgagcaaaaatcgacgacaccagaacattgattcatacaacaagaaaaggaacaactcccatggtcgaatacctcagacagaagaaaatgtggttagacagccttgcccttgctagagatccctacccagaagcacatcttatttccaatgtgacctctggtttggatgctcaatatcttgctattgttgttcaaattgaggctagatctaacatttcatggcaggaaacacaagatatgctactgagctttgatagaaaactcgagagacttcatgctgtaggagggaacaacaaaggcaatggcacatctgggattggtactagaccttcagcaaatctagcagca

SEQ ID NO: 254396 - DNA, 560 bp, Cannabis indica
agtctaggagcccaaaaaaaaatttcccttcaaaaattatacctattttttttattttgaaaaatactacatttttttctaaataaaggcccaaaataaatttcttttctatggcctactaaatttcaaggccggccctgaacatcatccctgtaaatttttataattttcaaatagtttacaataccgaaaatacgtttgaaattttttaaacatgcgtggtaaactatagtgtcaagaactccgttttcggtactgtaaaatattcggaattttttaaaaaatttacagggaagatattgtaaatgtaacgaatactgctatgaaaaaaattaaaaaaaaatatttcgacatctgatttcggaagtggaggttgactaagagattgtaataggaggttataattagcatttttcatttataatcccttacatcattgctaatggtactttttatgttttttttagttaaaatgactagaaagttaaaataaaaagttatttttattgttattgctctaattatgctccttatttagtaagtatttaattattttaata

SEQ ID NO: 254397 - DNA, 630 bp, Cannabis indica
aatacagcaatttcaaaacaatttaattaatttatttaatcttttcttaatatatatctctaagaaacataagagcctacacatcattcataatttcatagtcttcgtgccatttcatcaggaaaatatgtaattattatttttactaaaaaaaattacgtaatttgtttttttagcgtgaatgtgtgatccgcctaatttataattagttatgattgttgaaaaattgagcaatcgtgatatcaattagttaaaaatttgtttaattgaataaaagatttagatatcaattcgttgcaaaatacaaagtctgaattatcatttaacaaaatatataagtcaatcttttattcacatcgaacatagaagccaaataagtatatttcctttattttgaaaataatttatcattaactatttataaaattttaacaagttatttgtagtgcgtcaaaagaaaccatcagagtcattggagatgatgacatcgcttttgttgggtcgatcaatgtcttggccataagacaggatttactcgtaggtctagctcaaaagcataacatgatgtgacaaatgtactttcttccactctacctaagattgaggcgatagaagagatgatgaagcaca

SEQ ID NO: 254398 - DNA, 589 bp, Cannabis indica
cccaaaaacactttcatctcgcgaaaaatcacgtatatctgctataacctctcgacagaaaccctcccaaacccaaaaaccctcgcccaacaaacccatgttagcctccatctcgcccataccagaatcgcccaaacccagctgatcaaacggttaaaggtaaactttttttctttattatttttccctattttgcattttttccaccatttttttttctgagttaagaaaatataaaacttgattgtttttttttgttaataatgtcttctagtttagggattatttattatgtattattttttacctgtctagttcttacagatttaatttttataatattgaatgagttattgatagaatttttttgaaatggtagaaatttttgctatgacaaaaacaaacatttagatatatatcgtttggaacttttgagtaatagtaattttaatagtcttgacaatggaatggtaattgaaacgccaaaactcgaaaaaccccaaaccccaaaccacaaaccccaaacccctattcccattcccgttcactggcccattcccattcccattctcattcccattccccggcc

SEQ ID NO: 254399 - DNA, 764 bp, Cannabis indica
ccacctttgtacataggtggaggccttttataatgaaccatattacaaatagccttatatacattctcacgagcatcaactaagcaggtatactcagaatatcttggttcttgagttcttcctttctttacaaattttcatcaacttgagctttaaaacttctttggttcctagaatgacttacctttgactttggaaattctatttgttggtttgtttattcaagagcaggactatatttgatttgtgcccctccatagcaagagaaactttcttgtacaattggctgcacaaaagtatttgctccataaacagtgggtgttatgaacatagatgccaaaggcaatatagttagagtagttatcgatgatgattgagttgtgaggtttttgttgaagctgctggaagtactccataagcctaagcaaacgcatcttcacggtttaagaatccttgagctctagataagaagtcagataaagagtcttcttttttcctttgaagttctccccataacaagtatctagtggttattcctcaagtcaatgctacaatcttcatagcatcagtaacctttgtctttgttgtcgtatcaatcatgtgttggatgtacttcttaaggctttctcctggttattatttaatgtttgtcagagaactaacttccaagtcaaatccttagttgctatgaattatttcttgaacattgtctataaatccttccaattacaaattcatctaggatataaccttttccaccgatc

SEQ ID NO: 254400 - DNA, 763 bp, Cannabis indica
cattcactttctctttctctcttcatcttcttcttctttcttctcttctactttatattattttataacagatccattattttttcataaatgtacataaattattttctttccagggttcaatattaaaaaaatacatatatttttattcttttaaattatttaattgtatacataaattaatattcacataaatataattaaaagcaattaataaataaaaatattatttgaaatattatttatcagatatattttttaaattaacatatgatctttctataaatacgttttttatgtcaatttttctataagaagtttaatacagtgattgaaaaaagtcactacttataatttttataataaatgtatgatggaaaagttgttaggaaatggcactataagtctttcaacttggtctctctccctaattaggcgtttcttgttcattcattcaaataattaaattttattaggtatgaattgttcttttctttgggtccaaataaatttgatatctatttaagatatttttatgtttttttccttagaattagaacagtcaaactatgagaacacaatatgattcgaaggggtgctgtgcttctatatacacattttttttcccacattcattattatttttttcttttttgacaaagtgattaaaatcactcatgaatttacgacgcccaagtctgacactggcgctggaacctcctcgaaccaggatagctcatcttctaactgcagaacatgattt

SEQ ID NO: 254401 - DNA, 897 bp, Cannabis indica
atattatcatagtttttaataattaattaatctattagtattaaactagtttataaaattacatacgtagcgtccatatatattaaggcgttacaacttgcatggctagccaaaccatatcctgcagtgcaaggccgactagacctcccatgcaagtgtgtgggcagccaagattgacctagcaagactctagtaatagcttgatatgtggatagtaagctacctacgaattgggcccttaatagcctagaaaactaatggaaaatttctactttctaggggcaatttagtcttttatatttaatcaattttgttatagtgagaatttctcacctagaaactcgagaccaggctcctataaaaatgacacgtggactcactctcctcgaggagggttgagatgtcagtgagagacctcttgagtacaagcctcgcctgaaccaaactcagcgggatgatgtgaccttgacaatgtctagtcgcattcgagtagtttgcatagagtaggactgaagatcaagttaagacttgcatataccaagatatatgcgagaattataaaggtcttcctaagaagaggaaaagatcgcttccgtactcagcgagctggttcggatgacccaacaacctcgataacccgataaggactcgcatgtcctaagttatcgatttattataggatgtccgtttaagtaactcgaacaggacgcagacatcccaaactcgactagtcttttacgcatctaaagcatgcgagcttatgtaagaatatgaactgaccactcgtactatagaagtcgcatatgttgctgtatttaatgaattgggccgaaactgttcttcatttattgtatttacattttttatttatttaaatgttatattcaatgtacaaac

SEQ ID NO: 254402 - DNA, 989 bp, Cannabis indica
tggaacccattttctcactccctaacctccaatctcaccatcaaacttgatcgtcacaacttcctttcatggaaatctcaagtcacaccaacggtaatcgggcatgatcttgatgcaattcttttcaccggcacacccccacctcaaaatcttgttactagagctgtcaatcccgaatacaccaactggaaaaagaaggatcaattgcttctttcatggcttcggtcctctatgtctgaagttattcttgcatctgttgcaaaccatacatcggctcactctctctggcgtgcgttagagcaaaagttttctagccaaaccaaagcccgattgctgcaactcaagggccaattctctcatgtacacaaaggaagtctctccatctacgaatatgtcgaaaaagttcaaacgattgctgatgctctcactgttgctggagctccggttcaagatcaagatcttgttcttcaagtgctaaatggattaggtccggactttgattctgtagtttccgaaataacagctcggagtgacgatctttccattgatgaagttcaagcgttaccactgtctcatgaaagccgattggagcatcatcatcaaatgcaggatctgtcaatgaaaatgcaagccaatcttgcttttggctcaagacgatcgggtggtgttcgacctttttcctctaccagaactggcaatcaagaaacctctcacagtcaaggacgtgggagaatagggtactctcgttttcccccaaacagagttgtttgtcaagtgcgtctcaaagttggacatacagcacctgtttgccattatcaggttgacaagaattggcaagttcctaaacccgctgctataaatccgagagcctatctcattgaacatgatcttgaatatgatcctatggtctattctactaccatggttcaagattttggagatgattgtcagtggtttgcggacaccggagccactcaccatgtcacctc

SEQ ID NO: 254403 - DNA, 628 bp, Cannabis indica
cctagactagctagtagggtgttacaatttgatatcaaagccgccaggttatctgtcgtagatcgtcacgacatgtacaatcatctggtctcacggttcagtatgccttaattgctttagtagtttgttttaatataatgttttaaggaatgcctgataggaagcatgttggtagcctaatagctgaataggtacatgttttaaaattccaaaataagcggtaattcgtaaattattcttgatcgcgatctaaccagatttgctcttggtttttaggtttaactaatagtatggatgccaagcgaaacaccaagagttagggtaattcgttgggtctagtggcttttagggagctcaaatttccccaaatgttcgtggtcaaagcagaggccctagaggttgggcacgtggtcggggagatgataacccgctgtaggtttcccaggaatcggaaaacaggtttgcagcagggcaagctagaatcaatgaacaagaggaagatatcagatgcttgaggcaaaagggtgcttctgcgatgcctactccagaaatgcaggtggcccctacccctactgtgcaggcaggaccagttgctgcagtgaaccgaatgaaaccactgtatgaaagg

SEQ ID NO: 254404 - DNA, 675 bp, Cannabis indica
atgagtgcatgagaacatcaactagtatattcaaattaatttgaaatgaatcctagaataataacatacacgtggatgacttggagcatttggctcttagaaaaaaaaaacataataataataacaacttctaaggagtaagtggagcaagagataggcattggtggttagagtttgaaccaataaccttattaaagacatttatggttagtgtatgttattaaattattaatcatgtgcatattgagtacatgatatatacacgtgtatatataattaattagtttcgaaatttaagaacagttgtagtcaaagttgtgctcgcgtcatagatattagaactagttattaagactcttcaatgaggctatatggcacaatatatagggaatttgttagggaaaaatgaaccttttgacatctggcgtctaagtaataggagtggagagtttgactatattttgaaaaattgagatagagtaagatcaggtggtttctacataggtagaggtataattcaaattttaaaatgataggagcttatgtagtcaaattagaaggaatcctcaactaaatatagcctagaatgatctagaaatatgttcatgctatttcatgggacgtacggttagataagacgttgctaaggatcagttcttagtctataaatactat

SEQ ID NO: 254405 - DNA, 563 bp, Cannabis indica
aattgattttttgagcaaattgctttttagaaaaaggaaaagaaatttgaagatgttgaaatgagatttgagttccaatattataactgatttatgttgaaatcgattctcatgatagaaaaagcagagagaacaaagtatccatttaaaacccaccatagtcccctattccaaagctattaaaatcgattctgaaatgggtaaaaattttgggaacgacgtatatgagtacgaggagagagagcatgaggaagaatccaagaagaatcgctagttcgaacaggtggaaaactttgattattaactaacacatgactttgaagtttgctctttactgtttatgtttcaaattcgaataaaagtggacttgattagatgcactaagcatatattcttatggtaaatgtcgttgttgtttgatttagtatgaaccctatacacctgagcctccttgtcatacccgaaattgtttatgtgccagaagctaacacgtgtcctacagaaagaatatgaatcaactcaaggaatataataatgacattatatcattaaatgcaattcaa

SEQ ID NO: 254406 - DNA, 2653 bp, Cannabis indica
ctgtaaagaagaatcaggtaaaacaacaaaaacgaggcctttgctttagacttgtgatatggtgtttttttctttaaaaatataattttgccactcaattacactcactcggcacagccatgacagtctttaatcaaggctgcatcgctcttcattttagctgttttataaacctggggtccttcaaaaaataaataaataaacctgggattggacatctaaccaaaataataatagtaatctggattctggggtgggaagtccttcgtaataatctttgatacatgagattttcttatgttgaggctgataaggtatcattgactgatttttccttagacatgattatatgatttatccaccacaaatatttgtaacttcttgtgatatctttgtgttaatcattatgcagccagtttcatcttcagtaccaagaaaaccattgcaacccactaacaagaagcgtcctgacgaggaagattctttctctgttgtttcatcgtatccataaaacaattttcaatctaatatcaacattctgctctttattcataattgtgtcttttccttagagtaaggttaatcccttgactatgagtagaacagaagcctctgcacggaaatccaggacaactgtggcatcagctccaatatttagatgttcaaagcgtgctgagaaaaggagggaggtaattttaatttatcatctaaagtttaatttctgaagctcaggatgaataattattgacctccctttgatatggtcttattagttttatactaaacttgaggagaagcagcaagcattagaggctgagaaaactcaaagtgaagcaaggaccaaggtctgatagtttcttagtgttttgtagccctagtgtatatattagtaacacatatatgattgtgtatgtacaatgtttaatcttttaatgcttctcctacatttcttgtgggttttcattgctctgcttttggggagttatatttatttaatatctcgattttggaattgtaggaagagaaggaggcagccattaaacaattaaggaagagtttaacatttaaggcaaacccaatgcctagtttctaccatgagggtcctccacccaggactgaacttaagaaggtcttgcaaatattttacttgttcttatgcttagcattgatagatttttttaattcagtagaacagcagatcgatacgctgactgaagtttaaatatctttaaaatattttatttgttcttctgctgttaatggctttgttagattttgaaattaatggaacagcagattagatttaggaaaaagaatgttcactagtaatattgatacactgactgaagtttaaatattttggtttcctccatgttagcttcccccaacccgtgcaaaatcaccaaagcttggccgaagaaagagctgcagtgctacagtgaacaaagtgaaaggaacctatggtccaggaaatcgccatagtactactgctagctccatgaacctgaaggacaagagctacatcgataatggcaacagtaacacagattgcaatttcagtgataattctcagcaactcgatgagataaacaaggtgattccaaacggacaggaaaatgttgacattgctgttcattcctgagtttcatggtgagttttttcctaaatttataaggtgagaaaggtctcatttctctcgtagtctgtcctcccgggtttaaaaatatatccacgtactttgtttatgcaatgcaactgctacttcttgcagtattgtgtgtaatttatgagtgtaaattttctgtaacttatatgctttatgtatacaaaagagtttcacttatttattttattagcagtcgagtcttcttttcaaagaaagaaaatgccacaagatatctgatgtttgcgtccctactgagtactttaattgttataatttgttggtccatcaaaaaaattgtaaggctaggggagaagcctagtttccgaagtaaatggtattggatagctttaggaattaggagtgtacttaacaaggtcattagctaacaaaactttgggcttcggtgaagatagttgtgatacactgatacgtgtgtgtgtgtgtgtagcaatgattgtagggatcaaaagtgaagggtaaagcactaagaaggggcccataattatactatactctttgttttgcttatctcttctgttaagcttcattatgaaaaagctcttaaaagcaaaaagaaaaagatgctcatggaatggatagtaaagcaaccattggcgatgtgtgttttatttttagtaattaaattgcaaaagaatacttttaggaaaaccgtgtcccatgtttggaagcaaaaaatgctggtcaaaaggatacttgctttttttacaaaaaatatcttaacccttaaaaactttcttttgaatatttgcggtttcaattagtggtagattggattattaatctatagttactagcattatggaaagagtagttacttaatattacgagtaaagatgcgagaatgaagagtatattaaaaagacaattatatattatttttaaaaggataaaaatgacatattatataatgtttttgtcttcttagatatcccaatttttttttggattaattacagcaggagacgt

SEQ ID NO: 254407 - DNA, 562 bp, Cannabis indica
cagataacccaaagcaggcatagtattatattcatttgttaactaaaggaaatttgctactaaaaaaacactaccaacaatttgaacaaacagtaaaaaaatttgaagagtaatgtatcagaagtgcaattcatacaatgaataattgttcatggcgtaaaaggcaattagacattggaaacaaacctggagacgttgaatggcttgctggaaagtaagaagagaggatttaggctgcggagcctcggcggttgtggcagaggaggtagtaattgcagatagtggagttgcagtggagcggcgtgaagcggtgaaggggttggggaagcgagtagagaaggacttaggagcgtagaggtggaaggaaatgcgagaggattggggtttgagaaaggaaatgagtaagggaaaggccagtatagccatggctgctaattcaaactctgaaaaccttagcctttcatctagaatgactatttatagggtttatgtttatgctttataacacttctttaattagttttttattttgtaatttaataatattgttttaattaatttt

SEQ ID NO: 254408 - DNA, 803 bp, Cannabis indica
gtcagttcaacgctgccaacccatgaatctcaatataagtagttggattctcacacgtgtaacagtctcccaagagtcatgatcaagaaagcacagggggatttggtatgacaagtgaccaatgaaggcacttttttgatcacttggggggcacataagttatgttatggtacacaagagccatatgttatatgagcattcaaaaaattttgcatgcctgtgttataagtacttccatgtaaagataacaataagaaatattgatgttactcccaatgactgagtttcttaagatatggaatactgtgcaagtgttaaaaagtcaagcagtaatggataatgtaaaaacaaagaagcaaacatcagaataaagtcttcattaagtttgaatcatttctaatttaatttaaacaagtctggtaaaattttacgaaggcctattcacattgaaaggccgcctaggataaccaactaacaccctaaagctaaaaagctaaaaagaataatcaaaaaactaagacaaggtcctatgaagccaagaagctctctatgtcaataacaactttagcttgttcttcattctcttttaatggcgcattaaggaagaatgtcaggatgctcgggttgtagccttcgaccctcacagcttcttccaccactggttcatcaccattcaagttaaagtcaattgtttgaagagcatcaacattgaaacgctaatcgcaacactcttcaaagaatgggatttctgtctctataaaggcttcccaattgaatgatcgtgctcttccattggatgacca

SEQ ID NO: 254409 - DNA, 915 bp, Cannabis indica
catgtgactctaatggccatttattgcatttttgatcgaaaccgagcaaaaatcataaaaattgtaagtttcacatatagtaataataataaacataaagtttgataaaatcttcagaattgaaaaattacaactctaatgtccattttctagaaatgggacctacaacaaaaatattcacatataactataaaatatagataattaatgctaattgccacactaatctatatttcaatcatgcggtcattacaactatagtgttgtagccgacgaatttttcacactcaactatgatttagcagacaacttaaaatttccagagaacaattgcaatttagctaaacataaagtaaataaaaaaactataaaaaggaaccataatctttctttagatgattaagataacaaaaatagtaactgtgtaagtgtctatacaaagtgataaacaagagaaacatcatcttctagtccaaataatcttcacaatcaaactgtattacaatcctaattacaacccaaaacaataaatatttcttaaaccttaaacttttaaaggagaaatgataatttacacaacaacatagagtacaatcattctaaactagcatcacatatatatatgatatatacaatttatgcatagaatcagaaagaagaaaatgtattttaccttctcattagtatcacaaaatttcaatctttcagtaaataatcacattcaatcattaaaccttatttaacagcacccaaccacacactttaatattaacaatgtgagactagattgaacctcaacaatgttgaaaacaggttcgtaaggcttgaaggaaaatctgacctctcaagtggtccaaccatcttgttaccaatagcagcagcctcaacttctttctcttctggcgtatactctct

SEQ ID NO: 254410 - DNA, 608 bp, Cannabis indica
gtttatgaattatctagattattttctaagtagactttttggtaattttctatatatttaatcaagtagaaaattaatatttaagttgattttgttctagacaattaaatatatttttcttaagatatttaattaaataggaaaattatatttacgttgaaaattaatttatttaattttagatcaacataaattagaataattcttccagtttgattttattttatttttggtgaatttcaaaaatatttttgtaatacattagatttcgatttttatcatatatatttatagaagattaaatttgagttgaaaattaatttaattaattttggaccaacttaaattaagtaattttcataatatttattagaaaattaatattatgggtggaaaataaattttatttttcaatcgtcctagggtataattttataaatattaaataaaatttatatttagagttatcttgtaaagaccgcttagtttaatttggaaattagcagttaatcatgtttaattatgagaattatttatagctatttaaataattatttatattgttattattgaattctgagatgcattttatgtcatttagtagtttt

SEQ ID NO: 254411 - DNA, 527 bp, Cannabis indica
gtttttttagttgttttataattatcatgttgtttttttgattgtttcttgttgttttatagtttatttgtagttgatttaaaattatcgtggagttaattttttgttgtttttcttatttttgtttaagcaaagtatatttttataattttaaaactttataagcgtctttttgtaaataaaaaatttaagccgtaaaattataaataaaatatataaaaaatagtatttttgaaaattttcaattcttttcaatgaaaaatatatataattagaaaaagcttttaaattttgaaaaaaaaaaacgtttaatcaaaagactagaggtcgtttgcatcattttggtgttgatcatctttcttttaattgcactttaagtagaatggttggttctgagttgaaatggttcattgggaaaaaaaaaaaaattggctcttaatataaaaataaataagtcttttaaaaattattaaaaaatatatatttttttaaaaggttttttttttatttgggtccctaaaataagt

SEQ ID NO: 254412 - DNA, 502 bp, Cannabis indica
agagagaaagagagaaagaggggaaagagagaggggtttgataggatttttatatatgtttgtatttatagtaaagatgagtatatacttagtttttttttttgtttgtgacttgataggatttgaatgttgaagcatatcacgaatgtaagttagtacatagtaattacattcataattgtatggttgttttgaacaaacaaaagtatatattcacggtttctttgtgccaaatacgataatttgaactaatatttgtgtatgcactgttaaagacatcaaaaaaaattataagtgaaactattgaaattttttaattgatcattatattagaatgaataacttaaagttctaaacttacctttttatcatctcaagaatgattgacgagactttagatttaagcgggtttaagtatacaattcttcccgatattattgctataatcaacatctaatgcttgatgaaaaagtaacactgatatttattataaaagtaaaat

SEQ ID NO: 254413 - DNA, 793 bp, Cannabis indica
tattctaaagattaatattattagggacgtaccaacttcctgagctgaaatgagtagcattgtttggtgcaagtagaagaaaatgcatatgatcactagaaaccaccaccagcttaagatgtggtaattgctttgatccttaatcatgattagtatcagatcttattaattagagacttgatatgttttaattttgttgcaatactaaagagctttccgaatggggttttcatttataattatacattggagatatgtgtctgtctttattattattttcggttaatgctatattttgtcacgagagaaaggacaataagcaagtatgaaatagtattcatacattattatacgtgtatatacacaaaaataatatgtaatacaaattaaggaatcccttgtagttaaataatttatcaaaaagataatggaggtatcagtgagatgtcttggactgcgttcgacagcttggaaggtctcgggttgttttcagcctaagatacagaggtgttgacacttaggaaggctgcggttcaatgtgctcatttggttttacaaagatccagtttgagttagattgacagagtttgataatttggaaaattaataatcatgacagcactttgggagacattgattattcttgtaataattttcatgatgttagatttctgtattgatcaaaaacagttaatttggtagcgtattctttagctaaatatgcattgttagctatttggtggcttgattatcatgattgtgtgaaaaaatttagggtgcattattctctaat

SEQ ID NO: 254414 - DNA, 795 bp, Cannabis indica
agggtggataaatactctgacaacgagttaaaggatcaccacaccctaagggtgaggggttagtctaggggtacatcccttaccccctacacccttatgggccaattatcacactctaactacacgtggcatggttgaagcaagtatgtcatcctagtatcaagactacacacaacatgaagagtgagagtaagtggttttggagtactaccccgaagtaaatgactcttaccccctaataaagctaaatgtttgggtcatatcccaggaggtatcctcaccgtaaccaccttattcaagattcaaatcttgatatttctgtaataatcgcgtctcctcaagcaagaagcaccggatcttccccgatataaggcgtcaccaatgacctgggaaggagatccaaaaatcaacacttaaagagcaaaaactctgccatttttattcattgcattcaaaagcttcttcttgattttggaactccgattaataaaatacaagggcagtagactattactaacatctagagccgaacctctttaatcactggtgttcattattagcatttattacaattttagttaatctctcatttgttatgacttcgcgttgattagctaaaaatctagttaatacttctcctattgaaagctttttaaaattaaaaaaataaatacacgagaatcattaagtacatgaatatcaaagcaaaatggaactaaaaccacttggaaagatgaagaagaaaaaaggtaataactaacgaaaactaaccaaagatgaaaaaggtaataactt

SEQ ID NO: 254415 - DNA, 932 bp, Cannabis indica
ttaatcaaacaactataggtgagcctgttacctgtctgaagagccatcttggggactctggaagagacaacatgagaatgaactgaatcaaggctggaagtcctgcaataccaagcatccaacgccaggttccaggaacctaaaatagaaaatgataagttaaaagtttaataagcctagttgaatattctctttgcaagtattcaatcactgaagacggttaaaagcttaaataaatggacatacctttgtaaaagctaggttgatcaagtaggacaggaattgtccacctgtaatcaacaatgcgtttgaactcacgagtgctcctctgattctagtaggtgaactttctgagatgtatagtggtgcagccatggaagccattccaactccaaggccaactagaattctacctacaataagcacccacggtgcaggagctactgccataacaattgcaccaccaaagaacactatatcagcaagcagaagtgcctttttacgaccaaaacaatcactgatccaaccaccgactgcagcaccaagtatagctcctgcaacagccatactcactatagtctcctgcaaataccaaatgaaaatataatcacaaattgagctaagcataattaggagagaagataatgcactactctactgagaaattaagctcacctgcaaccatgctttcttatctacttctacaaattcctctctaatataaaggagagccccagaaatcactcctgcaacatccccacaatacaaagaatcaattaaaacctcattttagaatatatttacttgaataagagtcttcattttcacaatgcaaaggttagcaacactcatatgtatacattgttactaaattatgtaataattattctatacaaaattgttgaacaagacatgcattgttattaattagg

SEQ ID NO: 254416 - DNA, 1241 bp, Cannabis indica
atttatgttatatataataaaaactaaaaggtaaaaaaaaaatccaaagtcgggtcggtcgggtcattcagtttaattgggcgggttggacctattttcaacccacccaattaacatattgggcggtttgtaattttttcaggttattttggtttgtaatttttatagatttttcagtttggtttgggtgggttgttcggtttgggcggttcacaaatttttttgtacaaccctagctcgatgtttacaattttctgtgtgacacatggaatcaaaaaagtttctctgtggtggcacacccttaaacaaatggtcaggtcgaggaagtcagcaatatgctcaaagacactactaaaaaatgacttgaaaaagctacaaggaactagctagaggaactaccagaagtattgttgtcataccgaacaatagagaaaacaacaatggggcaaatgccatttgctatggcctatggttatgaagccatggtgcccgtggattagaacctctatcccacacgcgattaacctacgatcaagaaaccaatcatgccctcttggcagaatcacttgacgagattaaagaaaaatgaaccttagaaaacctaaacctagtggctcatcagcaaaaggtggcccagtacttcaacaagcaagtgagggcgagaaaattctttgtggaagatatggtccttagaagagtattcttgaacacaaaagagagtgcaactagcatgcttagacctaacttggaagggccatacaaggtggttaaagtcacggactctggagcataaaagctgggacaatatgacaagaatatggagctcgttctagtaccaagatattagaatgggaaacatttgaggaaatactaccagtaagtgtacaaggtctaatgatcctctcaagtatacaatgctagaacatttactcttaagtagatcgccttctaggcggatccatctttaaagtagtacagttaaaaaaaatatatgcaattgttttatttttttaattagctacagatcagttagatcatataatagctttcataattcaataaatgtaagttactatggtaacaaaattattttgaccaataaatgaataaagatattaattatcattctaattttgtcaattattttttatagacagttataaatttaccattaaaatttatacaaagggtttgctctaacccaaaagccaaaaaaccaaacttgtgaaatgtaagtgacc

SEQ ID NO: 254417 - DNA, 608 bp, Cannabis indica
acatttcttgatgattaattatagttagattcatcactagtactagtagcaataaatcttggttctttattatgacaattggtttcctgtgctaaaaagcgaatgagaagttttttgaattcacatatgttgcccttgacgctcatgaagttagttacttactgatcagtggtcttgtaatatcaaatcctaaagacatatttaatagggattgacctttttgtattcaccatatattatgagatttgtattccgtgatatctgattgatcattttccactgactattttttatttttgcttctcattgcagtgttgggcacaagagagaggtcattcttgaaaaacaattggtaatactctctctaccatatatcatatatcatgtgtcattctctctcaatttttaaatttagaacttgatatctcctttttccacaccacaatatgaacttctgagttgtgtttctctgtttccgatcattcaggtcgatcgtgaacatgtttcttggaggacatcagtaaagtgcactgtagaaacgaaatcaaatcattcaagagttagctgtgaataccatataaacagtcctgtttttcatggatccatag

SEQ ID NO: 254418 - DNA, 521 bp, Cannabis indica
tataccatgtaatttcctccttaacagggcagccccgagattttatggcccattagggcccattaaaatttaattagggcccatagacttgttagttttttttattttgaacttataacttttaaagtcaaaattaagggcataattgattcaatcagaacagtattataatgtttggtaagcctagcaaactagagcttataaatttgagaaatgagcacggcaagtggtgggatgatgttattggtgcaattcaatattatgtcacacatatttgatttaataaataaatatagaatagcggtagttattcacaagtgacacatcgtattgggttagggatgtacacggggcgggaaattggcaaggagtgctcttctgtccctatcccaattattaaacaaaaattaattaataagtataactaaaattaattttaaaataaattatgaaaacaaaatatattaattaataaaatgaaatgaggttagcatgtggattatgaggagtaatttaaatct

SEQ ID NO: 254419 - DNA, 679 bp, Cannabis indica
aaataagggtaggtttttttttttttttttgctcttaatttaattttttttttctttttaaactaataatatatccccaaatatatataccctccaaataaatttcttttttttttacaatatttaacataaagagacaaaattccatgcatatgaaaagaccaatttgccctataccctagttacttaaattaatcaaagcttaaatttgtaatttgtaactaaccaccaaactgttaactcaaaattttaaactagtccggtatactttcaacttaatttattttatgttgtcatgacatttccgaccactccgtcgagtttccacaggttttgggcccgaaaccatttaatttcagaaacagtatttacgatactcacatagtctaataaaatctccgtaattaataaattacgctttatttaaccatttactaaattcacacaaatcaacctaagtaagatcataatcttacttcatttaccagattaagtacatatttaataaaatatgcccaattaaatatcgtattattttccaggatattacactcaaattgctaactttttggaatttgatgttgctaaaaaaatatcccttcaacatctcttgaaataggggagtcatctaagagaatatttattcctatgtcgttttcaagagatgataataatagca

SEQ ID NO: 254420 - DNA, 483 bp, Cannabis indica
cggctttgtcagcgagagaattattgcacggtgggacatcagcgtggtttctggccgtagtggtggacaccactcggccagacaccactcctcctttaaacttagcctcacgcttaagttgaatgagctccatctcctgctcagaatgttcttgagcatgctgcacgactcctgcatctcccttcaacttagcctcacgcttcagttgaatgagctccttctcttgctcagctcccgcagcccgataagcactggacttcctcttactcgccttcataggctgaggaataaagtctactggataaagctcatactccacactgttggcctctaaggtcaacacagtgatatttcgagctgcatccagcagttggacaatcctctgagctctatccctaagagccagtgtaaggggtggacggtaatatattgggatctgttgaaattgagtataggtggtcttcataccttccacaaaataat

SEQ ID NO: 254421 - DNA, 749 bp, Cannabis indica
tgaagatgagctcgaggagtgagtttgttcagctaaagatgaggccaaatggtaacccgattgaacagtgtagatgccattgttagtgtggtgccatactaagcagtcattactaggaaagtagctcaaaggaatggtgagaatgcgctctatatcagccggaatgaagtattgatttaatagagcaacatcccattgacgatcctcagtaatgagattagccaccactgcattatcaggacctttgtaaagaaaaggtagaaaaaaattgttccctgggatccatggatccattccacattgtatgtttcgtccttctccaactttccatcgcaagccttctaacaataactctctgccatagagtattccttgccaagataaagatggtgagtgaccatgagaagcttcttgaaaagagtttaaagggaaatatctgcttttgagcaatcgacatagcattgatgttgggtgagtaatgagccgccaggcctgtttagcaaggagggcttgattaaagtgttcaaaagatctaaaccccattcccccatctgctttggatttacaaatcaatttctaatttctccaatgaatctgtgagccattttcagttcgaccccaccaaaagttagacatcatggattctaacttgttacaaaccattgtaggtaggcgaaagcaactcatagcataagttggaatggattgaacaacaacctcgagaaggatttccttgcctcccgaggaaa

SEQ ID NO: 254422 - DNA, 518 bp, Cannabis indica
gaagcttcccagagattgaaactactcgaaataccgttaaactttagcctcctccaattgtcttctaacattcctgaactgtctttggttccatagtttaagaatttgacccgtctttttggcctttttatgaaagtcgatcatggggtggtggtgcaatctttgagcccaagcgtcctttacaatccaaaaacatcttgggtctctagcccacatgttttcgtatttgaatgtccgactcttgcaacaagctccccccgaagtgtcaagcacgagaggcctgtgatccgagccattggaggagaggtgcttgacaattgtgtttgggaataagatacgccagtcggagttaactagcccccggtctagccttgctctcttcgatgatccgccgttgttggggttatttctatccttagccccatgtgaagcaggggccttgaatcccagtcatagccccaccgctgaccattcgacggaagtcaaaggagtatttggaagagttgccctgtttagcg

SEQ ID NO: 254423 - DNA, 3720 bp, Cannabis indica
tcactcaattgatgagaatatagaaaaaaaaagtggttgagattagtcttggggaccaaacctttatgttcaagtctcataaactataattaggtttcctattaggtattacacattatgaagctcataccaaataagatgtttattggactaatttacttagaccacttatttagcccaatttagaatattaacttaaataaattgtcttaatttataaaccagcatattaaattattaaaaaaataatacaataatctcccacttgggctacaaattaataccaatggtaattacatttgataacctgatgtgtgcacaaacttcctaattattctcaaaacatctcctttagacaatctagtccatctcctatacaaatatgagaccatagcagcattcgttacatttatcttaactagacccatcaacgatcaccatgtcaaatatattcaatgacataaatcaaatatggatgtataactgaaaattatatgcaatgtgatcttaatcatgtctatttccaattgatcctttattccttagtgagatcaatccttagtctttcaaatttatgtcaaccataattggaagataacacatttagagcaataaagataataaaaccatcaactttattctgtagaagactgaatctacttaaagaaatgtaatagtgtcaatcaataaaataactaatattgaaaataaactcccactaaaacaaaacattatcaaataaaataatacctctgtaagcaatatgctcatgaaagaccttgagtgtcaaaagtttagttagtggatctactagcaataagtttgatcttatgtactcaatagacattatcttactctgaattatatctttaacaactataaactttaatgcctatgtgtttagactttgataagcttctattgttatctaaatatagaactgctaatagattgtcataatatacctttagcgatcttttaattctttacacaacctgcagtcaagtgataaaatgtcgcatccatattgtattattggttgtatcatagcaagctatgaattctgttgccatgatggatgagctatgaatgtctacttagtactttttcatgatataactcctccagacaacaagtagacataaccagaagtggatctcttagttttttggcaacccacaacattagtgtcagaatactaaatgatcttcaaattttctaacctccgataagtgagcatataatcatttattctttataattacttcacgacccatttggttgcctaagtatccatactagggtcactttggtatttgcccaatatagtcactacgtactccaaaactggatgtgtgcattagaggtgttcatcaaactgtaccactacgcttaaaaatgcagtttgaaatcttttgcggtgcggttgtagtttacatttttgccaaaccgcacggtgcggtgcagtttgtagtgtcaaatttaataattgcggtttaaacaacattgcactatatattacaaagttactaaattttttcaattaggatttttgttctttctttaatataagaacaaatatatgtaatgtacgtgtatattatattaatttttagagacaagtaaatataatgatttgataattaatatatatgttatgatgttaagactttaataatttttttttttttttttgtaaaaagaaaaactttattcaaaaaaccaatgaaagcaacctacaagaatccaatacaaacaaccgcttctcaacccaacatgggcttaaaaactctactacctggatatacattacaaatttgagtctcaagactgttcttactaacagccatacaacccatgattatatactttacaccatttttaatatttttttactaatataacacgctgttttacaattacaatcaaagacacagtaatttatattcatccagatgctataaatagttgtcgagactactgcattcatgactttatcttgtatcgatctgagggggttcgaaaacaagtcaatccaatctttgtaactcttcggctactcaaaacctcctagccatttgctgatttcaacaaagacttgctttgtaaaaggacaatccacaaaaagatagccatgcgattcttgatcgctgtcacaaactgggcagttgacagaagagagaggaaacaccttattgagatggtctctggttagcaattggctgttaattgcttaccaacaaatgaatctatgcttcgggatgaccattttatgccacactctagcatcatactccactttctgtgcagtaacaagatgagaatagaagcttttagccttgaacttatcctttttagttgcagtgtgtaacccttctttgtcaatggtgcttctaagtctgaaagctttttgaagtaccaactagcattgttcttaaaagcaacaagccaaaaatcctgcctcttcaagtaagtagcattaacccatcttacccacagagtgtcttgtttttttgatatggcccaaatgaatttggccattagagtaatgttccatatcttaccatcatgaaagcataaaccacctagattcttaggaagacacactttctttcaagaagagaggtgaaatttgctttgattacctacctacaacatttatcaatagctacagttatttttttaggaagaataaacatattcattgcgaagtttcttatccctaacagtatagagtggattaattgcgctcttccaacaaaagataagttcctactagtctagttatggaggttcttgtggattttatcaagaataatgccacaatctggggcttgccatttggttgatcttagatggactcccaaatagttgagagaaaaagagccctccttcatttgtatcagccccaaaatgaattctttataagagttattcacaccacaaagtaggctaaagatttatatttattagccttgagccccgtagagtcactaaaaattaatgaaaataaattaaaataagtatcaaaattaacaaaaataataaaaatattttaagtgacttttaaaattatcttaagtttatttttttttaaatattagagtgtattaattattttgtaaagtgtaaatacaatttccctaactaaagaaaaaaaaactcttatcaattaaactgctaatggtaattcaatctaacttttccatggatgtatatatttatgtaatgaggaaattacatttattatgagattttaaaagttcttatgataaatatggcacatttaagtttgactaatttatatggtattctttttttgtttttaggtctttttatggtatttaatatatcatatatatgtaaattaggtttttaaatctcatatttaatgttttcatttgtttaggtagttttatttgtcactgataccggaaaagtcgctagagtttgttgtcagtgctgaaaaaatcactagagtagcggtcagtgctgaaaaagtcgtcggagttgctaccgacgccggaaaattcatcggaattggcattgtcgcaggaaaaatcactgaaaaaatcaccaagaaactaagaagaaaccactttcttggtgatttttccgatgacaatgccaaatctgacgacttttctggcactggcagctactccaacgattttttcggcaaccgacagcaaactttgaaaaagtcgtcggaattggcat

SEQ ID NO: 254424 - DNA, 710 bp, Cannabis indica
cgacatccggagccgaacctcttcaaattccgatgtcttttctttacatttattgcaactttcagtgttattaactgtatttattattagaattttggtttaaatctcatttattacgattctacgtcggttgactaaaaattcagttaacagatatataacaaaaccatgcataatcataattaattaatcaattgaggtaaaatagaattccatgtagattgatacaatttgaaagcaaatgtaaaattggatgaatacccatcaacaacaagataaaagaaaatgtgaacgagtaattaacagaccattaaagctgaaaacaacgtaaggaatattgtcagtcagttaaaggaataaagccaataaagaatcatatatattttgataagaaaggatattatatacatagctttatttaagtgaattgtctaatgtttcttgtttattttgttaaacggtcagtaaattgggttgctcatagctttgctagagccggtattttataacctgatcgtcgtttcaggttggagtctgttccaactgatttgttacctcttttggtaacgaagttaatggttaataaagatgaatttttcattcaaaaaatatacatagctcactatacatatagtcactattataattatatatagctttcatttcacatacaataatactataaattataagaatattttattttagga

SEQ ID NO: 254425 - DNA, 1067 bp, Cannabis indica
tctcaccaaaactcaccaattttaaaatagtttttcagagaaagaggtaaagagagggggaatcgggttagaggtgcaaaaaccagaaaatgaatcctttcatttgcaaataatcccatttactaccattaacataaataagccaatttaccataatgcccttagggccataacagacataagcaccaatacaagtgcaaaatggtcacttacaacataaatcttctaaaataaaaattcagattatccacatataattataatgccaataaataatcccagaattgtattttagccccgaactgagttcggcctgaaatacctgattgtgactatatcgcgccaacctgtcagaacacacctgaaaaagacaacacaggcatactatataataatatagttcaataagcacataaatatataaatttaattattttacccttcttgggtcaaaattactaaaatgcccctgactcaccaacgggttcttaatatgtcatatttcatattaattctcatataatagattatataataatataatcgcacaataatacacatttaactagttagggtttgctaatccattccataattctagggtattacaattgccccctccttatagaatttttgtcccgaaatttacctgaacaaccccggatatttctgctgcatatctgtctcgaattcccaggttaccttttccactttactgttccaccataatacttttaccagtgctttttgtcttgtttctcaagactttctcccttctatcaagtatttgcaccagttgttctattgagattttatgccctaaataaaacccatttcaatcttatctgatttgttatcaataaaagtttagaagtcatttatgtttacatgtagttttcatgtttatggtttaatatataaaaatctgttaagtccagaatatatagtcattcacaattacagtgatgtcaacacagtggaatgtgattgtcattatatgctttgaaagacattgtccctcattcatcagtgcattggatttacactgatgtgataataagcgatga

SEQ ID NO: 254426 - DNA, 505 bp, Cannabis indica
atgtcgaactggctcaactctacctactattttaacaatctacctgatgcctctggtttcgccaaaacttgcctcaaagggtagtttgttaaaatttcaatgctatgagcctggaaataaggtcacaattttcttgacgctactaccacaacaaatgctagtttttccatctgcgggtagcaagtctcagcgtctaataggcgcttactaacgtaatacaccagatactgtcttccctagtcttcacagattagtactgaactaatcgaatattcggacactgcaaggtagatggataagatttctctgggcatttgttttgaaaggattgggggttggcccaaatgtgatttaagtgcttgaaaagcctcttcgcacttctcagtccactaaaacttcttaataccttttaaaatttgaaaaaattctttgcacttatcaaatgaacgtgatataaagcgatttaaagcagcgaatttacttgtaaggctttggacttctttcg

SEQ ID NO: 254427 - DNA, 659 bp, Cannabis indica
taacccatcttctactcttcctaccagtcagccaacactcatcaacacccaccctttgcccactgctgctactacagcagtaacatcttctgctgctgtcactacaacagcaacatctactgctgccacaacagtcgtaacacctacttccccatcacccaatgtgccatctacatcaccaccctctcaacccatccctccatctgataacactcttccacaactatctatccgtaccactcccccaccaaccaacacaagtaaacaccccatgaaaacccggtccaagtcaggcatcaccaagccaaaagttctcatggcatccttgtaccccacttcgattaaggctgctcttcttgacagtaaatggtttgctgttatggggactgaaataaaagccttggtaagaaataatacttggactcttgtgatacttcctgatggtgttactcatattgggtataagtgggtttatcggatcaaggaaaatgctgatggctctgtttctaagctaaaggctcggctggtagccaagggatatcaccaacaaactggttttgactttaatgaaacgttcagccctgtgatcaagcctattactattagagcggtgctcactattgctgtcacaaacagttggccaattcggcaacttgatg

SEQ ID NO: 254428 - DNA, 596 bp, Cannabis indica
caaggaagaatttacatagctcgtaatgtcatctttaatgaaggatttttcccaggccataattctgatctgcaacaacaaaaccagcaggtacatcaatcttcatctacttctgattttccatctgctacattttttacacataatacttaccaagattctaataccactgccccttctggaaatatttcgagggaaacaactcatgaaacaccaactgctactcctggtggtgtgactgccagtcaaaatgacaacaatcatgcaacaaatgctactgctggtatacacaatccatctgccactccttctgttcacagtacacctctcattactcaacaaattccacctactactaaccaaaatcccacgaccgatgtccaccaacatacaaatccccataccaccaacaatgatataccacatacttctgctcaatcccaatctctacctcacttgcatccaccaaatcccacccgatcccatgccatgacaacccgttctcaaaatggcataagaaaaccaaaagtgtactgtgctactaaacatcctctaccagaagcattaatacccactgaaccaaagtctgttaaggc

SEQ ID NO: 254429 - DNA, 660 bp, Cannabis indica
acccgactctttgtttcgcacgactctgccctatggaatactaattggttggcctaaccctggggcttgagcatccatttctttttgttggggttggtcgattgttctttagttgttttgtggaacattgtgtgtggattttctcgaagggtcacccattacaccctttcctttgttattttctagagcagacaatccaactctaggatggttaaacttcttagcatgagggttttcttttggaggatgtaacgtagaatgatatcgagagtcttccgaatgtctctttagttgcttgttcctgattatcccatgagggtatttaaatttgtcctggtggaccttttagcttttgggcaagataatatttccagaaccaaagtggtctagcattgttgcttctataagtttgacttttgttcggatccagagtcgtagcctgactctggttgtgggatgatctattgatttgattgggcccagaagtgggcctgtcttggctaatattaggccttggaagcatacatgtcatcaatctagaaagtgaaaattacatgaaatatgggatttcataacaaagttagaaaaatatggcatttttaagtttgccactcttctatggcattttttcacatttaagattttttatggtatttgata

SEQ ID NO: 254430 - DNA, 825 bp, Cannabis indica
aatttgacacatgctaaaagttgtgtcaaatttagcaaaagatataatattgtattaaatttggcttacaataaatgttactttttatttactatagtgtcactaattattattattatttattgacttttacaaaacttaaattttttatttaatatttaccatattaccattatttataaacaatataatgcatttcaaaaggtaaagggaattagaattagatgtaattgaaggtaattacacacttttatatatctgtttgaatacgtaattatattgtaactgcacaattaaaagtaatatttgagaggtctcaattacactctctaattcttatgctcctgggtgtaattactaaaaactttttattataaatattaagtactaaaaattattattttctcgtgtaaaaattaataattttgccaaacaagacattaagattttataagtaattatcacctcctatctaaacacgtcttatattttaaaatatagtgtaattactatgatgtgtaacagtaacttccaaactcactaaaattaattatttttgtgtatttaatattttatcaatataataatatttttttattttattttatatattatgtattaaaaatttgaaatataattataaatagtgagctaaatacagtataaatttaatttttatatcaaatttaacataaattttacatcttaaactgaaaatagaataacaaattagcgtatatatttttaccttaattcatctttatgcataaattaagtgctctaaaaattaataatttaccttttttttttgtgtgtgttaagaca

SEQ ID NO: 254431 - DNA, 506 bp, Cannabis indica
tacaataaaatttgtgactaaaagaataaaaattgtgactaaatgatccgtggcaaaaagtattagtcacaaaaattacaatttattgtgactaaatgtgtttttagttacaatacttgttgtgactaaaattaaattagtaacaatttatatctaaagactatcttttagtcacaaagtaatattttattgtaactatttaatcacaaaaaaaattatattatgactaaaaaattgtcactaaaaataaccattttttgtagtgttgtgctgtggtctaacagaattctgtatataaggacatttgctcacatatttatcaatgagaattcatcttaattcaattactttctccaactcgtttccgttaaatcattgtgaaattttactcaatattatttgtttcactgttatgttttggagaagagacacctcccgttaagatctatagagtgataggattgtttgaacgtacgacacatgcatcatccacattcatgacttta

SEQ ID NO: 254432 - DNA, 1186 bp, Cannabis indica
catattgcacttccactgaaatcaatgagaaatttattaactactatttatatttctttgtccattaaattcctacaattttttctttttttcaattatttattttctaataaatacttttcaacttttaatcatgtaaagtagtatgtatataaatagagaacaacacaaatcaatctcatattaaaagtaaatattattgatcactattttttattttttatatatataaacaattctctcttatatattttttaaatagattttcattttatttgaaggtctgctataaaaatacacatagagattcatttaattgtggtgctcctttaataatgaaataatatatatatataaaattagtgatttttttgttatatttatgtacttttaatattcaaaatatttttagtattaagttgtaattctattatttttatgtgtaataaaaaaagttatattttgctgtcctaacaaaaaaatatatttttagtgtgaataaaaattttaaaattattatacatgccgcacgaagtgcggctttgttcactgttaaccatataatattgaagaaaaactatagttacacttaaccattaatagtagtgattttttaaaaataattataattaattaatttaattttaataaaatctaattagacaacattctaaatgctttttaaactaaaaatccaactatatatatttactattcaaaaatatttggtgaacaaatcaaaatactaaaaaaaaatcaaccacaataattatagttttaaaaaagttctaaacaggaaatcaaaggtaacaaataaatataataacttaaagatatatatgtatgggtgtagtatattaatactgcattagcaccatacttgcatatgtgcagtgcggttattcttcgttctaattatttttttctatttgaatgattactcctctcactattcggattaaataccatgggtactaggggtgagcaaaaaatcctagaaaccgatcaaaccgagtacaccgaccgtccgaataccgaaaaactaaaaccgaaaactgccttcagttaaaactgccttaacacggtcgattttagtgtcaatgacaaactgactgattaaactgagaaaggaccgaacatatatattatacactatacatatgtaatataatcatttttgaacata

SEQ ID NO: 254433 - DNA, 851 bp, Cannabis indica
atcaacctgttggttgcagagctgcacccaaacacatgaattagaccataatgcttagctctcactctcaaacaccgcattgcaatattaacaccaaactatgcattgcaatatcagctataatatgatttcgtgggatttaactaccattgagtatgatggattataaaatggttaatactaagtaatagaatacaatttaagcaattggagactagaaaaccatagtaattgctatgtaagtgcccatgaaggactcaagctttttagatcttgctaaaacaaaccatatgcatatacataaccatttaaactaaacaagataataggaaataaaccaaactaagtaccaaaatatattaaaaattaattatgagtggctaatactgatgaacaatgcaatacaattttaagcactacaaaaaaagataataaaaactaaactcaaaaccgaaatagtttatattaatttacataccatttcctgggaatgtagagctctgtgataacaccttcgtcgttctgcatattggcgagtgaacttaacttctctgtaaaatctgtacaaaaaaataggttgaaagaaattcaaaaagcaaccctttgattgttaacatcaaaaaatctataaatttttttctgattttatttaggataagaactaattatatgaacatttacgcatgataaatacatcttttttttttctaaaaaattataataataataacaaatcagataatttccattagaacatacaaaccacacaacagtatcgaaattaataactgagaaaaaggaaaaatcaaatacctagatttgaaggcttaagatgcagattgcagagaagc

SEQ ID NO: 254434 - DNA, 439 bp, Cannabis indica
aatcaacagacaagtgtgtcccattttttaacatccagcgaggaaacgagcaattcgagtggacgaaggagtgtgaaaaagccttccaaggctaaaagcacaactcgcaaaacctcccgtactctcaaaacctctggacggagaagaacttggaatatacttagctatcacggagcatgctgtgagtaacgtgctgatcagagaagaaaacaacatacaacgatcggtacccattgatagaaaaactcgcttactaccttattctagcaacaagaaagttaaggccctattttcaagctcatcctgtttgggtgtacactgaccagccattacgccaaatattgcaaaagccggacgcctctggatggttactcaagtgggtggtggagttgggtcaataagaaatttctttccaaccccaaacagcaatcaaaggcca

SEQ ID NO: 254435 - DNA, 632 bp, Cannabis indica
tcttgaaaaattaaaagatgcacctttttcggagaagatttgttttggtattaattgcagatatcttcttattattatttcggattattaaaaaaattcacattattaacttcaactccctaagatgatattctacaattaaaaaaatattaaaattactaaaattaattacttaattaaaaatatatataaaataattaagttattaaataaagaaatctacaagtccacattaatttatcaagacatagattgataagtacaatcatgttttaaagattttctttattttagtcattatgaaataaagaaaaacttaactcatgaccaatcttaataaacacaacttcaataactgaattctttaacaaatcacagatataagatacttgttttgattttcaaaatggttattcttaaaaaaaataatgaacaatgttgttataaatcacagaataaaagtaattattctgcaatataaaaattattacaaaataaaaaaattgtaaccatcatctaaacgagatttaaagattgaagaaagtattactttcaataatataataaaatacatctgtagttgtatttttttaacaacattaggagtattttaatgtctctctaaattacta

SEQ ID NO: 254436 - DNA, 529 bp, Cannabis indica
ttttaacaagtttttccttactcttacattgttagtgttctctaaaaatctcacccaacacatctcgaaaaataatgaaatatcacagggacgaagccaagagcgttgtgcatcacttttttattggaaatattgagagaaaaagtagttttcaagcacaaagaaacatttcaatccaaatagtgaaaatctcatatttttgatagtgatacccctttgtgaatgtggctcggacctatctcgaaatatttttcccctctcgtaacaataatttaatactactaagaagaagattgtttttgtgttaaattttgttaaaatgacccctaactataaaattaaaaatggtctactttttagggtaaattttgacaaattttaccttattcttacactcattagtgttttcttaaaatctcttcctacacatctctaaaaattttcaaatttcacagggatgaaaccaagagcattgtgaatcacttttttattggaaacattgagagaaaaagtagttttcaaacactaa

SEQ ID NO: 254437 - DNA, 527 bp, Cannabis indica
tcaatgttgttcatgcatgaaaaaacaattgatgattcctcttctctgccattaatcttcttttctatgcataccaagcttttacaagactcctcttctttcctctttgctttcactaaaggacaagctggattcctccatgttgctccatggagagcatgacttgtcatgatctaaggtgacaactttgttgttgtccaactccatcaccatatgatcatcttcacttaattgacattttcatcataatccaattcatgccctctagttttgttgctaatgtccatctcttaatgactaatgaaatcttcatcgctttgatgatcagacgaacaagctgacatgggagaatatcctcctgaagttttagtctcttcgcgctttcttaggtggcgtttggttggaggaataaaaacataggaatgggaataagaatgggaatgagattaggaatggaatggaataaaatttaaaatgcataaaaaaaattattaattttttttcttataatgttagataaattaaca

SEQ ID NO: 254438 - DNA, 895 bp, Cannabis indica
atctttttatgttgtattcttgtgacgacacaccttaaaaatgtaaaaggaacattactttggagggttttcccaccaaaatatgaggttggatggttttttgcaagtaaattgatacttgagggggttttgccgcaaattactcttttatttacagaaaatacatctttttatgttgtattcttgttaatttgttattgattttttgttacttgtgtgttatttttttgttgttgttttgatattatttagatattattttcttattatttttatgtaattatttctgtaaaaaaaccttaaaattgttaaaaaaaatatttaaacgtaagaatataattttttgacaaaaaataatgtcttatataattatccctattaattaattatttttataagttttgaataggcaccgacttttgcaaataataataataatacattatggtccaatccaaatgccggcaaattgcaattactataattttgtcatttttttttttggagagtttttcaacatcaattaatattaatatatattaaatatataaatcaagctttacttctaaatatatataaataattaatcaagtatttcttttttatttttttcatagaataaaggatactaattcttgctgaatttcttccacataatatgggattaagaaaaatttagaataaacaattccatgtatatgatttgtttgctgattgaatatattccttttttttttgacaatgcatgaggataaattaggaggatttttccttaccataaaaaaaggaggatttttaaaaatattttttttatgttttgtttttaattttactaatttaaaatttttatttactaaaaatatacttgtaccattttaaaattataaaaatatac

SEQ ID NO: 254439 - DNA, 939 bp, Cannabis indica
ctgttattctttatgcttgacaggagaaatttctgaacagacttcgagtaatacatttgcacgtacaaagtctgcttgaccgagcaaagcaagggcagatgatctagacaacaaatgaagtcatttctttaagtcgtacatagagacttaactgctacaggattgatattgtgaagctcaagcacaaaagctattcctacaatcatgggatcgaatcaaagggatatggcaagctgtctcaatcccccatttcatgtattctaattatgtaatatatgttcttaccaattatagatattgtaagaaaaagggaaaccatccctcatgcatttataaatagtgatctatcctcactgtaaaagggatcgaaagaattgctttagagagatatctaagagaaaatactcagagatttcattgtgagagctttgagagaggaaacactgtattctttgttctcaagtcaatacaatctaaggggagtaggctattactgaactaaagccaaacctctttaaaatcttgtattctttattgcttacctatttttgctctgtcttaattacatttctaatcgcttattaattgactcactttcgttggctaaaagcgaggtcaacaatagtaaatctagatcctgatgaaataatccccaacaactggcctcaaagccatggcaatgatttacttttatgaaatatggatttaaaacaatgattgtgttgatttggatgtgtttatgttggtttatgtgcatatttgatgattgtatggaaattgcaattttatgatgataaatatttttagtttcgttctgaaagtatttttttctgtaaagtagatgaaaaattaataaatttaggctttacataactcaatttagattttttatgaattagttatgattttttttttgaatttggatgaaaatatctaatt

SEQ ID NO: 254440 - DNA, 1049 bp, Cannabis indica
aattaaattttattttttttaaaaaagaaatagtttaaatataccaataaggaaatgacacgtagataatgacttgacatttaacggtcaaatacttatatggatgttcgatctagaaatacaacttaagtattattaccaccaaacttaagtatttatttacaagtaggagttaaacttaagtatttataccataaattagtcaattttaatgcactaaaatgtttgggaggcacaatttagtaggagaataaatccttattattattattattaaataaaggcttaaattatgcatcatccttgaaaaaaaattcaattacattctttttactctttttcacactatctttcttcaatacatgacatatgaatataatattatttctgcaaaagaaaaaaatatataattattttatagatatatataattccacaatacactgacccataaattaagaatttatgatcgcacagaagtaagttgtcgcccttagtttttttttaattaaaatgtaactttagcacaacataacctattttagattttaggcacgtaaagttgtgcctagtttttttcctaaaaatgtaccattggggttgagtgggaatttttccacaataaaaagggccccattactctgctactttgtgccatttgaggcattaggcacgcaaagggatggggccgagtaaaattcgtgcccaaggtgatttgaaggttctttttttcagcagctattttcactactacaaaatagttttttttttttaaagtctaaagactattaccctaccatactagagacattctactcttataattggtatttaattaaagactctattttctttcttgccctacacacattggctcctctcttgcatttactcttaatcttttgtttgtattgaacactttggagaaattcagtgttctatgtctcacagagacaacatagacaatattgattattatgttctaaattaatactttcacctcttgtatattatctttctatgagtagtattaatagcatagattttta

SEQ ID NO: 254441 - DNA, 764 bp, Cannabis indica
aagcatgccctaaagattgtttctcgctaccatgaattgatcaacaggtggacgcgataactggtcatgaattcctcacattcatagatgcctattccagctacaactagattagcatgcacacactagacgaagagcatactagtttttggactgaaatcgagctttaatgctacaaaataaagccattcagactcaagaatgcaagtgttacatatcatgaaatcaacatagttggatattcccttgtacgaccgatgatggtggtctgccaaaattgtctaaagttatttctagtttagttttatttttgtttggtgagtaaaatgcagttgctttataagcaaatgatacatatattatcattaataataaataatatatgcatactggtctagtgaatatggccgctccatctatttattctgttattgtaaatgacctactagtttaatttataataacaagtatttatcttaaaaataatgtaaattctagaacagttgtttggaaaactttatctttttttttgttttgcataatttaaaagaaatattatataataaaaattaaaagaaaagaactattaaataaagttttaagatagaataattttttttaaaaaaatacaagaaagtattgtgaaattttatcttaatttccaattgactgagtggttaaaatggtaaaatatttatatttcacactcatttgttcgaatctgcatacaagtggattatccaatttttgactaataatttctc

SEQ ID NO: 254442 - DNA, 1041 bp, Cannabis indica
tcacatcaaaatcgttgattcaactgattccgatcgtgctgcatccaaaagcaccacccatgcgctctgcgaactcgccaagaactgtacagttttttatgctaaccaagtatacaatatttcttttgttgttagtttattttatgatttttgatatgatttttttggggagtttagggtttatgagtttctagtaaatttgtgattcgtgtagagaaaattttaaatgatattgtggattgtggagttgttccaactcttgtcggctagagcagatgagacaaagccaaggttgtacgtgtacgagcataaagtggagagaagtagggcttttgctatcaaacttcttattgttaaggtaatttagttttttcctacctaatagttatatttgggtaaatactattttagaccttgtgttttgcgaaagttaccaattagactctctattttgttaaatgacaaaataaattctgtaatttctaaaattgtacaaataggaccttgaattgattttttgtcaaaataaaacttaataatttgatctatagatattatgataaaattggttacattttcggtatatatttgtattagaaattgtcttaaagatagttatattaaaaaaataaaaattgttaaaaattgagcttagggtcatatttataccattttagaaaatatagggtctattttgtcatttaacaaaatagagggtctaattagtaacttttgcaaaacacagggtccaaaatagtatttaccttagttatttctcgttacagttttatcatctactttgtcgaatgtatttatttggtaatcgatcaacttcaagagttgccctctcctcccctcactacaattaaaaattcttacttttaatcacaataaaacttgaaactgaaagtaaaaaaattgtaactaattataaattattattcctatgttgtgactaaaaagtccgtatagataaaagtattagtaacaaaaattacaatttgttgtgactaaatatatttttagtcacaatacttgttg

SEQ ID NO: 254443 - DNA, 1400 bp, Cannabis indica
cggtgggacggggttgagcctcgtttgcgaaaactggtggctgtgaggagtttagttgggttcggctgggtttggctgtgcgagaggaagagagaggatgagagggatgggtttgaaatgggaggggtagtttaggaaatttaaaaagttgtcatatagtaccaattttaataactatgcatttaggggaaaaattatagggtattttaagcatggaatttcaaatttcccttcttaaagctatatgaatggaaaccaggagaaataacaagatgagtttttgaagagtagagatgtcctaatgtagtttatttcttttatttcaaaagttgtaatttgaaaaatacgcaatatttactcggttcacatttcatttatttatttttgttaaatacttatttgctaatagtttattactacatacatgttgtatgccatacataaaatctcacatagttttctatttaataatcatgcatctcattctaaaaacataattatttaggattgtctttatatattttatgtgtatttcattcagtgaaatgaataaatataaaatgctaggttgctttagatagtttaaataatcttgtaattcacaccaagtggctatctcctaaagctagtcactatttattttaaccagcttattttctaataatgtattaaaattgttaagtaatatggtattaattaatttatttttaaacctatatttagtaatttaattaatgtactacgaaggttaaaattggtgtgaaaaaataaaaaataaaaaataataatcacgataaataaataagatattgttacaaattttataatatattttcaagtaaataccattttggaccatgtgttttgcaaaagttaccatttggaccctctattttgttaaatgataaaattgacattatattttccaaaatgataaaaataaaacacagaactcaatttttaataattttattttttaatataacaaactttaagacaatttctaatacgaacatatacagaaaatttaaccagttttattataacatctctagatcagattattactaaattttattttgacaaaaaattagtttagggtcatatttgtacaattttagacaatacatgatccattttgtcatttaataaaataaaaagtccaattagtaacttttgcaaaacacaaggtttaaaatggtatttaccttatattttctctacaaataaataatattggtaaatggtaacaataatcgttctatgtggaaaataaaaagacttattttgtcaataaaattgatgccttcaatagatcctgaacacaagttaatttagataattaataacttaaataactgaatagttttacaactctaataaccaataactaaaacact

SEQ ID NO: 254444 - DNA, 657 bp, Cannabis indica
gtaaaggaaagactgccttttctaatggacaaggagtgtcccctctgcaacgttaatttggaaagctgtttacaccttttcagggattgcagctttgtgaaaatcttatggttctcgggtgtgtttcctttgcgtatagacaaaataccaggggataccattcagtcgttcgtgcaaaatctagtcaggagtctctctgatgttgagataggaagaaaggaaattttaacatatctgggatgcattattgatcatctctggatatacagaaaccgcttgtgcagggagggaaaaaaggatcaagtccaagaggttcagagtagaattcggaactcatactattgttacttgaatttcagtaatgacagtgcagatgcagaagcagatcagaggcaacttttaccattacacagggaaggtagtcgttgcaactctcagaaagtaccttggatcatttgtactgataaacaaaggcgaagcaggtttggcagcagtaatgataaacaaagacacagaccaatgggcaaccaagacagcgtatagcaaagcaagttcaggtttagatgcagattaagtgcaattttaatggctttatcctgggcagttcaagagggaagcaggaggttcacttgctttcggattgcaaagtggcagtac

SEQ ID NO: 254445 - DNA, 749 bp, Cannabis indica
ctaaactatattgtattaataaaattataaattagaaatagattataaaagccatagagtatgagtggtaaatttaaattaatataaatttaatgaattaatataattaaaataaatccaaattaaattactaattgaaaaaaatgttttaaaagctaatataaaagtaaaaaaatattaaaatgctaataaagtgtatataaaatattaaaggctaattaaaaacctaaaaagttaattataattaattggcctaactttataaatacaaatcctaacttaaaagcttaaattttagaaaaatacaaataattatgacaatataataacaatgaaaataaaaatagaatatataatttgttatataattaaatcaaaagttttacttcatattagtaaaataaaataaactagtttatttttgtaagaataagatataggtattaaaattatcataataagattatatatggtaataaaaataaataattaaatacaaagagtaaataacatatttataaattaattatgtcatacaaacctcacgaaacaaaactccgtcaattcggtccgaaaatgcgccactaattgaaacgaacaaaattaacactccaccaccgacctctcctctctttgccatcattgtcgatccataatgtgtcatcatcatcgatccttctactattgacgatgcagaaatagtggaattgacaccctcttctcactacaaaaaatcttacatttagtca

SEQ ID NO: 254446 - DNA, 707 bp, Cannabis indica
atcagttagatccataaatttagatatcttacctcttgttgggaaggcatccctctctagctgccaccaaataagttttagacgagggtggattttggatgtccaaatcaatttccattttgcatccgctggggcagtagttgtgacacccataacaatacgacacgctgatctaattgagaagagaccactaggttcccccatccacatccaggcatctgttgtgtcaaccaccggtagttggatattcaatattgccttcgcatcattccagttgaaccactttttaaccaaatccacgtcccaaacccgattctcccttataaattgactcacccaagccactccatgtgttgcgtccaggaggggggtaggtcttgtattcaaagaaggcacccacggatcaaaccaaatggatgtctctttcccattaccaatctttttacaaacctgagtaagaagcaaggatttagctcttagaactgctttccaaaagcttgagtcccccttcttaatttcagcatccaagaaacatcttccatgaaggtatttggtttgaataatggtcccccacatgctgtccttatccgtaagagccttccacccccatttaaggataaaggctgcattaatagtttcgattcttctgaagccgaggcctccccgcagttttgattggtagagtgaactccaatcaattgtatgcc

SEQ ID NO: 254447 - DNA, 726 bp, Cannabis indica
ttacatatataaggccttaatagggtttctcttgattttattcaccgagcccaacctagttttgtcttattttaaaagtttaaattattcgcgtttttcaataaactctttgattaaaaaaggcgtgcacagcaacagaaaatattgtaacgtgcctaactagttacaagattcaggcaggagttatcccctatttttgggcaaggcctcaccgcgaccaccataagtctggtcgcgacaactgggcctgaaaacccaaaaaacccaaatttcgccaaacttcaatgtacaaatttaaaccaaacttcacataagtcgtgcaattggttttcaagctaaatcagagtatatcaaacaccattcaaaaaaaaattacaacatgcttaaagcacataaacaatcaagttcaattatcttttaattcacataatcaaagcttagataactaagcacaaacgtaagcttaaaaacatgctcaaagttcaaacacttctcagcaaaacaaattgacctaaaatcttggttttgccaatctcaaatgacacaaaaattcaagcctatcattcatgaatttatcaacataaattcatgttaagagcaccctaaaaaccaaatcatgaaaaatcaataatcatagataagattatgataactctatggtatagagttatttttatgcttttaaactaaaagtattgtgagaagagtagtgaaaatgtgtttatt

SEQ ID NO: 254448 - DNA, 763 bp, Cannabis indica
aataggatcaaatacgagaaatgatcaagggcttagctggcccaaaaccatcaaaccttaagttggataagtcagggggctcacctttctcggcatacatcaatgacttacccttgcttaagtttaagatgccaacttgaaagatgtacagaggaaagaagatcccctagtacacctagaacactttaagatcaaacagttctccaacaagtatctagagatgtatgttgctgaatctttttggtaaccctggctaaaatagcccaacaatggtattttaagtttgccccaggaacatttaattcttgagaagaattcttctcagagttctatattaaattctttgcctcaagaaaaataccttcatgacctgaggatcttgtcaaaataaagcaaagacaagatgagcctttaaaagactacattcaaaggttcatggttgaggccacaaaggtcaaaggcctaacagaaagaagctcatatacgaccatacttagaggcatcttgccatttagtgaattgttgaaagatattagaaggatctcaatgagcaacatgaaggagttccttgagcaacccgatggcttcataaagttagaagaagttatccgacaagcacagataagagggcaggtcaattattgaatagacacaaggcatcatactgccccaacttttgtccgagatgcctatcagcacagacaatatctgccaatcttccaacaatgagaatattaaacgcaagcataacaacgatggatct

SEQ ID NO: 254449 - DNA, 828 bp, Cannabis indica
taaattaacaaattttcaaaatttgacgttattttgaccaaaaattaattttaaagaaaaaaaatatctaataagataaaatgtcaaaactaacatttttcaaatcttataatttaatttaataaaatatatttcaaaaataataaattatgaaaatataatatggttagcgaattttgaaatttaaactagattatttctaatattaataatattttaatatcaaaaaaagatcattcaaattttaatagcaaaataagtaatatctgatcttatcattaaaataagtaaaataaataaaataatcaaaatttcaaaattaaccataaagctatttttgtggaaaattcaaattttcaaattcaaaggctactaatatctaaactaattttaattaattaaaaataaataaaaattaattttattctaataattagatttttaattgaaaattcagattctacacaaacttctaccaaaatttgaattttgtttcaatttaaaataatttttgaatcaacagatatcaccaaaacaagattacactaggggagtatgcattgcatactccgcgtgcgcacatgaggctgtaaaagcctaaattcattaattttttgtctaatttccagaacgaaaaaaaaaatattttacaagatacattgcgatttccgtaaaatcatcaaatatgcacataaactatcatgaaaccatccaaatcagcacaaacatcgttttaaatccatatttcatgaaagtaaatcattaccatggctctcaggctagtttttggaatatgttttaccaagatctagatttactactatgtat

SEQ ID NO: 254450 - DNA, 641 bp, Cannabis indica
aaaaattagtttcttgaattaacaaatcaaaaatcgatttctgaaatgactaaattaaaaactatttcattgaattaattaaattaaaaaactagtatctctgaaatgacttaaataaaaaacaggttgcggcataaattataatagagctggttccacaataaaacgagtaaaaataaataacacacaatagctcagaaccagttataattaaaaaaaaataagagagaatcaattcaaactatactgggacataaattaaatagaacaagttctacaacaaaatgagataattacacatacacaaagtgtaatcatcaacacatttttggagggaaaatactatgttattataaattaaaagtgtgagtcatttacaacaatagagtaaataggtggaggtaaagtctccaaccaaaaactagctccgtccaactctagagtaaattttttcaaaccgtgagcaatcatattagctatacgtttgtcatgagtaacatttactctaggaaaaaggaaagaagacaagatacatccataattaaatctttaaagaagatattcatgctgaaggtgtattcaaagcattggcaaccaataaagcatctgtctcaactagagagatagcaatttgaaaatca

SEQ ID NO: 254451 - DNA, 7223 bp, Cannabis indica
ataaaaatgtaaccattgaaatctcttccatatatatatatatatatatattatattacgtgtattgttatttttttcttctaattttatatatatatatatatatatatgcaatatatatagtgtccatatgtgtattgtaacatatgtttaatcagtctcttattttaatccttgtattattttacaatagagttgtaatacatcttgataaaacaaaaaccttaataaaggccataaatcaaaacccaaaagcaagatatataaatatgtatgtatccattccactactgacacaaagtttaaagctcaccttaaagttgttcaacatggcagcaggtccaaaacttcctcgaagctggaaaatcggttgctcttttatgttgggagcattagaaactataaactacaccaaatttatgacaaatcggtgaacatgcatgcactgagaagcagaacatatacctttacaatatatgcttagtcaacgttatcaattttgattggggttatctcatccgcaaccttgaagtgtccaaccaatcgtgcaaagaaaaccatttgttgttccagggtaaactttatgttttcagcctgtgcaaaaatcttgtattagacaatactattcactaaatgaaccataggatgatgccatattataaaaattgtattaccttccgaaaaccatgttgttccccctcgtactccacaagagcaacaggcaaaccctttgccttcaatgcctcgtagattttccgagcttgatcaggaggtacaacctgaaaatcagttagttcccaaaataatcagattatcaccattaaagccagggttcatacaattggtctacaacattcaaatcccaatttcattccgacagtactcttcttaccttatcttccaatccttggaataggattatgggacaagaaaatttatcaacaaagtttattggtgatctctcaaagtaatccttctcacttcctgcaaccagtttgcttttattaaaagagtaaattaaatcaagagaaaataaatgaaccaatgttatcccttgtcttaccaacaagattatctatatagtgagattcaaatttgtgtgtctctgctctcaacaaatttagatctgctacctgttcatatggtgccacaagacagaaatcatatcaagtagtattccatttgatgagaagtgtttgaatttgatgcatagaaaaatacaatacaatccaatactgtgtgatttagctatttccttagacttcagtgatcttggtccaatcttcttttatatttaggtccaaaacccaatcatgtatcggaaaaatattgttccaattataatttgggaatcttccattgtacaagttggataagatatcaaccttgtaatggtacgatgaaagagtccaaaggccagttttcttttaaattcacagccttagatgcagtgaatgaatactcacgtaagtttgtcaccattgattaaccaaaaaactggtagaaacgagatcagagttaaggaacaggcacttacaccatacaaggaagcccccgccttaaatgtgtttttgaatgcaagagcagctaaggtcgtgtagccacctgcagagcccccagtaatacataacctctctccatctacctttccagtattcacctacataaaatagatatatcaacacaacttgagtagacatatccatatttgacgtgtaccaggatcagaaattgtttaccaaatatttagcacagctacaacagtcattgacatcaacaattccccatgtcttcaacagccgttctcgatattctctgccataacctagaaaacaataggagtctctgttaggccaaaataactacaactgaagagacaacatttgtaaagtgatccaatatctaataacacagagacactagaaaaaacaacaaactcttgtcagaaattacagaaaaatataagaacgaaccagtgcttccaccataattaacatcaacaaaagcccatccacgacttgtccaatactgaatattcaaattcaacattgcatgtgattcagctgtgggtcctcctgaaaggaacaagaatgttaactgagtccctacagccataattattggaaaattcatccattcactcgtaacgattggcggaaggcaggagtgcaaaaataagaatgatttattttggtcatttatcaacaccttgaaaaatttcacattaagtatactttgactttgcaatcactaaacaacagttttaccataaaaattgaaagacagtttactgaaaacaagcaaattttcttgacgtgataaaatttacaaattttctgaagtaaaaataataagtaggctcaatattctctaaatttggcaactttgaaacagcaggttattcattagtactatcatcttaaaggactttatccatttatagtgatgttttgaaaatataagtttaatttcgtatgttaaataatataaactgatagacaatccaaaactttgttcttgaaaagctacaaggacctgctcacacgaatcaattgacttcacaaagtttatcagatcccaggtctacctttccatccactggaacctctgtcccctttttaatttgaaatcacaagttttttttttttgtggcagaattagtgttcatagaagaaatgatctaatctctgacacacagaatatgtcttttatatggtgcatggcaaagttaaacataccatggcttttcaatagaagtggaggcttttcttcctgactatggtaacaaggattagacggcgggtaaaaataggcgtaggcaatttgaccaggaacttctgttggaaattcaataaactcaggtatgctgaaataagactcgtattttaaacaatctggcgatgaggaccaaataatcttgaagtcaactgcttttgacttcggcttatctaacgtcacctgaaaggacagtattcattgctattcaagtagatatttaaggacattattcaagttaatgttgttgctaagcatttgtgcctattcaaagtaaaatgtgatgattatccaattaataagttgactctgcaccttagcaacagatgacgggtaattttcagatgctccctccacatacaagcaatcctttgttgaagtctgaaaggcagccaaaatatatcaaaaaaagaaaagtaccactctgactgaaggtcactaaacgcaataaataaatttaaccagtgacatcgtataaggtatttgacagtacgatgttatctatatcagtgtacggaatatcaagcaaagatatggtgctctgaacttcatccaaaatacccaggtatgacctccctttctgcctgcaagaaaaacataatgtaccgcaagaaaaaaaatgaataaattgctcaaagtgagttacaggcaaaattaagataacatatatataatatataatatacatatacatataagcacaacaatggctaacactgtagagcggctttacatgtcacctgtaggtacaagcaatcaagctttttccttcatcgcctgaaataagctcataagaatttatcccaaaaacccacaaaggtttggaaaattctgcatccaaggaataaacttgtactaccttgttgtcagattcaacctgttgcaaattaagaacatgtaaaataaatcagtcacaaatgtatttgataagctccaaaccagtcatttagaattcagtattggattaaacagctattctagcaacagaaggcgcaaaatattctttttcctgactggattcacagattttcatacagtaaataaagctaattgtcaattttgcgcttcatataccagacaactatcctccataaatgatatttgaagaatttttaagttgcataaaagaggtattgcaatggcaatatgaggacaaaacagagctgctatgccaaggccatgggaaggctcgggtaaggcatgtgaaatccatgactcgagcaacagagaggttcattgaaggctttgagaagatgtcaaggtgtcatgtgttactcgagccatgagaagcctcaaataaggttgaaacattcatgaagtagccgagtcactgcttggtttgggtaaaatgtgagatgtccatgtgttggtcaagcctttgcatggctcgagtggattgttggtcgagttatgttatagctcgaacaaaaggttcaaacgagaagaactactcgagcaattctatggctccaacaaaggctagatgcttagggtgtggctgaggcattacaaggctcgagtaagcttggcaggatgaagaaacaagtcgtgagctatcctatggctcgtgcttcgcaagaaaattgaagatatagccaagctatgcgttggctcggacagagcttgaagaatgaagcattgtcctagctatcctatggcttggacatagcttgaagaatggagcattgtcctagctacctatggctcgaagagagcttgaagtgtgaagcatagtcaagctattgagtggctcaagtaaagaggaagaattgaagatgtacccaagccatcataaggcttggatagaacatggtccgtcaaaaacttgactatggcttgcaaggtacaagatggctcagacagaaggttcaagtacgacacgtcctcaagccaaaatttcgtacaacctaggatgaacttctagaagctggaaataccatcagctgattttctttattttaagaatagtttaagtttataataaatatttgttttatttgtaaatatcttcctaatttgaaggaaggtagttggtggcagatatctacaaatcggttgcacttgttttgtaaatacacttgaactcattgaaaaatcataactcttggagaattataactctagagaaatattgtaagggcctatatggcacatcttatagaaaagctaaaagctgctttttaagcttttaaaaaaactaatagttacttttttaaaaaaaactgtgataaaaaagtatttggtaaacagttaaaaaaaagtttattgaagaatttatggaaaagctacagctaaaagctaaagctgatacaactcaacttttagaaaatattattttgattaaagactataataaattatcttgtacgtaattaaatatttattatatattacaaaaaacaaaaatacttttctgtaacacacacctaaggcttcctagactcttaagtctattttcttcataagtttttcatagaatcctatcagttcttgatctgtaacactcaattctcactattgtaatattgaagagagccataactagaaattacaaagtctaaacttataatctgtgtggtattatctcaagaataaatacaattaaaaagggagtaggccattacccgttcatcaagggggtcgaacttctataaattcttatgttacttttattatttgttattattatttacacgtggtgaaaatctgtaattaataaggctctgctgtcagttgactaaattccaagtcaacattttggtgctttcattgagagctctttttgagtttcttcatctcgttctgatcaatcaccatggttctaaccagaaaaactgcttcttcgaatcctcttcaagatcccatggcggtagatcccaatgttcgtgttcctcccaccacaaaaggtcctcctaattcggctaatactgtcaatccagccaatcctgcgaatcttgttgattctaccattcctccatggctagaacaacccgcaggatctcgtacaaaagagtagaacaacgtggagcaacctgctcataatactaataagaatgcctcgcgagtttatgcagaagaaattaggccaggagttggccaacctgctattgacaaaccttgcttggaccttggggatgatgctgagctggttaggctcagagaagctgtaggccaggtcagtcaaacaaaacaagaagaaacacgctctgttgcgtgcgatgcctttgcctagtagaggcgcgaattcctgaagtggacggatgaccatgaggccaccctccaggcccaccaggcagagctgaactgccataatcaggaggccaacaacctgataaggcaattcaatacgagaacaagcttcaggggcaaggccttgataagagatcccttgctagagagatccacaaacgggatgaccagggcctaccaacaggcagacaatgggcaaacaacccattcaggtccctcgaacagggggccaaactctgtcttgctcgaggacggacaagtcttgcccaacagaccatatggcaggatgaccagcaggttgaaaagattacaacttgcaaaaggttgggcagcctgcctgtagaaggctggatagcttacagcctacagaaggttgggcaacctgcctgtagaaggctggatggcttacagcctgcaaaagacaagtgtaagacagctcatcattaactgcacaaggtagccctgtaaggttcttcaatcctcaaagtgttaagatcacaaggactcaaacaagaagaactgggcaggtctataagaccctggaagctgtacgacaaagttgtatggcaaagctatatggaaaagttgtacggacagggctatacagacatgtcaaacaggcctccaaataagggttggctggccaaggcaaacagacatgccggacagaccctaaaaatagggttggccggccaactcgtgcagacaatctcaaacaggctggccggccaaggaaatctgtctgaccaaggaggtctgtccaaccaaggaaggctagccgaccaaggaggcctgtccgacaaggaggcctggccgaccaaggaaagctggccgatcaaggacagttgtccgaacaagaggccaccagaacagatccctctgtataagcatagctggatcaactcaaagtcatgatcaaaggtctttccggcccgaagttgtccgacctaaaactggacaggtctaggggataacccattacgacatatgtcaatgtgttgcccctacctaagttcaaaatgccagcttggaagatgtacaccgagacagaagatcccctgccgtacataaaatactttgagatccagacagatctccaaaaagtaattggagatgtgcgatgcaggatcttcccgacaaccttgtctgaaatagaatgcaagtgtgtttgtgagatttttgaagacctttataatgta

SEQ ID NO: 254452 - DNA, 551 bp, Cannabis indica
ttagagtgttatgtcaccgcctcctatctctcatttatatataaagatagagaaaattaaaatagaaaaagggctaatataatatactaatacattacgtactaatttgatggcggcgacaacttttttgccttatttggtttctcaatttgaaaaaatccttgaatataatctgcttattctgattcgattactacacacaaactatgatctcttcagagttttatcattttaatttcttttggaagaaagtactgcaataacaacaataataatttataaataatataattaattaaatatttattcatatgataatagagaaaattaaaatagaaataagctaataacataatacactaatacaatacgtactaatttgatggcggcgacaacttcttcgccttctttagtttctcaatctgcaaaaagaaaaagaaataccaataaattacatatgagagatgatggagatcatatatcatataagaataagaatgagagagaaataaattaaatttgagagatgatataatggagatcatatatca

SEQ ID NO: 254453 - DNA, 643 bp, Cannabis indica
gaggggggtatttttggagttttgaaaaaagagtcatatttttcatagtgtaaaatgtattggttcaaaaaagaaattttgaaaatttttaagtatagaaaatcaaatttccctatgaaaatagaggtaaaaattaaaataagtaaagtgggtatacaatgtaatttcctctaatacgggtaatactttgggcttaaaatggattgtcaattacactaaaaaacgattatttacactatatactgaaatttctagcttttttactttttttttgtcgggtagaatttttttcaaaactactgtgtattgtgttaagtttttactgttattctacggttgttttttagttgttctattttgtgtttcattgttgttttataaaaacacaatatttttttttaaaaaaaattcgtgtaataatatttttgtaaaagttaatctagatttcaatatttttgtaagtttctttaaacaatgacggcacagcttctcaagagaaaattagactctataccctttttatattgtcctcttttatttttaccctattttttaaattctaccatttttatctcttttttaaaatactttttcaattttgcccctgtcacttcaatatacttatgttagggtattttaggta

SEQ ID NO: 254454 - DNA, 808 bp, Cannabis indica
catggataagtgacacactaaatgacagctgacttaggttttaaacaaaaacctatcgactgtaacttaacatggaaataccctaaactattagggaattagccagccaaagctctgaaactaacaggaatcgacaacatgaatttttcaggaatcccacctacaaaatccagtcaaccggttttaggttacccggtttacaccagaaaaccccaaaaattctaaaaccttaccaaatcgattccaatccttaccaaaccttctagacctacatattataccctaataggcatattccaattaataaaacaactacaaaaactcagaatcaattttcaccattaaagagctaagattgagttctaaaagtcaaagcttgctcaaacaatcctacaaccacccaaaccagcaaaaaacaacataatacatcacaactaaactccagaaaacgaaatcaaacaactacaaaaactcagaatcaattttcaccattaaagagccaagattgagttctaaaagtcaaagcttgctcaaacaatcctacaaccacccaaaccagcaaaaaacaacataatacatcacaactaaactccagaaaaccaaatcaaacaacacatccactacagaactcataaacccaattcatggaaaatttcacagtctaaagcttaagaaactaaagagggagttgctggaaactttacattctcttggatactctataagcttgtggaaaatcacaagaattatagagaaaagctagaaccctagctggttctaagaggttcaaaagagagagagagagaga

SEQ ID NO: 254455 - DNA, 975 bp, Cannabis indica
cacactttttactttaactagacttctcacatatgttcattaactataaataactaatgaagtaaaacaacaaagcattattcatcaatctatattttaattaataaaataattaaaatattaatataagtccatttaaaagtcttaacattataagtacacttagtagtagtatatatgttttaggtttttattattattagagttttttgcggttaaactctctcagctattattccacttgaaattaactctctaagctcaaattttgatggtaaaacgctctaaacttttgaaatgttatcaaatttaaggtatcatatattttttcacgattaactgctaacatggactagttatgtgtataatttggtatacgtgacatgtttatatggtacacctaatattattatttaaaaattaataaaaaaaaatatttctaaacttgtaatatatatatatttttttataattttatttaattttaaaataaattttgaaataataataataataataggtgtactaatataaacgtgtcacgtgtacaaaagtagacatataaacagtctatggtggtagttaactggatgtcatattaaatttactaacagatcagtaatttagaagattttagcgccaaaatttaaacttaaaaaattaagtgcaagtgagatagttagtataatttagccgccaaaaactattattattattattattattattattattattattattattattattattattattttaaagcatatgttaagttttatttaccttttacctaccatgtcctcgtcgtgtaacgtgttcaagaaaaataagatattctaacagtgaacttttaaataaaagtcaatgaattatttgctaagttatgtttagagtcaaattgtttgtatatcaatcttgtgtttttctaagattggtaaaaattattacaaaacaattgtttattaaaaa

SEQ ID NO: 254456 - DNA, 1066 bp, Cannabis indica
gagagagagagagagagagagagagagagagagagagagagagagagagagagagagagagagagagagagagagagagagagagttgtttccttttttttttttcaaattttcttctttttgaataaatgaaataaaaactttgttttattaaaatatctcagccaatttaattttttaaaaaatctgattgttaaattaatacaaagttcactaaaggacaaaatataaatgggcaaaaagacaattttgccccttccacactaaaagtcataaaaggtcacttaggggtatttttgcctaactctaaaatctcgaccattcctgacattcccaatgtctaactttattgtccagctatactaaaaaatactaggatgtgattctaatagccaaacaccgcgttccaatgttgccggacacaaaacatgtaagattatgaaatttctatatatgacatataaaatgcattctgaattcaaataaatcatcataaataaataattcagagctaataaataattttcataattaaaccctaattatctgctaattttcaaattaaagctaagcggtctttacatacttgcttaaattatttacacgtggtgattcatattgtaaataagatttcgctgtatgttgaccaaattatgagtcaacacttaccacaatagagtttcctctatctgagtcgtgaattgcaatttcaatccttaatttattacataaaggtttaagtgacacaattattaggcaacatataaacaacatagtcccaactatgtataatcaatgtgcttggacattgcaaataggactaaaaaaatattattgcataatcagttttcaattatcgatcaattattggagcgtcagtaaaactgatggccaaatttcaaaaatacgtgcacagatccatgacgcaacgatgaatgcaagtttagtttgttttctgcaatttttattgacatttccaagattgaatttaggaaataacgttaatgtagcaattagtaatattagttactctagtgatacatattggtaagaggtttctaatggt

SEQ ID NO: 254457 - DNA, 474 bp, Cannabis indica
agatttgagttgaatctccaattcttagtaggtaattatgtatatatacatatgtattcttagtagtaatctcataaaaggaataatattaatacagtaataactataaaagagtagtctagacttttctttttggatttgtggtattcagagtctgatatcaaattcagaggttattctaatggtttgagaataaatttgcattagtttagatttgaataggtggatatgaggaataagcgtttaatggttgttatggtaattgaagtagtgatgttgatgagtagttgttgatttagtatatgagaatagttttggcttagaatagaggattgtatgagaaggtagtaagctttattaatagtttggatgttggttgttaggtgttggttataatttggaacccttgaaggggtatttatagttgctcaccccttacactctatggttagaattattgttggaaattatttt

SEQ ID NO: 254458 - DNA, 782 bp, Cannabis indica
aaaagtgttactaaacgccaccatagatcatgaaattaaatttcttccctagtgtattgacacaaaatccgcgtatatataatgcatgaaatcatgcatgtgtttgtttgtgtaagccgttctttcattcttcatcgatttcgtagatcccttttgattttcttttcttttctgtttttcttcttctttttttttttggcagtttgtattattcatctcattttttagcaatgcacgatggtctagatttttcttcttttggctaattattcatgatacaatactccaattaacctatcagagttggtcattataattgttcctacaattattgaaaatgtttgggacttgagaacatgttgggtctaaatttgccaatgaaggcaagtagaatgactttagtgaggaacattatagaagggtttaggtcgggtcggggaactatttttacacttgattgattgaaatagccatatacatagcgactaaaatctcttattattatatgttaaataattggtccctcgccatcatgaagctttccgccattcttttgtccaataatttattggaagtttgatccaatcggtggaaatatttccttttttaaaacatgatatattcataattaattttttatatctataagtaatatagaagattggatatataacaactcgttttgtttttttgtgtcatgtatagatttattttaattttttttttattttatttacttattaataagaatgcatttgataatttaaagtattttgcctttt

SEQ ID NO: 254459 - DNA, 1072 bp, Cannabis indica
atagaaaagattacattgaaatagagttttatttaggtgacaaagctcaacactcgagaccttgagtgtcctgaactggaacttgcttcatcttgtatcgaccttctccttcgaaagaggttagatacacgccctctatttagatacaagtatacatcctctctctttgatctagaaggacgttcagggtgtcttggaggtagcccacttgtcctggatttgtttccagggtttctatcgttgccacgagggatcccttgattcccaggtcgaggctttctcgtgtcctcattcctgtgagaagcttttggtacatcatttcgttcattcctttggttcataaatccttgggatccttgaggaacgtctcactgttgttcttgattatttgcctgattatccattagaacatccattgtactcccaagttgctcttcttgggtgttttaaggatttccctagtttgcttcccgtctcttggttctagaaccttgaggcttgcctcgtggtcttcgtaccgtagatttaggttgattctgaggattggttcctcgtgtcaccttggccgctgcagcctctcttttcaactcaacgttttgtcagttagattcgggtaagcattgtcggagttgtctattttctaattccactaatggtacatacctagttgggtcataagcaccctcacttctaggcacgtatctggcagaattattagtatcttcatactttctttctgaattttgatcaccaccaccatcattccttcttgaatgagatgttccagtggtacggggtctctgaaatcccattggttctcttctagggcgacgtgtagtttcttcagggcgatttccatcgttataattgttatgagccattgaatgtggatagattttttgtttgtaaggagggatttttctgagtttttatcactaaggctctcaattaatgtaccaaattattaacgcagattttcgttaactaaaaaaatagcctttcagtaataaactttctacaaaaaattattaagtaaacagagatatgatgacactagatatttttacgtggt

SEQ ID NO: 254460 - DNA, 813 bp, Cannabis indica
ttgcttcctttttccttatttttttgtaaaatgattaataaaatagttttattaatttacttcagccaaatataattaaacaaaatctgaataaatccttttatttgattcacataaagacaaaacaccaaaaggacaaaaagaccaaaatgcccttgcccacaaaaaactaacttaaagggtactaagggtattttgggtaaactctaaatttccgactaatcccgacattcccaatgtctaactaactgccccgctatacaaaaatactatgatgtgattctactgagccaaacaccgcgttccaatgttgccggacactgaacatgtaaaaatatgaaatttcactatatgacatataaaatgcattctgaatccaaataaatcatcataaataattatttaaatatcaataaataattttcacaattaaaccttaattatcttctaattccaaatttaaactaagaggtctttacagtagttattaatgatgtactaaacattgttaggaacaaaagttcaaactcaaacttcctctattatgcataattaaatcactgattttcataaaaaaaataagatttttacctaatgaattttactaccaaatgaatcaaactatttatctttaaacaaaaagtacttaaaaataagatcttccacaatacaaaatcaacttatgcaaaatttaataaattgttaaacatgtcttctatttttattaagaattcctttagataaagaattttactaccaaatgaatcaactattatctaaaaattaattcaaaacatcatctacaatgcaaaa

SEQ ID NO: 254461 - DNA, 618 bp, Cannabis indica
ttttttttttttgtattatgaaatgtgtgtacaacacacacacgaacaacaacaaaacaaacactcaaaacatccaacgaaggaacagggaaccagcaaacaaacaacagataaaaaacatctaaaggaaaacaaccaaacaaacgggcgaactaacaaaatagaccaacactaccctgaccaaagatcaccaactcctcacatatcaccaggatcccactccgtgaggtcatcaagaacagattcgtccagcacctcaggattaatacagcccattattctcgaattagaagcccactttgcaatgttatgagccatatagttgcatttgcgcgagatgtggacaataccccagtcattcatcttgtcacacgcgtgaagaaaccttgatttggcttcctgcaaactgaagtccacacaattggacaaaggagcatcaatgctttcacgacacaacgattgtcacattggaagatgatgtttttcaaacccaactcaatcgccttttctgctgccagacacactgcatgagcttcagcaagcttaggtgaagttatcatacctgtcttaactgtgatggaaaggattgtacccaagtcatctcgaatgactgcagat

SEQ ID NO: 254462 - DNA, 510 bp, Cannabis indica
aataaatcaaataaataatttgtaacatgtaaattttgtaatttttttcatatgtgataaacctagtaacatgatagagcccatttaaattatttgtcttgtatgagcctatatgtttgcaatcaggcttagatgaatataggaagcctaaataattttaatatttaaatggactgagttgctaaaataaaatatgagtttttacaaaaataatagattttaggcgaatgtttacatttatactgccacacgacaaaaattagatttttactaccttggcatttttttattttatattgtaaacaccgaaaataaaaacgaagtctccatcttccacacccacggatagaatagaaccaccactgcaacaccagaaggtacaaccagaaaacaaccattaaatccagcgagatcaagcagaaacattaaaaccattaatattgggctgtcatgatttttctaatattgtttttcgggttgttccatagctgtttttgttgggttttatgc

SEQ ID NO: 254463 - DNA, 531 bp, Cannabis indica
tattgaaaatgaaggtaaatcaatgggagatgaacttgagtagaattcagtgttcgaggtcaattttaaatgaaagtatgcacatgataaataaaaaaaaaaattaaacaatgtcaaagttcacttgaatcattgacgcatgattaattagataagaagactactcaagcgattgtccgatactaacaagtaagcacatttccaacatacattgtttatatatacacaattcttgtttatatatacacaattctccaacatatggctcatgtacatactcctcaaagcacaactcagttcattgaaaatgtaaactaaaacattaattaaggggaaaatatgattgtccaaggcaagttcaatcggaagagtagtggacttgtacatatttgacatgttgattaaatgatatgctttagtaaactaaactttcaagtatttgatcaaatatataactataaaaataatacatcattggaaattgtaattttcgaatatgggaataaaaggtgtttgaataaaataaccttg

SEQ ID NO: 254464 - DNA, 1105 bp, Cannabis indica
cttttatcacatacaaattttttttattaaacaattttttttttaaatctgaaacttttttcaagtatactaaaaagattatttcccaacactttataactgttaggaatacttagtattcccgacagtttataaatattgggaatattaagtattcccaacggtttataactgttgggaatagtaatgaactgttggtatttactattttcgtttacaaaattccatttagtattgccaacggttctctaccgttgccattagtttttcccaacgatttttttgcttcgattttaaactgttgggaaaaagttctgcttaccttttccaacggattttatatttgacccccttattaaccgttgggaaaagctaattttatagtagtgactgttgctcatgtataagcaaagtatgctcttttggtggactctaattgtacttggttggagatatgtctccttctctaatgcctattgtattatgactatttgttttaatataatagcaattcatctagaaaaaaatcaatgatcacaaaattgtcttctattgctctcacctaaagagtttacaaactaccaattaaaaagaaataaaatctaacaagcccatcaaactccttcgaaacatggaaaaggaaaacacccaaataaataaataaacaaaaagaattgattgttataaaaaatgaaagagaacattgtaacggtttccataaccttttcattttttttttatcattgatattacgcacacataagatctcccaactattgcaagaacaaaaaaaaaaaaaaaaaaaaagagaagagagatctaccaattattattatgtgtttttggaggggaaatttaaatttgtatgcttgcatttaattaaaatttgtcctcaaaactcataataccccatatttaaaatatatgaccattttttctattatgcccaaaataccctctgttttttccttcaccccctatcacttcttctctctttccctctctcttcttttctctacctgcccgagctacacaacgggagtcaatttttgctctctattctcatcctcactacactagcaccacactgcagaacggctcacca

SEQ ID NO: 254465 - DNA, 741 bp, Cannabis indica
ataactgttataagatctattacgaaacacaaaattaacatctattactaagaccaataatatcatctaaaactagaatcaaagaagtgataagagaagtattatttttcagtttaagcacaatattcaaataataatcaaactcaacaataataattctacacccaaaggagatgcactgaatcaacacgttgcgaatagccaaacttgagccactttaggaacaaaacagtcatccaaatgccaacttgttgaagctaaagctatttctaattaattacgaatcaccatacccaagccattataattgcccaaagaattgatagcggcatctgtattgactttgagataatcaagcggttggaaaagtttctattttgggaccacctaaagaggggctgtccaagacactgtcccccataagggatgtcaactgccttccgacaacaagggaggagacgccaccggagcttgtttgttatcaaacgtcctagttaatcacatatccaatgctaattagtatttttgttcataaaattttgatatgtatagtatatgcttatttcgattttttcaagccgttaagaatctcatccaaactattaaaattgttatataaatttaaaagacttctgtcaaatcgtgtttaattttactaacgcattaattatccatatattaaatcgtgcccctaaactttaatatatatatttaaataaacaatttaactaaaacaaaaaa

SEQ ID NO: 254466 - DNA, 580 bp, Cannabis indica
aaccatgcaacataaaatgttatttttgttctttattgactagtaaatctgattatattgaaatgagttttatttagggcacaaaatccaacatttctctactctaaaatttgatgtctttttttgttgtatttggttcttttttgcagtgcaagtttgctcctcaaatatggtattttagtgtatcatttagtgggataaatggcacaaaaactgagaaaagtgggggacaaaatgtgcattggtagtggtagaaagggtggtagcagttggtgaattcgtcagacgtgttactcgctgcttcattgtcgtgcacgaacctgacttcttcattgttgggcttctaattgataaatttaatggtcttggtccacgttcaaacttaggacatgatccatagtgatacataaatatgaggggttcttttaattatatacctaatttgaaaaataattatacaaataacaaaagaaattttaattataacatgacatctattatatacggagcttccaaaaatattagatagaaatctactattcttaagcttcacccaacgccacttttttttttctttgag

SEQ ID NO: 254467 - DNA, 885 bp, Cannabis indica
ttatctttttgaagcatataatcacaattacatttcactatgttgacatcactgtaattgtaaatgactatatgtctggacttaacagatttcgtatatattaaaccataaacatgaaaactacatgtaaacataaatgacttctaatcttttattgataaaaaatcagattagattgaaataggttttatttagggcataaaatcccaacatgaagttctttatagcaaagctcctaccaccttaaagtttttggttgccaaagcataattggttgccaaagaatacgatcaaaaataaggtattaattactttcacacctttatccctgttgcaaagtttaataccttaaaattattgcttgctactgcagccatcaaaaattagtctttgtaccaacttgatattaacaacgactttattcatggcaatttaaatgaaattatctatatgacgcttcccaaaggatataaacctaaggaaaatattactccgaaagctatatgtaaattaaccaaaagtagctatggcttgaaacaagcctctagacaatatttcacaaaactcaacaactatcttttatccattgggttcactcaatcacttcagataacacattgttcattaaaaatcataatgttgttttgttgccctttttaatatatgttaatgacattgtggttacttctaataatgatgttgctattacttttttaaacaacatttaattcagtctttcagcttaaggaccttggtcctttacaattattcttaggtttggagattggttcgtcctcaatggtatttctgtgtctcaacgccattcaccctacaactttgcttacacaagttacttaggagcttttattgttcgtacacccatgg

SEQ ID NO: 254468 - DNA, 614 bp, Cannabis indica
aaaaattaaatttttaatatctaaatgaattttttaataaaaaataaataactttttaaatcgcttaattagtcataaaaatctaatttatttttaatttttttaatcatttaaaataattttttcttaagatctaatttaattttataagatttactaaaaagaagtattaaatctttctcatgtttattttgagagggtacgatttgatagttgtcaaagtttaggtggcaaaattgctaatttataaagacatgtcgtcatttaatcaaaataatgggacgaaacctaacagaaggactaaatttctgtatatgtaaaagtttaaggagaattcttaacaagtcgtatattttaacagataaaataagtattgtcgaaagttcagagtaaaatttgttaattattgtaataaagaatttctctctcaaattgtttcttaacaagattgtacttagctagtcaagtggctgagcattaatgttgtgtcaattcaatattatttagattcaaatatgttgtttaatatttgagaaatactaaaggacgcaaatgagtatacctcaaaatatcatacacatatgttaatttaataagggaaatttcattttttg

SEQ ID NO: 254469 - DNA, 663 bp, Cannabis indica
caatacgatcattgttgaggctatttttcagaacttactgtgcatcatgatgtatttttaccccaaaatgatcataccaaaactggcgtatcatcgccgctttgtttataagcggaacgttcataggtctgtagggaataatattgtaaactgcatgcattactttttattttctttattagattgaactgtttaatcctgtatattcttacacggcttcattaattaagaatcgtgtcgagttaccttaaaatatttttgtaatatgattatctccatcgtatttatttataatttgattaaactttttttaaaaaaactattatgttgttttaaaaatatttctatattttctctttcaaacatcatataacataaaaaatttatttatttcccctgggtgtgatacaatgggttcaacgaaaaatgctaaaaggcaccatttttttagtgtaactgatgccaccatgctcgttttgaaaatgtaattttttcttctttttttttttgtaacaattaaccttagaatttggattttaattagataataattttaacaaaaaatgtgatcttatctaaaatgatgatttatcattttttatgttttttttagtgtaatgccatatgtataaaaaaaaatcgacaggattgtgaacgcagtaa

SEQ ID NO: 254470 - DNA, 1785 bp, Cannabis indica
aactgtaaagccaaacagccatagtgttttcatttttttagcctaaactcaaaataatattcatattttatttttgaaaacactcaactattcaagaatttaaatatggaccccactattttaattttcaaaaacataaaacatttttcaatttttaaactaatcacacccttattttttcaaaagaaaataaaaaatcatagtggtatattcattatagttacaacatcatccccataaatttttttaaaaaattgaataatttaccgtgccgaaaataagtttaaaaatttttgaacacgagtgggatactaaaatatcaagagctctgtttttggtactgtaaactattcagattttttaaaaaaaattacattataacgaatactgtcatgaaaaaaatttgaaaaaagattccgacatatgattttgaacgttaaaagtgactaaaaattataataagaagttataattaacactcatctattattgaataatttaatatgaagcatatagcaatgttcaaaagaaaaagacattaccataacctatggatttttattttttcatttttttaaatagaaaatgaaggggacaatgttaaggagttgtttagctcaataatataaatatatatatatatatatatatatatttatatataaaatactcgttcttatccaaacctctaccttatatattattttccaaattatgatgaaaggcatttggcatggaaatatgatgtgtactacctaccaatagaaggtaacacaagagtaacctactatttttgtaggagcaagggccgcaaaaattgatgacatttttagaatactagttatggctaattgtagtttgagaataaaggaagatttacatgaacaacttggatcttttagatgtagtaataaattaaaggtgtttttccctttgagtgagattctatggttgtgggagggagtcacattttatggcgtcgtttgcacattatgtatgtgttaaacgttctagagaattactgtatctactctgtgtcgtcctgtactcaaaaagagtgtgggagattcctgactgtgtgggaccatatctaatcggggttgataactaatatcatattagtcaacctagcagtagtttcatctgtcagaagttagttgtgttgttaagagagttaatttgaaattcagttttataacaaactgttgtaacaaaaagactaatgtcgtgtatcttttgaattgttttcttctcttcccatgtactttctctatataaataaagtgcttgatcactttgtttgatcaagaattcatttgctaaattttctcagtgttgttcttataaaaatttctttttttctctgtaagtttacatggtattagagccactgaccattgtcaatggactcatcatcttcagatctccaaattgaaactttggtaggagctcctgcacctccagcaatcaatcaaaaccagtcctggaaatggaatcccatttctaactctttcacattctctctcaccatcaagctcgatcgtgtgaatttcttggcatggaatcacaagttgttcgaagtgtgattggtcatgacttagatgagattctattcagcaatgtttacccaccaaagcacctaatcaatggtgaaatcaacccggtgttcactcaatggaaaagaaaagatcaactcatgttgtcttggctccgatatttattgttagaagggattcttggatcggttgctgcctattctatctcctattgtaacgtccccgcttc

SEQ ID NO: 254471 - DNA, 1315 bp, Cannabis indica
cagttcattgtctatcctaagggcatgcagagataccccaagagaactagacaataaaaccataatatcagaaaagaaaacctcaaaactgagagttgtcacttctgatccaccagtagaacacctacaaaataaagagaaaaaattaatatataataaatatttaattaaaaaaaatgaaatttcccttacaaaaaaataaaataaaatatgaaattttatgtcaatagtcacagaattctctaatgtaaatactagaacttatctattgatgacggtgactaccctacatttgatgtgttattattagactaaactaaccttacaaaattaaaactagtcatataataactttacaaaaactaaaaactagccatatgttagccttacaaaactaaaactagttatactggccttacaaaatttaaattagccatactggccttacaaaaccaaaaactagccatactagccttacaacacccaaaactagccatactggctttacaaaaccaaaaactagccacattggccgtacaaaagaaaactagccacattggcctaacaaaaaaactaaccacattggtcttacaaaattaaaaaacaagccacttacaaaactagacatattgccttacaaaaccaaaagacacattaaccataaaaactaaaaagccatattagtcataattaaaataacaaagatgataaaaaagtaggttatcttaatttttattttatttttataaaataaagtaataattcttactttatatatactttacttatgaaaagtaatttaaaaaattaccattaaataatttttctatatatatataaatatacaaaaggaaaactcaataaataaaatgtatatcaaaagatataaaatgaaataatcaaaacaattagaattctattaaagatagactacacaaaattaagaaggttaaaaaataaataattaaaatacactaaataactcccaaatttataattatggttatataatgttataaaattcacaattaaagacatttaaaatacaaaattctataagttgaaaatatataaagtcaaaattgattaatgtgaaaattaaaatattaaaatatatataataacttaatataattaagaaaatttattaaaatgactggcaagattaagtaataaatcccaaagaatttctctccattaatagggaattacatttattacccttgccaacctgaccatcactttcgcaagccgcaaaaccaccccggacactggtccgtgaatgatagtcaattcctgcataagagctaaggca

SEQ ID NO: 254472 - DNA, 750 bp, Cannabis indica
atattattgctagtgttgttgtttgaatctgccttagaaataaccaaagtagttgatgaagaaaccatagaagtgtatatattgctcttttaattaaaagtgaccagctacataatcacacaacaccacttatatatacatcaatttctaatgtctcacacatttttaataattaaaaagaagaagacaaatttatcagactttcaaatcaacattaccaacccccactcatatttttttattggccatgctttagtataatttgtatagtagtgtaatatatgagtgataaccttttatttttaaatcatttcatttgggcagataatattaggatgtaactcaaacaaaatttagaaggaatgggatgagtagaggaaaatagtaaaacgtgaaaattatatatatggtggataatgaaatcaacaatttaattcatagctttcttggaactattgtgtttgggttccttgaaaatgaaataattattttcatgtattgttttgtctttttatgtatattattaatattataaaaacaaaagttcattacataactttacattaattgttgccaaaagagaataatttacttagggaaatctttagtgaagagacgactcaagtcaagtaattgttatttaaaggaattggtcttcaaacgaatgatttgttataataataataataataaagaccaaaagaaagttgtgaagatgaactacatgcgttcacaatattttaaaaaaaa

SEQ ID NO: 254473 - DNA, 530 bp, Cannabis indica
aaaagaagtcatccttgaactcttttttgttgggcaacctcacaataatcctacgatcattggtgtgagtcctgagatagttaaagcctcctacaccacgcttccttgctgggcaggctttaacaaaataaaaacaaagaatctccagtggagttggacactcccacttcaaaatatggtagagaaattttaaataggccaatatcctatgagtttggtgccaattggaatggggtaatattgaggtagttacagaattctttgaagtaatctttaagagggagaattgtcccagcccttatgtgctcaagactccaagcgcctattctagaaggctcgctcatgttacaacccttgtctcagactagacattcaaggagatagcagctgaattctccattagcaatggacctaatatgacatccatgttcattcctgatgctgcatgaccttaaaacatccccttcataaggtccaatggacttgattttggactcaattaattcagcctcaaaagtgactgtaggatc

SEQ ID NO: 254474 - DNA, 712 bp, Cannabis indica
ctataaaaatatttgtaaacgaagaagctaatgtatgattcttttagcacacattctttacaattttaaagattttgttagtgcaaaagtagctataggtagggagttaaatgtataaataattacaatttagagattgtttgaaataatttttataaaaatatatatttatatgtatataataaattagaatttattcttaaaatatagtagtcttagagcactcacaagagacgaggtaaacaccttgtacctttcaaaaactgaaagaaaaattagttaaagtgtaaaaatgggactctaataatattttttttgctgaaactgaaaactgcattaaaccagaaaagaggaaaaaaccagcaaactagtccattgtagaaacaaggggtgctacatccctaacaccaagagacccaacaatgttatgggacacagataatgtataatttagctataatagctaagctcttggttcaaaaaaaattgtagctacatttagctaagacgggagagagtgagctaaacacgtacttttttatatttatttatttgttttctctttcttttttcttaaagttattatttttgtattttttattattatttaattaataaaaatattttaaaatatattatttaaatgatgttgaagaaatatagagaaactgatgtatggtgtaatgtaaatgtgtgagacaaaataaaaaaa

SEQ ID NO: 254475 - DNA, 1044 bp, Cannabis indica
gcgtcggaaagacaaatgtaccaaaggggcatggtaaagtgtctcgcttgatctttggagcaatagcaatctgattatatcgtcaataacccatcaagaaaagcaatagtaacgatgacctgcctctcaagcatatgatcaatgaatggcaatggaagtgatcttttctgtcgcacattcaacttgtagtaatctatgcagactcaccacctggtttgcattcttgtgggaactagctcactgtctttatttttaactactatgatcccagatttcttttgaaccacctgaacaggactcacccatttgttgtctgagattggacaaataatgcccacaccaagaagcttcaacatttctttcttcactacctccattatagggggtttagtcttcgttgtgcatcacgtacttggcttagctccttcttctaggagaattacgtgcatacatgtagcaggaccgattcttttgatgtcgacaacagaccatgcaatggtagatctttgagctcggagcaccctcaccagcttttcttcttgcacttggttgagagttgtagcaattatgactggtaaggtttcattctctcccaagtaagcatatttgagatgactaggcagtgtcttcagttcaagaataggaacttgtacaatggatggttgtaatttatcagttatgactggcaattccacataggccaccttcttataaagcttgttgaagtcattattaagtgcagttatgacatccaacatctcttcagaaaagttctcgtcagaatttaactccaagttctctcatttagcaacttccagattatcttcactatacagatctagcaccctttgggagaggtcatcttacacatcaagagaataaatagcatgaacatcacttggatacctcatggcctccaaaaggttgaatcggattgtctctccatcgaattccattgtcaaggttcctcctggcatcatctggtcttgtgtttcataatggtcttcccaacaaaattggagtggagcagggaatggaatcatc

SEQ ID NO: 254476 - DNA, 863 bp, Cannabis indica
tttgtgatccttagactcccattcaaggacttatagccatatccttcatcttccaaggttccaagtgatattaaattccttctcaactctagaatgtgcctcacattatgcaaaatcttcacttcaccattgaattgtcttatatccaccttaccaattccaacaaccctgcaagaaacatcattacctattagtactctaccaacattattagtttcttgataatcaatgaaagattctatgttagatgaagagaagagttgtcttagttaattattgagttatcattttatcctggttaaactgtatgttaaagatgcatatatagaatcaatctctcttactatctaaaagaagctgaaatttttaaaatgttcttcaaactgctatgactagacttaactcctttgtcaaactatatttattataaagtaaatatatgtccacgggaaggtgctagcaccataattattgaattgaggcaaaatttttggattgttcatttatttattttgtgtttactatttcagtgctttttttataaacatttaaaaactagcaattgaacattgtctgctgataaattatttcacttgtaaatgagttttgattcgggaatattgtactcaagtatcaacaatctttgggtagtatcaagttatgtgttaggctatttttagcctacgttttgtgtcattttttatatttgtttttcctctttgttattatatttggaatggaattacgcttgttttctttggtttcaggtttcacacttggaatgtattaattggtcgaatttcggaaaacaacaatccatagaatagagaaaattttacaagaaattaaagctgaaacttgaa

SEQ ID NO: 254477 - DNA, 599 bp, Cannabis indica
ataaaacaaagatggtaagtaaaaaagttgatgtaggcgtgtaggggtaaaaatgtaataaaatgtgcaaaatagatttttggtgtaaaaatttcttaattttttttttgtttttattatttttatatattatttttttcagtttttttttttttacaactattaacattttatggtgctcaatattatacctgatatgatatggtatccaataattgattagtaatattttttttatcttttgtgttttttttttcttataaatgatctttgtaatattttttatataattttttgtactattcttgttatatggcatcctaaaatattcaatgccaaactaattcatatccacaataaatgattaataatttttttttatcttttgtgtttttttttcttttgtttttttttttattaattcatataccaaactaattagttagcagttttctaaatcatttattaaattaaaatttataggagttgatattgaaatgaactaataacagtatgatactttttgtggtgcttgacaatttaatgtgtcctttaacatttttataattaatatgcacatatgtttattaacttcgatt

SEQ ID NO: 254478 - DNA, 743 bp, Cannabis indica
cttcatgaatgaagatagatcatatgtgtgttatattttcatcccaaatgggaatttataatgagcagttgcctctacaatattttctaattgtatagctcatatagcttgattaaatattaattttcataaagtattaattttagtaaaatttttacacttttacgttcaaatatatgtattttatatttttacggtattttataaacacgacatgaaaacaataaaaaaaccacatgaaactaacatgaaaataatatccaaataacataaaaataatatacgaaaaacaataaattaataacaaaaataacaagaatacaacataaaaataatatgaaaacatcaaaagattttattttctgtaaataaaattttaaaaacagtaaaaatataattttttttgtgtgtatttccgaaataattcatcgtacatttccgtacatataaacatgtaagggccataaattagaggccaaccctgacaaatatgggtggcaaattttaatacgtagggctggttccattggtgcatcactggagaaattaacaccaacattaattacctgtacggtggtcattggtcaatatcaaacttacttcatatctctatattagatacatacatatatgatttttatttcttaagcatttagaaaatctttttaactcatatttagatgtgataagatgatgatcatgtcagcaagattaggaagctcatcatcattactaccaatctt

SEQ ID NO: 254479 - DNA, 1241 bp, Cannabis indica
aaataattacacaatttagcatatttatttgactatgcaattacactataacagtataattggaggtaattaagggattttaattatattctccaccaattttcttagtcccatgagaattgaatgtaattactgaaaatgttccattttagatcttaactattaatatatatatatatattttgtaattactaactattttgttgaacaagaaattaaagaattcataccaccgtgtatccaaacacactttatattttaaaatattagggtgtgtttggaagtaacttgtaattactagggtgataattacacagtctagtaattacattatattttaaaattagatatgaagtggtaattatatatgaatttctaatatattgtttagacaaaaaagttaagtgtttacacaagaaaataattacttttattagttaataatttaaaaaggaaaagttatagtaagtgtaattagaacccctcgatcacctccaccaattacacagttataatgtaattacatggtcaggcaaacatgcagaatcatgcaattacctctaattacatagttagctttccaaacatgtttttagtgttacgaccttagtaattacagagttattttcaaacacacctatctaattttttgaaaaaataaaagagaaataataaaagacaccactaatgtctaacacgattcttggtgtctattagtgaaattaagtatcgaatctcatataatttaagacaataacttatgcataggttggctaggcctgtgcttagtgcccacctagcctagggcccaaaaaaaaatattctcctttttaatttacattattttttttttataaactttgaaaaataccatattttttttaaataagagcctaaaaatatttttttttctatgacccactaaattttagggctgactgtatctgtaggacatgacttatagaaggtgttggacactaatagtgccaatgctaaaaaaatagaattgctaaaaggcattactagtctctaataccttcatcggtgtcatactgctattggtgtaattaagtattgagtcttatataagttaaaaaagataacttttaagaaatattattaaccaatcataggaccctatctatagaatgtgctgaccgctagtgcccaatagtaatgctaaaaaaataggggcttttacaaaaatactaaattttggataaaagtttacaattttattg

SEQ ID NO: 254480 - DNA, 603 bp, Cannabis indica
agacggcaccttaaaaatgtaaacgaaacagtactttggagggttttcccaccaaaatatgaggttggatggttttttgtaagtaaattgatagttgagggggttttaccgcaattatcccttttttttaaggtgccactgcactacatttgctttaaaattttaatatatttttttttgaaagaaaaattttaatttctagttaattgtttcaatttctaaaaaatgttagaaaattgtatgatacaccccttttgttttttataatttttaggtgtgttttaaaatttttaattacaaaaataaaattaaaatttttatttttgaaaaacaaaattatgttttcaacaacttttgtttttcaattttaaaaataaaaaaataatgttttgctaattttttttttttactatttttatttgtttgatttttaattaagttgggtctcgatctaggattgaggttaggactgacgttgggtctgcatccggcgctggagttagggtccgagtctggcgctggagtctgggatgttcgaattccaaagtctatattagagtcagagtttaaattattaattaaaaaagtttaaaaaaaatttaa

SEQ ID NO: 254481 - DNA, 691 bp, Cannabis indica
aaaaaaaaaaaaagttgtatttggtgtaaatttttcaaatagaaagaaaccctaaaatgtaaatataaaataaactaaaaaaaaaaaataaaactaattaaattagaaacaaaaacataaaatatgagtttggataataggtttacaaaaatatggcatatcaaataccataaaaagtcttaaatgcgaaaaaatgccatagaagaatggcaaacctataattaccatatttttgtaacttttttacaaaatcccatatttcatgtaattttcactattttaaatgtcttacaatttctaccatttgaatttaataaaaattttgaaaatatcatcagaaataggttttagtaacatttaaaaaaaaataaaaaattattaaacatatatttttgtcacatttaaaatcgtcactataatttataatatacagtttatttttcctggtacagaaactatttttaatttgaaccaaaaaagaatgacattactttaaaacatatctaagattataactaaaataattctacaattaggacacttattaattttagtggtctaaataaaattatgtattgtacaatttataactaaacatctcatgatgtatgttttacagtctttttaaatagtatagtatattgtattgtagtgtttaaaaatggtgattaaattgttgaagaagaaaaag

SEQ ID NO: 254482 - DNA, 1074 bp, Cannabis indica
tttaatttaatttaagtttttgtgtttaataaaactaatcctcttttgctggacttttttattaacatatgattaaattttaacttttttttagatgagattaaattttaagtttatgtattagataatttggtaattttttattttaaaaaaaatttaatttttaaatatataagaattaatgataaaaaaatttgattatatttatttttgtttattttttatatttttaaaatcctttttaaatatttaaataataaataaaaaaaattaatgacatggaccaatgaacgagtgacacgtggacactaacctagcacataacggagaggtacctacggaagttccagagtagtgacggaaggtatttttaccgccaaaaataggacttaggtatttatctgctactcggcataaaacttaggtatttatgccgcaaattactcaatactaaattacattaataatatgacttgtgatgttagacattattagtgtcatttagtaattttctttgcaaaatacattaaattaatactctaagttcaattaatatcacaattttgtcttgccagctggcatggttttgatcgtttctctctaatttgttgaagttctgcgtgtgcgactggttttacgattggtttgtttttcggttccgattggtgcggcatcatcggtggagcacggtgtcgagtggtaggttccttggtcgtctctctcaggcttccagaaaggttcacgattgagtttgggattgttttctctcgggttttctgcgtgtgaagctgggttgcgactgggttttttttggtccggtttgttttgcgttttcactggtggggattggcgtcgactggcttggatcgtcttcttcgtctgtcactgttttggtgcggctgtgttatttgttcttctctgttttggtgcgatttatctggtggttttcttcaaggttgtgatcgttcatttggtgttgtgttttggtttgtttgtgactgggtttattctcttctctgtttgctgcgatttctaacggtggagcatggcgtcaagcagtcatgccatggagga

SEQ ID NO: 254483 - DNA, 822 bp, Cannabis indica
ggactaattatcatcagaatatttttccttggtcccattgtcctagtttacaaaatcactagggtggcttttccttcctctaggcctgggtactttcgtaccaatccttttttgtgcagtaagaccttttagagtagaagggtgtctgagcctggaggcttaaatggccttctatgcccgagtaggtctactggccggatttgtgtttttttaaggaggtacgggagctaaagggttctaagggtcacctacttttactttttccttatctgtactagagaacaggttccagcattagcagggttttcctattatttccttcgacacattctattgagggttcatcatctaaatctccctcatccagatctccaaacttagcttggaggcgagccatgatttcctccattctctgagaaaacttctcttgatgggctaacttctatttagtcttgagcaactctctggacactcgaaccactttggggtcctgcttatagtggtagccatctttctaatatccgtctttgacgtattctccattgtcatcctcttccttatttttagcatctcgatctttgtcgatgtggtcattctggttgttcaagttaccctctccattgtcagcgttggatgtatccccacctctcgcatcactcggttgggcgtgctctggcaagagggggtttacatcctccatgacagcgtcgaggccaccctgaggagtctttttgggaactatttttcaagtaaaaaccatggttgtagtagcactatgagtttaggtctttcttcagctctcaatgaaagaaccaaaatatt

SEQ ID NO: 254484 - DNA, 1037 bp, Cannabis indica
gtcagtctaaatccagtgaactgacaaatcatgggaattaaacttttgaacatataatcatgattatattccactgtggtgacgacactataatcatgaacaaatatatatgttctggacttaatagaatttatacattaaacatataatcatgaaataaatcatgtgaaccatgcaacataaaacgaattctgatcttttattaactagtaaatctgattatattgaaatggattttatttagggtacaaaatccaacaaaccgacacacctaaatttggaaacgaggtaagattagtataataatatgcatatgtgaatacatgtttagcgtgcatattttatgaatgcctcttagattacattagaatagcagtatcaatatacatagagttatattagataccgatgaatgtatgtttggcataaagactgattggcgttatcacatcggtacgactagagtattaagtataagctgatattatggttaatagtactgtcgtacgaacgttctggattaagactgtggtagaatatgtatctcggtgcttgacttgtcagcagattaatgctgaacaccaaagaccagtagggttgttgcagcctttgactcttcctgagtggaaatgggaggatgtcaccatggatttcatggttgggttacttagaacctctggaatgttcgattccatatgggttattgtggatcgatttaacaagtcagcataatttctactagtgaaaacaacctttatagtggatcaatatgcatacttatatgttaaggaaattgtaaggttacatggggctctgaagtccatcatataagatagagatccaaagtttacttcaaagttctaggaaagtctcttgtgagccatgagtacaaagctgaagtttagtatagttttctatcctcagattgatggacattctgagaggaaaattcaaatactataggatattttgcgggcctatgtgatggattttgaaggctcttggagtaagtatttaccactgatagagttttcata

SEQ ID NO: 254485 - DNA, 1098 bp, Cannabis indica
ttttttttcaaaattactgtatttttttaaaaaaaaatactgtgtactgtgttaagttttcagtgttgttctactgtagtttttttagttattccattgttgtttttagttgttatattttatgttctactattgttttataaaaacacaatatttttaaaataattttcatgtgacaatatttttataaaaattaacctaaatttcagtatttttataaatttccccttatagttcgatatagttcaattttttttctcaaaacaactttttccatttttttcttctttttttattgttacttggcaatgttttctattatactgttttttttttttattattattattgtaacttgcatgtagtgtcttgacttgaacatctattgaataatttttatttttttaagtgtaataaatgcataatgtgactttgtattgtcacattagtgacaattttttttattattattttcttttaactaaaattgtattatattttagaaataatataaatttgtgatttgattttgatacaattttttttttctttttttttttaatttttctttaatgaaaattgatgatgaaaaatttgatatcctaaatattaataccctttgatttcactttaatctcacttccccattattctctcttcctattcatcatcatcatcttcttcttcttcttcttcttttcactctttgtttcctcatgttctttctatctttatccattaatagataagttttttatttttttccttgttcagttcttcttcttcttcattattttttttttcatttttttatttagtttttggtaagatttttagttcacgtttttggaaaagataagagttagtgttggtttttttattctgattttccagaactgagcttgcaaatatagcctctattgcatctagtactgatactgtgcagaaaataattagttttttaatcattttttttatttgttttagtgttgttttacggttattttctatcattttattttttcgtacgtcgatttcactgttctagttccatctcgctggattaatgattattttttgggtgttctcgtggtgctg

SEQ ID NO: 254486 - DNA, 809 bp, Cannabis indica
taaattactgaattagtagcaaagttaaggtgtcatctagttaactgtcactatggactggttatgtatacactcttgtacacatgacacgtttatatttgtacacctaatattattagttaaaaaacgaaaaataaaatattaaaaaaaaaaaaataaattataaattttgaaataattttatatttattaaataataatattagatgtaccaatataaatatgacacatgtataaaagtacacataagcagtctatattgacatttaactatgaaaaatgaatgacaccttaaatttactagcagtttatagtagtttagagaattttatcgtcaaaatttaagcttaaaagattaaatgtaagtgaagtgatagttgagaggatttcatcgtaaaaaactctattctaaataaaagtctttgttggtttttgtagatgtctcagttaggagtgcgattgcttatatatggattggttgccgtgagggacgcaaagtaatataataaatatgttagaataatgtttaactgcgaagttttgtgtctcttcccctcttataaggcggaggtttttgctctgcagtacacggtggctcgatctttgtcgattagggcatggacaagcgctacattcttcactaactgtcaaattcttcagtctacagtgcaagctaatgatctcagattagaaatgctctcctatttttcttcatcttttcaaattattagatgtcaattctctttatgatccgtagaatgtaattggtacctttcctttctaccctttttttttttgttaatgaattg

SEQ ID NO: 254487 - DNA, 799 bp, Cannabis indica
tgaagacctgcttgaaaagcctgttgccgaggaaaaggaacctgatggagctacagaagcagtagtcaaggctacagtgcaagaatctgttactacagaaatctcaataacaaaagaatccgagcattcttcaaattcaatcactgatcctattcagagggaaccatcttccagggttaaaaagaatcatccttaagatctcattcttggaaacttggatgagagtccagagcttcaaaactgtgataaaggatcaaggcgattgaatttaaattgagaaaataacattttgtgcattccttgccacagtggattcatttgttgccgcgaccagaatgtagaatattcgaggaatcaaggagagtttagtgggcgcggcgagggctttggtggtcgtagccaagtcttccttgccgcggtagatttattcatggccgcggcgagatctgggcagagaggatagaatagttttaaggcagtgatctcaccgtggcgaggcatttcatggtcgcggcgagaatgtctgtactactcgagggaaaattcgtatttttgcaatatttgaaatttaaactgactctatttaaagagacttcgagttaggaagcgacggctcggaattttaatcgtagaacaatctaggacggcaggaggagtaaagtggcaatccgtattcattccactatcagtttcattcttctccttttatttcttttatgttcaattatgtttagttttattatggatatgagaatgaatatcatgaactaaactcccaatttatggatatgatgaatgt

SEQ ID NO: 254488 - DNA, 2087 bp, Cannabis indica
agaaggtactgggatatcgtgggtgatgaggtgatcaacatggttcaaaagttctttacttcggggagaatggagggccagttgaatcacacgttcatttgcttaattccaaaagaagagaatgcctgttcggtggacaaatccagacctattagtctgtgtaattttgtggacaagatattatcgaagatctttgctaccagactaagggaggtcattaacaagttaattttcccgttccaatcggcctttgtgccggggaggtggatagcgaaatcgtctattctgactcaagagctggttaataccataaagaagaagaaaggcaaaggaggactcatgaccttaaagctagatatgtttaaggcctatgataggatagagtggaattttctaatggaagttctcaaaggcaatgggtttgatgatccggttacaaatctgattttagagtgtgttagatctgtctctttttcggtccttattaatggtgtgccccaaaaaaattttatccccagaaggggtcttaggaaaggcgacccattatcacctttcttgtttctgctatgtcatgatatcctgtcaaagttgataatgaagaagcaggttgctggccagttacatggtatctctatttctcggtcagctccggaggtgagtaatctaatgttcgctgacgatacaattttgtttactcgggcaaatacgaagatggcaatgattatccttgagtgcatcaacaagtatgaatcctggtctaggcagaaatgtagtttgatgaagtcaagtgtcctatttttgagaaatatgtccagcaatcttaagagtgatattctcaaaattcttagtgttaaggagtgcaatggtcatgagagacacctcggcaatccttttgtgttcaaaagaagaaagagggaagaataccatttcttaaaagagaaggtgctaaagaggatagaaggttggaagacgaaactcctttcttttgcgggccgcacaacattggtgaaatttgtggctttatctttgccgctgtatgcgttatcaaccaacaagataccattatccacctaccatgagcttgataggataattcgaaaattctggtggacaggaggctcagaaaaggatcatttcttggctttgataggaggggatcgactgtgctctcctatgctttcaggggggctggggtttaggaagtttatagatatgaacaaggcattcttggcgaagctcgcttggcagatggctggtaatttagaggaccttggataaaatgtctctcggaaaaatactgtaaaaaccaacccttttggagcatgaatgcaaaaggaagcgagtcgaccttttggaaaggtgttttaaatacaagatatattttgtgcaacaatgggatgacgatagtgggaagaggagaatctatatacatatggagagagccttggattccatggcttgagtatcacgacttcatagcgaccatgaacaaagcgagacagaggttcccctttttaaaatcggttgctgatatttaaaatgaagatggtagctggaactcggtgctcatctctcaagtgtttggggagagtttgggaggcaaaattagtggaatagcgagattaccaaagactgaagctgatttattggtgtggaaaggggcaacagatggtatgttttcagttaaaagaggctacgaggccactcatctgccttggtctactgcggattctaatctgtggaaaaaaatatggaaccatggtattcaatttagactctcgttcatcatctggagagctatgatggggtgcctaccaactagagatcgtttgggattcgtagttgagaagatgtgtcctttgtgtgaattggaaactgaaaccaatctccatatcttttgggagtgccactgtgcacgtgcactttgattcagcagcccattctcttggatcatggggagtgtaccaagttttgctgatactgtcaaaggaaggattgagtggatgctttcaatcctcccgtcagatctcacaagcaatctcctgaagttcacgggttgcttaattgatgaagtgtggaaagctaga

SEQ ID NO: 254489 - DNA, 616 bp, Cannabis indica
ttgcctgattactgtatggagtgtggagttattggatatttttatcaaaagtgccctgtttttttagaaaaagtggatcatggaatagaaccagaccttgcttatagcccagaactgaaaagatcaagactgcctacgtcttcctatgaccagtatcgtactgattttcctaaaggcaatgcgtggtcactactcacaagattagcccgtacatcaatcactcatgccctccccaagcttcaatcgattccccaacctcaaccataccctttattagtgggtgaatcctccacttctgcagcagtcccacttcaggataatcaaacttaaaacattgcaaatgttgcggatcatacaattagtactgttgctaattctcacttggttcatagtgttacttctccattattcactccaccagttcttaacaatgcctccttcactatctccactgccactaaccaaaacaaagacataatacaccaagcatctgttgaacatggttcaaattcaaaagggaaaggaattcttacttcttgtaccagtaatgattcacttaaaataaatgtctatacaccagacattgtggaatatccatctactgatatgcataaat

SEQ ID NO: 254490 - DNA, 696 bp, Cannabis indica
tatggttcaccttgacctttctttctctaatttcagtggcaaagtccctctccaattgtcttacttgtccaacttgcttacacttgacttgagtagtagacagtattcttatgaagttttgagtttggaaacaaatagctggaaaagaactgttgcaaatctaacaaatctcagagagttgtttcttagccaagtccatatgtcttctacttcacctgattcctttatgaatctctcaacttctttgacatctcttgatcttagttatagtgatttgcaggggaaacttccagaaaatgttctcagtttgccaaaccttcaacaactcgatttgactaacaattggaatctcactgcttcttttccacaatataaccaaagcagcccacttaaggtgttgaagctttctaaatctggagtcatgatagatccttacctttgtagaaagttcaagtatttacaagttatatctctttctcaatcccatttcaattccgtacaactatcacccacatttcttgacaattgcacacaaatcacctccttagacctttctggtaatagtttaggtggtttcttcccatgttcatccattttaaatcaacagcaactaacccatttagatctttcttggaataatttcataggtgaaattccagaaatttgtagtaagtcaacaaaaaatccattctcgtg

SEQ ID NO: 254491 - DNA, 710 bp, Cannabis indica
agtgttatcaaacgtcacctaagtaatttaatttttttattttgtggttttttaacttttacattattaatgaatatttagaaagaggtgatgtcaattgtgagaccaatactagaagaaagcattaaagtgtattgtaataaagtgttgccaaagtgtttgagaatagcagacttgggctgctcctcaggccccaacacactcactgcggtctccaacatttttgacatcattgaagcctcttgccaatctttgaacatcaacacaccaactttccaagttttccttaacgatcttcctgggaacgattttaatgccgtcttccaatctttatcgagcttctatgaaaagcttaagaaagaaaagggtgacaagtttggaccatgcttcatcacagctatgccagggagtttctatggaaggctttttccagacaattccatgcatattgttcactcttcttacagcttgcagtggttgtccaaggttagtttattttaaattaaatcaaatttattacttttatcagagtttgtcctaagcattggtgggccaagtaagacttttctcagcgcatttatgtgttggcaagagtaacacttttcttagggcatatttgtgctggcaaaagttaaactttttctagcgcaaaaatgcgttggaaaaagtcatttttgctagcatttttcattttgtgatgacaaaagttt

SEQ ID NO: 254492 - DNA, 561 bp, Cannabis indica
ggtacaaatttcacatctacatagtattttttatacaaattcctcgttttagttttctaattgtttgatacacatttctcatttaattgttcatatctaacgattaaattattttataattgtttctttttgctaaagaaaagaaaagaaaaattctaaatggaatttaaataaaataaaataaaaactactttattataaaaatacatactatttctttagtaattctactaattttaatatttgtaacaaaaccattaccattctacatattttgaaaataaattatgtttataattttaagctattatatatttatttatttatttatataatacacatcattcaatgagtccaatatatatatatatatgtttttttcttacaaatattgggcaatattgcgcaaagcgcagattaattccctaattattattatgagaccgcgcaacgcgcggttatattgcatagttaattaatattacttgaacgatttacgtataatataaatcatagtacataaatttaaatattgtgcaggagtactttaaaaaaatatat

SEQ ID NO: 254493 - DNA, 550 bp, Cannabis indica
aattcaacaacaacaacaaaaaatccaaaaaaacgcagaacagcacaaaaacgatcacaaagatgaaaaatcacaaacccacacaatacacagtagcagaaaagccacgatattgaaggagaaaactattgaaattaccttctgaatggctagactagaagagactcagcaggcggtggttcctggcgaggttttggtagttgaagcttggatcgtcaagagtagcagcggcttcgaagttgagattgagagggaaatgccgaatggttaacggccgcattggcgcctaaatggttgtgaataatgtttcagaatgctgggccgggcccaaatatacaaacttgcaaggaataattacatattgtaccatttttttttaaatatttacatttttacaaagattgtttttcttatatttttacggttttctaaaaaataacacgaaaacaacataaaatcaataagaaaataatatcaaaataacaacaaaaatacaacaaaaaataacatacatataacaaaaaattaacgacaaatgaacaaaatttca

SEQ ID NO: 254494 - DNA, 453 bp, Cannabis indica
cttgtgagaaataaaaacttgaagtagacatccttataaaaaaaaactcaaagtaaacgtacctccattactattgcgacaatatgcgaaatgaactactataaattgcgtgtgtctctaattttttacttaaactcattatttatctcgtcaatctagcgagttggtgttgaccacttttcagcgtcaacactaggtatcgtattattaaagggtatcttagtaaaagtacacccattttattaaaatagaggttattttattcaaaattattagaagtgagttagaatgcaaaatgcacttataaaaaaagacccattctgccaattagtttctaaaaacaataacactaatgttgattttcatataaaatagaaacatgccattttgttcaatcttttcccaaccagttcctctaggtgtctcggttttggttttggtgtctctcggttt

SEQ ID NO: 254495 - DNA, 592 bp, Cannabis indica
caatacctccttttctaattacacgagagaactttttttttcaacaagattgcaacaattttatatttatattttttttctagatttgacactggttgtcaaatttttctttctttttttttccttttttttctaactcgctgtcaatctaaatttttttcatattatctcaattttcacactttttctcacacacatacaacaaattttccatccaaattcctcaaacaaagatctacttatggtataattagggttaaatctttggatatttaggggtttatcttttttttttaggtctcaatatgtgtagaaacaaagaataagttaaggctcaaaaatagtaactaggataaaattatagggatggcttgaaaggcacaatcgattcaaaaaatggctgaatgactttcctagtcattcataatttattattttgcttcaaatagcacgaaagcaaattctaattttttttcaaacaactttctacatgtcacaattagcatacagaaataaatttaattactagaaaattacctaatatgattccatgttcttttaaagcacataattgaaattagtcaagagtgta

SEQ ID NO: 254496 - DNA, 507 bp, Cannabis indica
taatattgaatataaaatgtgatttatatataaaaaaaacttctgttctcggtaaaagatattataccgtgaacaatgtcctcggtatagatgagttagttaggccaaaataaaagacaattaccgacaacatatctaacctttaacgacaacaatgtcctccgcaaagtttttaacgagaacatcatagttatccttggcagaaatatatttttaacgacgaggctctgacgaggactttttaacgagaacatatcctcgttatatgattttactgaggacatttggagttgtaacgaggacatttgtcctcgttatagactgtttttttgtagtaaatatttttggctttctaaatttcatacaccttacgtgtggtttttataattagtatttgatatatttttataaaatgtgtacatatacatatatatttttttatctaagagtaaatataatttctgatttaatgagaatatatatgggagattaaattcatttttaatt

SEQ ID NO: 254497 - DNA, 508 bp, Cannabis indica
gataaataacatgtaaagattcatttttcgtttcaacttaaaattaaacttaatcatggtcttcatattaatatcagagattgattagaatagagattttttaagattatggctccaataaatctaaattaatcaacaataagttgaatgattatgtaataatactgtaatagaacttgataaataacatgtaaagattcaaattttgttcttctttttttttgtttctactcaaaattaaacttaatttgtcaaaaaaaattaaacaaataaacataattggcaatggagtgaaccatgttcttgatattagtgtcaagtattaacagagttatttcttaagattatggctccaataatcctaaataatacttattattaaaagtataataatacattaaactataattattatttttattttcgtaatacattaaaagtattatagaatactcaataataatacttttttttgtgtaatatttattatttaataaacttaaaaaat

SEQ ID NO: 254498 - DNA, 732 bp, Cannabis indica
agttattaagactcttcaatgaaggctatatggcacgatatatagggaatttattagggaaaaatgaaccttttgacatctggcatctaagtaataagagtggagagtttgactatattttgaaaaattgagatagagtaagatcaggtggtttctacataggtagaggtataattcaaattttaaaatgataggagcttatgtagtcaaattagaaggaatcctcaactgattatagcctagaatgatctaaaaatatgttcatgctatttcatgggatgtacggttagataggacgttgctaaggattagttcttagtctataaatactattaatcaaagtcatcactcgtcacttgaaaatccaaacacactttcaatctttctcttcatttgcatcccctttagaccaaaaccattactctaaagtccattttttatcgtataaactttaccacagaagctataatccttcattccaaattctttctctatctcatcaaatataaagttcttgttgtctccaagaccattaagcctcttagctaaaattaacatcatcacctcgatcatttttttttctttcctcttagccaagatgtaccaagctatcatcacctccactaccaccattataattatcatttcaacatttccctataccaccatacatcatcatcaagatttgggtcatcacaaagtgatttcatttgcacgtggctgaaatataag

SEQ ID NO: 254499 - DNA, 657 bp, Cannabis indica
agataatgtgtttgggaaatattgctatgagtatgagacacttgttgtactataattatttagtgatttttttataatatttattaaaataaaataagtaaaatttaatattaaattatatttatattgttacacattctttaatatttttctttttttagtgcaagtaatgttattctgttatagcacttcttggaagacaagagaagatggacccatatgatgtgtgtatttatatatttatctgagctcggtgcagactcaaaaattttgttcagagggagccaaaaaaaattagagatgaaagtaaacttaaaaatgaagaaataataaaaattaattattaaaaaaaaaaacataataaagaagaaaaataatataaaaatattcacaaaattaaacttttaatttttaaaaaggaattaaatggtaatattaaaagttcaagtggagatatgccacccctctactgatttgagccatgcagaagtagatttattgacgcaagcttaagcaaattgttctgtagaacttttctgaagtgggtcatatagataataataatttctgttggccaaagatgagcactaatgaaaaaaaaaaagaaactacttttacgtcatgtttattgtaactgaatttttattaatatatttg

SEQ ID NO: 254500 - DNA, 3773 bp, Cannabis indica
tgctttaaatgtttttttttttaacttttttcccattagaattaacatcggtaaactaacttattaattatttatttttaataatttattaattaaaatatttcaattttaatttaatttaattattatttaaaatactaataaattaggtagattattttatataatttgaatttaaatttaaaataaattaaaatatattccattaatattttttatcattatttgaattaataattaaagtaaatgtatcaagttcaagcaaacgagatgatgatgctattacttattattttcaagtgtataaattggtgtccatatcaatagcaagaagaacacttttttgaagaatgatataaaaagtatatatacatacatgcacacatatatatatatttatgatcattttaatttgacccctatataggtagctacgctcctacttagtagatagctcatcatgatgatcatattgattcatatatatatatccaaacaaacaagcaatgcctatgtagttggattccaaaaaggcttaatggtgtcactcatatgaaccatattgatggaattatatcattgtgtcacattgggatatcacatcccccaactttggtttctatttttttagacagcatgtgcataatgtgtgttgtacacacttttcattttttactttctttgttcaattattcaatttataagtgcttttcactccaataaaagaaattgtgttctttagttatatttgtttagcccatgttcaatggaattctaaaatatttaatttatgaagatttaatactattctactccaactctaaaacctatcttacatataatattgtctacagtactgggacattataaatgtcactaaaacttattttttatttattaattacttttttctttctatataatattatagctttcaaatatatatatatattgccatttttaataatctaataatacaaaatattatatttaattaaaagttattttatgtaactttaatattgatggttagagtaaaaaaaataaataatataatgctacatcattttatggtaaattaacacaattataatgtttatggtccaagttgcttttaaagcactccaatcgtgctaaaaacttatattagcccttcaatcaactactttataacttaggtggcgtttggttggaggtaatgaaatagaatagaaaaaaaaggaaacaattttcattccattcttttatttggttacatattaaagtgttagaatgtcattccaatagaatggcatttccaccattttggtggaaagataattccattgtgaaatggaaggaaagaccattccaatgcttaatgagaaaaaatttaataatttttttatatattttaaattttattccatttaattcatattcctattcccattcctataattttattacttccaaccagacgccacctaaattattatacatttgcacaaagtccaataaaatacatctttacatgttattatggagagagcttaaatttttttattagtttcattactactttatttgattttactcactttttataattatatttaatgcataatataatattttattaaattatatattattaatatattaaaaatatattatttttatgatgtagataaaagtatttaaaaaaaaatagtgtaaaagtatgagttaaaatgaaaaaaaaaataaatgaagtatttaaaaagattatagggattacaaataaagtctcatatcggttagaaataagaagaataataggtatataaggatgaacatatttctattggtataagactttttggaaaggtacccaataataaaatcgtgagggcttaggcctaaaacggacaatatcatacctgagtagagatggttggtatctgataatttttgacaatttagtatcagagttagatcccaacattagctatgcgaatgaattctctgaatcatcttaaggtgatgtgccttggtgtactcttatgatgtctgtggatgtgctcagttaggcggtgtactctgattcggcagagttggcctagtaatgagcaagaatctcttaagatagtggtgggactccatgtaggcgtgctctccaacgtattgaaggaaagtacactagttggtagagagtgcacggattggaggtcttatttggtgcctggtacatgtcgaaagttttcttgacaataaaggtcagggagcgtgtttgtttgtaataacagtggtgcaagatggaagatcgtttgaggggagactatgtagtgttgtgtttaaggggaggattgttgaaaatacaactaataaagtctcatattggctagaaataaagaaaataaaaaggaacatgggtataaaaggatagacatatctctattaatatgaggtcttttaagaaagtgcccaagaataaaattgtaagggcttagactcaaaatagacaatatcatacttagagtggatggttggtgtccaatgatccataatagaattgtatagagaaattgatgtaagtactcttatctagttacacaaacttttgtggttctttctttcattctctctctcatttgatttatttaaatttatacttacttccatatataaacaataaattattatattttagtaataagacaagaataatttggagactaaattttattattattatttttacaaatattttattattatttgatttttagtaaatcttttattttatttggttgcatatattttattttattattttcactaaatttattaagatttgctaaacaaactaaaagttcaccaaataatagaaaataaacttaaaaaaaaaatggcaaaaatttagaaagttatttctcaactcaatattttctctttcttcctttatctcaaaataataatctccatccagttataatctaggctaatactacaaatatatattcaccatgtaaggaagtttcttaaattcatacgagcttttatttgtttattcatttaattattactagtttttttaaaccaactcatagaagctttgtgtcttttacatataaattcatacttatcgtatatgacatttcaatattatatattatgaatctctaacattttatatgtcaaatctaagttaattttgttaatgtttcaatttctttcaaaaaaaaaaaataaataaagaaattaatttctaaagatagatatcacaaggaaaatttcattaattgactataataatacaacctatatcaaaaattggacccttttattttttgtacaaattgataccactaattcaaaaagattcctaaaatacccctaaaataaaatttcactcattctctctgaatttccctctctctctctcactttccccctctctctctctgactttccctcttcacgaaccagaaaccaccgtcgacctcgacccatctccaccacgaaccaggaacccgtaaaccccaaacccccaaaccaacaaacccatctccgtcgaccatctcaaccacgaacctaacaaacgaggcaaacccaacccacgaacgaggcgaacccaaacccaaaccgaggtgtgtctctctcaaatttcacccaaacccacgacgaaacgtcgacccaaacccaaggaagaaccgccgtcgccaccacgagcaggacccgtcgccaccaccaccaaattcattaaaaggtaatgttttttttgaagaaaaaaatatatttttcatagattt

SEQ ID NO: 254501 - DNA, 502 bp, Cannabis indica
aaaaaattaaattttatgtttaattttattatctaatcaaataaataaatataaaaaactcttatttttacattaaatatatggattgaaattgttttattggtttaaagagataataaaagttgaagccattcggagtgcagaggtgtttgtttcctctttcggttcagtggtggaagattgcaagaagatctttaagagtttgtttaatgtttcgcttttgtttgttaagtattctgcgaattgtgtagcgcactttgttgtccggcactctatttccttagccgaacgtatgttttctattaatagtgttcctatggaattgatgtctatttttacgagcgattgctcgatttaataaagaacacttctttcaaaaaaaaagttgactttaagttaaatatttttgatataaatatatttttaatataatataaaaagtatttttttattaagtagctaaattaaagcataaaaaatgaaatcttttaatattttaata

SEQ ID NO: 254502 - DNA, 523 bp, Cannabis indica
tgtttccattgtctcggattcaaaggctttggtggatgctcttcgtgcgaaaagaaccccggactggaaattgtcggctcttttttcttctatcttatattgcttacttccttttctttctgtaatgttgtgtttgctaaaagagacttactcatgttgatatgcttgctaaggatgctagacatgttcaaagcggctttctgaactacaaaggggagggatttccccctgtgaatctcgacatcttttggagttaatttatcctgaactaaggttctttcaaaaaaaaaaactaaaatataataattaaatgtaaaaataaaaaaaaaaattaaaacaattagtagtagtttggatgggttaacccgaccaaaccgaccaatttgtaggttattattatttttttttcttaattatactggttgcattttgtaatcctatttttacattgccctgaataaaatatagcataaaccgaccaaactaagacacgtattaccctactctagtaacgaatgcttat

SEQ ID NO: 254503 - DNA, 559 bp, Cannabis indica
tttttttaatttaataaattaaataaataaatgtaagagaatgatttctcaattatttattagtaaacatgttattattagaaataatacgactttttgtagtgataattaatagccaagaaactttatgaaacgtggtataattaatgtgttgtttcatctgaatgaatatataaaatatgaatatggatcgaagtgttataataataaatataccacacataaagatttaatacatgaactgtaagactgctgtcattgacatctaaaattatcagtttgcacaaatcttgaggtacataacagctatatatagcttagcagattcaaattatcatctgataaacgattcccaaacattattttcttacaaattaaattaaactccaaatttaattttaatttcttggcaaccaatattaagttaagttaaggtagttgattgacttttgttttgtttttgttttaattctttaatttattttatcattaatttcgaatacttttattttattttaataattttctaaaaagtaatgtataattttttttatttatt

SEQ ID NO: 254504 - DNA, 556 bp, Cannabis indica
tgaacaatcatctttgttcccatcattattgggttgctttcaataacttcagataatttttcactaatgtcttgtaccaaagcaccccacagagtcaaacatatcgggttgaagctacaactgtgattgaaaaagaaatgacattattagttttgttatgtatcataattttaaatccatattaaattattgttagtgctctaataaagattatcattatgtatttgtatgttatattttatatatctgtcatcgattagatatatttcttgtatggttcgttgtttataaactaaattgaatgtaatgttagttaaaactttgtaaatgatttgttatgtgttatattgtggagatcctaagttaccttatggtttgttggagtatatgtcagatgacaagttcttaaacgcaacgaattcatggattggtttagaaatttgtttgccttcttcttggacttcaacaagttgtgtttttgagttcagcgtctagccataatggtaatttgtgtcagtttgaaggtatttggcaagtgttttgttgacacgggcat

SEQ ID NO: 254505 - DNA, 1065 bp, Cannabis indica
tgaccaacacaactagttaggtcaacactgccaacgtggctgatcataatgactggcctctaccgcctatggtagatcctccattggcacctcgtatggagggtttggccaacgtggagcaaccttcgggcactataactaactttggtccctagtattatgctagggaaatggggctagaaattggttagccagccattggcgagcctcacgtggatttgggagaaaattttgaataggccaaacttagagagattgtctgtaaagttggccaatggctgcgatgcattcgcacaacagagacgcaaattttttagatgtatgaatgactaagagtacatcctttgatctcatcaggtggaactaggctgctgtaacagagaagctggtgacttgataaggcggttcaatgaaagaactattgggagaggtcaggatctgatcatagatactctcgaagggagactagttgacagattgggcagggtctagtgacaagcagtccaattaggttttgcaagaactaggacggacctcccctgcttgaaggtggaaaagtcctgccacacagatctaatggcaggaacagccaaactctagcaactagttgcttgggggctggctagggatctctggctcaacaacacccccatttgtccaacctttggcaggccagccccttagtggtgcacatctggttggccaatagggcaagcttcctctctaaaatattcgagagcaagtcatcctaaggtcattttttgaccggctaggcccaagaacgggtggaaatatccaagacaacatcaactcgagaagtgaatacaatcaattcaagcatttagatctaccaaactccaacaattggtgtgatctactcctgtcaacacacaggctgcaccaaccaaacttaggggagaacaggaagcagacattgcctagtatagagcttgccgtaccatgcacaactgcccaggtaggcttgttgccatggccaatttcgtacctgggctggccagccaaagcctagatgctaagcctgggggctgccgcccttgacatctc

SEQ ID NO: 254506 - DNA, 502 bp, Cannabis indica
taattttttttataataaattaaaatatataaaacccaatttaatgtctagtatagcctcatactatactatggtgtggttgagtgtgtatgattcttgtgagattctaatcttgattgcatgtaatatataaggtggctttcttcattgtattttttcctttataaacatgaaaaaaaactgttaactttatacatatggatattcaagtgcattctgcagtactagcttgctagctttatgtaatgtcaaatgatatttggtacaattactattcattaattattcgatctataacaatttggccgcagagttaaagtacattgaaagtagttattgctaaaagacaaagtatatatttaacttctttttttcttttttcattgttgtactgatcactatatcctcttcgatttgtggtggaactttatattaaaattttagcatgtagatgatctttttcttatatattattacaatcataaatctctcattttcgtaa

SEQ ID NO: 254507 - DNA, 618 bp, Cannabis indica
actatatcctcttcgatttgtgggggaactttattttaaaattttagcatgtagatgatctttttcttatatatattattacatttacattcataaatctctcattttcgtaaaaatgatcatatccatatatatatatacaccattaatttcttttgggggacagaaattacattaaataaaatttctcccacaccatgatattgcataatagagcaaagcacatgcccaaaggtacaatgggacgaaagacccatgtttagctttgtttggttttggatcacgttccatattctatgaatttatattatatatatttacatacgtacgtgttataattatagctatattgctagatattttgaatctaataattatatattatagcattattaattgatttatttgatgggaataagtcctccaatttgtggtttcctcgtgcattattctatgtatatatgatggaaaatgctacataaattaaaaattagtttcattaaaattattgaaaattccaattactatccatgatgactcttttggatatatatatacttatagcttgtgactatgaaatgttataatatatttcatgttgcttctctctctctctct

SEQ ID NO: 254508 - DNA, 778 bp, Cannabis indica
acatgatttcgaatcaagcagaacaataccagttgacgttgaaaattcaaagacagtattgcatagaaaatgcaacgaaatgctgataaaataatgtgtgagaggtcaatgcaaaaaaaaatagagaaccgaacctagtttatttctttaaccaatgagacccaatatacctatattttttttttcaattagtttagatttatgtagtgtatcttagaataaatatcagaatttaaaagtaaattttcattatcatagtaaattatcttaaaatagaaattaactgcaaatacgaaaaacttgacacgtaaatttttatttaattataataaagattattagattaaattatttttttaataatataatttataatatatattcccacaatatcaaaagtttgttaagttatcaccttcgagttttttggatgacaaatatctatatatctatatataaatataaaagaaagaacaaaagagtttatgtggcattctagattttttttcattgtatttttaaaatttggtgatattttcatattttatttagaaataaacaactacacatacaaacatcaagtctcgcatagtttgaaaacacttaaggtattgtccacgtaagttataaataacacttttgttatgctactttcctttgtccaagaaatatttttaagggtaattgatttatgtcttacccaataaattttaaattttattcaataaataatttatcattcacatttttataaataattatatatctttaataatta

SEQ ID NO: 254509 - DNA, 766 bp, Cannabis indica
gattggtgttggtggcagcagtaatgggaggggttgattgattgctaagtgttctttgtctttcttggtgaataaccatagaaaagactttgttgaggggtagacaggggtcgattaacgatatttgttcacgggtatcatgataagtttcattcaatcctttgaggaattgtaaacttgatcatggttgatgtgatcttgagtttgagctacagctgcacaagtacaattaatttttggacgaagctagtttatttcgtcccacatagctgtcaattttgtgaaataggcactcactgaatcgtcaccttgatagagataggtcaaggtttcatttagctcaaagattctttggccattaccttgattgaacctattgctaagaacaatccacatctcggcaacagtgtcgagatacattagacttctcttaatctcaggtgaaacagagtgaaggatccaaaacatgactaattaattacatcttatccaagaattgtaaaagagagtcatgagtagggagttgaggtaatgtaccttccaacaatggagtcttgtttcgtgcacctacatcttgaaatctcttttccatggctgaaagctgtgatcggtgaggatcggggtagcaagaaccaaactagggtgatttgcattgctaaggtaatatggagaacgaatgtcttcatatgatggtccatcgattggattggatcgaaggacaatgacctgttcatgtgaggatcgatcgactagattgggtcaagaa

SEQ ID NO: 254510 - DNA, 836 bp, Cannabis indica
ccaattttggcactctgacatggaatcacgcgatggtgacacgtggaatcaactctatgtacctgctcgcaagaaatatgtcaaacagggcaccacatacactcgctcggacaaagtcctctaaaccgagcagtgagaaattcgtgcaacacgccaacacttagcaaattcagctttcgcatcgtgagtcatcaaagaaatccatataactttgggatcgaattatagagatatggcaagttgtccaaatcccacgattagtgtactctgtatttactatgcaatctgtatacttatctcaattgtatccaaaagggaaatactttcctcctaagcttatattcactgggcaaagggtcgaaacatttgtctaagaattcatattcagagatattattgtaagagctctaagaaaaggaaccattctccttgttcttaagtcaatacaaataacaaggattaggctattaccgaactgcttggggctgaacctctataaaatttatgtgtctttactctctttattatattacattcatattaaactacttttcgctcacaaattagactcactgtcattggctaaaagcgaggtcaacattcccaatctatacagtaatgtgcagggggtcattgtgcgggaaactcacctaagcagcttcttcttcggtgaaggagattatgggctctaggcttttgttgtttaaagattaaagattcagtcttcgatagctaggatatcacttttggcctcgtgacgaaatgtacgcacatagcggtccctagcatttttactttcgcctgcaatgtagagtttaccaataatgacccctaga

SEQ ID NO: 254511 - DNA, 913 bp, Cannabis indica
attagaattactcatgaatttataatacatatatctataaatagctcatgaattttgttgaacctagatagcttatcatctaactgaaggacatattttattaaactataaactactaaagtcagcaagcaacatgagacaaaactgtctccaaaaatttaaataataaagttataacgttctcaaacaacacacttaaagagctatagctttagcttgtatcattgaatactacacaccaactcattaacatattgataatgatccttaaatatctacaaaataaaataagataaaaataaataatcacatattaatattaatttgactgataaagattaagaaaattagttctattgcacctatgaatttgagctaagataattagttttgattacattataagttgttgtgtcctgtgcttttatatattacaattttcatattttctattatgaaacttttttatttggtaccattatgttttgtatacaggcgtacagcaatgacaattgtaagagaaaattatagggattaaaagtttttattataaatatggtacatttaagtttgatcaatttatatggtattgtttttatttttaggtctttttatagtatttgatatgtcatatatatgtaaatgtaaattagtttttcaaatctcatatttaatgtttttatttgtttaggtagttttatttgtcactgatgttgaaaaagtcgtcggagtttgctgtcggtgccgaaaaaatcactggaatagcggtcggtgccgggaaagtcgtcggggttgctgtagacgccagaaaattcatcgaaattggcattgtcgccagaaaaatcactgaaaaaatactaagaaaccgatttcttgatgcagaaactggcttcttgatgaagaaactactttc

SEQ ID NO: 254512 - DNA, 977 bp, Cannabis indica
aacaaattgcacagtcttcttctcctagtccatctcttattattattgtaataacttaattaattctagcgctaattggatttgtatggttcctataaatttgaattagaaaaatattatattatattatgtgaaaagataaataactgaataaataatattgtataattagcaatatatagccatgtcactttatatcttattatattattattatacaatatatattttttatatagaaataatatcacgggtaattaaatattcaaaatatataagtctctccaaacaatataactcatgaactcaatgaatcctccctacactcaatcgatgtggtgttacaattataataaaatgcataaaacaaaaccataattacttgaaatattcaaattcaatgttaagaaactctttagttatgatagtaataaaaaattttaacaatgaaatttgtcaaacatcattaatcgttcattgttgccgcgttggtcatatattcatgagtagggtcgtatgtattaatcaatatatatttgatatatatatatattttaaattaaactcttattaacaagaaccagagtttaatacaaatcaataagaaaagatgaaaaattatcaattaaagctaattcaccatccaccctaagtgcatgcacaactaattcatgtgaaacaagagagaataggaggattacaatcaaaatactcaaaatacaaataaaagtatttcatcaagattacaagaaatctagagaagaagaaggataacacacaaaaagcttgaccaaggctcaaggacctttgtcctaaaagtcatttcctccctcatatggacacttagggaaactctagaaatgctcttaaagatttatcaagcctcatatgctcagcctagtgtctaaggatgagcatatcctcacaaggttctaaccacaacaaatagtttcaaccacttcttatgcaagtgaaca

SEQ ID NO: 254513 - DNA, 1108 bp, Cannabis indica
aataaataacaaaaataagaaccacataaatattaaattgagtttaattatatttttgatttgtgtttgtcaagaaaacatactaattaataatccaaaaattcacgtaaaaaaaataaaaaataatccaaaaattgaaaacaagcatctacacatttgtgcagagtgcaattaaagtacaatactataaacaagcatctacacatttgaaaacaagcaaaatccaattaaagcacaatactataatatatacatatgctaatttaaattatattttctacaatatcacaatcaattgactttgtagagagtttcgtacaagtgacaacgtatacattatgcacacgaagacaacaaacaagacatattttcttaattcgagtccaatcattaatgcaaaatacgtgaaatacatgtttacactgcttcagtttaataaccactttattgatttcgaataatcattcaagacagataacacattcatcatctttaagattatttcttgtaccattatgttttctaaaaaatataataaattaataatatgagattatttcgcacgatcaataactatatattatgagaggttttccatcatcatggggatgatcatataactaataaagatgtaggtattatatgcttgtcgtaacaacctccatattaaagattaaagtgtcttaaatttttaaaagaatattaattaaatttaaatcattattaatattagttatagggcacatatctaattaatgaagtaatatgtgtgatgtatgattatccttaattgaaagatttatgttttataagtaatagttagttgttattacaaattgtaatcaatgtgggagtattactattgtcaataacaaccatattcatgtaattatatggctaataattttgcatcattatatagtaagatctagacttttttattttcatactatgttttaagagtttttgcttatgacaccctcacatattatggaaaactatgaataattacataagaaaagtaatttcaagtctccaaaagaacaagtcatcacactatattttgcatcaaaaactcaaaaacatgccaattctccatttaaaatgt

SEQ ID NO: 254514 - DNA, 963 bp, Cannabis indica
aaggcgcatgcacgcatctcttagagcttcccggagcttggaagacacatgcgcatcgcttttttgtgtgcgaaaggtcactaggcatacgacacgtgttcctcaagcacgtgtgtgaaaggtcactagtatcctcaagcacgtgttcctcgccgtccatacacagacacaacgaggtgcaagaggtgttggggcgagccgacggtgctaagacccgatgcatttacgatgactaactcataaagggtcgtcacatataatgaatctatccatcccaaggctcgagcgctagtgctcaagcgagggccagatccattgttgatgactacttcccctacctttgtgctgagccatgaagttgatcgaaaattgatcctgtaatggcggcagctaagaggagaccattagtacctcgacgtctactgggcctctagtccggcctggttatggtactgtttgtggaggcaggccattttccgcaaagtttactcagaaggtctctgtcatcacgatctaactacaaccctagagttacatcaaagaaagtaaatcgtgccattaaaaactagttagcgaaactctaccaaagtaacattcatcctactaggggagtctttgccaaaaaagctacaaagtgccttgccatccattggaagaaaccgactgcccaggagatcctaaggcgcatgcacgcatctcttagacatcgcttttcatgtatgaacggtcactaggcgtacgacacatgttcctcaagcacgtgttcctcaagcacgtttctgaaaggtcactagtatactcaagcacgtgttcctcgccgtccatacacaaacacaacgaggtgcaagaggtgcgtggggcgagctgacagtgctaagacccgatgcatttacgatgactaactcataaagggtcgtcacatataatgaatctatccatcccaaggctccagcgctagtgctc

SEQ ID NO: 254515 - DNA, 705 bp, Cannabis indica
acaatgagaagtaaataaaactactgtcttatatttcacataataagtcagtcgtagcaactccaatcaagactccgcaaccatgcttgctaactcaataagaactgcaatcatgttcgaaggccaaaacaagaaaattcaaaaagaaagcaaaactatataacaacaaaggaaataaaaataagggatcgatgactatgataccaccaatggaatgttgttcccaaaacaccaccaccattgcaggcaagctttaattatttcacaagagttctatccagtaaagtcaaataagtactgaaaaaaatgaaagcatatttaccaaatgaggaaaacatacacgggatgacaatcaatttaaaaaggggaagtaagaaaagttgaaattcttaggtatgtggtaggaaatcaatgttgactgagaaaccatagcagcgatctccagaagctgaaaaattaaacaatgcattcacatagagaaaataccatcatatatatatatatatagagagagagagagagagtcaatttgacaatgagaagtaaataaaactagcattcttaattttcacaaaataggtcggttgcaggaactccagtcatgactgaaaccatgcttgctatcttcataagtaataaattttgttccaagtccaaaacaagaatattcaaaaaaggaaaaccaaacaatcaattatacgaagt

SEQ ID NO: 254516 - DNA, 839 bp, Cannabis indica
aagacccaaacctagatctgcacttggacccgcactcgcacccagagtgggatcggaacccaggacttagacccggaacaaaacccagactcagatcaagatcgaaacttgggactcggacaaaaacttggacccagaccaaggaccctaacccacacctggagctcgatctgaacctagaccgagatttggacccgaatccaaactcggaccaagactcgaaccccaatacaaactcgaactcggaatcgcaattggaactggaagtggactaggactaggaccaggacccagacccaaacccaaacccaaatcaaaacagaaccgagacccaaacccgaaccgtgactaggaaccaaacccgaacctagaccacgacccaaacccaaactagaactgggaactaggcccataattgggatagggaccctagcaacggaggtaggaccaggacccaagacacgaccccagacctgaacataaacataggacccagctcgtgacccagcacccgaaaaggaaccagttttcgacccgagatcgggatcaggatctggacccggggctgggatcgaacctgtactcagtgtctagatatgggacccagccccggacccgaaaccaaaccagggcccgaactagaatctagacccggacccaaacccagtcccagattaaaacctgaactcgaactcgtaccctgtgacctgaaattggaaccgaaccggaagtagaccgggccccgaaaacgggaccccaaccaagacttggacctggagctagaaccgtaaccggacttggacctagacccaaaaacataaccagaccaggacccggac

SEQ ID NO: 254517 - DNA, 724 bp, Cannabis indica
ctttatacaactactagccacaatccatatatgcataagaaatttttcgatatttatatataaattattcaataataaatattaataatttaatattcattcatatatcaaaatgttcagctctttattaataatagaaacgtctgtataggcttttcagggcataaaaaatcctaacaatatcctaagaatctcccactttccctaaaagcaaactgggcacctcctttagtcccatattagttatatgacccataaaattaagatgtcaatggtagcgtctttgtgaatggatttgtcaggttatttctgatgtgatcttcaagaccgtcatatcatatctgtctactatatttcttattagatggtacttcctctcaatgtgcttacctctcttgtggctccttaattccttggagttggccaccgctccactgttgtcacagtagagcacaagtggtttctacttctggaactacttccagagcagtgtagaatttcttcaacaaaatcgtttccttagctgcttcacaagcttctatatattcgacttccgtggttgactctgcaatactggtatgtttaatgcttcttcagagtacaactcctccactaagagtaaagactagcccaaatgtcaactttcgactatctttgtctgattaaaaatttgaataagtatatctaataggatccttctggttctgggtactctaccaatttc

SEQ ID NO: 254518 - DNA, 1500 bp, Cannabis indica
  modified_base (1395)..(1395): a, c, t, g, unknown or other
caactcatgagtgagcaacaactgttggggtaaggataaagtgagtaaactagatttttgtgaacactgcatacttggaaaacattacaggttaaagttcacaacaggtactcacaactctaaaaaaatacttgagtatgtatattctgacctatatatggggtcctgagaaatttagtacacatggtggttcttcttattttttaatctattgtggatgattattctaataaagtatggatatatctacttaagagaaaatgatgcttttacaaaattcaaacattggaaattattagttgaaaactttactaatgaaaagctgaaaactttaaggactgataatggtttagaattttgtaataatgaatttgacctctattgtaaagaaaatggcttgcagcgacatagaacagtgaggattacacatcagcaaaatgaggtggctgaaagaatgaaccgcaccatactgaacaaagtgagatgtatgctactttagtcaggattatctcaaggattttggagagaagctaccttgacagcaattcacctaatcaataaaagtccatcaagagcaactgaaggtaaaactcccgaggaaaaatggtcaggtaaatctccagacctttctcttttaaaagtttttggatgtgctgcttatgcacatcagagtataggaaaacttgaacctagaactttaaagtgtgtttcttagcgtaccctgaaggggtaaaaggctatagactttgggtaaagaaaaaatggagatttaaaactatgaatagtaaagatgttatattccaagaatatatttttccttgtttacctaatgaaaagtcttgtgcgagaatagaagatactaaccctgcaggtacaaacctagaagttaaaacaggttcgaatcaagtgaaacaaaatggagacacaccgggaatggtttaggtggaatcaaaccaaaaccagcagcccgataacaatggtcaagggagaggaactgatgctcaacaagagatcagggatgaaaacaccgaaaaggaccttacaaactatcagttgacaagggataagactaagaggacttcgaagcctaatcagaagtacagctacaacatatggagtgaagaacaagcttatgcacttctaacaaatttggaaatggatgacatggaaccgaagacttataacaaggcagcaaatggaaagaactctaaggaaaggaataaacacagagaagaagagaggggctctcaaaaagaataagacctggattgtgataccaagacccgagggtaaaagtattgtgtcttgcaagtggttgttcaagcacaaggaagggagatctaaaagatgagcctataaggtacaaggctaggctagtcgctaaaggcttcgacncaaaaagatgtatcgatttcaatgagattttctctccggtggtaaattataaaacgattagagtggtcctaagcttagctacacagtatgacatggagatagatt

SEQ ID NO: 254519 - DNA, 1491 bp, Cannabis indica
tagtaagacttttaacctaaattttgatacctgggatcccgatctgtatggttattaatatataaattattaaaattaatttccgagtttattattataaaatgcgggcgttacaaatgtgttgattgtttatgtatcagatagtacccccaaactttgatatatacatcatggtgctctttgaatttttatccacgtcaggcggtatccgttagtaaaatttgacaaaaattcttaaatcaaataatctcaaaatttaatttgggagaaagttttaacaatctgaaaagttcgaggatacaatttaatacatgtcaaaatttagaagcaaaaatcataaattagttcattaggaagaaaatacaattcatagttcaattacaaacaaaaaaaaaattgcacatgggaatatatgtatctagggcctcttgatgcccatgatgatcaaattaacgaaattgaagatatgatcataccatttattttaatcatttaactgaaagaagggaaaaaaaaaaacttgtgcagtagtactaatatgtattaactttgcaatagtactttatagagatctattaatatgatcaatatattagatcatctttttatgaattataatatggctagctaatacatatatgtctacaatagatgatcactaatataattaaatatttagtgataataatactctaattaagcttacatataggtatacatagcttaattaactaatcaattagatagctagctatatggttaggtccaagtttatgtgattgtgatcataagttgtggaattattattagaatgggaagtagtaggaggaggaggagtttcttgtgaagtagtacttgtagttgtagtagtggatgatgatatcaatgagagctcacaaagctcattacagacttccttttcctttttcttacgcctattattaatatcactactgctgttaatatatagtgttgtaacaatattaatgtttgttgtatcctgtaaaagaaaaaaaaaaattatacatagaaattttatttaagaatacatttaaaatcaatgaaaatttaaactatatatgttatacctgatgatgaatagcctcattctgggtggattgacattctatttccccattattattagtatgatcaaaatccctccaatcatttctcaactcattattatttcctaatgacctgcattatcaattcataaatacaaataaataattaataatttagagatagagtaaatgatgtatgatgggatcaccccttccattcaaaaagaaaaaaggaaaaaaaaaagttaatctttttagtaatcaatgaatttagtaatttatagtattttttttaccccttttataactaaagataatacaaatttaaattattggaaaatatataaaagcccacatatggggaatcagacaaaaataatcgtcgatcgatctagctaaaaacattcatagaatataatgattg

SEQ ID NO: 254520 - DNA, 1078 bp, Cannabis indica
atcgaaaaggacaaaacagaaagacttattggcataaaacagtcttgatttgatctcttcaaaatcaaaaccactataataattttccccaaagccttacttttcactctatgaaaatttgttcattctcagtgttacagcaaaaacgatggagctggttccgtacatatgcatatatatatatatataaatattaagaaatgcatcaaacccagaaaagaaaatctatcagaaaacccagaaatgaaaatatatggggaaacccaaaagtgaaatacttgagaacaacttcacagctagcagaaaatgtacctgagagaattactagttgagaaggtcgggggagagagagagcaggccaccggtggaaggccgaactgcggagggtggaggtgggagacggagggagtggagtgtaacagtgaacctgtgaaggagagaagcaccgagttcgaaggagagatataggtgtgatggcaatgtatgtaacgataatattgtaataggactttcttttttccaataaaatatagggatatgattttgtcctacggaatatattttgtggttacattagatgggtctcagggtacattaaatgagtgtcagagtacgtttttactttttaacattaattactctagatcgatctcagccgtcagatcaaataattctctcatctgacggctgtcgtacatcacggattaaaattcgtgaaagtacaataacgagacaaaatattctgtattaaattatacatccaataattaaaattagagtttttggtgactaaactctatcaactattgttttagttgtatttaacttttcaagttcaaattaaatttaaggtgtcatctcattaagagtttttagcggctaaactctttcaactatcatttcacttacatttaacctttcaagtttaaattttgacggtagaaccctccaaactaatgaactattagcaaatttaaagtgtcatccaattaactactaccatggattgcttatttacatactcctgtccacgtgacacttttatattagtatatcgaatattattatttaaaaatta

SEQ ID NO: 254521 - DNA, 524 bp, Cannabis indica
gtacctttaaaacatgtatgtttggccatgtgtagtggctcatgcctgtaatcccagcactttgggaggccgaggtgggcggatcacctgaggtcaggagtttgagaccagcctggccaacatggtaaacccccgtctctagtaaaaacacatgaaaaaattagccagggttggtggtgggtgcctgtaatcccagctactctggaggctgaggcaggagaattgcttgaacccaggagttggaggttgcagtgagccgagatcacgccactgccctcccgtctgggcaacaagggtgagacttagtctcaaaaaaacaacaaacaacacacacacacacaaacacacacacacacacacacacacacaacaaaaaacatgtatgtttgtttaacaaatgttaggagcatcagtagtgaacattccgttggttctattctagaattattgtctttggatgaagaataaaaaattatatatctaaaggaacctaagaattcattgtttaaaccctagcagtatac

SEQ ID NO: 254522 - DNA, 515 bp, Cannabis indica
tattgtaacattattcccatatttattctcaaaaaagattaaatctggaaattcctgatgcaacttcacttcgagaaggattataggaaaattcagcttatccctttccttggtggtatcatccaccattaatggattccccgattggcctgcaatcttaaacaataatttttgcccccagtactttatctctagctcttccaattgaatccaaatggggattgccttaatatcttccttcttaaagttgacattagggtcccaagtcttcatgatcataggtcttttattgaagaatacatatcctccattcaaagcactgtctccatcctctgtattataaaacctgaaaatgaaaattccatatgataacattccaattttatctactttgtccttccaagtgcccctaatgaatccctccaacaccgctaaaagaggattggctcctagtacatagtaaaccattgaagattttcagaaggccacttcctcttctatattatcaaatgtta

SEQ ID NO: 254523 - DNA, 568 bp, Cannabis indica
aaggagggttgaagacgtgtcgtacctccagtgatcttttacgcatagaaaacattatgcgtgcgagagtcgtgttgaatttttatgaagcaatctttggcttccttaagggaaggctaaagttccataaaaattcaagcaattgcttttcttaaaaagaccaaaggatgaaacatcattgggcatgtgatagacttcaagtagtccttctctttcgagaaggagggtttaagacgtgtcgcacccttagtgatctttcacgcaagagaaaacattgtgcaggcgagagtcatgttgaatttttatgaagcaaacttcgtcctccgtgaaggaatgctaaagttgcataaaaatttaagtgatgacctcgcttaagaagaccaaagggtgaaacattactgggtatatgatagacttcaatcagtccttctcttttaggaaggagggttgaagacgtgtcgcacccgcagtgatcttccatgcacaaaaacaacgtgcatgcgagacatgttaaatttttatgaagcaaacttcaacttccatgaaggaaggctaaagttgcataaaa

SEQ ID NO: 254524 - DNA, 1296 bp, Cannabis indica
atctcaagtcataatctttgaccagctctaaccatcgccgtcacctcgtttttaggtcattctgagtgaaaaagtacttgaggctcttgtgattgttatagatctcgcactttacgccatataaataatgacaccaaactttcagtgcaaaaatgacagctgccagttcaatgtcatgaggaggatacctttgctcatactctttcagttgcctagatgcgtaagcaattactttcccaaactgcataaatacacaacctaacccctgtttggatgcatcgcaataaaacataaaattttcatcactgaccgataaagttagcacaggagcgttaattaatctttgcctcagttcctggaaactactcttacacctatcaatccacacaaacttatagttctttcaagtcaattctgttaagggtgtagaaatcttagcaaacccctcaacaacaatatgaaggagttcctcgaatgagttgacaatttcataaaattggaggaagtcgtccgaaaagcccaaatagaagggcaagtcaataatagttagtctaagggtgcaatgcaaccccgagacctacctaacatgcaagctagtacaagcaatgccagccaggcctccaacaataagaataatcgaggaaagtgcaaaacaaccgttctggccgaaatggtggcaaaaaagggaagtacaatgcttcccttacaccatagaaccaaaatgagaaggaggagaagtacacatgcttcaccctcctaaacaagactcctgagactatttgcatggccactcaagttgttgtcccatacaagaagcctcttccaatcaagaatgacatcaataagagggacatgtataagttctgtcgatttcacaatgacttcggtgatgacacaaacgagtgtctacatttgaaaagggagattgaatttttgataagaataaacaatccccacttgcattattatgtctaaaatggccaagctcaggcacaagctacctagaacggggacccaatgccaccactagtggtgagtcacctaaggttcataataggtggaccccacatagaaggcaaaacaagcaaagctagggtgcgctatgcttggactctccgccatgagcaaaaaagtgacatcctagttgtcgaagaaagagactccaagcaaattaggcttggagagcttgccatctcttttattgaaggatacgctgcccaggtcaggttccctcacaaagactctttagtcataactgcacaaatagggaacatgatagttgctaggtgcatggtt

SEQ ID NO: 254525 - DNA, 1043 bp, Cannabis indica
aacatttgcaacatatacctacaagataacaataaaatattaatagagcacagaaacactaaaccgtaattagctggtggaaagaaaatagtaaactagctttaaaaaagaagagaaataacttaccctcacaacattttgtgcttccctaccttgccgtcccttagagatagcctatgttcaagtaaccaaaataatgaattgatatgagcccaaaaggttaatacagtttaactttgagattcttcaaaggaagtttgataaacaaagaatattttccatgcaatggagaaactacaagccatgcttcaaaagcacttcttgcaatcatcatagttcttcgtaaatgtttctaatggcagttcaatacaaattatttggaaagaaaatattcaataccgataatgattaatcaggtcatgaagcagcacactgtttcactatttctcttccattccatatcagtcatccgaaaaggaaaaggatatattatgtaaggttacttgaaagaaaatgttgaaatatatacatatttgaacacaatttcccttttgttttttcatctttgtccctacagaagaggcacattgaaggaagtagaagaacagatacctagcatcaataatcacaaggatacgacagatacaaggttggtgacatttatgattccaaacaatagaccaaaggccaatcatccattacttaaatgtgaaggcaaactaaagaaagtaaaaacccataaccaacagcaaacacaacctaaaagattactatggacacataccatttggcctactgcagttgtaatgacagcaggtgtgctcctatagcacagtccaggggcctcagtcactgctgactgttcaatcacctgaagtaaatttgaggcaaattagtctttggcacaatagtttgaatcatatctcagatactataggggaaacttttctcatatccaaatattgtgaaagctagtatcataatatattggcatttaattacgggatacttgcagcgaaactcctttaatatttgcaattgtt

SEQ ID NO: 254526 - DNA, 694 bp, Cannabis indica
acgtttttgaccacctagtatatatatatatatatgaagacaaaaacaagttcttttttttttttatttttactggacatccattcttatgttatagactagtcagggagtacgtgccagaggcacgtaatacccatcaaaatctctgggttataattttattttttacattcatcaattatatttaaataattattaaaaaaaattatgtttaatttaaataaggacataagtgtggtataagttcgcttgttaaaggtaaggtcactaatcatcctgtctaaatgtaagttcatctgattttctccaccattatctactaataaacaaaatttagaaagaaaaaaacgaaataataactaacaaaaatttatgaaaaaataaaagaataacagcacaaaaaagattaatattatatgtatcctcatatagtttgtacactattatatacttattgaagtaaaacttaaggaaaaaataagcaagtaaaattcattaaaaaaatacaagaaaaaaatggtaaaaaaatgtacaaaaaacttaaaaaaaaaaatagtattctaaaaaagcaaatggagtaaaaaaagatgagagatttttttaagaattttttttttcgagagattaaaaaaaagacgggaaaatgacaaatattaataattcgtaaaaataaaaacaaaacacataactccaa

SEQ ID NO: 254527 - DNA, 514 bp, Cannabis indica
aagataacttgggccaagcccaaatttggcaagaccttctaagaaaatatctttccacctcgttcaggtgagcttcctccaaggatcacccgtactcggaagcaattttagtaccgcgctttcgaaaggccagacatcgtattcttggaagcctagaataatttcctttttttatcaaatccacaaagtaaggagttaacttttcttaaatctcgaccagaagattatatcaagttaaaatgggaaactacttaaaataaagattaagtaattaattcacattaattatccacaattatagaacacggtaatgatgatttgatcgtgttcaattttcctagtcaacacacctaatatctcatgggttgggcctcacgaatacatccctaacttgtgtgtttttttatgtacccattaaagggaagagagaaactaaatataattcttataaatactaaaactttaaagtattttgaagacattatgactgcatttttcattttagtttgatttt

SEQ ID NO: 254528 - DNA, 786 bp, Cannabis indica
tcattttttatattttttttgttggaagactttttttttcaatttttttagccaatagaataacttcaacccatataatgtaaaaataataattttttctagttagatagaaaattaatcataaaatgttcaaattttcttattattatctattcataaataatactcattaaaaatacatccatatatatatgtagatttatacacttacatttttgaaaaaaattaaatgatgtgaaagaattaaatgatgtatatatacacttacttttttggatctcgatgaaacacttgttgcctcagaatttatggaagtaacagtagtattatgctgcatattacagtaaaacaagttatacataagaatattaataaaaatggaatagttttattatctttgctaaacaaaaacaatagatagttggtactagctagttcaattcaaatgttgagtgtgtgaaaatttgtacgcgaaggttgaggaaacaatcaaatgcccactgtatcaaaattcaaatggaaaatatagttggtatatattgatatcccaatagagaacccaggattatatatacaatatataaatgtaaatatgtatttttttatataggagaagtgaaacttattttattctacatatataatttttatttaattttttgtaatcaatagaaagaaaaaaagaagaagagaaaaaaaagtcacagcttatctttcattgggtctgtgcatatagccttttctaaattggtggacatcattactgtccgacgtcattaaaaaaaa

SEQ ID NO: 254529 - DNA, 1007 bp, Cannabis indica
aaaaactgcatgtgcgggttggtttgaaaaaatggttaaaaaccgcaccacccgtactgcgaacactcctatcagacccagactcgacgtggacccgggacctagacccggacatagacccagacccagacccagtctgggacccgcacccgcaccccgcacccggacccagaccccggaccctggacccgcacccggacctagacccaaactcgggcccgaacccgggactcggacccgtacttgaacccaaaccccgacccggacccggacctagacctaaacccaaaacctgagacgtggacctgaacccggacccaaatttggacccagacccgagacacagacccaggacttggacctggactcggaccccgatccgtacccagaccccgaccccgaacctggaaccagacccagaccccaacccggacacgaaccctggacctagactcagacccaggacacggacccgggaccctgacccaaatcctagacctcggacctagacctagagcaggacccaaacccggatcaggatccaaacccggcctcaagacccaaacctgtagttggtgttaaaattaagtgtattaaaaatatattataactttacacaatcaattaatacaagtcaataccaaatattgtatcgtattaaataatactaatacaatacaatacaacacaatctctaacacaatataatacatgacaatacggcgttacaaacgagccctatatgtacacactacaagaattaccgtttttaggggcggaggggtccgctggtaataattaaaaaatccgccggtaataagtattagcggcggggtccgccggtattgctccgccggtaataccccgtcgctattaatgattaataccggcggactgacacgtccgccgctattaataattaataccggcggacaattagcggcggggtccgccggtatagggtttccactgacatttaaaaagaacattattaccggcggaccccc

SEQ ID NO: 254530 - DNA, 699 bp, Cannabis indica
attacttttaaattttaatcgtataaccctaacacggaacacaagctaagccaaatctaatttttaaatatgaatttctcatcccctagaatccatatgcgattacagctctagaattccctaaagtattttcaatcgattgaaattgactttctatctccttaagcaaaatcgattcttgaagtcgactttcagttctcatattgcaaccaagcttctccaatggaatcacaggaatgctctgttcattcctgaaaaaaattgttggatctacccttctctttatctccaccaatctccgaaaattctccttaaaataactaaccccaagagcatgagcagttcgataattattagtcttccaatcgtgatcgttgattcccaaatcaagatctctgtagttctcgtcactatcactgttcctccatagccttttggaaatccatgtaccaaatccaaaccatccccttcactcgaactaaaatctccgtaccactagtccaacacgatcaaatacctcttactcgccaattcttggcgaagagcacaaatgagcccttttaggccgtgattctctaccaccaactcagtcacctcttctcccactccgagcgaggataagatccgtttggctatcgctctcttgtggctctttttgtatttcatccgatggtgcgggcatggagacccaaacccttg

SEQ ID NO: 254531 - DNA, 470 bp, Cannabis indica
ttgtggtgaagaatgattcagattaggtggttgcaaggttagttaagccggttactggtttagttgcccctgtagtagctgaagccaaggttgtttctcttgcagtcacatggtctaaatcaattaagctgcctgtccaatcctttcatactaattgtaagagtattgtagataagcttaataattgtaattggaacaatagtgtttgtgatgatttgttggtagatgttgaaaactctttgtccttcagtcctagccctaaagttgtatttgttagcagggattttaatactcatgctcacaatttagcaaagttgggcttaggatttgataaagagttgttctggaatggttctttgccttccttgtaacaacttgtttgcatatattattttaattatataattttttaaatttagggtaaaaacataatttagatttcataaaaataattaaatattacacaaaca

SEQ ID NO: 254532 - DNA, 674 bp, Cannabis indica
attgttgcacagcaaacacaacctagaaacagtggaaaccacacagacgacgaactgagcttaagaagatgaatagcttgactgacagggtgggtgaattcaaatgatggtaaaaacagatatttattaccaattagagtaaaagacgaaaacacccttggagctatatttcatgaagcccaagcccattaacaatagtaaaaacacatcagcccaaacctgagatagacaatatgtaaaaaagaaaacaaatggaactaaaaattggaaaattaccacatggaaaacatatactcaacttaaaaaaaaatagctcaacagagacgaacaccaatgctttgaaaaacaatctgtagaaggacatctacacaggtcactaacacttaaagcacaagtaagccagtcaataaaatttgagaaaatacagggagcaatatcagatgtatgaaaggataataattgacacatgatcaaggatgaatcaccaaactaccatttgtgtgtgaagtgacctcatgtgaagcaccaagaagttaaccaaggcacttcactcatctcaaaagagacactcaaaagagaagatagatgacttccatctttttttaatttttctccccctttttcttataattgataaacagtcactctcttggttttgccaaccagttgaggct

SEQ ID NO: 254533 - DNA, 722 bp, Cannabis indica
aagttgatagttactcaatgtgtgtggtggctttggctagagaccacaaggagtcggttttgtgggtggctagcaacatcctcaacttctttgaccctctcattggagacgctggtacctgtttgctagccctagaatcagcgaccctttagaagcattcgtttatgataattgagagttattctgagacggtgatcaacacgctaaagggaactacttccttttggggtattggtaactatgtgctttaatgtaaaattctctcaaccttttgactagttataattttttttatatctagactatgtaatttcacagcccataatatagttaagtggacttttacctgtaatataattggtatggtcaatccgtcgtctatacaagataacttattatgtaatgaccatgaagtttaaccatttaagctttaatatatttacgcattttattcaaaaagaagaaagaaaaaaaaaaaaaaaagagaaagagagagagatcagcaccacaattgtagatttgagatctataaaaaataatgaaaataaaacttatactcgatttaatatattatttattatatattatatgatatataatatgaacacttttttaataaatattactatttataattacttaataattataaatattaattttaaaattattaaactattaaatatttatccaataaataataataatgaaaaaatcgtgac

SEQ ID NO: 254534 - DNA, 1234 bp, Cannabis indica
tcacaattaaaacaactatactactttacttattatcaataacatgagtttcacgtaggtgatgtccaaatccaataaaacaaaataaaaaagtatttactttattttaaccagatatgaaagtgaaagaatcattactgttagtgatacgataataaagataaaacacatatattcactaatacatataaataaaaaataattaccttggagaactttttggtaaatatgaggtctttcaccaacatacttgatgaaaaaggccatggcagtggcaacagtgctgtagccagcagtgagcaaacccatgatcttatcagcaatctcagcctcagccatatgcttcccagaagggtcagcagccacaatcatatggctcagtatatcatgcatctgaccaccaccacccatggcttccttcttctcttgaatcacactcttcagttctctcctcaaagcattcgcagccttagtagctctataaaatcttgtgcctggaaaattcaccaccaacgaatgcatccccacagtcacgtcatcgaagttctccactagcctggcaatcctctcgggctcatcaatccccaagaagaatcgacaagctaaggtcaacgtcagtgttttcgttagagggtaggcattgacttgggcctttccctcccaatggaccttcatctgttcttgggttatggagtccattttggccaagtaatggaccaacgcttcgggcctcaggaaccccggggagcgcaggagcttcgcctcttcctcacgtttgtgctgaatttgggcctttttggggtctttgtaagatcggaacatgcgttgcatggagtggggtcggaaggctgtgaagtacttctgctcattcgagaagaggaatttgtggccgttgggcccacaaatcacaacggtcttctcgcccagaatattggtcttgaatatatccggggaatacttttccattctcttgaacacgaacttttccggattcccaaacagaaactcaatcgtttcaccgattatgggccaccccatgcttcctggaggattgttattggatgatttgaaaatgactatacaaaggactaacaaaaatggaactgaacaaaatgatgatgaggtagagagtctccatgatggggttgttttggtaatgtatgaaggtgttttgcaaatgtagctgagtttatataagaaagaaaagttaatatattctacatagatgcctaat

SEQ ID NO: 254535 - DNA, 889 bp, Cannabis indica
atacatatatataatcaattatatcccacactagtttaattttaaaatttttatttctaaactaattaaatccctccaatgtcattctcattcacaataaatatatattacattgaatatatacaatacatgcaattacaaattacatttacttaaaaaaaaatatacacacaaacacaatatatacatacattatatacacacacatattcaataaaatataaaaatacatatatatactatacattgagatttaaatttttaccttataaccgcaatccgacgaactattttgcaaaaaatccgggcactatgcacatacaacacaactgatgtgatcagtatatgatcactcacctcgcaaacaacacaaaccaaagagattaatcaagaataatgtaaacaaatgaaagttgtatagtggatcaatgattaaatggctaataaccacttataaaccagtggcaagaaccagaaaagaactaaagttaatgaacaattaagaacaatagtaataggagaaaagatcaaacacaatcaagtttacaatgttcgaacaagtgatgatgaatcacttgcctactcctcggccagaacagccccaatggcttcagtctttattgatgctagaagagaggattgcaaagttgtttacaaagtgttcttgacacattcattcatgaagcaaagcttcaattacaaaacaactcatctcaccaagactctctctctctgttacaatctgaactagcactcaaaaattccctcttaattgctaccagaacgctatagcaattggctatttatagccttgttcaagacccgatcctaactgtcataactgacagttaggtaaaaccgttaggggcagttggaatgtattagccaa

SEQ ID NO: 254536 - DNA, 593 bp, Cannabis indica
atttaaaagttatgttgatttttataattttttatgagttgttgtgagttgttggtatatagattttgttgtattatatatttctgttttattgtatagtatattattatttttagatgatatttattttttattttgctatgtataataatagtatataattttgttagcataatacaaatattttaatatactaggttaatattacgtgtaatgcacttataattatttttttttaattagatttaattaagtaatgttacatacaatacatacaatacatgtatattaattaaaaattatttacatgaatattaatgacttagacatgaaataaaattgtgggtgattttgttgataatgagaagctatttctacagtggatacataggcacttgcacataaaaatctatcacggacaaaagggttttccatggagaagataagggcttcacaaacatcttctatatgtattattggtatttttccaaccaattcgtaccttagagaattgtaaagtattggattgtttttgaggtgagaataaaacattgccacacgcattgtaacaagggaagcagtcatttttctgg

SEQ ID NO: 254537 - DNA, 939 bp, Cannabis indica
gtaggcgtgtaaacataattaatgaaacatttaggggtatgagtgtaaattaccagatcatggtttgtataaatacagaagcaaaactaatcgaaaaccctaaaagaggttctctttagacggcaaactgctgtgtgagattaacgagtctatgaacacagcggttgtgtctaaatcttatttccattttcaaatggaaaagagagagaagaggatctgataacaaacgatggtgtttcagaaagccagtgctttgtttcaatcagctcttggctcgctataatgcctacatttttgttttcttattatatttttttttctttcatttgattttggattttaattttgaaattctacctcggggtctattttattttaggggaaacttaagaagttgtaatatttttttattagattgatggagaaatggtagttttaatgctcatctgtgcatctctgaaaccgatgatgacttgttgcttgtattcattttagagctcatgataaaaattaggattcttttcaatattatacctaaaaatttattttatttacaaaaaatatcattaaaaaaattatttgtacaaatatcgttatgcgtgccacgttatcgtatagaccaaatttcaaaataattaccgaaaataaaaaactgaaaatctcgtttctagaaatttttactttttgagaattttgaaaaaaaataactatttagttactttttatatgaataagataacaattagttacttttcttttaaaaatttatttcagacgcaaattcgctgtgagaaattcaaaaaaatcgaaccccaatttcaggttctgatccaatttggtcttctttttattcgtaaatcatcccccaatttttaagattaatttttcattttctaacattttgagatttttgtctccttattgaatcttttcaaatct

SEQ ID NO: 254538 - DNA, 1097 bp, Cannabis indica
atgaaaatcccacaagtgaaaagatcagggtgacatccagaagcaagtaaatcactccaaaacctcttagcttcatgaacattccctcttacacaccatccattaagaacaatattccatgtcttaatatctgaataaacaagctcatgttgtttaccaaaagagtaaaacaaattctctgctacttcaacatgtttatacctacacaaccacatcaaaagtgcttgaaatgctaacaaatcaagctcgaacccgaacccgaaatctttcctcctcttgaacacaccaatggcttcatccaccatatgtgctgcagcatatctattaagcaaaatcccataagtgacttcattcacaagacctttctttcagacatttcatcgaacacttggtgtaattcctcaaaacgtctcattttaccaagaatgtcaagaatcttgttgtatggctcagacccaattgaaagatcagattttttagagacccaattgaagaatacataagccggttgccaatctgaatggtgtctatgtagtacattcaaaacgtaatcttctgtcaactcgaaaccacatcgttcaagagctttctcgatttcatttgtgggtttttgccttcgaaaattgatgatgttttgaataaaaattgctgtttctccaattgggtcagtggaattcgatggtagggagtgtagtaatcgagttcttggattaaaaatgaaactgtgattatagttacgtagaccgagtaagaagaaacccatatttcttggcattttctttagtgttttgttttcctctaaataagaaaaaaagaaactctgtgcttttggtccaagactccggcggtggtcgacggctgagctggcggtggtttcttctgatatcacactttcagttgttcagactcaagttaggaagttgaacctgctgcaataatttttactattgttaataatttattaagggtgcgtttggaagtaactatgtaattactaggtaaggtaattactagggtggtaattccacagtgtagtaattacattattttaaaatgtaaagtgcgtttggatatgaggtggtaattacatatgaatt

SEQ ID NO: 254539 - DNA, 1099 bp, Cannabis indica
taccgagtataggctgatgttatggtcaatagtaccgtcgtacaaacgttctagactgagtaccgtgtgggacacggggattagggttatggtcagaggtatgggcgtctgatcataatccgggatatatgtatgttatatgatttatgcttttcttactgagcatgtcgactcacaatgttatgtttatgtgtaggtaagggcaaggctaaatttgaggaaccgtgagaacgagcacatgcagattgtacatgtcggggcggttaggcctggagtgaacgatcctcgagacatcagggcttttgctgttagtcgctgggcgacaaatattttgtaaattaatagcaaacttttgtaaagtgtttagtaaacgggatctcgaaatattttgtatttaatactataagtatttaattaaataagcaaaattttaattaatcacgatttttattaacctcgttgattagcaacgagctgcacagtatgtttaaaatcacgttaacacgcctatgctagttagggtgttacaaaaggttggctcaagtgaagtctacacgtaacttcagaagtcccgtacagacttgggggcaactgttatcccattttttgcattctgacgtgccagcacatgctggtgacacgtggacctgattgcccatgtctggccgaaagagatgttccgaacagagcacagcatacacctggacggataataccttcccagccgagcagtagacaatccgagcagcgatcaacgcttagcaattttagaacttgcatcgtgaagcatgaaagcaatccctataaatcttggatcgtatcgcagagatatggcaagctgtccaaatcccacaatctatgtattctaaatatataatatatgttcttaccaattatagacattgtaagcaaaagggaaaccttccctcaagcatttagccctataaatagtgattcattctcaccggtaaaagggtcgcaagaattactttagagaaatctaagagagtatacttagagatctcattgtgagagcttcaagagaggaaacaatgtgttcttcttgagttaataaaaatcaaggggagtaggctattac

SEQ ID NO: 254540 - DNA, 618 bp, Cannabis indica
atacgtatattttgggaacatgatagtacaattgagtaggagcgctaatcatagatatagaatctatagcgtctattcggaaatggaagtgaaatgatgattttcttcgagcttggctaaatagagataaatgatacaacactcattttagtgattatattagttcatgatgagtccatatttatcaatttatgtattaatgttcatgaattgattctttaaattattgattagtgtgattttaatttgttaggctattttagaaactattcatgcatttagagtcttttggagggattttagcatattttggtggaaaatagtagaagccggcgagctcgattgtacaaggttaaaatgaattgcaaattaggatgaccttagatgaagaattggacttagcgttcaacatgaaagttttagatctcgttcttagctttctagagcatcttaaatcgtcaaattctaagtaatatcgagaaagttatggccaaaatactatcagtcatcacaacaagaaatttctgaaaataaaaatatttaaaaataaagatagattttcgagtagagttgcgaattttttttttatcttttttttttcaaaagatgagttatctt

SEQ ID NO: 254541 - DNA, 727 bp, Cannabis indica
ccatctcagataaagttgcggtcacttcctccacaataggaatggcatttagtatttcgacttcttgggcagacaacatcttggagaattaaccatcaagatgaggctgattgtaatgtgatgtttattgaacagtttgttgaatttttggagaaaataataggcaatctgcttatggtctcggatccaatccccctacgaggagtctttgatgcattgtatatagttcttttgtcttcttatcattgtggccatgaagaacttagagcacatatcgctttcttgtagccattgaacctgttatttttgcttccattaaatctcctccctaagaaacgcctctgatagttgttgttttgcatggttaattgcatcaaagtcatcagggcatttaatctcagtttcctcaagattagatgtagctaatttcacttgccgagttacatccaagaattgcttcttgttccaactttgaagttgtcgacaagtagctttcactttcctatggatgttgatcataggattgtgatgtagtctcgtgatccaagcttcctcaacgaccaaaaaataatgggggtctctggcccacatattctcatacttgaaagtcctaccttcgcaattaactccacttggagtatccagtagcaagggccgatgatcagaggccgtagaggagaggtggttaataatcgccttcaggaagagaatgcgctatttagttgag

SEQ ID NO: 254542 - DNA, 1237 bp, Cannabis indica
attgtagcgttttatttttaagagcatgaataatattaagacaattggattccacaatcaagctcttattctcctaataaaaaaaacacattaatatacatgtaaatgattcttagttttacaataataaattattaataaactcacaatttcataaaattataaagtagtaatttcaattaatttttaaaaataatttataattttttaaactattggttgtaattattatttccaattttattaaaaaataaatataatttttttttaaaaaataattattagaaacttgccataaaaggttattagattgttaccttattaatttttttagtgcccatcaatgggtattacccatttagaagtgttccatatatatatgtggttaaattctagttgtttctattttttatgtcatttgtttctatttttacaaatatatgtggttaaatactagtttctattgtgatgttaaattgtttccattttctttttgatttgtttctatttttagtgtgagttgattttattttatgttatttgttaatcatttctcaaatacatgaggttaaattctagttgtttccattttgagattaaactgttttcattttcaatttgagttgtttttatttttttatgtattatgaggttaaatgcttattgttttttttatttcgaggttaaattatttttatttttcaatgctagttatttttatttcacacacgctcatatagtactagttatttccattttagaaacacataatgctagttgttaccatttcaatgtgagttgttttcataatttttttttattttatatatatatgaaattaaattctaattatttttattttatagaatttgtttacattatatatatatatatatatagttaaataaacgtatctcctatttctctactatctttctctctctttctaaaacacacaaccactgaataaaccagtaaagtagtaataaattaataatctcattgaatatcaagttctctcaggacccgtttggtacgcaggattagactggattggactgaaaaggattggactagactagacaatattgaattatgctgaaagtaatcatgtgtttggtttaagaataaactggactattttatttatttcctttttgaaaaaaaaaacttaaattaaaataaaaatatataatattaaattaaaattacaaaatataataataaacaaataaaa

SEQ ID NO: 254543 - DNA, 2171 bp, Cannabis indica
tgttaatgaaacatacttggtagtaaatctagatccttgtaaaatatttctaacacaagctccctcgagcgagtgttggccctctagatcgagaggaccgaaagagtgtatccgtgcaccaagaacccgaggaaagaggaaagaaaagttgaaggtaccctctgactgatctaagacagaaaatcaatgaaaatcttggtgatttgagtaaccatcttgaaaaaaaaaacacgcattgccagtctccaaaggcacgttgaatgagggaatcttggctgaactggcaatactacgcaaagacattgctagggtctcccggagaaaaaaaggggatgattcagactctaattgcgaggaccgggaaccatgcgcccgacacatactggatgcaaaactccccaaaaattttaagatgcccaaaatggcaacttacacgggagattcagaccccagtgaccatttgttctggtttaactgggtggtcatgagggtcagcaatgatgcaaagtgtttatgctttccactaacgttgggcggttctactgagaaatggttcaagaagttggaaccaggattagaggactgctgggacaaattacaagtcagtttctgaaggcagttcatcgtggcaaggaagattaaacttgaagtcagcaccctggctaacataaaatgctgcctacggaacccctaaagaacttcataaaaagattcaaagaggaggcttcaaagaccaaaaaggtggatgacggacaacagctggcccttgttcaagctggaatccgcacggggacccctttctggaatgaactacagtaagagggggcagctaacctccaggactttcagaaaagggtttcaaaatacatcaacttggaagaagcccaaatagtggcttacggaggatactacccgaccagagtatcgggatatgtacctggagcgtagcttctgagagccccatctcctgccactcctcaaatgagcagaatacagttctccgctatcccaggaaataatcaacgcctcgctttagctcccgcatcatcacactttggggcacacgtgagcaatccctcggggatgagtgtccaaactccgtcccaatctgcatctaccaccagcctggcaggacctcctcagagctcctagagtaagaggtcctcaaaaggcagtacccggactgaggacaaatgatagcaaagggaatatattccccaaatatactcaatatacgaagctcacagatacacataagcgtgtgtactttgccactcggcagaatacgcattaccggaagccttcccctttgtacagggatagctcctacagagatcccaacaagaggtgtgagtatcacaacgacattggctacaccaccaacgagtgcaaaacctgaaagatgaaatcaagaacctaatccgattaggtcacttgtatgaatggattaaaaataagttaccacatttaaactcggtcccagctacaggctccttacctcagggaggagcagggggtatgcccgaaggataggtacccctcggaggggcactccctcagcaggtgcccggattaccacctcggctgaatgggagagtagccatgatctctggtgggcctcatattggaggatccaccaggaacgagttgaagcattacgctggggtcataaaacacgatgaagtatgggaagtcactcaactcccagcacaaaggcccaggctcatgaaccaacccatcactttcatggaggacgatgcaaaaccggtgcgcttccctctggttatagaaactcccatcgcaaacaaggtcatggcaaggatactggtagataacgggagctccgtgaatctattgcttaaagaagccttcatggccatagggctcacggacagggacctatcgcctagcagctcccagctcagaggattcaatgggacaacacttatcccaatggggaatgtaaggcttcctgtcaccctgtgcccagacaccccacagagcactttcaaatactccaccttcgttgtagtagattgtcccactacctaaaatgccatccttggcccactggctttggtcaatttcagagcgatcacctccattcgacacttatgcctaaagttccccacccgtgaagctggagtaggaacggtgaggggaaaccaagg

SEQ ID NO: 254544 - DNA, 528 bp, Cannabis indica
aaaagaaaaaaaaaaagagttcaattttatgtttatagtggagtaataatagaattaataaaaatgattatttgattgaaaagactcaataaataatctaatttattagagtttagtattatagttctcaatatatagttcccgaatcaccactgtgaaacacagtcaaatgtatggatgatacaaagtaaagtaaagaaagaaaaatttaaaggtgttcactcgatccaatccgcactattttagtcatagtgcatccaatctgtactaaatgcggattttatattttggatccaatttcatcaacacaataactcaaatccaatccaatccgcaaaagtgcagattggatcggttattttagattggctacttttcaatataatattatttaatatttattaaaatataaattttttcacataactaacaacaaaataaaataaattatagttattttatgcctccaacaataaattaaaataaataacataacaaatacaaattcaaaaatatatataaaaaaaa

SEQ ID NO: 254545 - DNA, 1237 bp, Cannabis indica
acatgcactgcgtacctcgatgtacgagtgttggtagggtttgttcataccctgagtacccctgagtgatataccacgcactcccagtacctctccgtacttatgttggtatcacggtactctcaaataacattcactataccaatgcactctataccgtaactgtataagtgttggtagtgcaactaacattttaagcatgcatatacacataacatatacatacactcagatatctatatcacacattatatacagttcttaccttctctccgaattcaagtgtgctggccgacctgaacgaaaagtctcgtactagatggatgccctaatcacattaattctaaatatctcaaaaagggaaaaaactagggttccaaaaactgccccaaccggcagaccggttcccaatcggaagtcctgttctgggacaccaatcgatcgaccagttgctacaggtcccccagaaccggaattccagttctgtgctggaaacccgaaaaaacgcccccgtgacctcaaaatcaagccaaactctaccaaactttccagtatacttgtacaatgcatacacaatataatccaaccagaaattcccagaaaaatcaaatgaatctcaacttgccattaaagacctaaacttgagtttcaaaactcaagcttgctcaaatccatcaccatacaccaaaactaacaatcagaacttagatttaactctaaactagcataaaatcagaaccctaagcaccaacaaccctagcagcccctatttcacaaaatcaacacatgaaaccaatttcaaagcttaaaaacaccaagaacaaagagctagggattacctcaaccttaagaactcttgaattcctagctgaattccagaaattcacaccagaaaagttggttcctcttgctttgggtttggccgaaaaggagaaagagaaagagaaattctattttttgttttcctttaatttttgattttcttcaaatggaaaaaggatttctaattaatccttgctgcccttagaaattgctaggtgtcactaacataaccacccacctaacactcaaataatctaaaagactaaattaccctttatctcaaaactaaggtttttcaaaagctaggggtaaaatggtcaaattctataaccccgctcaatcccgaaatttaattttctctaaaatattcccactaagaaataaggttccaaacttacccatgtgatcaaactag

SEQ ID NO: 254546 - DNA, 655 bp, Cannabis indica
ttttgttatattcttttcacaattttttgaatccaccatgattcactttgatttgagtctaaaattgctcttccaattatgactcattttacaagtttggatccacttttgatccatttgttcttgctatgacaagacaaatctcataagtgtaactctcacagttcattttctcatctcataaaatgagataaaatcactaatggaaaattaattccaaaactctttatattattatatataccaataatatatataactctcatgcataaaattatctcccaaattttatgctaagtaatatattatgtatgttactatcatctcatacataacatatgctcatcataatatatataatcaccacataatatatattgtatatgtatcacatacataaatattctcatcgtaaatatatattatcatatgctcaacatataatatatgtacttcatatacatgttatatattatgtatatctcacatatacatattaacatgttcaaatatcaaattatatatcactatataaatatgacatatacacccatacatatataactcatatatatatatatctcaatccatatcttaatatagaaaaatacgttaatataaattttactatgtataaaaaatagtaaatcacaaa

SEQ ID NO: 254547 - DNA, 1035 bp, Cannabis indica
gatgaggtattttccctatccaaatgacatcttcatccaactctagagcatatttcacaaacccgtgagcagcttgattagcatgcctacgaatatgcgtaacagtaactctagggaaaaaggacaaaagacaacgaacatcacctactagatccgaaaaagaagataaatctttacgtgacgtggccaaagctgaagaaacccggagagcgtcagtttcaacttgtgttattggtatttgttgttgaaatgcctaattaagactgtgaaaaagtgctttggcttccatttcatcacttctgaaatgaccttggactgatttggataaagcagcaactacttcccctttgcaattttgaactactgctcctatacccaaaactttatccatagcattaaaagccgcatcgacatttaagacaattgacatccggcggcttccatggtatcccattcatagcagttgtggttgaaccagcggcattgttcatggagttatgttgcattttctgtggaccatcagaaccttgtctagcaacatgttggtttggcacactctgctggcgattgctctgctggtatggccttgtagatggaggttgcatctagtttggtggaaattggtctggtacatggcctctttctcttccttttgccttagctgatcgatatttatcaatatagatttgagcctaaaatacaagaacagatgaaacacgatttgtaccaccatgtaacacgcagtttcgatcattccatatactccatattaggcagatgaaattttcaaactcaaccttatccatggattttgctttatggataacataatctccattgaacatggcagggacacaattaaaatcaatactgaaatgagtttgcttccagacagccttagcaaacttacatgtgaataacgcatgcccaatcgattcccaagcacattgacatctagaacatgttgctgagtcaataatttttcttttgtgcaaagctttagcaacaggctgagcttgttgaatgactctccaa

SEQ ID NO: 254548 - DNA, 857 bp, Cannabis indica
gtacaaagtgggagaaaaaattgctaattagcgttattttaaatatacaataagaataaataagtaattttaatatgcattcatcgcgatgtggattgcagtttgaattgggttacgatttagattgttccatgcgctatactgtataatctgtaaaaatgtaaaaaaaaatactttgaatgtataaatgataaaactctattaaaaaattaatttatttcaagtatacctattagtaacttgttatagcaagttataaaaaatataatcatgatagttatatttttaatgtaactatcaaatagcgactctattaaaatatattcaaagaattaataaacataaaagtatttgttttaaaatatatgcaacatcatttgaatattttctctatttttcgcttgttcatttgaagaaagaaaaaatatttattatgagcgatcttaagtggaaaaagcattggtgtttttactcatattttctcactcaaattttttctttcatcattttttcttctcaattactttaaaaatgtataaaacagcaaaatattacattgcttataatatagtacactatgtataattcaacaatatagaagagatacttaactattttattgaggtaattaaaaaataattgagattgctaatgcaatactaacctactaattgttctttcctatatctctaaaactcaaacagatcatatcatcaacaacatacaattgtaataagataatacatattaattaatttaaaaaaagaacttagcaacataattctaatcagactttctcattaaggacttcgattaactaaaaaaatctacaatttctattcaactaaattgtacac

SEQ ID NO: 254549 - DNA, 622 bp, Cannabis indica
aattatacaatttttataattcagctttttcgaggatttgttgttggttgttttcttgttgctgtatgattgattttgctctcaaagtgccagtctcagctaaaatcatattttttgaaattaatcttctccttgtggtagataaaagttgttagttgttgttgttgtgtttttgtgacactaatacaaaaaggggtattcctgacggtcttaataaaaatattttttttgggaaaccgtcgctaagaaaattaagcaactgtttaaaattgtcaggaaaatagggtattcttaatggttttaaactgtcgggatgtataggcgaagatttttaactgggaaacgtgtttttttaaatgggaatattgtcgataatttaaaactctcggccaaagcataagcgatgatttcagatctaaaattttatttcccccacatcttaaatttcaaaattttatttctcgcgtcataaatttatttttttacctcttacaatataaaccccgcaagaaaaaaaatagattttattttttcaaagtcatttgtaaattcatttcatttcactagctctctctcctccgtgagcactagtcgaagcatccctctcctccattctctctcg

SEQ ID NO: 254550 - DNA, 942 bp, Cannabis indica
taaaatcgaaataagaaaatatccttggcacacaagttctttctccaatgttgactctggctaaattggttctaagtatttgtgtccatagatttctctcttccatatttatccttcaatttccttgcaaatgcttttgtaagttttaaatttgttgtcagtttgactcctcatatttgctttgcagttacattcattgtctttctttgtgctggatgaggctgatcgaatgatagaaaatggacatttccacgagttgcagtcaataattgacatgcttcctatgaccagtggatctgctgaagtaaatcctcaaaatacacaaagttgtgttacagtttcaagcttccagagaaagaaacgacaaacctttgtcttttctgctaccatagctctatctgccgatttccgtaagaagctaaagcgtggctccgcaaaatcaaaggaatcaatgtctgagggattcagttcaatagaaaacctttcagaacgagcagggatgagagacaatgttgctgttattgatttgacaaatgcatccataatggcaaataagctcgaggaatcatttatagagtatgctcctcccccatctattgtcctgctttttttcttttgtataaatattattcatatattcattgttgagtctttttccatatgataaaccacgtaattgtacatttgaggtgtgtataaattcttaatctgaggcatcaactgtggtaacattttggctataaggcagcagtttgattgttaaaatatttgtgttacatggaataggggctataaattaactgtgtagcatattattgtgacattatgtttgcgtccgatccttactcatcttgggcatggacaaatttaacctttgacttctctttattaggcatacaactgattattattaatgtgcggacaccttgatttgttccaata

SEQ ID NO: 254551 - DNA, 624 bp, Cannabis indica
aaaaagaaattagtcttatttttttatgattgtatacgttgtagttatttaaggcatcatgcaagattttaaaaattataaaacattaacacggtaaaaatagagttcaaagagtgttgcacacgtgacttttttattttatacgcgtgtgaaatagaagatttgaacattaaattctatattgtaaattattttactctgaaaggcttggggggttgttgctacactttcgcaagtgaggcggattgagcaggatattatgggcacactcctagagctaggatattactttgcaacccgcaatctgaatgggccggagtggcaaccaaattttatgagtaagctggcagtgttgaaattgtatactaggaatcccgttggttctgggagctgcgggatgcgatcctccggtatactatatcctagacgtatatccaggtcatctggttcgataatatccaccaaaagttgtgatctcctcttccaaattaatgtatttttcagccctcttttgaaaatcttgcaggctagttgcaccttcttgttggagctcattctcataaggagtttcggtctagatcccagcctgtagcaatgtcaactgttgcccatcgtcgaccttct

SEQ ID NO: 254552 - DNA, 931 bp, Cannabis indica
agggggatgtgcacttggtcgggtgctcatgcccagcaaggggcattgatgcctttgcatcaatactttaaggaggtggcagacttcttcggcctctgcccagcccagttcacttctaagggcattaagtatctgtcagtccttttcgtcctttacgcctcccagaagtgggatatgccttctccccacgaactcagctggttctttgatttgaagtccactcccaagtaaggccggtcggggtacttctatttctctcaaccagacttcaagtggttgacgggcactgatgactcggccatcagcaaaattgggcattttgttgatgagtacttcttggtggatggcgcgggcatcactcgtactcggttccagtagattccaacatatcatcgtcctcccctcactcttgctcttagggatagagctcaaaaacttgctcgactgccgggggaagaccggaatatcatccggtgctggacgggctgaacgagctcatccagagaatgagctgattcaactgaagcgcgaggctaagttgaagggaggtgcaagggccaagcatatgctcaggagcccttgaatcctgaagatgcggctgaagaagagcaggtgactccagtaaaaaggagaaaaaaactttcggcccagcccaggcctatcgaacatgcaattcgcatcagggagcctatctttcttgcccggccgcctcctcccgtgctcgaaaaaggggaagctattatgtccgaaatcagaggcatgtcaggtgcgatggacttttgagatctgctcgagcaatcatcttgcatatactccgtcctgcttttaagcttcttgactattatgcttcatgtttttgatgtatgtttcctctaaccatgttgttttttgttccgtgcagacatgtctcagaagatgctcgatgctctga

SEQ ID NO: 254553 - DNA, 549 bp, Cannabis indica
ccatgcatgttctcggacacctcaggctgtatttttacttgtttttttttcatggtgagtcatatttttagggttttggggtcccaaaacctcatcttgatgtctaaaaccctaagggagacctgcgccatcttttggtgccacaggtagactagggcttatgagaagcctttgatggtgtttcttgcttagtttagtcatatggatgctagaaaaatactttgaccacgttagttcttggccaattggtgggagagacatgtgccatcttttggtcacaaagatggcacatgtcggtcatagttgttctacacttcttggtgactcttctcacttgcttttggtaccttgatgttgtaaatatacattggccaagaaaattcttcaccatttgatgtggtcgacctgtgccacttccttgtgcacaaagatggcacatgtcgactaggtggtttctacaccacttggccttcctaacttaggttttgatgtcttgatgatgaaaaagtacttttggcaaagaatcttcttctcatttggtgtggctga

SEQ ID NO: 254554 - DNA, 724 bp, Cannabis indica
ttagataagaagagtaagtttaggaagaaacgaagtcgcgcactttggctgaaagaaggagatcgaaataccaaatactctcataggaaggcaaacactcgaaagaggaaaaactctatcttgggtatactggacagcagtgaaaaccgggtttatgggaataaaatggtgggtccagtagcatgtgattacctccagcagctttttgaagcaaatctagcggcccgggaagagttggaggcgttccaacgaataatttcgaataaaatatctcgctaaacaaatgagtacctcaaagctccttttaccaaggaagacgtctatcgtgcaatgcgagatattcacccccaaaaagaaccgggaagtgatgcaatgtcgagtctcttttataggaattattagccgatgataggtgatgaagtgtccaaggtttgttttggggttctaaatgatgggaggccggttcatgatattaacgatactctactttgtcttatcccgaagcttgacaagcctactcgaatgtcaaatttttggcctactagtttatgcaacgtggtttataagatagtggctaaatgtctagcgggcgcatgaagaatagcctttaccaagctatttgtaagagcaaagtgcctttgtgggggtaggttgatccaagacaatgatatcattggtttgaaagctacattgcatgaaaacgaggagattcaggaatggaagg

SEQ ID NO: 254555 - DNA, 2163 bp, Cannabis indica
taaagaatgtaatagtttataataatcaatgaattataataattaatagcattattatatagtgaataaaaataattatgagttaaatttgacataattcttcaattaaacttaacaaattattttagaaaattattagagtactgtatttttttattttattttatgcaaaatttaaaaagtgtgagttttggctgttacatgtgtcttttctggaacatattgtcgggaaagacgggattatggtagacccagagaatattgaaacagtgaagaactggcttaggccgaaaacagttactgaggtgcggagttttcttagtttaatgggtttttgcgttttgtggaaggtttttccaagatcgcaatgtcgttatcttagctgaccagaaagaatcagcgatttgtgtggtcagacaagtgtgaaaatagtttccaagagttgaaacaacgattaatcacaatttcagtgttagccctgccgactgatcaagaaaaatttgtggtatattgtaatgcatcaataaagggcttaggttgtgtattaatgcaagcagataaagtaatagcttatgcttcatgataattgaaagattacgagcagcgttatccaacacatgatctggaacttatagcagtagtgtttgccttgaagatttggcgacactacttatatggtgaacggtgtgaaatctatactgaccacaaaagtctcaagtacttttccacttagaaggatctaaacatgaggcaaatgcaatggttagaattggttaaagactatgactgtaaaattgtgtatcaccccgagaaagcaaatgtcgtagcagatgccttgagttggaaagggcccaaccaaactttcagtacggaaaggatttctcctcagtcagccttggatatgtctagggcaaatattgaatttataattggagaattgcataacctgacacttcagtcagacttgttggaaggatcagagtagcacaattagaagaccctgagttggttaaaactcgagaagatgtctcagcagccaaagctaaggacttctcaatttcaaacaatggaatgctgtttaagactcgggtgtgtgtcccaagtgatcctaagcttaagaaagaaattctaaatgaagcacacactaccccttactcattgcatccgggtaccaccaagatgtatcaagatttgaagccctactattggtggtacggaatgaaaagagatgtagtggattatgtaactagatgcttaacctgccagcaaatcaaagcagaacaacagcgaccggcaggactagttcagctgttaacacttctagaatagaagtggtaagacattgcaatggattttgtggttggattacccaggaccagagggatgtacgactcagtttgggtcatagtggatcgctttacaaagtcagcacattttttgcctatgaaagtaacatatatggtggatcagtatgctgacttgtatgtaaaagaaattgtttgccttcatggggtaccaaagtctattgtttcagatagaaaccctaaattcacatcgaagttctgggtgggtttgcagcaggccatgggtactagtttgaagtttagtatggcctttcatcctcaaatggatgggcagtctgaatgaactattcagatacttgaagatttattgcgagcttgtgtcatggactttggaggttcatggagtaagtatttgtctctgattgaattctcctataataacagttatcaaagtaccataggaatggctccctacgagctgctctatggcagaaagtgttgctccccaatttattcagacgaaacaagagaatgaaaatatttgggccctgaattattccagaagacaaatgaagcaatatataagattaaagctcgaatgcttgcttcgcagagcaggcagaaaagctacgtagatcctaagcgcaggatgttacatttcagataggagatcatgtattcctgcgtgtatcaccaatgaagggtatcatgcgttttggaaagaaaggcaagctaagtccaaggtttattggacctttcaaaatacttgaaaggatcagacatgtagcataccggttagccttgcaaccaacattgtcacctgtgcacaatgtatttcatgtctcaatgttgagaaagt

SEQ ID NO: 254556 - DNA, 1126 bp, Cannabis indica
aaaataactataaaacaataaaagacatgtacaaagcaacagaaaaataataaaacattgaccttattgcaatatgtaagacaatatcaactctcaacatgtttttgtattacgaaattctttttttttacttaattttgacaacgttttgtacttgtactttttttttccatgaaatatgtttgttacaaattcatacttttaaatcttattttattttattttttggtcttcctttttgagttagtgactagctaaaatgacaattctttttttaaattaaatgaattgttacatattaataatagaaataataaaatcttataattttaaaatggagtttttaatataaaaatatatatataactaaatgaaaaaaaaaattatgatttttaaatatttttttagttttattttattttattttattttattgaaattattacatttggaccaataaaaaattgacacgtgatattttatttgggtttaatggatcagttagaaagagggaccaacggacatagagaaagcgtggccttagggtctattattgccaatttttaaagttggcgactaatttgcgtcaaccttaagtttttggagactttttccgtaattatctattttatttataattattaaataaataaaaaattaatatttaaataaatagattagataaatggtatatttggaaaaagataaaattatttcattaaaataaataaaatggcaaaacttaaagtccttgggccataaggtgattttggcctgggcttttatttagagttcattaatttttttttatatatagcatatgacaaagctttgattgccaagtttgtggtgagatactaaaaatcctaaggaaataaaaaaaaatattttctcctctatagaattcaaactcttaagaaatctgccctataatgtcttgagtaccaacccactctatttaaggtagtacttagatctatgtgaaggactatacattttgtcattgtttgagtaaaggaagtaatccaagttcattgtttactgccatctgatgagaatcatgaggttccatcttaaaattaattggtgataagtggagttagctcatgttcttatatatgactca

SEQ ID NO: 254557 - DNA, 577 bp, Cannabis indica
aataacagtaatgatttgcagtaaaaatatacatcggggtgaattttattgagtttcgggttttcgagtttcaaagcttttttgtcttgatttagtttcaatcttttacatttaatatataaacatatgagtgatcttcactacaaatagtttaataaaaaaaaaaaaaaatcaatactcatgttataaaattttattttcaacatgcgattgttaataaaaaaaattatataagattattttttaaatttgtacaaataaagtgtctatttttcaacagattatttaatttttaaatgtgtatataatttattttttctagacaattaactaaatatataataattatcttttaattgaaaggtgtaaatccatttattatatttatgtataaaacaaactatgagagttttagaagattaagagacatgaatttttatgtggtttaagtgttaactaatcttagttcatgagttaatgtattgaggatgttgtatgagcacaataatagtctctctcagggctggccctgacttttagtgtgccataaaaaaaaaatattttgggcccttattta

SEQ ID NO: 254558 - DNA, 548 bp, Cannabis indica
tttcttgaggtggattaaaccactatctttcaagtttttgggttgtttcttagagctttggttgatgtctctaaattatcactaagggtatcttggttcactttgaaagcattcataacgaaaaatggttgaattttaagtatgagaacatgcgtattatatattttcattgtggaatgtttgaccacactctcactaagtgtgttccatatctgaaaaaatgtgatgagcttacttatcctcctcctcttcattataggatctcccttaaagctcatgcttaatccaatttcaagaaaacccttttgatatctctaactcaattccttttgaggaaatatatttgcctactgtgaacattgaccaaacattacctattatagttaatcaatttcttaccactagggacaatggagttggctcttctatctttgtttctgctagtagaggtactgaaggaagctcttagtgttttatgtaagggcttagttcctctattgatgcgagtcgtgctttgagtatgcatcctgttactcatagccttattg

SEQ ID NO: 254559 - DNA, 857 bp, Cannabis indica
acacagtatgagacaccaatttttaaaaggaatcttgattcgctttcagctgatctatacaagtttcaaaaataacacagacatttttaaaccgtctataaatgtgtaaacactttcacggacgggctttttgatagaaatgagaaagaggaaattagactctatactctttttatattgtcctttttatttttatcctattttttaaagtctattatttatacctctttttttaaacactttaccgatttacctctgtcacctcaatatactctccatgtgactcccttatgtcagagtattttgggtacaacacatataaaaataaaggtatatttcaattaaatataaaattaaaggtaaatttagttaattgattgataaaaaagaggcatttttcaacttacccgtattcaatacttagaaattttttagcccagcccagttactcttttatttcaatacttagaaatttttcagcccagcccagcccagttactattttcatctcaattcaattttgattagataaccatagccttcgacgttgttgttgtcgccgctacctctccgtcgacgtggccgttgttgttggttctagttcttcgccgttgtggtccttgtggagtttctttatcgccatttttgctgcctccattggttctctcctcttgtatctgaggtaatattacactcttacattttccctttccctagattttgtgttatttctctaatttttcgatcaaattttctatggctgattttgtcttttttctctaatcttcgtttcttgattcggagtcgctgctacctctccgaaacctatccctgtcggagtccacttgtagtggcgg

SEQ ID NO: 254560 - DNA, 950 bp, Cannabis indica
gatcccccatatagcaaatgggtcgggcaggtcatcattctaagttttgttggtggtacgcgaggtacatgtgaaaacctcttacacttatcacatttcttgacaaactcgtgtgtgtccttattgatcattggccagtaatatccttgtctaatgatcattttagacaggctttgccagcccgcatgatccccatagaagccttcatgaatttctcagatgatttcattagcttctagaggaagaacacaccgaagtagggcattgaataccctcttttatatggtttgccttccatcattgtgtagcgaggcactgtatacaatagttttcgcatgtaacaccctaactagcataggcatgttagcgtgattttaaacatactgtgcagctcgttgctaatcaacgaggttattggaaaacataaataattaaaattttgcttatttaattaaaatataacaaataacttatataaacttccaggatcccgtttacaaaataccgttacaaaattttactacataattacaaaatacttgttgcctagggaaaaaatacaaaatccctggtgtcctgaggatcgtacactccagacctaaccaccccgacatgtacaatcttcatttgcttgctctcacggctggtcaactttagctttgcccttacctacacatagcaatagcactgtgagtcgaaagactcagtaagaaaagcataatataataaacatactaaaatctcgggttataatcaggcgctcatacacctaaccataaccataactgaatcaggatcgatcttgacaaagtataactaactgcgaatccagcctatactcagtactctaatcgcactgatgtggtagcagttaattagctgagaataacctgaaaaattgagaaaaactccaaccaagcagccctagaaatttttgagagagagagaga

SEQ ID NO: 254561 - DNA, 1014 bp, Cannabis indica
tggaactaagaacacaaaacagtaaaattaaaaagtatcccgttagtttcggagcatctgaaactgcctgggaatcgcagtcctttcatgggaagggtggagtcgacatttccgatcgtcaattttctacagtttcttttgattttgcgagtgatcgtcatggatttggagctggtgtctcggttaacagaggtcttgcgcctggatgattccgacggaccgattctggttttgaataaggctggcgtagaggaaggtaagaggagcttggatttgtctctggtgagcaaagttattggccctaaaccggccaacaaggatggaattgagaatgcaatgaagggggtttggaaactcaatcatcgttttcaggtggaagaattgagctccaaaaacgtctttcgatttttcttcggtagccgtgaggataggcagcgggtttatggtgggggaccttggactttcgataaacaattgatttgttttgtgaaaccgatgggattgggagagatttcaaagatgaattttgattttacgtccttttggatatcgatcaataatgttccgttggcatgtatgaccgagttgtttgcaagggaatggggcgagcggattggtaaacttgaagacattaagcttgtcaatgggactatgaaggttagagtgaggatgaatattactgaacctcttaaacgagggctgcgggtggcggttgacgagcaaggtaatgaggtttcattattatttcaatatgaacatttacctgatttttgttttgattgtggtattatcgggcataaggcattggattgtcctttgagggactttggtggggataatcctagacccgatcgtgggcgttatggttcttggatgtgtgctccaagttcaccaccgcgtgatcgatttcggtaccagaaaaagcgtgataactctccttctaataggccgatcatgtctatgggagaggcatcgcgaatactagcggcggtggagaaaggtcgagttcgttat

SEQ ID NO: 254562 - DNA, 802 bp, Cannabis indica
tttattaagcgataagtgatttatagcaatcgatatataataaagcaatataaagacacaagaattttataaaagttcagccccgagtagttcggtaatagcctaatcctcgttatttgtattgacttaagaacaaggagaacggttccttttcttatagctcttacaacagtatctctgaatatgtattcttagataatatctttagggtatagtctcgactaaactgtttgcgaccttttgcccagtgaacatgcatcattatttatagggctatgaaccttggacatgaagtgtttcccctctcattacaatggatataagcagaaagattgcacgatccatacagtgtacactgatcgtgggatatatgcggaatacattgatcgtgggataaatacagaatacaatgattgtggaatcgtgggtgtgtcatatctctgtaatctgatccccaagttatagggatgtcgttgatgactcacaatgtgaaagctgaattcgctaagtgttggttgctctacacggattgctgattgctttgctctaggcatgccagcgaggcatcctgctcggactgttccctccaagcagatactccaagtggattccacgtgtcaccattctgcgatcccacgtcagagtgcaaaaatttagataacagtatcattatgcatgttttttcgaacttaaataagtaatgttaatatgttaaatatttattaattagtaaggtcttaagttaattatattatgtatgtattaaatatgttttaattttttgaactcatgcatgtattaa

SEQ ID NO: 254563 - DNA, 713 bp, Cannabis indica
agaatggacgaggtggaagccgcaataagatacaagttcaccttaagaaaaaaatctggcctaacaaaataattggcttggagagttaccatgcgcattagtgggcctacaggaccactgcgagaactaccaccggacattccccattctcaatggtgtgcgggtgcgaggttatggtcctagtagaggctataacttccctcccatagaagaaccacttacgacccatccacaaatcaagccttagttaaagaagcactggactaaatagatgagctccgggaagaatctcaaatacgcatggcaaaaaaaccaaaagaaagtagcaaaatatttcaactccaaattcaaaaacaagaaattttccattggtgacctggtcctaagaatggtcttcccaacctctgaagaaccggaagtgggggtactcggaccaaattgggaaggccatatgaagtaaaaaatgaaataggctccgggacctataagttgaagcaaatggatggatccatagtgcctagagcctagaattctaatcatctctggaaatactatcaatagttaggattttagtatttgatttcatatttacactttgtaagttaacctatggcgaacaaagtatatgccttatcctgcataaatttaagctaactgatccaaaaactctttttaagtcactaaggggtatactaaggcataaacatacacga

SEQ ID NO: 254564 - DNA, 1830 bp, Cannabis indica
tgatggagctctatttaatgatgttatccgttttgggatgggttgcttagcccgtaaccatgctggttaagttcttgaggccttcactacaagcaggaggggaattgttaggctagagattgcagaaatcatcgggatcaaggaagctttaagatggatccaacaatataattggcaaaatattctgctgaaaactgatagtttggttctgtgttcaggctatccagagtgagttgcatatgccgtgtgagtttggtttattggttaatgattgcagaattgctttagcttctttgagtcatgttgctattcagtttgttgaacgatctttgaacaaagccgctcatttttggcgcgtagttcttgtttttccctaggtcgtactttttaggattatcagttaagtcctgaattgcgtaatattgtactggttgattttgccggttaatgaaagtttacttttattcgaaaaaaaattattaataagtaactcagataaaatctattacatgaagatatagttcaaagagaaaaatcatcgagaatagacataccaagccgttataataatatggaagaaaaccttaataacaacttcaattaaggatccaataagctaccaacgatcaaacatcaaagaagtgtgaagtatgatagattgcaaaattaaatgaacccctaaccgaatccacatatcaatgactatcagctaatgatcttctaataaaaattgggacataataactccattatttaaatcataaataagggaaataacacttgaagtgctgtatcaagaaagattgaagctcataacaaggggccaataaagatagatcccccagatttgatgcccaaagagagagaccaagacgtccttgccaaagaaatttagatccattgataatagaccagcaaatcaataggaaagaaaactagcatctctcaccaagacgataacaaaccctattaatctaataaggtggtgaatattcaccattattagaaaaaaaaatgaagtgactaaaaaatttaacataataatgaaaaacaaaacaataaaaaaaaaaggaaataccaccgcataattaggatcccaacaaacctaactcatcccccacccactcgacactaataatcaactagaaccaaccctctatctcaaaactccaccgcagcagtcgtacaaaaaataattagacaccactccccactaactcgaaacagattacaatcccaactagagcaagatccctcaattgactagtctcccacccatcatatagattggaaagaaactagaagccaggccattccataaatctaaagcagccatccccaacctagcacgactccgactgacctacagatcaccaaagaaaaagaaccttaaaaaaccaaccagacgacgagcaagagaactgtcttcatcccatgaaataacgttcatggccgtcctaagagaattcagacaaaaaaaagaggaaaggacctccaatttaacatcatgaaaccgtcactgagaatactctccttgacataacaatcactcatgatcagagccccgccaaagcccatgaaagggccgatattaaatccaagacctttggtggctaggttgcaaagaaaccctagcgtataagaattcaggttgattattgttaacgcagattttcgctaactaaatatataaccttttacataataaatttactacaaaatttaataataataataataataataataataataataataataataataataataatagatttaattttgataataggaggttttttctgatttttgctcttgcagctg

SEQ ID NO: 254565 - DNA, 565 bp, Cannabis indica
cttctctaccaccaacagagaatagcttagcgtgccactggttcataagtttccaaaggcgatctttgataccactaaaaagttctttcttgtctttaccagcataagatggtagacccaaatatttctcatggatagcacaaataggcattcttaacacactattgaatcgttccttaatgtgttgtgaagtattcggggagaaggacataacagtcttctctgtattaagaagttgtcctgatgcacggtggtaataatcaagtgttctgtggacagcttggcaagactcttcagttgcttggcaaaacaacaaactatcatcagcgaaaaggagatgcgatattgaaagagcctccctggcaatagataaacctttaagattacccaacaattcctcatgttggagtaaagcagaaagtccctcagaacatattaagagcaggtaaggtgacaaaggatccccctgttgcaacccacgttttggaacaaccgaccctttaacgaccccattaacattaaatgagagagccgcagatgttatacaagtcatcacaagattcac

SEQ ID NO: 254566 - DNA, 1444 bp, Cannabis indica
ttacaggaaaagtacataatataaacaactagttgattactcgctagttgtaagaaattagatgacataacaaaattacataaactttttaattataaatgacaaactaaacaaatgaatggattcacttaaggaaaagtcattccaattctaccaacattccaatcaactaaacactactctagttagttaattataacttttacaactcatacaacttaataacatgaaccaaactaaaacaataattttagtaatatataaattaatatgaattaattgtgagaaacctagttataagttacattgtgtaagtattaactagttataattagttactaaatactgaattttttttgttaggatattttttttgttagttactagacacactccgatttcaagtagggttcgatgcatttttagagtttgccttaaagttttctaaaaatcctgaacgtattcattgtccatgagtagattgttgtaatggatctaaatgaaatattacaataattaaggaccatgtgtatttatacgaggttttaataaaagttatactacttggtattcccatgacgaacatttagctgatgatccatatcctttaggaaagcagggggtagatgatatcgagggtaatgatttcgatgatcatccattggacttgcttaatgaagcacatgaggaatttcttaatgatcctaaaaaattcgataattttctaaatgatgctgataaacccctattcaagatcccccacgccaccgtatttggatcaaatctcagaccaagagaataaaacttgtcactcattacgacaaggaaattgtcgaaaagatagtaagtatatattaatctttaattgagtactactaatgagttagtatatataattaatatactaattgcttgaatatgtacattaggctcaattagaggagcaacttactcagggacaaattcaggtccatggacaaaacgatatcctgacgcaggcgctcaggacactagagcatcctggacgtgtcagggctgctaggtatgctagtacttgaaatttttttccttagttatacaaaaaaaaatcatagctaattttatttcatgatttgtaggttcctgaccaggacatctaaactgtttggcaagaaaaaaaaaggaattttctgatgttgtggctcggcaacagaaggagattgataaattaaaagccgaaatccaatcccttaaacagaagaaaaacactgcccaactagaggaagaatgagaggtggatgatcaggcatatgttccacaacaatacgctcgtgaggatgaggggttgaccacaaatctatgccgaagagtttgtttccctcaacgagccacctctcttgtacagtttcgatgaccagagggcccttgatcaacaagttctgacaatatcgacaatattatggcc

SEQ ID NO: 254567 - DNA, 598 bp, Cannabis indica
ttaataggatttattttatttttattttattacatataattaaaaagtgacacatgaatttctcataaatcatttatttttaataataaaccattttatttttaatataaataaaaagtcaccacgtcaataaaacaaaaagtatcaaggtccgtttatgctctctcttggagaagagccttccgtatttgaaatgctgcaaaagccagaaactaccatggatgatcttcttgccaaagcctcgaatcttactgtgttagatgaagatggctgagaaatcaatgaggctgggggagctgttgctgggggacactgtgcgaaagcaaggttctgctccaataggtcgatgattcgtcctctactgaagacgattttaggccaggtctggggaattgctgataataaatggggagttgaaattaaattcagcaataaaaactcaagtttcttggttttttctttcaaatctgcccaaaatctgaacagaactttggtcaagagcccttggttcctcaattatgggactttgattcttgaaaaaatggagtctttgccccaagattgggagaaggaacttctgcgttttccaattagtggg

SEQ ID NO: 254568 - DNA, 551 bp, Cannabis indica
caccagaatttgaaggactcagttttttggaattctttagaactagacatgactgatgtcttaaaacaagtgtcgtaaacattgcattgttcaatttcaaatgcagaggacatgttcttgacaaaggaaagaggatgctcatgatatttataatttaagactctgataactttgcaatccatacacaattgaaaatcacattgaggacattggaaataaaaggctctggggtctttgtttttacaaagaaaacatttaccaatatagtaccttttaaaacgaagagagagacaaccgtgattaggatggagggatgtttgcatttgttgtgggagttggtcaatgcattgtttatgaagaaaatactcacatctattgcaaccataataaactccaccatctgatggtgaatctttagtttgacatgcaaagcatctaacatgaatgtttttgtaaatagcatcggttgtatcaacaagtagtagcaagtggggatgagtagaatgttggatgcaattttgaccttcaggacatgttattatggagtttga

SEQ ID NO: 254569 - DNA, 847 bp, Cannabis indica
tggtgccctcgagcatctctcattgcaaaaatactattaatgcattataattgacttttagcatttcaaaaatgcctcaacttcttgttcttttagagaactttattttgaaccattcactgaagcaatgaaatcttgcaaggacatgcaaggacaaccattatgaagctatgtagaagttcacttgccataagttttgcagcctctcaaaattcattatgctctcatctctctttgttccatatctttctctcactgaaaaaaatggagcttcaccggctttaatggcggcagatttgtgaccccaccatctcgcaaagaaacctaggaacattggtctccaaaaccccattgttcctcccttctatccccgaatctactttctctgcacaacaaaagagtcgatcttctgtgcgctaaaggacttgtgccaccttctttgagatggaaacaactcaccaccaccgacggagacctaaaatgaaacccccaccagagaaagtaattaatctaatcccaagattaatgactaaaaaatagaagaaaacaaaaatcgtaattagattagtatttggaaaaatcagacttaactttaagtaatatataatatttaagtaacaaattatttgaaatgattttttattagaaaaattattgtacccttttatattttaaaactcctgaaaattattttttactaggaaatgtcctagtccaaatgaccacacatatgaaaccatatggttgtacaccctaaaagtgactcttgtgaggaagatttgttttgggggattctttaatcttgggacatacttggacgagtatacacgattattgttgatcttcc

SEQ ID NO: 254570 - DNA, 655 bp, Cannabis indica
gagagagatggctgagatcgagagagagggggatcgagagagatggcacctgggtcttgggttgctactcgctgctacctgcgagagagagaaagagaaatggcattagaaaaagaaagaaaagaaagaaaaagaaagaaaggaaaaaaaattattatttattaatttttttaatttaaattaatttttttttaaatttttttaaataattatttacgtggaccaataaaattgtgccacgtgtatattgtgtccacatggacaattcaacctggcaattaacagctaaagttggacgggagtgttaaattgctaacagaacacgactatggggttttaccgtccaaatttagattttgaggattaaataaaaccaaaatgaaagttttagagagttttgccgccatttacccaaatatttattctccctactcatatacttacaagtattactagcaattagcaagacggccaaaataacaatactcaataaataattctagagaaatgctaaaaaaatagtatttaatataacttagattctatataatttaagaaattaatttttaatgaatattgttaagtaatcatagagtgccatctataaaaattgttgagaaccactaatgacctggtactttctaggatctaccag

SEQ ID NO: 254571 - DNA, 552 bp, Cannabis indica
aaactaaactatgccagccatagctatagctatacattttctccttttgagcttaactgatgatttacttaataaatgctgtatagtaactaagtcttttctgggcccatcaatccttgggaaactgatgttcttgggctcctctgttttgggtttactgttcatagtttgttttgggttttccttttgttatgagaatgtgtttttatcacttttgtctttctaagagtttgatttgagaaatgctaaagatcactctatagtagtatctaacatcctatattattattaaggaatttttacataaaataccattttttttctgttttttaatatttatacggtaccataatttcagtttttaattttaccattttttttaaacttttatacggtttcttattaaaaattatatcatatacggttttggtttttatcatataactccctacacgtttccttctaatatgtcaaatttcaatcacttccctgtcagttaccattatctaacccactccctcgatattatcattatattttgaatttcatatt

SEQ ID NO: 254572 - DNA, 894 bp, Cannabis indica
gcacggtctgaaggtgtctcgacatgcccctagtgtttcacacttgttcttcgctgatgatagtttgcttatatgtcgggccaaccccaaatcggctattgctctaaagagttctcttgatgtttattgtcgggcttcaggtcagaagcttaatctagacaaatcagttctttcattttcaccaaatacactacctacggttcaagccaatttacatcaaattctacaaatgccaattaaaccatgtcatgaaaggtatctggggcttccatcttactctggaagggataaaaaggtgttgtttggagacattaaagagaaactttggaaacaattatcggcttggcaagaacaacttttctcaattggtggaaaggaagttcttctaaaagcagttgctcaatcaatcccaacgtacgctatgagttgcttcagactctccaagtctcttattcatcaaattgaggtcatgatgaataaattttggtggggttcaaactcttctaaatcgggtataaattggaagacttggtctgctctttgtcaaccaaaatctgaaggtggaatgggtttcaagagtttccttcacttcaaccaagctatgttggcgaaacaggcttggcgggttttttctaatcccacttctttgcttggtcgcattctcaaagctcgatacttttacaactcttcttttctggtttctaacaaaggatcatacccttccctgacttggcaaggaattatttggggaaaagaacttcttgtaaagggacttcgatggaaaattggttctggtcaaagcattttgtgtaatactgatccttggattcctggtattacaaactttttgcctttgcgatcaaatggaattgcaccagatcagcgtgtatcttc

SEQ ID NO: 254573 - DNA, 983 bp, Cannabis indica
taatattcacacatacacctattatagtgaaaaaagggaccaactaatcctgaatgccctcgaggagtgagaaagtgacagagacactagctaactctaacatagctattggcccattgcgttacattactgctccccacttcactcgtggtggtgtgtgtccgaaacttggaagtgtagagccatgagcggcgaaccgaagagagaagatccactggccaaagccaccacagcagccgatgatctctaccatctccgagatacgtactttcccccaaatccagatgacaaaatctctaagcttctagcttcactccgatctacgctctcaaccttctcgtattctatcccttctggttaatttatttcactaaaacctaatctcgttttacttatttatttcttcattttgattgctgggttttgtctattttgtggtttgtttgcttggggttttgaaataaagaaccagcttacctattttggatagtgattttgtaaaaatgattcaacattcatgaatttgtactttactgaaaactgggccacactcacctttattgccaacttatagttgttgctgttcgaaagctcatttcaagtcgaataacatgaaacccaattgaagtttttgaattggactgattaatttgatggtatgtttcaaggaaactgttcgtgggtctcttgaaaacaaataacatttcatcacttggttgagaaatgtttagtgtgttcatgatggatatgtgaagcaaaagttagcgagtctcactttaatgctagtttgttcacgggggatgtatgtacgtatttattttacttgtggtgggctgttattcttgctgagtttgagtactgtaaaatttgaagatgtgcacattctattcataatatgagatgaaggatatttccataaaatttgtttttatttattgccaatttctttattttttgggtaccatttatttatttgctttttt

SEQ ID NO: 254574 - DNA, 551 bp, Cannabis indica
aatgttcaacagttcacacaatcaaggtatcatctttctcttagatataaactattagtccctccacaacctaaaatgcattggaataaggaagtttgggggaagtttaacatccccaaatgcagctttattttgtggattgctatacagggcagattaaggacaagagaacgattgcatagatttgggatcatcattgatccaggatgtgttgtgtaatgctcaggaagaaacttgtgatcaaggcttctactcaatctttatcaaggcttatgaagtggattgaaaggtgcaaatgcagcaaattcaaaaaatacactctctcggctgcaatggcaagcttagtctatcatatatgaaagactaagaatgacaaagtatggaatggaaaaaatgaagatataaatagagtaagttgtacagtcaaagaaatggttaagctagaatttatagtgtttggccgagaaaggttgggttaaatgacttggctattggttcaaaaatttatagttgtaaaattaatttttgacaatagatgtaaactgtaaaaa

SEQ ID NO: 254575 - DNA, 546 bp, Cannabis indica
ctcatcaaatatacaacttgacgtaaaacaaaactgttttgcaatgtaatgagcaatcctatttgcagatcgtataacaaaagaaagaaaaacattatgtaactcagagagagtagcaatcgacaatcttgaacaagtaaaccaaattgagatggcatttgaactgaacccttaatagcctgaacaactactaacgaatcagtttcaacttccacttcagttaacttcttcatcttaatctaacttaagacttccttgacacccacaacttcagcaatctcaggggaaatcataccaatttttctatttgagaaagcttcaagaagcttaccattattgtctctaagaatgaagccaaacccaaactgattctagtttcaaagagagccccatcgacattgatcttgagcttagttaaaacaggtttcgttcaatggtctctaacattactaaagtaaacatttagtaaaggtatggaaccatttgattgagcattgttccaattgtcaagattagtcttagtcgatcgaatcacctcagaaactt

SEQ ID NO: 254576 - DNA, 769 bp, Cannabis indica
gagtagttttagaagctaaatgtaggagcaaagtttgtaaatttgaaccacatgtagttaaaactttgggcattaaggaggcatcaagttggatcaaggctcatgaatgataaaatgtgatgctcaaatcagatagtattaccgtaatcgatgatttggttaaaaataaaaacatagtcttttcttataactgtgtaattttggattgtaagtagggatgtacaccgggtggggaattagcaggaatgctctccctatccctatccctgttaaagattttaatccccaccccgcctcatctccgcttattctccatcggagatggggcggggaatcccctattgtaaaaataaaatttattttaaaaatttaaatgtataaaatcattaaattacataaaagataaaaaattacatattatttactattcaatatagtaattatcatacgaaaacacaacttcgaaaattgtaaaaatgatatttttatactaaaaaaatacaaacgcctatataaaatattactaaaaaataattaataaattaaacgggtccccgtcggggcggggagtgtcaaccccgttcccgccccgcttaacattcggggacaaaatttgatgggctattttaaaaaatatggaaaaaattattaaggttatgataaatatgacataaaaagtaaatgccactaaatatgacattatttaaccaattaaactaaaaataaaaaaaaaaccatataaaacattaaaaaaagaatttgaatttaa

SEQ ID NO: 254577 - DNA, 3284 bp, Cannabis indica
gtaatgggttttatttagggcacaaaacccaacacttctggcgtaggcttaagaaaattctttggcttcatagtcaacgccaggggaatagaagcaaacccagataagatgcaagcccttttggacatgattttcccacaattatcaaggaagtacaaagcctaacaggacgcatcgctgcattaagcaaatttgtgtccaagtctacagacaaatgtgtacccttcttaaccattctcagggaaacaaaaaatttaaagtggacaaaggaatgtgaaaacgcactccaagagttgaaagaacaattgactcaaccaccgctgttgtctaaacccctggaaaaagaggagttaggcgtgtacgtagcagtcacagagcatgctgtaagtgttatcctcacaagagaagaagacagtgtataacaccatgtatactacatcagcaaaaggctaatcaatgccgaaagtcgatacccactcatggagaagctgactttgctcttggcttccagaaagctaaagccctacttccaagcacaccccacactaactaaactcttgagatctctcaagacttgggagaaaagcaagagctagagaaaaagcaagcgtaagagcaacaacaaaatcccaaagtactaacatggaaactccatgttgacagaagttgtactggccaattgttcggtgtaggcattgcccttacaacacctaaggggtagaaactacacggagcaatcaaatcagctttaaagcctcgaataatgaggctgaatataaagccttcatagctggcctcaagctggcccatgaagtatgggctaaccacctagacatattcagcgattctcaactagttgtgaatcaagtcctaggtgaatatacaactcaagatgaaaagatggttgcctacttgagcaaaattaaagacttgctaagtcagcttaaaggctacacgatccctagagaacagaacgccacagcagatgcacttgcccttctcgcaagcaacaccattgctgataaagaaaatttggtgcccatacagtttctagaggaacctagcattgttatcccagaagaagtcgacatgttgaataatactccaacatggatgatgcctattgcagcttacacccaaattggagccttgcaagaagacaaaaatgaaacaagcaaactgagaagaaaagctgctaggtacttgatcctagacgtgataatgtacagatggagtttttccatgcctctcttgagttgtgtcaccacagccaaagctgaacgactgatgatagaagtgcatgaaggcttatgcgacaatcatgctaggagcaaagcctatccaagaagatactctgacgggagtacttatggccaacaatgatcgaagactcgatggactatgttagaaattgtgataagtgccagagattttcaaaaataccaagagctccacccaatgagctcacgatgatgcagtctccttggccttcaaagtgtgggggatagacgtaattagtcagctcccaaagggaaaaggaggggtacaatttgttttcatcgcagtagactacttcaccaaatggacagaagctgaatccctggcaacaatcacctccaagaaggtccttgactttgttgtcaagaacattatatgccagtttggccttccctagaagattgtgtcagacaacgacaagtaatttgacagtgacatgttcactgatttctgcaacagacatggcatcatcaagagtttctcagccatggcccatccttaagtaaatgggcaggtagaagctatcaataaaaccctcaaggacactctaaagaaatgccttgaggaaccaaaagccaactagtctgaattgctctcagaggtcctatagtcgcataggactattgagaagacaaacactgggaaaactccatttgctctagcttattgctatgagccaatgttgcctgtagagctagtgccaccatctcatagcagaacaacatatgaataacaaataaacaataccctgctggtagagtcctttcatgaagtagaagaaaaaagagaacaagccaacctaaagctggaagcctaccattaaaaggtagcaaggcacttcaacaaacacgtcaagagcaaaaaattctgtataggacacttggtgctcagaagagtgtttccaaacactaaagattcaacagtatgcatgttaggatctaactgggaagacccttatcaacttatagagataacttggaaaatggagtcaaagaaagttatagttttatatgatgttttttttaaaaaaaaaaataatatatttattttttaattgtaaccaattaattgttttaatacatttattgttagcttgttctatttttaatttactatctaacaaattagatatttttaattttttatttttgttagtagtatagtatttttaaaattatacctaattatatataaatatattcaatttaatttaaaaattattttttctagaagaaaataatagtaaatatttataattttaaataaaataattttcataattaattatataatcaaatttgaatttaaatgacattatcatttcaaataaaaatcataaataatctaaattgaattttatataattcatataaaataaaaaaaagagtacaataaattaaaatctatccaatatttgaattcaaatctacaattctaaaatatactaaataaaaaaaaataaaaaaataaaataatgacaataaaataaaaaatagtatatcagtctattagatgaacaataataacttgatggttccttttttttttctttgaaagaacaattgaacaaacattgttcaaataaaaaacaccactaagaacatattttctagaagaaaaagagaagattgcatgagaatatatatatgtacaataaaaaaaaaatcatgcaatttaatttataactttctatctaaaagaaccataattatacattacttaaagatttatatatataaagtcaaagtataaatattttttaaatatatattaaaagtaaagtacatgcattgaataatatggtaagttagtattatttttaagtaattaaaatttaataaaaataaaaaaaaagaaagaattaaaaagataatacataaaagtattttgagtgatcacaaaattttcaaattcttcacattatgatctcaagcaccacgattccgagcacttccaagtccagtgctaatttagaaaaagatattgacaaagagaaaaagagaaag

SEQ ID NO: 254578 - DNA, 827 bp, Cannabis indica
tcatcaaacaccacatcatgagatatgtagagcctcttgtctttggatagacatttgtatcctttatgaaagagactgtaaccaaggaaaacacaaggagtagacctatactcaagtttgtttttgttatagggtctaagattaggataacaaaggcatccaaagacttttaacatagagtaatctggtggtgtttgaaatagagtctcaataggagtagacatttttagcacaggtgttggcattcgatttatgagataggcagcagtgcgaaaagcttcatcccagtatttcaaagggagagaggcttgagcaagtagggtaaggcctgtttcgacaatatgtctgtgtttacgctcaacaactccattttgagcatgagtgtgtggacatgctagtttgtgagtgatacccgaggtctctaacaaactagtgaatgatctaaactcacccccccaatcagattgtagggcttttattttagtgccaagttgaagttcaacttgggttttgaactttgtgaaagtaggaagagcttcatctctagttcttaagagatatagccaagtgtgtctcgaaaaggcatctacaaaacttatgtagtatctgtatccatttgatgagttgatggggcagggccccataaatcagagtgcaacagttcaagaggtgcagtgtatgtggtggcagaattgggaaagggcagcttatgagttttgccaaggcaacatgctttgcacacattgaaaagatttttattggaaacaggtatattacattttgacagagtcgttgtgacaatcttagcagcagggtggccaagcctg

SEQ ID NO: 254579 - DNA, 926 bp, Cannabis indica
actatatatttttaaatctgatgcattttgaaatatcaataataaagtgtaattatattaatagttattgatatatattacattaaattatttccatattaagtaaaatatatgtaatagattcatttttatgtaatagaatgtactaatatgtcatttattatgataacttttaaaacaaaatataaactgcccaattgatcatatgatattatgaataggccaaattaatagtgtttattagttcaggtatattttatgattttattatttttgtatataaatgtataaaaaaaattttgagtttattgatttctattaattgaattaatattatattatatgtatataaatgtattaaaataaaagtttgtgtctattgatttccattagtattaatattatattattttaatattgatttccattagcattaaatcagtatattaattcacaattattatataaaataataagaggtaaagttatgacaatcatatttaatatactattattgcataagaaaataacagctaagcatttatgcttaatttgtgctctattttaatactttctactatttctattttcattgatttttttttcgctccttttataaacttttctcctctattaattataatatagcctttaaaatttttatgattttttgtcttctattgtattcgatattgataattcttgaaacattatttgtttttttttttttagaaaatcgttttcatgcaaaatagctaaaggataccactaaattcttattatatgaaatagtaatgggtaaagttaacattgaatcacatctaaataaagtttaaataatatcatagtaataactcattatgtgtattttttttatctctttgattagtacttcttattactaaaaaatatacaatagctatcta

SEQ ID NO: 254580 - DNA, 903 bp, Cannabis indica
tgaaggcaagggcctgttcttccggcatggttagcttctggctttctggtatcaaaacaactccgaacgtgagagttagctttaatctaggagccgtagagaggaacatcgttcccaattggagggaaggcaaaggccttgagcagtcccaactgctcctttaaaataacaaaaatttaaaaatatgaagaattggtcccaaaatcctactccaacatatgctttatattgtgagctattatacatcagctctattccttcgaaggttaagagcttctttaaatcaattttatattattattttttcaatttctcccctcaattggatgtttgtttgttcatttttaatattttattatttctttttattgtttaatattaaaaatatgttaaaatataatatttaaatgaagtaaagaataaaacagagaaattaatatgtggtgtaatataaaaatttgagataaaataaagaaaatgctattttagtaattaattttaaagaataaaataaagacactgttgggagtgctccgagcactcctaacaactcctttaaaactagcttttcttaaaatgaagaagagaagaaggcaaaaaagtgtaaaaataatggtccaacaagtgatgtattttaaagaacaatataaagaatgcaatagtgcttctctacatgtagagaaacactattcatccttcaaaaatatttcaataatatataaaatagaattttattcttattttgttatgtgtattatagatatatatattaaaaaattattacttaaatgatatagagaaaaaataaagaaagttgttgtatggtataatgtaaaagtttgatgtgaaataaagaagtaaagtttaatgatgtatttgaagatagagtaaaaaagtgttagg

SEQ ID NO: 254581 - DNA, 781 bp, Cannabis indica
atcaaactaatcaataatttaaatcaatttaagaatgttaatacataaattgatcatatttataagacaaatatggactcatcagtaacacccttatatatcattcggtaagtgtttttcgttacttgcataaatatttgttattgacgaatgtattttgaataaattcaaaaatcataacttgtataaatatttgtacaaaaatatatttgacactcagtgccccaaaacagttcaaaaaaatatacagattaagttttcaatttttcaaataattaatttgtaaattataaaaaattagaatatgtctaatattattcaacacatataaaatcaagtccaataatcaaattgagtccctacctttcccaagttgttaaactttgttcaaaaagacgatcataagctctcaagtctcaagctccaattgtttagttcaatcttagacatcactcccatatataccatcaaataaataaataattatcatcattgcattctacattcaaaaccgagtctaacaacatataacatgactatattatttagagttccgaaacctcacctaaatgatgtacattgactattggtggtggtagaaattggtgtactgaaaatatcaccaaaaataggggtagtataaatcaaaacaactacctcgacgagtagatcatactcatgccaactatttttcaaaatagtacacgatatcgctagaaagtcatcagaaaggagcagagctacaaaaacatcaccggaaaaagtagcgggctgggtataa

SEQ ID NO: 254582 - DNA, 640 bp, Cannabis indica
ttagcaaaagtgaaggagtggcttagctggaaagtgcaaactacatcagtcacaaagttggtgaggtggattgagagagctaaatgtagcaagtacaaaaagaaggtgtttgcacaacaacgactagcttcgtataccatttgtggaaggctagaaatgacaaactttggaaaactacaaatgaagatgtggacagattagtaacaagagttaaggaggttgtgaaacaaagagtttttttgtatgtggcctaaaaaagatagtgtcatagagatgaatagttttgctcattataaagtaaataaaaacatgtatagagataaaattagcttaccaagttcggtgagactattagattgtacgaaatcatttggagtgatgaaaattataactggttcaataaaaaaaaaaaagtttaattcccatattatgtattcttctcatcatatgaaatttgggacagagataatgtacccaagcgtaacaattttaggaaggcttaaaatactggaacatttggcttcctttgatgtttgtaatgatacaacttgtttgatttgtggggagttagggactttattgaagatcacaagtatttatttttttcttgtaaattaaacaccgtttgttcatgtatcat

SEQ ID NO: 254583 - DNA, 1261 bp, Cannabis indica
cacagatgctaagcccattaacaattgatcaccaacaacatgggctaatacagcaaagaactatccaatcaacccaagttttaataaaaccaataaaatttaatgtaagcccaaataaaagtctaacattgaacccaaagccaagaaaagaaagcaagccccaatcggggattttcgttgtaatctggccaagatctgtgagttgaaaatagagtaatggttttggttttgataatggattttaggtcatcagcgagaagaagacgaagaagaaaagaaagaaaaagaaaaaagaaaaagaaaaaaaaaagaaaatcacttttaaattatttatttatttattttattttattaattaaaataataatttggaccagtaatattttgacacgtggcaatattaaaaaagtaaagggctcagttaaaattaagattaacggacaaacaacaacttggagcttgaggactattgccgctatttctggagcttgaggactaatctgtatcaacgtgacctttttgaagatttttaccgcaaatttccctttttaatttttaaaaaaaaatattactacgcaattctaatttttatattttagatctaaactttttacattacaataaacttatacattctctatattaattctttaaatattttattttgaacaaataattctttaaatattatatcttaatttattcattttaatatttctcttaaattcaataaaatttctatatcttaattttatgggaggtaacataccagtacatctccctctccaaaatcatacatcagatttgttttttctgatttctttattatatgacaatatgtttattatagtaatgatgaatatcctaccaattttcaaatattctgagtattttacattgccaaaacaaagtttaaataatttattgcacggctagcacgtgtaaaaaaattactttgaattttattttttaacactataaacaatctgaaaattttcaaattaaatccctttactgtgattcaccatgaaaaaaaaaaaaaactctggcttctatattttcgtggaaggtgatgtaactggtacaacacaacaccactcatagacctccccaaactatatatagcaaaaataaaatatataatatgtagaatagtcacaaaaaaaaaattaactcttaagttacaataaaatttagttgattttgtggtctaattaaatacatcatatgtgattaaaattactatgactaaatgtaatag

SEQ ID NO: 254584 - DNA, 581 bp, Cannabis indica
tgtcccactatttttagtgtgacgttatagactcccacatatatataggatggcatttagagttctattggagcaattttatgttaaaattttactatttttgagattttagtgttctattggagaagccctaaaagggtacaaatagggtcctaaattgattttttatcaaaataaaatttaataataattcgatttaaaattgttatgacaaaactatttacatttcatgtatccattcatgttaggaattgtcttcaagctgattatactaaaaaaagttatcgaaaattaaactcaaggtcctatttttactattttgaaaaatacagagtcatataaaatataacacgaatacgacacgttgacacgttttacaacctctaaattttacaaaaaaaaaaccaaaaattaaatatataaaaattaaaacataaataaatttcaccagcaataataaagagttcatacttcatagttcggtccaaaatttaaaataggagtagttaaatataaggacagtttaattgatgcatcagtttctgaatcacacgttaataaacaaaaacagcaaagtttgt

SEQ ID NO: 254585 - DNA, 967 bp, Cannabis indica
aataatttgtcaacgcgtggtattttttaaatgaacaaacggagcatttaattagggactaacgaactaacgaatatggtgaccttagggactattaccgcaaatttttgaggttagggattaatctgcatcagctataagtttttagggacttttgccgcaatgatccctttgtttttctttaatttttttttttttactatatacaatactaaatttatatattaaaaagatatttttttttctatatattcttttcttaaatttaaaatatttttttaactatataaataattatttggtctcaaaaattatattattttgatttactcattaaaatgatcattttaataaattcaaagtatatatgttttatcgtcaccgtagaaaatgaccaaaatttaaagtaatattttagttttttttttatttaattaactaataagtaatcaatatatttttgtttggaaaatataagtattgtattccaattaaacttattttataaattaattttgatagacacttttaaaataatttaaacatcatatgaggttcattaaaaaattacactaattttacttgtaaacttttaaataattttttatactttattataacttatttatttcttaattatatttaaaattaatgtaaacgatgtttgaaaaaagtaacaccaagatctaaataatatcttacacataatagaattagttgttggaaatattttactggatctctttcttctcctttcttgatgttgattctccttcttgttgtattggattcttcacaatcttccaaactatgattgagataccatttgatgtgtgtgggcactcactcattcactcaaggttcgaaataattgaagaagaaaagagaatggaagtggcggctagggtataggtagaaggcttagaatttttttctggaggaatgagatgcatcatctttttcctga

SEQ ID NO: 254586 - DNA, 701 bp, Cannabis indica
caacttaagggtaaataagtgaatctgtaacaacaggtgggcatctgtataaatataaataataatggaattaatgaaaataatggtaataaataagagagagtagttaagaagaagacaattgagagagatcatatagatggttgaacatcctatccaatcctttttctttttttataaattttatccaatctaattagtaattaaattttaataattattatttaattataccttaaaatctatttcaattactaattagtctaaattcattttttaattagatatctaattacaagcattattattaactaaaaaacatgaagcttaaagcatataaattaaagactggctaattaggattttttctcccgaactttgatatgtaccaaatcatgccccttgaatttttttgaccgttaaaaattctctttgaactattgagattgttagatttaagcacttttgtttaaatcatgtccctcgaactttgatatgtactagatcatcccccacgaactttcatccatattagaattttttttactaaaattggacaaaagtccttaaattcaacaatctcaatagttcagacgtatttttaacgaccttaaaaattcaggatacatgatttggtacatgtcgaaatttacgagaaaaaatcctaattagcctaaattaaatttcactattcatttcag

SEQ ID NO: 254587 - DNA, 1426 bp, Cannabis indica
aaagacaacacaggcatactatataatcatatagttccattaagcatgtaattaaattaatttcataaatttacccttctcggatcataattactaaaatgcccctaactcaccaacggggtcttaacatataattaatcacattaatttatatatattgaactatataataatataatttcttaattattcttaattatctaattaggattttgctaatccatttcttaattttagggtattacactatccaaggcctggcacaggggacaagttgccagatttcttgagattcttgtgagaggtgtgccatgtaggatggttcccaaacacttgcacgttttacgcctttttgactatcattcccgaatgacccttgagggtatacgacttcgcctctttgaatgcttgctagttgaatgtatgattaccttttagaactattaagcttagtcacaaagaagcgactatctgatccagaagtgtcatttggctttacttatgggtcgactgatcgatccacttggacccagtgaatggacctgtcattcttaatgggcttacttgaacatacacgtgtcacttattcagaaatgcagataatatttaccaccaagccttctaggctcaagagtcacagagacttgcaaccatcatccgactttgtcatcgcaactagggccatgaatggtttgagtcttttgggattccatgatgacatgttgtggaagatcctgaacccttcatattttgctagtagagtacacatgtcgaatattctttgggtcgtgtatgttacgcggttcacggtagcgcgtgttgccttaggttgcaaacttatggttggttatgccagctagttactcgaggcgaatattatcattaatgtgcatgtcattggttttataaattgcattaaatgtaacttttggcattctcggaccattggatcccaaagattatgctttctcaaactcaatttgagcccttggatcggaggcacacgaattgccaagattcttagaataaaagctctccgaatatgattcggatgcctcaaatatgttcgtgacatgtctagttcatgtcttagtataaattttgacccatttacactaagacggtcccaaaaaatgaaactctagatgggttgttgacttgggcgttaggtgaaatcctagacacctaggttgatttttgtggtgttatttcatgtatttttaactcccaggccttgaacttggataatttgtaacaccctattgcctaggcacgctacagtaatttttctacttactgtgcactcctttgctaatcaaaaggtttttcaaaaatcatgacaaatttaaacttttaattaaatttaaacttttataaatataaaaatattcgtacaaaagtcaagatcctgtctttaaaatttaca

SEQ ID NO: 254588 - DNA, 752 bp, Cannabis indica
ttagtggcttgggaggaggtttgcaggcctcgggatgaaggaggtctaggaattgggagattggagttaagaaacaaaagtctgcttatgaagtggttgtggagatttccttcagagcaaaagtcgctgtggcacagggtggtggtaagcagatacggtagagctgataatttctgggattctaagaatggaagtcgtttgtctcccaaaggcccgtggagggatatctcagatctgtatgatgagtatttgggcttggtacaattcaaaattggaagaggagataggattcgattttgggaagacatttggattgacgattctcctttgattagtgtattccctgacttagcagtaatatcaagaggaaggaatgcttctataaaagaaatgatagtggatgaagggttaccaggtggttgggtggagagttggaatttcaagtttagaaggaacttaatggatagagagatgccaagccttatctcattaatgcaaaaggtggaacatgtaaaagtgttgagtattttggaggatagtcgaatctggaaaccggacccatcgggagtattttcttgtaaatcagccttttcttggttgacatcaaattcattgactgaggacctggtttggacgaagacgttatggaaaagttgcgttccatcaaaagtcaaagtatttggttggctcgtcgcattaggcaaagtgagcgcccatgacaaggtgcaaaaaaggaagcctttcctttacat

SEQ ID NO: 254589 - DNA, 5236 bp, Cannabis indica
aatgggtatacttgatgatatgaattatttgaaaaataaatgtatttattttgtagcggatcttttacaaaatcaattcggaatggtgctagttcgtttagaaaatatgattaaaggaactatgaatgggacaattagtcataaattgatattgatccctcacaatttggtaaattcgactacattaacaacttttgaattttttttctgattatacccatctcttatttatataaatataaatataaatatgtgagttataaatttggaaattaaaaaaaaaaaaaagtaattataattaatggtaattcgatatccttatatacaatatttcttaacagtatataattttagtggttatattttgataagaggagctatttattgcttgcttattgaaatttcccagaacatggtattaaaaagctataggcagcgggctgtatgtattatgttctccatggtcagttgacttgacctgaaagcaatcagagatacaatcatacaacactgctctttctctttttggtgatcgaatgaataagctcagcagaattttgattagcaatggatattgaggccaaccgatataggcctgtagtccccttattgggtctgcttctcctagccaacttcatacgtggagatgataccatatctgcaaatcaatccctgagtgggttttcaaccattgtttctgcaggtacgatttttgtactaggattctttaaactaggtaaggctgaaaactactatttaggcatatggtaccaagtagatccttcgcggactgtcgtttgggtggcaaatagagaaaaaccagtctccttttattcagagcttaagatttctgatggcaatctaattctgtacgacaaagaagtcccaatttggtcaacaaatgtcacctctgctacctctcctgatgttcaagcagttcttatggacagcggtaatctcgtactaacagatggatctagttcttcagaaccactgtggcaaagttttgatcatctttctcacacatggctgcctggaagtaaaattggatacgacaagataacaaaaacaagtaaacttctcacctcatggaaaagttcagaggatcctgctcctggcatttactccattgaattagatcccagagacaactcgtttataattagctggaacaggtcaaggtcatattggacaagtggttcgtggaacggaactaattttttccttgatccctgagatgcgtgactttgccgatttcaagttcctttttgtagaaaacgaaaacgaaagttacatcacttattctttttcaagctcatcatatacatcccggtatgtattggatgtttctgggcagctgcggcagctaatgtggcttttgtcgagtggttggaatttattttggtctcaaccgagacaacaatgtgaagtttatgctttctgtgggccatatggcagctgcaatgagaattccttgcctttttgtacttgtttgagcgaatttaagcccacgtctgaacttgactgggatttgggggactattctggtgggtgcgcaagagtaaccaaacttgaatgtggtaacaacagccttcctaatggtgagaaggacagatttctagcgatgcccaacatgttattacgaaaataaacagtctttgcgtgtcggttctgatgaatgtgaatcacgctgcctaaaaaactgttcttgtacagcttatgcttatgaaaacaatgactgttcaatttggaaaggaaatctcttaaatctggagcaactatcggcggcaggtgacaacattggcactctttatgttaggcaagcagcttctgagagaaaaaaaggcacgattgtccaactagactggatcttttataatccatatcattaaaaaatgccatgctattatgctaatctccattgtaatgtcaatattttctacagagtctagcaaatcttcaaagtctaagatactatatgctgtcctaggaactatagcagctgcttttctcatcgcaagtattgctttttctatacatcgtagaagaagaaaacagaccaaaagcaaaggtaatgctaactattagtgtagaaaatggaaatattctctcgtacttacacttttaataccaaaatgcaaaaataaaacttttggatttcctctagctataacttactacttcaagtgtcttttaaaattaggtgaaagaatgaaacttcaaggaattcaggaagttcggctatatgacactgagaaacaaattgccaactttataaaatttggcaaattcagtgaagattcaagagaaggtatagatgtcccatatgttgttttggaaagtatagtaatggctacaaataacttttcagacttaaacaaacttggacaaggaggttttgggcctgtttataaggtaatgctcatcctcatcttactacacttctcgagtctcatttttaaactactactactatcaccactatcgctttttattctttttcttattcttaaattttcttttttacaaaaaaaattaaaaaagcaaaaaaaaaaaataactaatacctgccttgaacccccaacagggaaaatttccaggaggccaagaaattgcaataaagaggctctcaagtggttcaggacaaggcttagaggaatttaagaatgaagttatgttgattgcgaaactccagcatagaaaccttgtaagacttttgggatattgtgttgaaggggaagaaaagttgctgctgtatgaatatatgcccaacaaaagtttagactcatttatatttggtaagtttgtttttgtgaattgatgcaaattttcatctctttatcggaatgcttttatcttagtttagaatttttacagatcgaacactatccgtactgctaaactgggagctacgctttgacatcatactgggaattgctagaggtcttgtttacctccaccatgattcaagattaaggattatccatagagatttgaaaacaagcaatgttctattagatgaggagatgaaccctaaaatttcagacttcggcttggctaggatttttggagggaaacaaactgaaggaagcacaactagagttgttggaacatagtaagtaatgcataaggtcctaacctgaaattgctttgtttcttagttttctattaattttttactaataaacttgtttataaaatttaatctctaatagtcaattttttatgcacagtggttatatgtctccagaatatgcattagatggatttttttctatcaagtccgatgttttcagttttggtgttatggttttagaaatcctaagtggaaaaaaaacacaggattttaccagtcagaagaagccttgagcctgttaggatatgtgagtgttgatgctatttcacatattaatttatattattgttcttattttgaataacctttttaatcaatacttgctcgcaggcatggaaaatgtggaaagataacaagacattggatttaatggatgcagcattaagtgagagttgcaatgcaagtgaattcttgaggtgtgtgaatgtggggctgttatgtgtacaagaggacccaaatgatcgacccaccatgccaaacgtgatcttcatgcttgggaatgtaacagcaagtttacaaagtcctaagcagccagcttttgtggcgagcagatctcttcctacctctgcctctcctagtaaatcatcattatccgttaacgaaataacaaataccttagagaatgggcgataaattagttagaagtaattatttattgaactagccaactataccgcgctactagctgttcagattttttattataacacaactgttttgattttttattatttttatataaaaaaaattatatttaatatacaaaaagaaaaaaaaatattagtttaactggatataatttttttttgaataaaatttaaaatttcataaatttcacccattacaatagaatgaacttcagttaaacaatcagtccactaaagatcacgacctgtgaaaaaacaagagctccttgcaatacaatgagccatcttatttgcatctcgtttaacaaaacgtaatacaatattactagcagaagaaagtaaagcacgacaatcattcacaatcaagccaaactgagatagaagaatggcattactaagaatagattgaacacacagaagactgtcagtttcaagaacaacctgtggccatgagtgcttcttgatccaacttaaagcctccttaattccaacaatttcagccatcccagattgaactctgccaaacaagctagtgttaaaagcagcaacaaaaatcccatttgagtcccgagcaatagctcccattccaaaacgctcctcatgttcaaatattgccccatcaacattaaccttgatactattaaaatctggtgtaatccattgctcaatattctttcctccatcaagagaagaagaaagagataaacctttcctggtttgagcaaacttatattgatcaagaattgttcttgccgaaaagacaatagcagctgtagaggaggctttattttgccaaataaattcatttcgagacttccaaatcgaccaacctagctgcaacttcctctaaaacactctcacttttcttctcaaaaaacactagcaaccactcaaaaaaatcaggtgcatcccagaagcaatgttgacagctgaaccatttcaccaggcccgtgagtaagagcaactcgcaagtgcgtgaaacgttgtttcatccgccaaattgcatttggaacaaactctactaaaaggtatatactgatgttgaagttgtgcacaagtaggaagggtgttcgtagcagcacgccacaataagttgctgatttttgggggatctttaaatcccacagctttttccaaaaaccaacatgattagatgcattgttgtaccctttcaaatccctcagccttttgtaagcactcttaaccgtgtacacaccatgggtatcaaacttccaagtccataaatcatccttagagttagaactcaactgaatcgacagaataagttgctgatctctaggttcgaaaatgtctcgaatcaactccacatcccagcatcggttattaacttcaaacaaagcattaattgttcttccttctaatgcaggatgagaagtgataacatacggattctccacacaatcaagcaaaggatcatgaagaatactcactg

SEQ ID NO: 254590 - DNA, 629 bp, Cannabis indica
tgacttccatgtcatcaggtaataggttaaaataaaaaatatttaatttacaaaaatttaattaatagttataaatatcaaccattagatttgatccaatggttaataatagaatattcactcataggtaataactattaaaagcatgcccatatatatattgttacataatatagcgggactaatatttaacataataatgattataatacattaattaatatacatctattaatatgcttaattatattctgcacattttaataactaatataaagagataagaaaaattaattgtgagtgcaatttcaattaacgtatatctaagacccgtgtaggacataatttctttaaacagattcgcctccttcagttagtgctagagaatttcaacagtgtttatctcccaagatgaaataaagaaaagtaacaaggagcaccgctttttaattttgtggaactaaatatgccacaatataaactaattactctaaggagtattttaagataatttataacactaacaacttattttcaaagaaaaagacttaattgactaaatgatatgaaatgttcatgagaaagttttggtgtaaaaaaatacatcaaatgcttaagactttttataa

SEQ ID NO: 254591 - DNA, 631 bp, Cannabis indica
tttttgtggttgtatttcatcaaatatcacccaaaccaaaccaaacacattccaccaaatttaattattttgttgctactagcaatgcgtgtatctatatgtatgggtatatatgtaattttgtaatatttttaaagtataaaatataaaaaatatacattaattttacataattttttttagcgtagcgtaatagtattttacaatcatttaatagcttaatagcttgaaggtcataggttcgaatccatgacctctccttttttcccatccctccctcaccactaagctagccttagtggcttacatttgcatagagtttgattaataatgcacactacctagtaccctactgctgtaaatttatgtcacaagaaaatattaacttgttgtgttttggaatgagtaggtcatgctttatttagaacatgtccaacgtaccactcaaatctcaatttagtgtgctaaattgctccaacatatctatctctaatctattttgacgcaattgacatatatgctctgtaacaacgacatttattttggaggagcttcttatggagaataaattcattgaagaaaagacatagtttggaaagtgagaaacaaccagatttatcctttttttttt

SEQ ID NO: 254592 - DNA, 1004 bp, Cannabis indica
aaattagtagctttgatgtaagtgaccacagtaacagacactttttcgatcaataaatgaataaagatgtttgtttcaatattcaaattgagtaaaatttactaacatgttgctaatttaccatccaatgcgtacaaaaggtttggtcgagcccaaaaccctgaatagacaaaagagcatacttgcaaaaaaaatgataagtgaccaagagtcataagtctactcggtcactggggggcacctatacctgtataaagcatttggtaaaaataaaacaaacacagttgcatgatgataataaacagagaatgaaattcattaaagataacaaagcatgcaaaacttggattaaaggctgcctggtcagcccgttgtttgaaaaatgaaaaataattccaagtttaaagaccgcttggccggtcactttgtcttaaaaaaatgccttatggccagacaaaaaaaaagatagaaagaagaagtattcaaacggctggagtcccaggctctttgtacgggtcttctgggccggtcggagctggaggattagttgtttgagtggggggcatgtctacattcttaccggaggtagaagtggtcgcctcggattctccataagccacctgagaagcgcaatactcgagaaagatatctttggaatttcccaagtaatcaaagtttgccttgggattagccttctagaagccataaaaaatctcgagacccactgtctctaaggcatttaccttctctctgagcctcgccactttagttctttcgctgcttggcttctgacttgtacttttcaacctcaatttcatgctcctcctccttagacttcttctctgcttccaacctgtagaaaacagctcgaagaacctccctttcttcttggaggctggtcacttctttggacaaggaggcaatggcagcttcaagttgatcagaagcctggagtgttgggttttatgccctaaataaaattccatttcaatgtaatccagatt

SEQ ID NO: 254593 - DNA, 955 bp, Cannabis indica
ttctagttttcattaacaatcttatgtatagtgcatcacctttgaggaaatttcctagtagtagtggtgatagtgatacttagggacaaagctatttttgcaccccgaattatgagtttgtgacctatgtattattattctcactgaactttttcagttaaaaataattcataaattattcagagtgttgtaaattgatcattctcataagttttatcacacctaactatcaaaatgatggcatgaatgcttagccaactgtcgtgttaatatcatgtcaatgccacatgtataattaatttgaaaaaaataatttaattttttaatttaattttacttaaatttcttaatcattgatgatttttagtttaataattttcttagatgtaatttaaaacaaagttaaacatttctttttacatataattttttattcttttgaatttgttatttttatttatcttaatttattattggagacataaaacaataataatttgttttattgtgttgttagttatgtaaaaaaaaatattttaaataaatattaaataatttaatattaaaaaataatcaattcaaaagaactgacccaatccgcacttttacgaattagattggattggatttaagttattgtgtgaattagattgaatctaaaatatgaaattcgtacttagcgcggatcaaatatataatgagcaaatttgtacagattatattgaatgaacatctctaaatatattatgtatatatatttttttttttttagcaaataatatatattataggtttgggtaaataaattatgtattttatagtttattttaaactcttaatattgtaacatggaaaagaagttataactagttaatgatttgtaactctttttagttgatcagatttcaagtgtaattaagtgagctgttacacaaattgattatggaattaaaag

SEQ ID NO: 254594 - DNA, 739 bp, Cannabis indica
tccaatagattccaacaaagatgttgcccacttaataacttcctctaggacgcctacacaagaaatgagctcagtccccagtaaaatttgaagccagtagagtacctagttgaaagtaaaattgtctacagattaagcacgcctgctaaatgtgctactgaatattgtgttaaaactaatcgatttaatcaagtttgcggtacttactcttgattgtgttcaataaaaaatgtaaggtatggtgaaaatacatagcaaatcacggatcagatttaccaaatcatacttctagttagttccacattgacaactttccaatggatatcaaaaattaaggaataaattgagtataataatttgtgaagaggctggggaatgagaatagagaaaattagggtaagaaaattacaacattttctttttctttgctggaatcagcttttgtcttttctaggtgaatcaaaatcaaaatagagagttaagagaataaattaaagaatagaaacataccaccgtcgaatcgtctgaaggaactcacgggaggttttgaccaccggaggttttgaaggaaggaactcaaaaacaactagaggttgtacgaaggaactcacgggagaagagagaccaccgaccactgtcaaattgtctgaagagaggtggttagggtgagttctcaccgtcgtctgaagaggagatgcgactgaagagattcacaaagacgtgaatagtgtgaggctga

SEQ ID NO: 254595 - DNA, 1629 bp, Cannabis indica
cctgaggccgaataagatatatccaaaaaagaagaaaaaaaaagagaagtgtttaagcagttggagtcccaggttcttggttcggttgttgtgggccaaccggagcacgaggatctattgtttgaacaggaggtgcataagcggcctgaccggaggttgaagcagctgcctccgttctgccataagccacttgggacacccagtactcgaggtacatgtccttagcatcgaccaagtagtcaaaattggcccgaggattagccttccaaaaatcaaagaagagctcaagacaggctatctccaaggcattgaccttctccttcaacttgtccacctcggctgaaagctccccctccttggcttccttttcctccttcatccgatgaagaactgctcgaagagaagtcctctcgtcctgaagactgttcacctcagcagataaggttttgatggtctccccaaaacggttagcagcctcgagatccttagtcagcacagtgattttctttcgagcagcaaacaactccttgttggcctcacccagttccaaccgaacaactccgacttctgccctggcttcttcagcatccttctgggccaagtctgcctccgccttcagggtgtcggacagagccgcgttcttggaagcaacagacttagcccgggagtaagtgtaagccaacttcagacgggccttcacaaaagaaaaactttagcatattgagctaagtatggaagattaaagggaagtatcaaaaaagacttaccctggtgaactccttcaagactccgcccaccaacaaatccaaagatgagtcattgtcagcaccagccagttgctcactgacctcaagaaccagccggttcatgtgatgggctagcatctccttgccctttttggactctagaagcactggcaaaggtggagaaggtgcccgcacccgttcaggatcactcctgacaagttcagaccaaactgttagtggtccagactccttggacttgacagatttggggtagaggggtttgcagcagtcagctcctcggaaagatcaatgacctccttggaaggcctcttttccttagtagaggacccctcaccgcccttagacttcttggccggaggagaggcgctagagcttccgcctattctcttcctcagagtgtcaatcatttgctgagacatgtctgcacagaacaaaaacattgtggttagaagacagccatcagaaacacaaggcataaaagttaacaagctcaaaaacaagataaagtaaaaggcaaggtcaccgcccgaacaagactcagaagtcaatcatcacctgacatcgatcttatctcagacatgacagctttcccttttccgaacatgagaagggatggtcgaacaggtgaaacgggctccctgatgcgaatcgcatgttcaacaggcctggcggggccgggagtttcttcttcctcttcagtggagtcacctgctcttcctcagcttcatctttaggattcaagggctcctgagcatactgcttggcccttgcacctcccttcagcttagcttcgcgcttaagttgaatgagttcattctcctgatgagctcattcggtctggccagcattagatttcctcttc

SEQ ID NO: 254596 - DNA, 1003 bp, Cannabis indica
tataaaggccttaacctctagctgaaaacctaagtgcttaagttgcctctaagctaaaaacctcaaactctctaagtgttagactctctctcttcttcattctctcacacgcctagcctaggttgtacaacaccctaggctgtccaacacttgagttctgccaagcattgattcatacattgtaatcctaagggcacaatagcacatcccacctatagcgatatagatagtaattccctcgattcatacattgtaatcctaagggtgcaatagcagattccaattctcaaagctcattttcaattttattactgcttttaagcaaaaaaaaaattcattacttctatttattattttttaaaaccttttatattcgttttttctattacttttttgttgtatttgaatcaataacaatttcaataaaatagttcaaatttgttagtgttttataaaatatataactatattataatatttaaaaatattatttgtaagttgtacattttttgtaggtgctcaatttttaaaattagaagacgacttctaaattttttaagacgatcatgtatatgatcttatatttaattattcattggtgttatattattatacttagtgaaaacatatctaatactaattggtatccaaaataaattgaatatgcaatcaaatattttcccatacgattttcaagggatttgaattgtaaacctaggatttaaggctttctatataaaggtcttaacctctagttgaaaacctaagttgcttaagctgcctctaagcttaaaacctcaaactgtctaagtgttagactctctctcttcttcattctctcacacgcctagcctaggctgtacaacaccctaagctgtcccacacttgagttctaccaggcattaattcatacattgtaatcctaagggtacaatagcatatcccacctatagcgatctagatagtaattctctcgatttatacattgtaatcctaagggtac

SEQ ID NO: 254597 - DNA, 1706 bp, Cannabis indica
taaacattaatgtatataaatatatatcaatacttaaaattaactaaaaataaacataacacatagagtgatataataaacatatatgaatattattattttgtttattaaattagtatgtttaataaatagaaaacaaaataaacatatatatacaaagtattttatataattattatgtttattataattgtaaacataaaaatagacatagtcaatttatactatactaaaataaatatattttctttctattgtttcaatatattgattattttctaatgagttggtgaacgaataaactattgaagtataattcttacatcaaaaaataaataaacaaacataattttataaattccaaaaattatttaattaaaaaaaataaacatgacacaataaacaaagaaaaagaaaaagataaacaattttatatatatatatattatttattttatatgtaaaatattttatattattagtatctttattataattgtaaacataaaaaaaaaacatagtcaataaacacatatataaaatattttatattattagtatgattatcataattgtaaatataaaaataaacataatcaatattatcatatatataatcatcaataattattaccatatatattataaaaaaaattaaaaaaaaaagtttattataatatataaaagtgtatgagaaaatgataataagttttttttcacatattttgtaattaattaaaataatgtatacaaaattataaaatgcccttgattaataggattataacaaatggataactcatagtgtatctatatcgtggaacatatagagcgttctatataattgagagttcaattctaaatctatagtggtgcaaggaggaattaataagttagagaatttacttggtaaattctggatctgtttattggaagctcggttatataggcccatggtccccatactagttgaaacaaactgcttgtaagactcaattaattgattttagttaattaattataattctaaaattagagtatgtctagtttatgaattttgactaagttatgacttgattgtgaagaaataggattttaaggtttatttattaattaagagactctgtggagtctaattaataagtaatataaatgacaattttattttataattattttaattattaaataaatagttttggcatttataggaatgaatttgcaaaaagtggtatttgtgaaaaatagataaatggttgagaaaagtggcaaaaatctaactagtgatggacccactaagggccggccacttagtccatttttcgccattattttatcattttttattccaaataaatcaatcctaatcctaactgaagtagtataaaaagaaaagaaaggtctcattatccaactaatgcaacaaatgactcttgacctagttttcatcttctcagataactagtgagcctgagacttcttcttcttttccttctaattttcgaaatcctatagtcttcttcaccattaaatttcagccttcagtaattgagtgcatgcccacgcatagcaagttagtcctcaatcatagtgtgtaaaactgtgaagaatccaaataatagaaggagtgtcgagctcagatcttggtgatactctgtcacagaaaggatacaagggttaaaaatttgagcagaatgagtcattta

SEQ ID NO: 254598 - DNA, 545 bp, Cannabis indica
aaaaaaaaaatatttaagatatatcatcacctccaccctttttctcctacccaaaaccctaagaagcttcaaccaaggattttcttttctccttcttttgcttaaattctcagcaattggattgtagttgcaaggggtagaaaatgctttgatatcaagctataatcttgtttattttcctttgaattattttagttaagattgagtttttgatctagctattctagagtttcatgcctggttgggatagcttgaatcttgagcttattctcaagtttaatttgggaatgtttagatactaattgatgtatattgtggctggtttggtttgaattagataattgagtttttgaatcaagttttggttcaaacttggtgaagttatgaattggatgaattgtggttaattgatgtattggatatcttgtatttggtatcttatactgttctagaaatgctatttaggtctgtgttggtttggttcgagctggggaagaaaacagggggacaccatgctatttaggtcgaccggttgcctacagggg

SEQ ID NO: 254599 - DNA, 892 bp, Cannabis indica
aagaaaaaacaaaagaagcacaacaagtacgtgccagtctacactatttatactgagcttattgaaacctgggaaaatatctacctcgcacatgagcatagggtcgcattccgtaaacttgggcccatgagacatgcgagacacaaaagagatgcaacaaaattttaactgcaaaagttgttgcctagcgactatacaaaatacaaccagctgtcctaaagatcgtacgctctaggtgtaatagccccaacatgtacaatcctcatccgctcatctcgcggctgctcaaccatagccttgcccttacctatatatgcaaacaataactgtgagcgaaaagactaagtaagaatatcataatcataaacataaatttaacattaattataattaggcgcccatacaccaaactataaccctatccccgtgtcccacacaatactgagtctagaacgttcatacaaccatactatcaaccaaaatatcagtatatactcggtaatctagtcatactctagtcgtacagatgtgatagcgttgatcttgtaattgccaaacatacatcaatcaatatccagtacaactctacatataaacatgcatgctaaacatgtaagcaaatatgcatatcattgtacaattcttacctcgttttcaaatttaggtgtgccggtcaacttgagtggaactgctgctcgacgatttacacgcccctgaatcacaatattcgtaaaactgatgagtgacatgatatatcactttttgggaacttaaaataaaaaataaattaatccctatcgataaataacttggcaataccctaaatatcgtaaaaatagaaaaaactaaggttcgctaaaataccccaactggtagatcggttccccaaccg

SEQ ID NO: 254600 - DNA, 771 bp, Cannabis indica
tgaagcagttcgcagtgctaagcggaaagagttcaccaaattagtacaaactgaggggatgtcggttacggagtatactacaacgttcaatcatttggccaaacttgccgtgggtatggtgccaacaaattttagtaaaaaagaatagtacctggccggtttgaatgtgaagaatagacattgtctagtgatcactaccaatgaagcaacatcttattcggaaacggttgagaaggcccttcgagctgagggtgcggtaaaattccttcaggagcctcgggtgactctgagtgttggtggaacccccactcttcctactcctgtttatggtagggatagtggtgattctaccactgagtagaagaggaaagttacgccggcatctggtggctcggggcagagcaagcggttctgtgggaaccaaggtagaggtggacgtcagggttactcttaccctgagtgcccacattgtaagaaacatcatccaggagagtgtatccggaagacatgctttcagtgcagcatggtggggcattttaagaaagattgccctcaggcaaagaaagaagagccgaagtcagaggcaaaacatgtacttgctcgggtgtttgcgatcactcaagctgatgctgcagccagtcattcggtggtgacaggtcagcttcttgtcaacaactccttgtatattgtgttatttaattcgggagctacacgctcatatgtggctacacgggtaattgatcttttaggtaggccttgtgatatacttga

SEQ ID NO: 254601 - DNA, 571 bp, Cannabis indica
atcatcaatcacaagccaattttattaaatttagaaatatttttttcatttattttattagaacagcacatgcaatttttttagctccacaatttttaatatttgtgataaaatcatcatctttctatatatcttaaaaataaaaaattatatttttaatttcaatattattactttatttgtaatacacacatcaaaatattatatttagattcaaccattgaataagtacaaaaaatatataaataaaaaagttacaaaagttggataagatgattgctcgaattgtaacttagtttcctagttattaaataaaagtaaacaaaagaaaactaatgaccactttacattacattctcaatcgtaaatagtaaacacgccattaagtttttaacatttttcaattcagacatgaaatctcactgcatgtaaaatttaggatgtgtttggaagtcattgtgtaattactcaatggtgtaatactaaggtagtaattacacatgttagtaattatactattttaaaatataaggtgtattgagatggtaattatataagaatatttttattt

SEQ ID NO: 254602 - DNA, 651 bp, Cannabis indica
agactaacataatagtgttagatctttttttttttattatttttgattaacaagacttttatttcacaaaacactaaggctaaatagcagccacatggggagctgcttcccaaaaaatagacgcatcacaaacacgattcactcgagcgtgatgagcaagctgatccgcaaccaagttttcagaccgggaaacataaacaacagaccactgtttaaaagagtttaaccaagacaaacacttggcaaaacttggataagacccccaagcataaggtaaagactttgcttgcaaggctttgacaacagtccaagagtccgagagaatactaaccacttccaaacaagaatcagcacacagttccatacacagcagaatggcttcaaattctgcttctaaaacacttagcacagtccggaaagcctgtgccgaaagtgcaacctcccttggaacattagcctgaacaattccaagccctgcatcattcccaacaaccgaggcatcaaccatgaacaagataccagatggacttggggtggcacttagatgttcaggttcagggtcactttccaaacccaccaaaccggctaaactcctgccactcagggtgatcttttgaaagccgagtccgggtcaggccgtaccactcccaa

SEQ ID NO: 254603 - DNA, 584 bp, Cannabis indica
gatggcatggtccgacgacacaaccaccttagagttgctcagttccatcagcacttgactgagaagcttgacatggagatgccggccttgcattatatgatcatagagtatcctggaaatgaggaggaaaagatgaggggttcaattggaaagtttggcctaacaggtaaggttatggctatgaagagtctgtcagatggccaacggatccgtgttatctttgctcaattggcttttaggcaaccccatatgcttctccttgatgagccaacttctcttgccattgccagaaagctttcttcttttccggttatggctttcttttcaagctcattaactcccaccgcaccatactccatcaattcattcactcctccttcatctgggctttctcttccttcttcatcctacaaccctcttaagctccctctcttctggccatggcagaaggtattttctttctttctttcttttaatttgaggtgttttgaaattgataatggtgtgtgaataatgaatgtgaaaccaggtgaaagtggggccactaaggtgtctccaataggatttggtacatgggcttgggg

SEQ ID NO: 254604 - DNA, 994 bp, Cannabis indica
taaattcatccagaacctcctttaactcctgaattgaacttaagttccctttgcagaaaaacatcaggtcatccgcaaagcaaagattgataactttaagattcttgcataaagagtgatacctgatctttgattggtttgctgctagcaataatctcctggtcaaatactccattatcatgacaaataagagaggagataacggatctccttgtcttaatcccttcatgcctttgaagctgcctggcactcttccattcatcaagaccgaataggaggtagctttcaaacaagtcattatccacatgatgaatctcgatggaagtttaaagtcattcaataacacttccaagaattcccaactaactgtatcataagctttactgatgtccactttgagagtgcaccttggggatatgttattccttttgtaattcttcaaaaggtcttgaagaatcatgacattgtgggctatcgatctcccttgaacaaacgctccttgattttgattaatcagtacaggaagcacttgaggaagcctagaacataacaacttcgagatgcatttgtacatagttgagcaataggctataggtctgaaatccacagccttggtaagggtttctgtctttggtatgagagtgatcatggtagcatgtaattctcgaggcataaagcctgtcttaaagaagtcttcaactgctttagtgaattccactccaagttcaggccacatagtcttgaaaaaaccagctccatatccatctggcccaggggattttgaatcaggaatactaaagaaagccttctttatttccttgcttgtgaaaggtcttatcaaactcaattgttgttccaagttgagtctatttcccagctccatacaatcagatctcaggttctgagtggtgatagaactagtccccatgtaccctcagaaatgttgaatgaagtgattaaccacttcattaaagtcatctatgatctcaccttg

SEQ ID NO: 254605 - DNA, 500 bp, Cannabis indica
gagttattgatttaaagggggaaacaaaacgggaaaacattcatgaatgaaaagaacaaatgtttcatcatctaggccgaaagctattcgtataaatgacataaaagcttctcttaaaacatgcatcaagaataatataaaatagataaaaactcacgaataatactaaggcaaataagcatttaatggattaagcaaacaaattatcacatgcttcataaaccaggcacaattctgtgttctgaagccattcttaaaacttaaaacatatatatgctctttatttgtataacgatagtaataatctatttttaatcaagacttctcaaaccattgttaacaaagaaaaaggccttattctcgagtgtgaacaagtaattaataaacagaatcctaaacaagacacaagccgttcaaatgacacagaacaacaaattgaagaaggcaaacaagaaattgagaagaaacctatttttaataaataaattgttgtattcaac

SEQ ID NO: 254606 - DNA, 1249 bp, Cannabis indica
caaacataaaactttaggtacttactctaagtattattatttttttttttatataaatagtgcttaaatcaaatattttttttgataaaaaataatgttgtttattgattaataataacataataaaacataattatacatacaactaaaaatataggtaaccaaaataaaaattataaatataacaaagtttaactcaaataaaatttgtatataattaacctactttatatatataattaagatatttaagagagtacttttgagaaattcaaaataattaaccatacaaaaagtatgactcaaatactcagtttcaaattcgtaataaaataaattaattaaaagaaatatgctgtttaaaatttatttttaacacattaaattattagaaattttttaaaatatgtacttacttttaagaagtgcaagtaaaattttcatatatgtatatatataagacacgagtgtttgtacatgtttttgtagcatattttcacctgacaaaatttctattaattaattcgatatcgtacaagctatttgtaatattaaaatcaccgactatatattcatttcaattatgtatattttcctccaaaaattaatctatcttaagattttaattatatgttggtgatgttgagctagtgctctcaatttatgaatactaataattaacagtcaatgtaacttttttcttttcttttgagatgtttcatcatagaatattacaatattatacgtacaacataacataatatataagatgagtctcattttcagtccccaagccaaaggcagctcaccatgactgcaaagctcctaatttataatgttcttgaccttgtaattctgatcacagaacactttttggtaagtaaaaggagtgtcaaacaacaagtgggaaaccaacaagaccacatatggggataactaacaacaccacaaaagggaaacaatacatatatatatatatatataatactttatatataactcatggagtaatgggcttgtgaagtttgaacagactttggctaattaagggtgccaaagcctccaaaccagaatggtgaacatgggcaatttaaccgtttctattaccatagttgttctaattaactataggaataattacataaggtatcattttttgtaaaatatttacatttttacgttcaaagaatgtatttttacatttttacggtttctaaaaaataataccaaaacaacataaaatcaacaa

SEQ ID NO: 254607 - DNA, 1948 bp, Cannabis indica
aaaataccaacatgggtgttgggcctgcaccaggtgtcaatctggacactggtcccttgtttcggcctccaagttttgtctgtttcttccctgaaaacacttgtttccccatttttgatgaagagaagaagacgtacaagacgaattttcagtttgatgcttggaagtgacccaagttgacaaaatgtcaacctgagcgttggggcacctagtgctccgggtgctcaaaaacaaaagttctctgaatttgattctgatgtctcaaatatgtttgtgacatgtctaattcatgtcacagtacaaagtttgacccacttgcactaagatggtcccagaaacttaaactgtaattgggttgtcaacttggacactgggtgaaaccctaggcacccaggttgattcttgtggtgttgtttcatgtattttcaactcccagatcttggacttgaatgttccatgtttttatggtacagaatactgaaagatagtgagttggaaacaacttggtggtatccaaacacccattctggagttcccaaagtcaacctggggaccccctcccaggtcgactattatgactcaagactgctcaactccaagatattctctttcttaccaccattgatgtccacgtcaccagggtaagtttccagattaacatatctatatattcgagttctaacagaatttatatattaaataattaatcatgaaataaacatgtaaaccatacaatagacaatagtcaaatatctctttacttttattgataagattatattgaaatagtgttttatttatgacataaaatgtaacattactcgtgttcacgctagcctaatatgcaatgttttttttacatagtttgttaatttatcaagcatgagtgatttttgtgagaaataataaagatatgaaggcattaagatcaatacttaaatggcggtgatattgggtagcaccacctagatgtggcacattgcaattggttagatatattttttaaaagttatttatttatatgggactcaatacttttttttattattataaaatatataagatccgatacttaatacagtacaacacttaaaagaatattagacattactggtggcttttagcattaataatacctaattgactgccctaagaattattaagattaataatgctattggtgttcaactggggacttaactcgtgctggcctaagaatggctgcttacgatgacaaatacctctgagtgagctttccataaacaagttccccaaaaatcattgttatctttaatcccttctcgaaaatttattggtttcttgttccctaataggatcaaagagatctaatatgttagccttcattgtatttggtgtattgtttgcaatgaatgaattatttttccttttctgttcttttaaatttcttctctaaagaaacctgtagaatgttcactaataatttttaaaaccatatataacataacgaacattatgtgtttgtgcctcgtcacgtgaagtaggagaaaaaaaaaacaagtagatattcaaaagaaaattagtaaattaccacccactcaaaaactccaaagtcagtcgtatactccaaagtcagtcgtatatttcgtttttccaaatatagattttgatgatgaaattttcttctatatataacttgagtaggcttggctaacgaattatatatactattagtattataattatggaacttttacaatacaccccattaaaatgagtgtattttttcataatcgtgtactttataattatttaaaacattcaacaaaattttgaaaaattcgaaataatttacaatataaaaataaatgtataaaccgtctatttcacacgcgtataaataaaaaaaatcacgagtgcaacaaactctttgaacactatttttgacatgttaaatttcctaaatttc

SEQ ID NO: 254608 - DNA, 1417 bp, Cannabis indica
atttatatataataaaataatatttaaatttaatttttacttgttgtttatctattttttatagattcaattatactttatagaatttcctaaaaggaactctaaaaacttatgtagtagtttagttttcatgtgttttctttaacattttttagttaaaatttacaaccaagttttgaattgaaatccaattaagaaaactactgattcaatccaattagtagattggattttgaagcctaactagattggaattagagatgatttttcaaattcaattactcattagatttaataagattacagaaaaaaaaaaaaaaaaacgaaagagtcccactgaaaatacaatctgactttaaactagaccctcttgcaatgcaatgagcagccttgtttgcgagatcgtttaacaaaaattaaaaaaactattatttaatgtaggaagaagctctcgacagtccctagcaatcagaccaaattgtgatggtatacttatcgaacttttaattgcctgaacaaccatcaaagcgtcggtctcgatcaccacatttacccacttctttctttttatccaacttaatgcctctttaaccccaattatttctgcaacttcaggttgaaccaagccgatatggctcccaggaatagcttcaataagctgtccattatgatccctcgctacacaaccaaacccgaacttattctccgcttgaaaaatagcaccatcaacattaaccttaatcgtgtttaacattggtttcttccagtacgtgttcattaacatatcatttattaataatgcccccattttttgtgattgagcacttaaccattggtcaaggacgactctagccatattattaaattatattgtattatattatttagtatattttttataatacttattttgatttatattaaaataatattgtgcatgtataaacatacaattaattaatataaaacatgatagtatataaaaatattatgtataatattatagtatatactacaatacgtatccttaataactttcaaattttttaaaatatgcatctattaaattagtagtgtattactttttttttctattttaatttttgagttagtagtagttaaaatgataatttattttttaaaaactaaataaataattacattaataatagaaataataaaattttatgattcaaaaatagggtatataatataatgagtaatatgtaattaatatgtcaatatctactactgcacattgtgtcaattaaaaataaataaaaaatcttattattgtattttaataaaatgtgtataaaaaataaattaaatatatgtatctaaactacaaagtaacaaaaatacaactaaaaataattgttaggaagaaaccgaaaatatacactataaaaaaata

SEQ ID NO: 254609 - DNA, 1540 bp, Cannabis indica
caacttcaaagtgatctcgctagataatgaaaacaaactaatgaatcaaagcttccctttcgaagaatgcagctcgattcaaaatctcatatgatatgaaaatacaatcaattaaaactaaatcaactgctgaagtactaaagcaaatgcatcagcaataaagaatctcaagcttactcattatccatgttcagtttgtttctggaactgcctccttcagatagctcatactcagcctgccaaaagtagagtcccaggacattaaagatgatgaaaactagaacaatgctgcaacagattgtaccctctctaacatgtttgtgaattataaaacaacttctattttagtctaaatgtcatataaatctttgaagtattcgagttatggagcaaaacaaacaaattctttgcaagggaaaaacttcgtagtttgtattaattaacttaattatgcaagcgacagcattttactaaaatgttatgcacctgttgcttggcatgatcaaatgcttccatccactttcgagcatctccagctgtagaacaagcaatcttcaaaaagcaaataaatattaaacattatcatcaaacaagaaaaaatgatgattggattaaaacatcggtattaaaaagaaaatgtaagataagaatacaaaaacttctaattcacatagactaggcaatgtactaaaagctggttcattaagtaactacactttaacagttgacttttaaataactatttcggccctaatttattcaaattgaaattatctccaaggaaactcccgctcataagaaaagatatttttgaataaggtctatactccagagcctttgtccctggtaataatcttcatgtaattttatgagtaatgggctaaaatttatataacattcctcttttctttttataactaaaatctcttccatagaacatgaaacttcacctaccaattattgccacaaacaggaagctatgaaccaaaagagctacttgtagtaaaataaataaaaccaactcagtattctccgaataggtgagtttaaggtgaccaagctatttgtcctgtaatacttgggaacaagaatagtttggaacagctcgaaatcctaagttaggtcagaatcaacaaacccaacttctaaaaagaatatgcagcacaaaattgtcatgcaattttagcattcattgctaccaataatttacaaactggagaatgtaagctacaatttacctcgcctttcttctcctcatctaagcgattataaaaacgcaagacatatacatccttatcctacaaaataaaacattaacattactttagcttccacaaatctcatagacagcattagttatattctctctaagtagctacttaaagaagaaaaccaccagtggatatagataatatatcaaataaaaatctgaaaaaaaagtataagaataaaaaaatgggagaaagaaacagtcttaaacactaccaagaataaagataagtaaacagagataatacatcaaataaaaatctacagaaaa

SEQ ID NO: 254610 - DNA, 849 bp, Cannabis indica
aggctcttagaccattcataagccaaaatcttccctagaactcccatcgtggagtgaaatagaacatgaaaccgtaagctcccaagcagtaggaggagcccaagactctgaccgcgtgcttgttgaagaatgagtcggcgactaaggcagtggcttggttaagggaactcaccggagtcgtagcgaaagcgagtcttcatagggaaattgtcactgcttatggacctgaacctgggtgatctatccatgaccagaatgaagcttgggtaaaactaaatggaggtccgaaccgactaatgtatacagaaggcaaattaataattaaggccactatatgtatagtcaattcttaaattaagacaactaaatgcaaaccgagttaataagaacacaaaacaaacacaataaacaagaaatagaaattgcagacaccacgaaataaattgcttcccaagacgaaagaaatcgagtaccaattggtacaatgcagtcgagtaggatcaactctaaatgactctcacaagtgtatttctctctcagactcgcactcaaacttgcatattcatttacatattcagctcaatacaaaaccctttgtaaaatcccaactctttcctctttattaccctcttgaatctttctctctcaatctcactctctttcctataagcttatttggtagttagctaggatttataggaactaagaccacaaattttatcgagttccttcagaagccattgaataacaagtatagcctgaagtaattaaacaatctctctgaaatcagtttctgagattaagtttatgcaatctaactaactgtcaaaaccttaaactccaacgttt

SEQ ID NO: 254611 - DNA, 587 bp, Cannabis indica
ttctttgactcagaggaggactgccaaatggttatggagagaagaccatggttggtcaatggagtccttctcaatctgcgaccctggccgattgaaggggaggtatgtctggctgagtttgaggtggcacgtttttgggtggagttccacggtttgcccacgagatgtctctcggaagataatgcccctatactagctaagaaagttggaactttcattaaaactgatgggagaagaaaagaagatgtggtccggcgagggttcctccgatgttggatagatgtttggatatctcatccttttccagcagggtttttcttaaaagcaggggctaatccgagttcttggattcaattcaagtatgacaagcttccatttctatgctttaactgtgggaggctagcgcatgtgactggcaaatgctcagcccctactatgtgggtcactccggctactggtcaagcggtgagaatgtatggaccttggattaaggttgatggagccagaggtaattgcttcacggcaagggggagtcaaacagaattaatggttaacgatgaaggtccaagcttcctcaaacttagccg

SEQ ID NO: 254612 - DNA, 2687 bp, Cannabis indica
caagtgcctcaataatatgttggaatagaacttacagccactttaagccaccatttgataatttgatcagccagcaggtaatggttgtctattaattatgttaacgaaaaattgactaactctgaatgctttaatttctagagagaaactagagagagatgctctaaccttatggttacttttttaaacttaaaaaatgagtttgtggagctctacttttataggaaaggaggtcttattaaaataaaataaaataaaataaattaaaaaatgtgaaaaaaatacatttaggctatttttgattgcagatatatgagtcttctaggttcaatctttcaatataggaatataaaaataaattacaaaaatgtggcaaaaataaaaccacgatattgttaaaagtccatagcccaaatcaatttaaaaaaacatatatactacaaaaaaatactctttaaattttcctatcctatataatttctacttgaaacatatattctttcactatgtggcggaaccgcggcttgaaaacatatttatgctcaatttatatgagttgagcccgtgcgatagctgtgggagccaaaaagcaagcttaattatggggttttgtagttaactcagacaacttatacctaaaaatatgttcttttaacaaatgttgtggttaccagtcaatgtgaagagaatacttgccaaaagatacaataaaaaaactaaaatctaattttacaagcaacaaaactcctctaattcaaacaagctctaagaaaatacccgataatacaaaattttaacctccgtagagcacatgtaatcccgctatcaaaatgatgaaatgaatttttgaatctttgtctgtgcgcgttccttctcttcaagcccatccatatcaccaatattgtcatgatactcctgtgacaaccagaagcataaatataaactttccatcaaacaacaatgcatagagaaggaaatttagcaaggagactaggaaattataggtagtgatctctctctccaactatctacaagattccatgtatagctgttctttgcaactactattgagaaagaattcaaatattgataagtttatacaaaatgggtactagaacttctttccatcccacaaactcctatatacttaatcacttgggtcagtttgaagtggtcaaaatatattaaattgtgtattgtattacgatcaaaataattgaaaagcgacacacgaaaaatgtgaagtattgtccttagaatataacacaaaatgtccactgcacttatttacaagacattaaaaattgaacatattcagattacagagtacgcatacctgaagtatatccttaatatgcttcttagtaagtttttgctgtttcagtagtagttcaatccttgatctcatttgatgattcctgcattgagtgaaacacgcatacaacagaaataagctaacctgtaaacctaaataaagctccaccaaagagtctagtgtcgtgattgtgtttgcttgtctataactttgtgacaagaacttactcggagcaccaaatatgacccagaatgacagctatcaactgcatcaggaaataaagaggggtaacccaattaagccttcacaaaatcaaactgagaatgctatctttaactgaaaacttataacagataaatcagtttatcagatacctacatttaaacaaaaatacatcaaagaatgtaagtgaaatattatgtttcaaaaatgaaacatagcaaatttggacacagggtgcataggataaacctagtctaccttcgggatgacatgaataaaggttttggcagtaatggaattgaagataaaataacagaagcaagatgaagaaagagcaggttgcttccccagcataggattttcaggtagaagatggcaacagctaaagtttataataacataagagataacaatatatgatgcgaaagaaaagatgagattgaaagaaattaacagagaagtggcattgggaggtttgaaaaaaagtgtagtggtggaagaaaaagatagagtcaagtggaaggaaaatgatgggtgaaagaatagttggagaagaataaagagataaaagaggggaaatgaactcaaataagagtaaaaagataagtgtagatgaacccaaatgagcagatatccacaagagagagtgaaggcccaagagagagtggaaaggaaaaaggttgttttttgatgaagatactatcttataatataagtgggagtatctctaccgaaaactaaaagagaatagagctataaacgaagtaatttgtaggatccagatatcatagatctacaagagactaaaagagaggtcgtggacaaaaggttagtacgataggagatcaagatttaaaaaaatagttgctactatcatcaattgggagagcgagaggatttgttaatatttgggattaaagacaagggaacatcaatgactcattggtgtgagagtttagattactgattcatgcagagcagggacatgggaaatgggccaggatggtggttttcaggtgttctgggccttgtagttatggaggaacagatgaattttgggatgattgttagaatcccccatcaactaagtatgggaatagcctggtgggctgtttataaattgctaggatcagtggcagacccagaattt

SEQ ID NO: 254613 - DNA, 744 bp, Cannabis indica
acttaaagtaagaaagtgttgtatctcgcttaagtacaaagtctgagtatcgaactttagctcttgccactgctgaactaacatggatccagtctttaaaaacagagataacaatcaatctccctcaaagccctatactctggcgtgacaatctaggagcagggtcacttgcatcgaacccagtttatcatgctcgcacaaagtatatagaaaacgatctccatttcgcttgtgacaaggtgttagcaaaccaacttgatgtttgatatgtggatagacactatcaaattgctgacatactcactaaacctttaaaggttaggggtaaatgttaacaatgattttggatggaggacacgtgtacttccaagatggttttagctcagctgttctagggcccaatcataagcccaatcaagataatgaattggatccatcaacaaattcaagccttctagatgctggacaaatgactcgtctaggtaagataaacctccagcactgtatgtgtccggatagccccaagtagagcttctggaggagtagttaacagaaatctggatattcaactttgtatcgctttattaattgtcaaatcccacaatatgaagacttaattacccatgatcttgtatgagaatcatgtcttccgaatatggaactaaatcaattgtcaatcaagtatttatgtctctttattatccataaaagtatgacacgatttgataactatcaatatgacat

SEQ ID NO: 254614 - DNA, 1044 bp, Cannabis indica
tgtatcattgtcggtaggtgggtattgagttgcaggagtggtgactgtagattacccattcctggggcgttcggggctgcagatgaagtgcctccactacttgtaccctctcatcaccaagtcacgctaaaattgtggtcatactctattttgtagccttctgtgtgcatgccttgtcattttcttcttcttgcaatgatcttctctcaaacacttaggaaaatttttccttgattctgctttcacaccttctccttcttgaatttctctctctcacccactcactgacttgcacaaacacacacacaccacaccacttgcacacacacacacacacacacaccactcacacacactactccactcgcacataccactccactccactcacacacaccactcgcacacacctgtccactcacatacacgtgcaccactcgcacacacaccacttgcctaactcctctctcactggtgacattcttcctccccatcctctgtttgcaggtcatcatggtgtttctctttgtggtgcttgaataattgctaatttttggggtcaacactagggtttggtcgaatggtcccgggatacatgcattgacttagtcattccttggccaactcttaaagtcaatttctttaacttcttaagactaattgttgactaatcttgagaattagccttgttaatttttagtgttaacaatctccccatagactataagaattcttttaagtgttcttgtagactaagttcggcaactgccatccttttttcttggtaatgtctttctttctttaggtgtttgtgccttgagatttttggtttgagggaatcttctgccactttggccttctcaacctcttttctgatgtaaccttattatgaaaggagtatagactctttgagcagtctcaagcttttactgattacttattggatgttaagggagttttttagcctcttgggttgcgcttagccttttttaagttgttggatgttaagggagatgtttatcctcttgggtcgcacttagcctt

SEQ ID NO: 254615 - DNA, 697 bp, Cannabis indica
tccaagagcatcttgagctttattcaatttctccaacccgactaatgcgcttctccccatgcccggatggcaacctcttccttctttacaggtattccttgttcaatttcatatctcaagtattcctttttgaaaaaaatgtatcgatttcagatctgagtttttgatactgccattaaggttgttcttcaacctcaaagaaggaaggagatggttcggaagaaaaggcatcgacggtctggttgctcgattgcgagcctagtatgtggaggctgtgaggcggcgaaagaccaccgattttgtataaaaagttcaatcctttagaatgtgagtaatgaatttatgttatttaaatctataaataaattatatgttttttttccttttgaattaggttttgatttagatttattttatgtttatttgattaaatgtctttgagaaaaaatggtgatatttgtgttagcagcagtatagtataaactgtgttgttttttttccaaaagaaaaaaagaactttgtgttagcagcagtataatataaactgtgagctttagaccatttacaggcaataaattacacgtaggccagtcctatataattatttatatgtaatccacaatgagttttgatgggtttaaaataaggaaaaatgaaaaaattatatgtgctccattctatcatcttgaatcacata

SEQ ID NO: 254616 - DNA, 520 bp, Cannabis indica
attagttattactgtagttatatatatatttattctctttttaattttcttattttttattaggtttataaatttatgtgatattttataatagaaataattatatcgtcaattttgtaaaaaacctgattgtagatagatttcataatcttgactttgagattgagaaaataggagacaaagataaagtttagtttaataggatatgggaaaaatagttgtaaataagggtatattatcaaaacccatttacctatctacttacacctataaatttaatttataataattaattaaaataaaaactaaattaactacctcattataattctctaaccatataatttgaatattattatttaataattaaataaaacaaaaatcaacctaattaaaaatatctacatacgtataattttaatttatttattttttatgctctttctttttcacactcaattatattacatttcaattccatttttaaaaatttcagactttttcttttttttctttttct

SEQ ID NO: 254617 - DNA, 548 bp, Cannabis indica
ttgatgtataatgtcatttctaagttctacataagagtaaattattttttatattttcaagaacttgtatgctcaaaatataatgaactttaatattatattattcaactttgtgaatcaaaggtgtacaaaatagctaaacaagcatatggatgattcttgaagcctttctctcttttactattaattacacctttatttgttttcttttaatatttaataccaaagtaaaaatctctaaactcatttggttacttatttgttactttttattaactttttgtgtttatttttctactaacacttttgtctataatcacattcctgtgaaattgaccgtactacaatcaccgctagtagaagtcacatttgggcgttaaacatgtcacctatagaagttgttgggtaccattaatccctaatagcaatgctcttttacaataatacaccctcataaaatgtgtacactgatgcacccgtgtaaattttactccaattatttatagcgttatagttgtttatgacatcttgtaaattttcaaaaaatt

SEQ ID NO: 254618 - DNA, 899 bp, Cannabis indica
actacatgtctatctacatatgtaatttgaatcaaaatcgcacgcattagagtataatgcatagtaaaccatacttggtaatttcatattaaagattccttacttgaatacactatcgccttggtttattcgtattgtataatcttaattcttttgtacgaccttacaaaattataccatctctatatgaataaggaatttttagatattattaattatacttttataattaatgtatttatttatcttataattatattcatatattctataatatattatccattaaatacttacttttaggacacaaaccctaacgatgactattttgatcgctggcaccaataaatctccttttgatcaagaatagtaaattatttcttctaaattaactggaaccgctggtttgaaattaaatcattcttattgcgaagattcttaagtttgactttacacgcttttatcctttccccaaactttgttgtaacattcctcccccaaggctttacaaggtccataggtgactactgccataaggaaataacagtgctctctaaaattggagaccactgccatagtggagtgacagtggttggttactacacaaggaaaaggaattcattggccaaattgtattttcaacattcatgtaccaaatacaagtgagaaacaccacccatggcttcccacaagccatgcgtgaccagtgccattgtccggctccaactggtggtagtggtcacgcgttagggtttcagacatcgaaataagatttttgggtcccgagacccccaaaatatgattcaacataaaaaataagtcaaaacacaccctgaggggtccacgagcatgcatggccaaccactaccatttggtcatgtcagtgctcgcaactggta

SEQ ID NO: 254619 - DNA, 893 bp, Cannabis indica
attctaagcacgctggaaaaaaatgttgaaaaacgacgtcggacgtagcctcacgcggccccacgcgccattgccgagagtgggcttcgcaggctagacgctggaattcatcttctaccttgggcgggtctgaaaccgggtctcgcgaactcggttctttccagtcgggtctggtctgttttccggccaaaaagcgacgaaaacacgggataaaggatgggtttcgatcgggattgaatttctagtccatttacactactaatttcgggtataaatgacgaaaagggtgtcgatcggattgtgttcaatccgaaaactaagaagaaacaaaggagcccgattgtgattttttctcagccgaattaaaaattaaattatgtagaaacattgtaaattgagcggtaatgagatttgcaccatcaattttagtgtagaaacaattgaatcaaaaaacccaaatttaatttcataaagaaaaaatacataaactctaaaaatttaatcttaaaattctcctaatttactaaacgattttagtaatataagatatcaatagaaagagaattttatgataaataaaacccctaaatatttaagattgaaaaacaaaaaattgaacataaaataataacgaaattaatatgtaattgaagaaaattaacataaacatattaattgttatacaaattataggttctaaatcatatataataggcaatctgataccacatgttataaaaattaatataaacctcaagatcaatttgtatataacatagaacacaataatatataataattaggtatgcgtacctgattgatccataacattacctcaattcgatccatagcaattacttcaattcgatagtgcaatactatcaactaagtct

SEQ ID NO: 254620 - DNA, 3492 bp, Cannabis indica
gggacaatattgtccaatattctccctctgaatggtggctatttttgctcaccaatcttgaatcaccttatcataagtagtgtcattttctcacttatatttgtttgtttttcggttgggagttccatttactcgcttattcttgttcgcggctaggagtaccattttgctcgcttgcgggtggctaactctttcatagatgtggatcgaaagcccgttagggatatggctctgataccatgttgagaatcatggggttccatctcaaaaccaaattgtgattagtggagtagcccatgttcttatatatggctcaatacttttacatttaatcctaggacaaggttctctaatatcccgccttaagatggtggttattttgttcaccaatcttgaatcaccttatcacaagccatgccatttggtcacttatttttgatcagatctcaagcatctttacaacatctggatctcgtgcggctggctaaccatctggataagtgtggatcgaaagctcgttagggatatggctctgataccatgttgagaatcatgggtttccatcttaaaaccaattggtgatgagtggagtagtccatgttcttatatatgactcaatattgttgcatttgatccatgtgggacaatattgttcaatatgagagaacaaattcggaaaaagttttaaaattgagatacctatttataggtccaaaatttagccaagaagtaaaacaagggagagtttgttgaaggactgtatgaagatcattaatagagttaacaacacaccctatatgcatgctagaaagatacctttgactaccttcagactcatgctcacaatcatagagaaagttgtgatttcccatgttcacactataaatttcaattaaatctaaggaaaactggaaagtttgtatttaaattttctaaacattaagtgttgtgcagacgtaatgatgtaaaaaccattaaggatgggattagaaaagacttcatgcgagaaattaagggttaggataatcatacctctgatctcttcgtcataagttgatttggggtttggtagttgggttttaacttctctaatgttactagcacaccttgtgttgagcctaggcaaagcttgaaaccgatgaacggaggtgccaccgaagttggagaggttggggcgagaatgaggttccacatgccttaaaattttgcattgtgaacagtcagttcagaaaaaccttcagtctgttggaggattataaatgtaatttgttagctagattaggaggcttgtcaattgtcaaagttgaaaaataaattagtggataataataataataataataataataataataataataataataataaatttcactatttttcctctctcctttttccctcttaatgaagataaaattacacactttttgagagagaaaaaaatttgaaaatcatgaagatttattacttaccatcgcatgttaatttaagaagatgttgatgattttaattacaatttacaattattgatgttgttatacatattattatttggtaaaattttgaattaaaagtatagtaatggtttaggacattataccatatacagtagaatttctattcaagaatacacttggaactaaataaattatattgttataactaaatagagttataatagaaaaaaaatttaaaatatcaaaaaatatcaatgtaataataataacaataaataattattttttttgaatgaaaataaattttattagacaaaaatatccgctaaaacaatggactgaagagcaaggggaacatcactctcagtttaaaacgacgacctgaccaataacaagcaccacacgtgccatacagtgcgcgactttgttgatcgtttaacatgaccaatagaaatactacttaaagaagataaaatagattgataatcttgaacaaatagactaaaaatagaaggcatagataccgaactaagaataacttgaacaactaaaatgcaatccgtctctaaaatgacatttgacttgttattcctctttatccaactaagtgcctctttgacacttagaatttctacaatctcgggtcggcaactgacagaagaaatagttgaaaacggctcaactataatgtttatacatgtattataatttagaataaaattattaattttacttaaataaatttacaaaatatatatttatattttattaagatgtaattattcttatatagaggtatattttattaatacggaacttagaaaatgtataactaattaaaatttagaagttattcttttttataaatggcttaaattggaatttgatttttttataaaaaattaaaagttatttttaaatagagtattgttaaatagaagttctaatgtatattgaaaattcagactaatcacttttttttaaagtgatcggagcaagaaaaatagaaatcaaatcaatagaaagaattcttttttaattattttttctttatgtgatgaagtgacgtaatttaagttgagggctgttgaaacttgaaagttgaaacattctttgtgctatagaaggtgtgaggagcccacttatcgtgttcatgtagtggaaaatgactgtgaaagtaccagaaatgtgttgtacttttaaaaacaaccaattcttcgcccaacacttcagccgatggtgggccttgctttgggcccatataggaagacattgcttatttattccattttaaaataaaagtaaaaatattgaaaaaaaaaaattgtggaatatatactatatagtatatatttataaaatataagtttgttgaagaatatattgtgtcattgtatagtagatgcatatgaacccataactaactttacgtttaacatgtgtagttcttatgacactatttttcttttttgaaaaatgcttattacacactatttgagttactagaatatattaataattgagatgtaaataggaacaaaaaaaacagaaaaatataaaaaaggaaaaaaattacaaaaatactatgggccggcccattaaacatttatacagtccacatacaaatatttacaaaaataccacatgcactaaaccttcagctgcacggagcgaacgatgaagatgaacatacctcgatcgtttcaaatcagcaaaacaactaaaataaaaccaaaacaagggaaatacaaccattaactctgacgaaatcaattggaaaagaagacatgcaatgatctaaacagaaaatgacgaaaaaaaaccagaaaaactgtgaagaaattgaaattacacatttgttttctgttttattcgatcaaaacaactccccctaatatcgaaatccagattcataaaatgtaaatctgcaacaaacaaatctagagctcccatcgaatccaaaacaatgtatgatgtgaaaaaaaaaatttaaaaaaaaaactacatgaataatagatctacgttatataca

SEQ ID NO: 254621 - DNA, 768 bp, Cannabis indica
tgacaaccgggctaaacgtttcttcaaaattgatcccatgtttttgaagatgtcccttagcaaccaaccgtgatttgcatctgtctaaggaaccatctgcattaagtttaacacggtgcacccatttgttaagtttgcttgcattttcatggccatttcattcacagcattgtgattctccaatctactttcatgggagagaagaagagcctgaacttcttcaagagaaagaagatcacttcttgctgtaatacctgaaaccacggaatcgtactcgggtcccaatccattcaaaaattgcataatgatatcttgatcattcatagtagaacctgcaacagctaaggaatctgcaagatttttgtcagcataatccgaaatcgaaaggttacctttacggattgtggagaattgattcttcagttgaagtagtctagcacgagactgactattgaacctttgttccagggctttccacaccatataagaggactggaaatttgcaatagatgtaagaactccttcggacggagaggagcgaagccaggatagaaggagctgatccttctttctccgctgagcaaacattggattgggactgccattaacgagggtagacggagaaggaaccccgtgaaacaagatttcatcaagatcgtgacctatcacagtaggaacaaccactactacaaaaggcagaattcgcgaaggtctcaaaaacgctttttttcgggactgtcgctaaaaaaattatctgagtgttaaaaa

SEQ ID NO: 254622 - DNA, 1916 bp, Cannabis indica
tcaagctatgtaattacatttaaaatctaatgaataaaaatgtcaagtaaagcttgttgatatttcattgttattacttaattacagctcacaaacctaacgacgctcccaagcattgagtaaagcttatcgggatcttgaggtaactccggttatttcttcagtgagtaaaaactaataatttatgaatctctgaataagcattatagatgctcagcatgtgacaaccctctgaagcttatgatcaagaaatcccaacaaaatttggtatggcaagtcaccaatgaaggcatttcttcaatcactcgaaaggcatatacaccctactatgataacatgagcattcaaaaaaaatcacaatacagttagtacttttatggtttaatgaaatgttgacgttatccctagtaatcgagtttcttaatcttaaagttctagtgcaagtactgctgagttcattaagatgaacatcaatatttgacacgtggcaagaaagatgacatttcagagttgagtagtcccaactcatagttgttgacctgggaagggtccctagccctacgcccaggttgacttagggaactgtagaatggaagttcagacttcaatatacacatttccaagtcattatctttcagtattttgtaccatgaagacatggagcagtcaaattcaggccctaggacggtttcacctagcgcccaagttgacattcctaactatggtttcaatttctgggacttccttaatgaaaatgggtcaaaatttgaattgggacatgaactagacataccacgaacatatttaagatatcaaaatcagatttaggagcaagttcatttttgaacaacctgagcacccgatgcctaggcacctagcgcccaagttgataatttaccaatttgggcaacttccaagtatcaaatcaataatttaactcatgcatcttcttcgccttcatcaaatatagggaaataagtactctcggagaaaaaataacacttcctaggtgctaagatcaaggcccatcacccaagttgacacctagggctgcccaacgcccaagttgatattttgtcaaactgagccaattctgatgatgttttttaagaaatcttctaggaatattcttcgattttagaaaatattaagattcaactatttttggggactaacaaaacttttaggaggctaaaactgtgatccaacgccaatgttgacatatattcaacctgggccatttccaatcattttcttgaaaaagtgttctaggaattttttttgttcataaaaaataacaaagatacaagaaaacttggggagaaaaccacaaaatcgaggccctggaaactgagcccaacgcccaggttgacctggtgtcaggcccaacacctacattggcaatcaacttggtgcgttgttttggtcgttcaaatgccaattctgatttgatcattctctctgaaatggtcaaaaatagggtaggagaccttaagttcttgaaccttagaagtatcaaaattacttcctagaagctcggaaatgagcaaccaatgcccaggttgataaatagcctggtgccctgggtttcacttatttgattctaattttatctcgaaagctagtctagtttttcacaataactaagatcaatgaagtcagaatatcaaatttacaacttcgcatttctcttttccaagcatggtaaactacttggaaattaggagtttcgagtctcctatctccgcagaacagcgacatctctgagaactagtgactaggttcgccagaacacagaaataaactaagtgatgtcaaaatatcacttagacatccaaatgtacattcccaagatgtttttccactcacccagcatccaggctgacatcataagtcaacctgggcactgggtcatg

SEQ ID NO: 254623 - DNA, 1548 bp, Cannabis indica
ccactcatctcgatgacctcttcaaaaaatttgagagttctaagtcgagtaatactgaaatcaaccctaaagtcatcaatcaattaccgaccaaaacaaccatgttttggaaaccaatctacggaggacttcctcaagatagggaaacaccaaaaccatccactgtacaagctcctcaaccaaacttggctcaacttcctaaggaacttaagcacgtcttcatgggagcaaaaaatactttccctgtcatcatatcctccacccttaatgcaactcaagagcaacaacttatcaacgtgctcatagagcaaagaggagaaatttcttggacgttagttgacattaaagggattagtcctttgatttgctcccaccacattaaattggaagacagggctataccacgacgtgatcctcaaaggagattaaacccacgaatgaaggaagtggtaaagacagaaatcttgaagcttctggattacgggatactttatcatgttgccgacagtaagtgggttagcccaactcaagttattcccaagaaatcgggagtaacagtggttccaaatgataagggagaactcatccctaccaaggtcacaacaagttggcgcatgtgcattgattatagaaaattaaatgcagccacccgtaaagaccatttcccacttccattcatcgattaaatcttagaacgtgtggcaggtcatcctttctacagctttctcgatggttattcagcgtactaccaaatcgagattgctttagaagatcaggaaaagaccacattcacttgtccttttggtacctatgcctttcggcgtatgccatttggcttgtgtaatgccccagccaccttccagcgctgcatgatgagtatctttagtgatatgatcgagaattgtatggaagtatatatggatgatttgacagtctttggtgattcatttgaatcaagccttctcaatttggaagctgtgcttaaacgatgcaaagagaaaggcttggtactcaactgggagaagtgtcatttcatggtgccatctggcatagtcttggggcatattgtttcacaacaaggaattgaggttgatcaatccaagattgaactcatatcaaagctgcccgcccccaagactgttaaggatgttcgatcctttcttgggcatgctggattctataggaggttcatccagaatttttcgacgatagctcgacctttgtcgaacctcttggcaaaagacgtggtgtttaactggacacccgagtgtgaggaatccttccaaacacttgtcaccaaactcacttctgcccctatcattcaaccacctgattggaacttgccattcgagatcatgtgtgatgctagcaattacgctataggggccgtccttggtcaacgaagggaagggaagcccttcgtcgtatactatgcaagtagaactcttaatagtgctcaaatgaactattctactactgagaaagagttgcttgccgtagtattcgcacttgacaagtttcgttcctacctgatcggttcccctatca

SEQ ID NO: 254624 - DNA, 712 bp, Cannabis indica
tgaagtttaataaccatgttttttggctacttctttgggtttagtcatagtagattctagacataatttttttgaatttcactatgctagtctctcttttggctaaatatgtcttgtcggaagttattagcaagatttggttatgattcttgtattcatgatctcattttacatgagataaattaatttaattagcatcccctttctttttatgttcattgcttgaaagatgatctttggagttcttcttctaaaaataatatgatgaagcatttactatttaattacatggaatttttttttgaaagaattacataaatattttaataatgtatagagcagatatatatatgagtattaattatcctatttagtggtaagagtaaaaatgtaaataaaaactattaatcaaaaactattaaatttacatcctacaaaattttaactacacctcaatactaaatttactacatttatgtaattaaaacattactttttataattgcaccccatttgatttacaaaacgggtatgtttttggctaattaggatttttacctcctgaactttaacatgtaccaaatcatgccccctaaacttttaaggtagtaaaaaatgccccctgaactattgagattgttagatttaaggacttttatccaattttagtaaaaaaaaaaagtctaacatgataaaagttcaggggacatga

SEQ ID NO: 254625 - DNA, 911 bp, Cannabis indica
tctcaagccaaaagcatggtctgcactttggaaaccaagagcacctacactgtcactttaaataacacaacagctactgtgtcaagttgtcttagatgtaactcgaatgtgcaaaatgaattcactttgtggcacaatagattagggcatccttctgagaaagttgttcatactgtactcaaatcatgtaatatgcccttaagcaataaaatttctcccttttctgtgtgcactgcttgttgtcttggcaagatccataaattcccatttccaaaggcttccaacactgtcataagtgaacctttacaattagttgtgtctgatctttggggaccctcccacaacacttcctataatggctataaatattatatccattttgttgatgtgtattctagatttacttggctttacttgttgaaacacaaatctgaagcattcaaaacctttctacattttaaagctgaggctgaattgcaaattggcaagcaaatcaaggttctacaaactgactggggtggggaatttagatccttttccaagttcttatctgaacaaggaattcatcatagacatccttgccctactacacatcaacagaatggattggctgagagaaagcataggcacattgttgaaaatggcctcactctcttagctcaagcctctcttcccttaaaattctgggatgaggcttttcgtactgctgtctatatccataataggattcctacccctattcttcacaacaaatcaccactggaagtcctttttaacactaaacctgattacactacattcaagacctttggttgcacatgtttccctaatatcagaccatacaataagcacaaaatggaattcagatctgccccatgcactttccttggctacagccttaatcataaagg

SEQ ID NO: 254626 - DNA, 698 bp, Cannabis indica
tagaggaggtacttctggaataacctctatttgttgatcatcattttgaatgacagcttccacaactgaaatttctttaatgacaccctcattaacaacgagaaattcttcaataataagcccctcatcaataatagacacttcatcaataataggatcctcaccatctttgttattaggagtaatacatttatcaacaatgtgaacattatcaactgaagtaggaattagactactgttattatcatctcttgaaaaagacataggaaaaaaaatcccttatatgactacgtcaactacaacataagtgtccactttaaactttgactccctgtcacttggtttcatgagatcccttagcccctgattgtgcttgcttcttttcataattttttccatcttatgttgggcttgaattgagaaacatagtgagaagatttgtgcttctccatttacaatttttttttctcagctacacactgagaaattaagttactgacattccatattttattataaatattgtaggttgttttgataaggataaaagaaaagacaggaagtgcatgaagaacacaataaataatgcaagagtgaggaagagaaatattatgatttgtcaacttagactgaacattcacaattttcataataaaatctcttactccttttgattcatcatacttaatggttgtcat

SEQ ID NO: 254627 - DNA, 527 bp, Cannabis indica
aaatattattacagaaagaaaaataaaattatgaagatatcttgaaccaccgatcggatcacacaaaccatgttaaagcttgaacttgcgtggtggctcgttgaaaacccatttgtccccaaatcggaggcgcgttaaacaccgatccaccactgtgatatcgcctcatcgtacacccaccgccactgagcgtttcttttcgaactgcgtcgctccacaaccacggagtgtaccagatctgctttaatcgcttcttgagagattttacgactaagaggtgtgcgtctctacacactactacaaattaggcctttagtgacactatatagtgacactcataaaagtgcatgtcactaaaaaatgaagagtggtttttagtgacacacaacattagactctaaatgttcggtatttattacgcagaatgtgtgtcactaaaaatatagagggtcactaaaaataaaacccaaaatatatacttttataaaaataaaaaaaaaagcaaggcctatggtgacgtgccacgc

SEQ ID NO: 254628 - DNA, 592 bp, Cannabis indica
agcatccgcaattacaatattacacaaagaagaaggagcattatactccaagtaaattcgatctgacgaaaaacaagaccccctagcaatattgtgggcaaccttatttgcagaacgattaacaaaagaaacttgaacattatttaaagaagataaaattaaacgacaatcctccaccaacaacccaaattgagatggcatatgaataggactttgaattgatggcatatgttttaatgctccattagtttgtgttgataatatatctatttgtgtttataatgtagattttttaagtgacatatatagctttttatatattaataatgattttttttttctaggcctatccatggagtcaatctcgatctgattcaatgcaccaagtagtggttctactccgtaaaggcatggatggaaattctacctttaattgttttgagcaacaagatttcacggtaagtgaactcaccctcttttgatttctacatctactgatataaagaagaagtaattttaatctaaatagattgttatcatggtaagatgagatcgtttctaataattacaataaataatttacaattgtata

SEQ ID NO: 254629 - DNA, 747 bp, Cannabis indica
tctctctctctctctgacgataccatgatgatgaaatttctgttgtattgatgttttggactggaagcctaaagtgtatacaagaaaaatgactttgtaacaaagtgttttatgcaacctactgaaaattttcaggaaaatgcaactattctgagcgttgttgggaaaacatttgatgatttggttttgaatggtcccaagaatgttcttctggaggtatgttattattcgggtctttcactatccttactgactttcgagttcccttgcttcattcataccgacgctcctcagttccccttaaacacttctttcacaaatgtagaaaacctttatattattaactgttatgcaacaggttttttacaccatggtgctctaattgtgagactacaaccaagcaagttgagaagttggctaaacacttcaaaggttcagatttgatctttgcaagatttgatgcctctgcaaatgaacatccaaaactccaggtaagggcctccatgaataatttaagtattctaaagaataattcatttttatgcaaagtttgaactataattcttcaatgcaggtagatgactatccaacactcttgttttaccgagctggtgataaatcgaacccggtaattcacttaattaatcgtctaattttttctgtgtgaatgtactgaactagtaatacaatactcaccatcaccaagtccgagattacctgatttaagaaatctgtttctcattgcag

SEQ ID NO: 254630 - DNA, 951 bp, Cannabis indica
ggttattcttggagacttcaatgcaatgtttagttttcaagatagaagtgggggaaagcctattcagaataaagacattgaggatgctcagaattggctttctttgggtcaggttgaggagcttaaaagctcgggatcgtttttcacctagacgaacaagcatgaagtggggggtagaatttattctaagctagatagagttttcataaataatatttggctgaatgagtttcctaattctgatgtctgctttaaatgggaggtcatttcagatcactgttactacttaattcgttgcatgttcagaataatgtatgtgtaaaaccttttcggtttgggaatcattggccttctaccctggttataatcaactggtgatggactgctggaatgtaaaggacgctggtaccggtcttgatagcttaatgaagacgttgtttcgtgtcaagcatggtctaaaagtgtttcgtaggtatgaagtgggagatgttgcaacggagtacagggaggctaaggaagcttactgtggtagtcttgaggaagcagctttgaaccctacagatcatgccctgcaacttctggttaaagacaagcagaaattatttttgacatgtaacgccctgtccaacagggacgccacgtgtgtgcaatttaatacaatactcatattcatataatatgtaattatactaaaaagtgtgggtaattaaattaaaattcaacttttaaaactttttaacaaaagataagtaatatggactacggggtccccctgttttcaaaatattcacaaactggtttcaaagtattttacaacataaactttatatttccaaaatacaatcaaaatagagcatcctgtttactgggccgtgccactgcggctggtatgtacattgctgctgcgaccacaaactcatggttgctcaactttatgttgggttttatgcc

SEQ ID NO: 254631 - DNA, 555 bp, Cannabis indica
tggaagattacagggatcttttataaggagagcagggtttgagacaaggagatccaatatctcttttgttaatttgttctgattatggagtatttatctcgtagattccaacttgcggttactgataagagatttaggtatcatcctaagtgtaaaaagctgaaattgaccaacttatgctttgctgatgatttagttgctttttgtaaggggaatgaagaatttatccaagtgattagggaggctttggaagattttaggaacacttcgggtctctctattaatcttgggaagtctcatatttattttggaggtgtctctcaatcaggtaatttggttcaacacatcaacttacaggtagggagttttcctttcaaatatcttggcattcctcttagaccaactaagtggaagcttgaagattgtggtattattctgaaaaaaaaaaatgaagactaagttgatctcttgggctaacaaacacctttcttttgcggggagggtgtaattaattcattcaactttattgagtctcaggaattattggatgagaat

SEQ ID NO: 254632 - DNA, 517 bp, Cannabis indica
aatcacgtaatacgcctatgttagttagggtgttacaactttggttttctgaaatgacctcctttaaactatctttcattctattagcaaggcattttgccacaattttgtagcacacattgcataggcttatggggcggaaatcaccaacttggaccgggttttttaatttggggattagacaaagaagtgtcttgtttgtaggcctacaatccttgtttgtgtttagaatctcaaggcgaacacgagttacatccgagcccacaacctcccaatggtgatcataaaagagccgaggcatcccatcctcacctggggcctttagagtattaatttgttgtaatgcttgtactatttccgtggctgtaaaatcctgaaggaggtgctcattctgtctgctacttagtctcaaaggaacaaaacgctgaagataaggtatgaggtcatgttcgggttccttgtgggaaaaaagaacctcaaaatggtcacatatagtcttttctatcccctcttttgt

SEQ ID NO: 254633 - DNA, 529 bp, Cannabis indica
ttctcaaaaaaaaagatgaatatttttttctgaaaaaaaaaatgaaggttttttctttccaaacaaatcttaatagagaattaattaggaagacatgttccaatttttgattattgggacaggaaatgggacattcaattggtacagaggatttcaatccatatataagatgtgaaaaagtgaaaagaatggatggacttaatgtacttttagaagatgtttagtaattttcttttttttttttgaagaacctgtaactttcattaaacagactatgatcatcaagccctaaagcttttttcgcaactcggtgagcatcgacattatcattcctacggacaaaactaacagaaactttagggaattttgataaggagttacaaatgttacaaactagaactgatattgctaaaagtttatttttacaattcataattttagtgaagaacctccagtttccataacttgtaagaaagttcttgattttatcgtcaagaacataatccgcagatttggaatacccattaaa

SEQ ID NO: 254634 - DNA, 650 bp, Cannabis indica
gaatccaaattcaagagaaggagaatcgagctcagatcttggtgatattctgctacaaaaaggatacaagggttagagatctgagcggaaggactcatttaattccgctgcacccattgttttaaaatttatatttaggatgttaaataacatacatggtagtaaatctagatcatactaaaacaaattctaacaagaaggagatctcaaatttgagatatctttggccgagtgacatttcattgtctttgctgtctgacctcttgaatggtcatgactgagtgaccttctttaagccttgtaccactttcgtgttttgatcataactcccttaatattaacccaatttgggtaattcaagtttctataaaaagatgagaagaagatctacaaaggtgacatgtccttggataagtgacctctcaatacccttaccgagtgactttgtcactctcaaggatgagtgatattgtcactctcatggccgagtgacattgtcactctcaaggccgagtgacaaataccactctcaagggtgagtgacattgagtcatcttgggccaagtgatttctaccatgtcatctctcaagccttcctcaactaaccttgaaattataagcaccaatttctggggttaacacttgcccct

SEQ ID NO: 254635 - DNA, 648 bp, Cannabis indica
attcaatcccatgacgtagggattgccttcgtacttggacttcacgataccattatgaagtagtcaaatcttggtacacagctcggaataccaaactcattctctgcccgaataatctgccctttaccctgctcggataagcaaatgttgtgagtgtagatatgttacctgaagcccgtttataatatctttccgctcaagtgcaaggaatgttggacacgtgtcactcgtacatgctaccacgtaatagtgcaaaaatgggataagacatatctagaagaacctcaggaggttcatattattattattatgcgatgatcttataagaaactcgcaaggttcaaaattaacaaatgcaagctcgttctactttaagttctccagcacaggataaaatttactgaagaactaggagcatgtgttattcggataaattttccactcttgtgaggactacactaaaggaaactcatggaatggaaagggacctcataatatttaggtaaaatagatatctcgtggtattaagaaaggcatctcgcaaatgaagtataacttgcggtatcaacaaataaaggtgcaaacacatgttggaaattattttaccaggatctatttactatcatgtatgttggattaacaacctaa

SEQ ID NO: 254636 - DNA, 411 bp, Cannabis indica
agggtaccaaatatgtacaatttaaaaatatgaggtacgcattaagtattattgaaaacacaaggtattaaatatgtttttcatgaaaacacaaggtactaaatgagtatattcccttaattttaccttgctatatgactaaaacaaaaatattactcttatatgatttcttcttttttttaaaaaaaaaaaaagacaatatctacaatcaataattactgtaacaaaattttctttggtatattttgaactgtgatcaagctacagtgatagagaaatattgctcttgtttgaattttttttaacaaaaggcaacaataatgataagaatatacaagaaaaataattttacaattaggctcatttctaacaaaaagtatccctctagtcattatcatatttttaaatttc

SEQ ID NO: 254637 - DNA, 659 bp, Cannabis indica
cactgacccaaagtaccatctcgctgcgcttaaagagctgatgaagatgaaaaaggtgtcatgtaaggcaaggtgtcaatgttttgtgatcacattaaaaggagatcgcgtataaatggttcagatggctaagaccaaggacgatcacatcttggaagtaactttcagacgaattgtatctatcgactatggtttaacatgattcaattcctattactaaattctatgcaatagcaagtttagtcaagtaattatagtcttctcagatatataaatctcaattacatgcaaattttctactctcgtaataaattaaacatgtaaaatgcattaaatacaaaaatcatataagttatccaaaccatataggtactctcatccgatatcaaaatttgattctatttcactatagcataattgacgctcacttctaagattttgcatcaaaatcataaacatttaattggtgattaagaaattaaaagtaattaagtacgaataaaatagaatacatagaaattggaaaattaaatcattaaaaccataaatcaatgtcaaataatatccatttaatccctataaattatttagcttctcatgttcatcatagcaaattcacacatattaattcagaatagaagaagaaaatagagaagaaa

SEQ ID NO: 254638 - DNA, 652 bp, Cannabis indica
accagggacggagggactttagcccatgtgtgggctaaagccctcactcaaatatatacatcaaattttttatatgtagatatatacatatattaattcactttgctcaatttattaaagtccaattcacaaaagccctcactcaatatcttaatcatgattcatgagcctactcttattctaatcaagtccattttaaaagtagtccaatacaaataataaaaaaaataatactttattaaaaaataaaataataccattgacaatattttattttatttttgtcaacagtattattttattttgttgaagatgaaaatttgaaagatacatttatcattatttttattagttttgacttaatatttattcaagccctcactcaactaaatttctggcttcgtcactgcctatggcgttagttatttggtaataactaacgcctagtaataactaacgccataaggaacacacgtcagctaatgcgtgctctatgtcatcaattatttccaaataatcgacattacatgtagtaattgtattaaaaatttatcaccttatgatgtcaattattacaaaataaccagtaccgtatgtggttgtaattaaaattttagttagctacattatatggcatcaattatttattaat

SEQ ID NO: 254639 - DNA, 968 bp, Cannabis indica
attgcagcctaccttataaatagaagcccaaaccaagttataggcttaaaaacctcttatgaaatgtggtacaagagaattccaaacctaaaaaatttgagaatctttgggtgtaacttatgtacaattgaaaagttggaacctagatcagttaaggaaacttttctaggttatgccttaagtaccaaggggtatagaatctatatttccaagaagagaagaccaaaggttgtgattgctagaaatattattttgaatgagttagaatatcctcacttaacatccaagaaaggtagtgtatctccgtgtgatgtaggaaaaatagggaacaagaacactacacgtatggaaatggaatacggaacgaaacatttagaagaaggttcattgacggaagctattgtggaaccagaagacagtgcgtaggcggaagctgattctgagcttgaaaataacaaagaccaaatagaggttccagaagtactcagacagacaagtatggaaggttatcagttgacacaagataaaaccagaagagagttttaccctttcagcaaggtttgtgaaagtagacttaatagaatttgtcctagaagtagtacaacaaactgaaattgaagagcccgaaaggtacgaagatgcaattttaggtggaaacaaatcaaaatggctccaagccatggatgaagagatagattcactccaaaagaacaagacttgggttattgtactgaagctagagaacaaaaaagattgtggagtgtaaataaattctcaaggtgaaagagtgaatcaatgagaattaaccaatatatgtgacagttagtagtcttgtgatccgtaatgggaaatatcgggtaagctttgtaatcccacattgtctggggaatgtcaagtgtgatgattctgagactatttaggtatgggactacacagcttaagaaagcttaaatggattgattggtact

SEQ ID NO: 254640 - DNA, 719 bp, Cannabis indica
aatctttataattataaacgtatggttcaaggaggtaattgggtaacagagatatgcatacatgtattatagtattatacccacatattatatagctagtgtatccccgacccgacccgatatagaattataatatatagtaaaatatattaattaggaagggtcctattcatcgtgttgtaagggttttgcaaaagcaaatccacttgtttaccaaaaagggattactatacaacggagcagatatgattatgtctataatccaacaagtattataattgtaatttacaataatattaatccaacaagttgtataattgtaatttacaatattaatccaaacagttgtcatatatatcatgatcatgataataaagctgctgtatgtacatatcaaaatatatatcgatcctaaactactatactttaggcccccttctgatcagtaataataacatttattaacaatactctatatactttttatttattaattaatactttataaatattaattattgttaaaactttatttaattcatactcttctctgtaaaatgtattataccctataatattttacgtacgtagttgatttaacaagttaattgtggattaggtcgtatgtcatatatcaaatgtatattagatatctaaaactaataaattaaactaagctatgctagatatttagggtcgattattatatatactaggtg

SEQ ID NO: 254641 - DNA, 833 bp, Cannabis indica
aactttaatttataatttcattattaaaatatagaataaaataaatgattaaataaaaatacattttaaataatgagctttaatcaagagacattcgatctccattgttggttctacatagttcttgttttagtaactaatcctaggaatcatcaaaagaccataaccacaatcatacatctatgacatttacatcttgttcatagtggtattaacaagattattctatgtaaagagaaaatatgcgaatatccacttggaagtgtgtccatttgtattcaaacatatggatgcacatttaggggtggatatgagttatcgttaaatttttaaattcttagacaatcactctagaatataccttatgcaaagaaatttgaaatgttttagaaatttcatgaatttctagcaatggtgaaaacaattaaggtagatggttaaagatcttgtgaactgataggggtggagaaatatttgtttatgtagttcaaagatcattaagttgaactttgaattgtctccaaacttacctctctagaaattcggattgcatattgatgagaatgaaaggtctatgattagttactagcagccacctgagtccttctagggaaatgccttagagatagcaaacgacattctatgtcgtcccatctaagtctgatctcaagaacctcagaatgatagaatggtcgttaacttagcatacaccattactacattctggaatgccctgatcatgaacttaaggaaagccaaaactgctaactaaggtttgcatatctaatagttgttctaaagtgattaggggtggaccaccctatggtcattaa

SEQ ID NO: 254642 - DNA, 791 bp, Cannabis indica
gcggctaaactacctaaactctggttccatttttctctgcacacctccgtccaataatgacagttaagtgccacggtggactgtccacatgtacacacttgtacacgtgacaagcttttagtggtccacgtattattagttttaaaaaatatttataaatatttaaaaaaataaaaaaaatcagattttcttttttatttttttaatttaaaaaatttatttttttttcttcttcgtctttgttcttcttttttctgagttatgagctgaccttgtgttcccttgccagaagcagagctccaaatatcattactctcagcgtctccgccttagcacttcctacgaccttattctcaacaataaattcagaaaatattttctttaaagaaaaaaaaatccatgtccctttcactcaatcgccattattaaagataattagatgaaaatattaccataaaattgggagctcgtgggagcggtgcgacggtggatcgagaatgagttaggttagcacggtggcatcaggagaagctggaaatgaaggaagagtgcggttgagaagagagaagagtagggctttttgtgtgggcattaggacttaatggggaaagagatgagcaagagtaatagtaaacctttggggcagcaatggcgcccagtggaggacaaactgagctgacatatgcaagccattttcgcagtgaagcaaaggatagggagactagagagaggagaagcagcaacaaatattttgagtgttacaaatacaacttggatgggccacttcttct

SEQ ID NO: 254643 - DNA, 1662 bp, Cannabis indica
tgggctcaaagttcagttgtttcatacttaacctacttaaaaaaaaaacatgagtccatttttctatatatagataaagaaaaaagaattgtatgtatcttaagtttgtcaaatatataaattggagtagtgatgaaggagaccaaaatgtaaaaataactatacaagtggcttaaatttatgatttttaagaatacctataattattaccttaataattacacagttacttctaaatacatttttaaatttgtgtgtattggataacatttgagacactagtatttttttttctttccttgctaatatcttaattatttgttatcatttaacaacatctctatattatattgcttcaattaatgtgtcattatataagcatgagcagcctcaaacatttttaatttgataaataaattatgatacaaatcatatatgtatatatatagttttttctgtatatgtattccacataatttccacttatataatattgcatgtatttttctgtcacttttcaatatatatagggattctcattaataaactattttagctgtttttttttattataagaatttatccaaataaaatttgagaaattgttagttatccaaaatcattaaaaaaagagtaaatatcacttgtagtcaattggtttacaaggcccataaaaggcctaaaatgggcttataaggctttccaactctaatgggcttttgcagtttgcgtggatgccattattattttttgtttttcatttttctctctttaagctaatattgattttagagaaaataggattagtagaattgctcgaataatgcatgaatattaccttaaaaaggtgtgattataaatgacatgagaatatgttatttactttgtataacttaaaggaattatgcttaatttttttttgaagaatcaagtaattgtattatctcacaagacttttacaatctaattatgcttaaattagtattgttgaacttaattgggcataagaatatgctaattaattaaagaatctaaacataaatattttagaaaaaggattatgacatgctaaatttctagttaaaaattattaattacaatactatttatttgcatcattgtatcaactttgtatttttaagccaatttaatattctaatttgtttttttcctcataatttgtgtttgttgattcttacattttcttatcacttcattttattttttgttgacactaatttgtgagtagttagtttgtgaattaattttcaattttcaatttttgtggagacagtactcaatttatcactttattacttgttgacgactgcgtattttcacaacaattacatattgcacatatacacacacagagacacgaaacaaaagaaaaaaaaccaaatgggccaaaaacataatctaatacacccctctcaagttggaatgtcaatgtttttaacattcatcttggacaaaagggattgaaaatgacttggaaataagggatttatgaatatatctgctatatatgttttgttttgttgtaacatgaataagctttaacttgccttcttgaattcattcttggatgacatgacaatcaatgttaatgtgcttcgttcgttcgtaaaagagtggattctcaaaatatgaatatctatt

SEQ ID NO: 254644 - DNA, 872 bp, Cannabis indica
agaagcatttttcttttggcttttcctcgtagcagcctttttctttttaactattttcacagctttaataggcttcttgctattcttccaattgttcttgttgttgggtttcgaagtagaggcaatgtttgcctcagccttagccgtaccattaacattgccagaattaggagttttagttcctcctttctgtggtcctctaatcaaattttcaaatgtctgaaggttgttgatcaactcgtgaaagtcaagctccaacttgttcatgacataatttgaagtaaaggggaaaaaagctggagtcaaactgttcaagatcaaactcacttgagttgtctgatctataacagctccatgattctcagcctcctggaagtaactaatcatctggagaaggtgatcacgcatgctctgatgaggtttcatgtatgcattgatgaaattcttggtcgcctcaaagcgagcttgaattcatgccatctcgaacagttcaattaactggttcatgatttctgcagctatgagagtgtctgcaaaccttgctttcaaggtgtcaaccatgctagaaaacataaagtatcgagctttgttattaacgttttgccaacgctcgaacttttctttgactgccttggttgcattctcatttggctgctcaggagcttctttagtcaacacaaacagggcattttccccagtgagatcaatattaatgttctctctccattttataaagttagctccattgaacttgttgtcagtcaacagtgacaccatgggattgttcatagtcatgttggatactacaaataacaataaggtttaacacaaaatcatatttagaaattataagcacttagcaagtaggaatg

SEQ ID NO: 254645 - DNA, 3118 bp, Cannabis indica
taaattgaaatggattttatttaaggcacaaaacccaatagtattgccacatgtcattgatgttgtccacgtagacatgccacgtcaggtgggcaaaaattggaataacaaccatattaataaaattatatacaaccataaaataattacatcatatttataaatttatatatcacctttatatataataaaataaaaactaaacatgcatgatccaaaataaaatgatatacatactatataataaaacttatatactatataacaaaaaacatatacaccacaaaaaaaatatatataataacaacaaataataataaaaatatataacatgctaataaaattatgtcatgtcaataaaagtacaatagaaaatagaacttaaatattattatttaaaaaaaataatataccatgctagggtttcttcgtgagtcatcatgtttcagtcgttgtcattattgccgacaattggcatccttttccgttcgagatgcgtctcttggtgacagttgttttcagtcaatattcaatcaaaagatgatggttcacgccattaacagtctcgtagacaagcagatcgcgacaacaatcatcactggctactccgccattacaaacctaggtccccctcaagcaggtatgcatcatttccaccattactccatattttatgtcacttctgtcattaatttttcttttctaatccctaattgaaccactttcaacccaagtcgacttcccctctctcacttcggttcctactttctaaaaagagaaattaataaccatcacttctctgcaccccctggctattcatcattgccctagaattgttaaagccttcatgtcctccaggtgtcctttggaagaatttagtgggcactgacagaaacccacactcaatatttgatccccttggcttgaagagacccccatttaatgttctgcatattatgataattccatctttgtggtgctcgattaattccttttgctatcaatccttacatttaatttgcagccttttgcctaaccctctataaatatcccccccaattagtttactcttgcctaacccatattgcctatccctttacttctgctcgtgtgcttcatgtccttcactatgacatacttttgttctggtttttcacatcatccttgactgactttacaatggaagatctctctcaaactctcaactctactcttaacctcactgacacagaaaccaaaatccattccctcattgagatacctaatgagccagaagaagatgcatgggaagagccctctgctttccttgcggtcaagttgttaactaattgtcatttaaatgaagatgctttcaagaagtgccttcaccaaatgtggcctgaacggtattctattaatgtcctggtgaaggaaccaaatttcttcactgtggaatttggatattttggtgatcacaggcgcgtcctaattggccaagcttggcatttaaattacaagctcattgtgatgactccccttgaaatcgaatccacagtcactgtcgatatgcttagctcaacacctttttggattcaaagttttcagaatcccctttcttcatcggtcacgagccttcactcgaaagcttggtgaaatcctcggccgctttatagaagtggacactgcttcacttaaagaaacgtggggtccttatcttcgtgtccgaagagaaatagatgttacccaaccccttcctcgtggaaccgatttccacttcaccaatatggctgcccttgtttggcttgagtttcgctatgagaatctccctgacttttgccattattgtagtcgcctaagccatattgtgaatcactatgccgagtttcttgccaaatgtgactcgtcatctatccctcccatgctctgttacgatcacaccctcagggctaaggttcgcattacctcaaaccctttttacattgccaatacgcgcacaacacttcgcccccacataggccaccctcacctaatgtcgactcaacaccttgtttgtttgctccaaggacaaaccatgccagctcatccttacaatgccccaacattggattacggcattcaacacttcagtcaagctcgcactgcttctgctggcctctttgtggcaagaccttcgaacacttaaggttccttgcctatccatacggcttctcatattccaacttttgtggcaggatggaaccctgctctaaacactcctacgctcaacaacttcctccctcatgtttcccaccaacctattcactcaatgagtcccactcgaacacccatcaactcagctagaatagcagccggtgtaccacttgagactactaccccacagctgcctaaatctcctcctccggcctatactaaagtcacaactgcaaagcaactaaatgtgcccttgccacacttatccacaccgcctactatgtcgatcccttctgtcacagaaggatcaaactagcacactgtcccgatgtcatgagcctttttccactattctggaggatttaacgacttctcaactgctgtaattttcccttggagcttctttcgtgccaacccttagtgctctcccaggtcgtagaattaaacccaagcatcgctctagcatcaatgaagccgagttcaggaagcttcttaagcgcaatcgcagtctcacaaaatccttagatgaaagtaaccccgatgaggcaggtgtcgctcaacacacctgccaggagccatgagtctcattagttggaatggtcatggattggggagtaaacgagcattttgctgactctcccttttagttaagcattttaaaccagccattttgtatattatggagactaaactacatgttggtgctataaataagtttcgtactaagcttagttttgttaacagtcttgaagtcccttgggttggccttagtggcagcctccttttgttatggtttcatgatgttgatgtaaccctactttcttataatataaatcactttcattgctatatttggtttcccaattattattctctcactttctactggttttattggggcgtccgcatcacactaaccgcactaacatgtggcgaacttcttctatcg

SEQ ID NO: 254646 - DNA, 677 bp, Cannabis indica
atagcaaggttatcacatatgtaactttggtcatatacttattctaaattcctttaaacaatatatatgggggctattgtagattgtattatattgtattgtgttgaattatattatattagtactatttaatacaatactatgtttgttattgacttgtattaatattgtgtaaagttataatatattttaaatacactcgaccccaacaccaactacgggtcgggttcgagttcgagtctcgggtcgcaggttcgggtcgtggatccgggtttaggtccggatccgggtctcgggttcgggttcgggtttgggtcccaatccgattccaggtctaggtctagatctggtctctgggtccgggtccgggtccgggtccgagtctaggtccaggtcccaagtccaagtccaagtccgagtctcgggtcccgagtccgggtcttgggtctcggtccgagtttgggtccagatctcgggtccgagttcgagtttggggttcaggtcccagtcccggtccgattccaagtttgggtctagatctggtctctgggtccaggtcccggtccaagtctaggtctaggtcccaagtcgaagtccgagtctcgagtcctgagtccgggtcttggctcggatctcggtccgggtccaagtccgagtctggggtccgggttcgagtc

SEQ ID NO: 254647 - DNA, 1485 bp, Cannabis indica
tttcctttagagagaatggaaaaggcatcagtttaattgttaacatcatcactcactccattatattttaatgtaccacatagttctagaaaattagccaagtgagtgtgaggatcttcagtaggcaacccacgaaattggataatgaactgcaccatttgtaagatagctggcgtgatctcaaagttgttggcctctactgctaatggtataatactgttttgtacccttgtaagactagggattacacaatcatgcaggcttctttcaacattagggtgagcctgacctccttgcataactccaagaattagatcattcctttattatgtgctatcattaaaacagattgtattaaattgaataaagagaagaagaagaggttgaactatcacattaatccgtaaaataaactcaagtggttcacataataatctttaaaaaaaaaattagctattagaagtcattctaaaacaatgaacacttaactcaagatatagattaagagataaaatattattggagtcctccattggtggtgccttctgttccttgccctccttctacaatcgaactttctctcaatttttgaatggcgtccaagcttttccttcaactctctttttatagtgcaaaatgttgagttttcccaaaacaccaaggtcaaggccttgcttgttaggtcacgaccttacaagcgatcaaatctttgctgattctagtagttttccagtttccaattcttccaggacgcaaaggaatgtcgcggcgtttagggtcaaatttttatttttcttgatttgccactttaattttgaaaagtgcccattattgacccttgactacgaaaattaagtgtggaaatacaatctttgactcattaaaagaaatagaaaatacatccaaactaaaagaagttttatttcctccttatattttctcaattttgaaaaaaaaaaatgtttgcagaatcactaaaattacaaaaaccaaagatctctcaacatttctcttgaaagaaataaaaacaaaaaacaagtataaatctgaacaacaaaatagtaaaaagaataaaacacaacctaaaattgtaacctaaaaaatacataaaaattaaacttaacattcacaaaaaagacttataccaataaaaatattgtatataccattaatcatccaacccatttctaactaagaaaaatacaaacaaacatatcaatacaaataaagcgtaaacaattagacctcggcagttgtacacgatttgctttcttgttccaagttgagtgtgttcagttcaactctgaataatatatataagatccactcttggctgagttttgtaactttctcattgatattgtctctattatatttgcaacactgttaatgtggttatttttaggctaattagtgatttttttcctgaactttgacacgtattaaattgtgctctctgaacttttttgaccgttaaaaattctc

SEQ ID NO: 254648 - DNA, 1008 bp, Cannabis indica
atttttgaggtagatatggtatgggtgtaatcaaaccggtgatataccaagtctctcctgaatgcaaactgcagtagaaagcctttcagagcaaagaagaaataaatatggggataagggatccccctattttagtcctctagaagggaagatttccttagaaatatgacaatggatattaaaccaaatacatactgaagataaacaattgtgaataaggttaatgattttctcaggaaagttgaatttttgagtatagccaagagaaatttccattcaactcggtcaaaggctttctccatatctagcttgagacccacccacccaactttaccaaacttcctatgactaatggcatggatcatttcctgagctatgaaaatattatcaaaaatgaggcgatcagacagaaaggcattctgagtaggagaaataatgtcctccataacagacttaatcctattagcgatagtcttagcaacaatcttgtataaagttgtgcaaaggctaataggcctaaagtcattaagagaggaggcattagttcttttcaggatagggacaataagagtgctgttaacagactccaaactggtattgttgttgagaatatcaagaatcgccttacacagatcctccccaaggtattctagtttttctgataaaagtaggcattaagcccatcagaaccaggggccttgtctcctgaaagctaaaacaaagtcgatttgatttcttcagcaataaaaggagcatccaacaagttgaattattgagcaattaactgagtgttaataacggagaggagcaaatcagtagcctccctgtcactgccctgagaattaaaaagagtggagaaaaaatgatagacctcattctcaatatcaaccaaattggaaatggtgttaccatcatcaaggttgagagccctaatgaagttagttttcttcctagaggagactttattatggaagaatttagtgtttttgtcacctgctctaagccaat

SEQ ID NO: 254649 - DNA, 902 bp, Cannabis indica
aagttatttataagggcttactatgatataaattacattattacatagtctattataattagtaattacattatattttaaaatacccagtgtatttagatgtaaaactgaatcttacatataaaattttaataatcttgtttgacaaaataattagtaattacataaaaaattaatattatatagtaattaatatgtgtagcataaaatttttttgaaattaaaataatttttttttcaatatatacattaataattaattagtcaaaactcttttcctcttagagtcattatattttatatctttatttctaatttaaaaatatcattttatatagccttattagtaggaaattacaaaactataatttctataaaaaaaacaaaatatatgtaatttaaataacttatattttaattaataaattacaattaaatatataaatacatataatttgaatatctataaaaagttgacaataacaatatatcatatcttatatatatattaattatttacatttattttatattacacttaaatgtacatctatttcttgagaaattgaggggggccgtaatggccactccaacctaactgagtggctccgcctctgccctcatgcacatattatccataattttttttggtgataatatgcctcataagattattgtttattactttttaaaaatatcattgtatattaatctatgaccatatatttactataactcttctagagtatgtgtggtcttctaaaattatagatgagggattcctgaaacatcactatttatccaacttattgaatcattttatgcgtatgtatatactaatgttgttcatgtcaaaagtttgaaagtttaactatatgaacataacacattaatgataattt

SEQ ID NO: 254650 - DNA, 708 bp, Cannabis indica
tttttgctttgaagtaattttttgttttttcaaagattttttttttcttaacatgatattatgatttttttttctttttataactgatttttttaggagactttgactaattgactatgttattaatggagtaactgtaacatacaatacattttaacccaaaaaaaaaaaaaatacattcacatgatttgtatgtgaaacattaattatatatatgtgtaccatataccatgtatcatataccatgtactatgtagtatgtaccatgtatatatatgtatgtattatgtaacagcccattgtttagcccacaataacaaaaagtaaaaatatcataaaaagaaaaacaaaaagtgaaaataaaaaatctttaacatttacagttgttacaaatttatcctatgttttaattaaaaatatataaaattaaattaaaaaactaaattagttattaattttttcgtattaaataaatagaatttgttttttaaaagattataaaagatttttatttaatatgtcatcaggtacctatttttaaattattgagttgatacttaatgaagcttagttaacacaaataaagtatttttgttgttacttttttgattagggtcatgtgtaataattacaaatgtaaaaggaatttcgccgcaaaatatcccttaaaatgaattcaattagttataacatatttttttttcaata

SEQ ID NO: 254651 - DNA, 393 bp, Cannabis indica
aatgtccttctctttgaatgtgatccttcacagtcttccaatctatgattgaggtaccacttgctgtgtgtgggcactactctatcactaagaggtttcgaaaatatgaagaagaaaagagagagaggtagggtcggctatagagagaaagtggaaggctcagttttctgaaaggcaatcttttgaattactgacaaactcttaaaaacttgttattttgactgagccatcactttctatttataggcaactactaggtttaggttagtaattatttggcattaaaataatgaaaatattaattggaaaaactcaatcaagtggccggccataggtgttaatgggcctcacttggatttttgcagttttcacaatttttatttctatttttct

SEQ ID NO: 254652 - DNA, 877 bp, Cannabis indica
tctttattgatatttaaatgatagagattatattgaaatagagttttatttagggcataaagcccaacaggtctatcacttgatcccagtttaagtgttagggtctttgttcgctcaggtgctgacttggccttccttttagtgaactgtactgtcacttgggactggttctgtccacgtaagcatgcaacgccatgaggacaaaaattagaataataatatggaaagcaaaatgttgcctagacaagacaaatatatatatcgaagcttaaggtggcaaaacaactagacatacaaacaaacgccataataatactcaccaactagacatacatgttctaaatagaccatcagttatggaccctaattagccaaaggacaacaatattctagctagctagaaattcataactcaaatcaccatttactaccatgcaaagacaaacagtataaatgcaaatttttactacccacatagatcaaacacaaacacaaacatacaataagtaaaatatatttacttacctaatcactaaaataagaatgagcaaccatgagaacatgaagaacaaaacaaaaatattcagaaggaaagaatttagaaaacttacctcttgaatgcttccttccaagactccaagtctcactccaccaagagctccaatagatgtgagaaagaatgatagtaactccccatatttatagccaaaaagagatagtggatgaataataaatgtcactcatctagaagttgatagtaatagtaatatatgaaagggtaaaactaactattgggtacaaggtactgtcattaaatgtcaaatagtatattcatttatatttaattaatatatgcatgttatgttggaaatatttt

SEQ ID NO: 254653 - DNA, 491 bp, Cannabis indica
aaaggagggatgtataagggaaccaggttcatttgatcttggttctccattaataagattttttgtaatttcttctcatccattctccaatgtattcaatagactcttgtactgattttaacatcaacaaaaggtctatgtttatctactcttggtgttaatttctctttgttttgtccattaagttgctagttttatcatcacagtttgtgatcaaactgtgtttgtgattttggttctttttgattactgtattgtgttcttgatcaagttcttaagagttattcattcactacaagtggtatcagagccaagggagatcgaagacatcaagaacctgtttttgaagatcaagaactgcagccatgtgtcatctgcaagatttgaggtggacaagttcaatggtgaaaataattttagtttgtatagaatcaaaatgaaggcacttattgttcatccagagatctttaaagctttgaatgcagatgact

SEQ ID NO: 254654 - DNA, 768 bp, Cannabis indica
ataaatctcttgtgtcaagttatttaattttctgcaaatatttttatattctgtctattctgttttgtcactgcaaactggtttctgtagcaacagaattactttctgcttctccagaagtatacagttttatattttcgtatacataattgacatttgcaaaaactcggttttttatatagtcttaatacttataccaaagtatgatagaattctcatgattcaatttacattaaccataagaaaaactataaggtttatttatatgaaaaaagaatttcaataaatatataaatcaaagaactagtagcactaatattgaaaaagactatttttttaaaaaaattctaaatgaaccaggatgacctaatttattcaaaatagaatttaaaactaaaaaaattatctaggtgatgataatgtataagtctttttcaattccaaaaataactagtctttaaccgtagtctgaatatcattaattatagcctcaattgtttcactattcccccgaaagatgaatctttcatcaacacttggcttttagtttcacaaataaccttccataattatacttacataagcaatgttataaaattttgcttactaagtatatataggtacaataaattaaatcttttacaaaacaaattggaaactcatttttacttagatatgcctaatggcatacttagaaccaagggcggacgtaggctatcatatgaagaggccatggcccccctataatatattacatgtaattggttt

SEQ ID NO: 254655 - DNA, 519 bp, Cannabis indica
agtaaaatatcattaactcatatttttcctatataataataagagaaattacccatatactatttttttttttttaaatttaagatttcttaggtaaaagtgaaaaactcataataataataataataatataacatgtcaaacatgagaaagattaagtttaatgaaaaagaaattaggaaaacaaacttgtttatagtatctgtaccaatatattaaaagaaactgcttttatctaagaaagtgggaaacatacaattaacccatattatctcactgattaacataaattgatgagataggtggttcaatccaaatcggaggtcgctttaatatcctgtgaaacatagttgagggtaaattatagttgaacttgaaactttggtcgtcgaggttatatactcctaaatcacaatttcgaccagtcttagtggacagaacaatctcatcatgagtaaagtatatacaattcggttgaatattgaactcaaaagctaaggccacaatgcttgaattatc

SEQ ID NO: 254656 - DNA, 566 bp, Cannabis indica
catcatatgacattacaactgtagacaagtaacaggcagaccacttcagggaaagtcttatcaacggacaaaatctgattgcaaggccttcaaagctgagagggaagacatcttctctggcaaccactttagaatagggcatttactaatctccaactcacttagcttgggagcaataagtccaccatctgggaaagatacaaaactatcacaataccaaatagatagagatgttaggtcctcaagagatttcccatctgacactgtgatagcttcaaagtagtagctgaattcaatcttaagagttttgagattgggaaatacatccatatggagggatctaaacgatgatccacaataagacaaagtaaggtgttgaagaggagggtaatggtagagtggagtgagtgtggaacaaggattccttggctttattgcctcatacaatgactctgaattctccaacttccgaatttccatttctctgacacatggtaatcttgggagacttaataatggataaccattaatttcaatacttaccaatgaaggaaggaagcgaggca

SEQ ID NO: 254657 - DNA, 9176 bp, Cannabis indica
tttttttttttgttttttgaatagaaggctatattaggttaaaataaaaaaaaaaaaattatgatattaagctaaaacttggaattatatttacataaaaaataaaggctaattaggatttttgcccctgaactttgacatgtacaaaattatatcctagaacttttaaagttgttgaaaatgcccgtgaactattgagattgttggatttaaggacttttgtctaatttcatttaattttactatttcagtgattacttatatactaaatcatgctccccagattttgatatctaccaaatcatgccccttgaactttaatatgtactaaattatgacccttgaactttcatctatgttagacttttttactaaaattagaaaaaagtccttaaatccaacaatctcaatagttcagggagcatttttaacgactttaaaagttcaagggcatgatttggtacatgtcaaagttcagggggcaaaatcctaattagccaaaaataaaaaccctaaaattaagtttatcttattttattttttataactattggggataccagtgtctaaagtacttgaattttaaatttgctaacacttaactataaaaattaaaattttgactgcaaaatttactgaaggcacgtttcgtttagctcttcacacttctatctaaaaatcttagttgagtgtcatattagactaccacgtatagacaaataattatattaggtggaccaatataaatgtaccacgtatatctaatggtaaacgtaagtagtctatgtcaacaagtttggagggttttacaattaaaagttgagattggaagattaagtgcaaataaaatgatagttgggagagtttaaaaaaatcaaattgaatcgatttaattattattcaataattgtattatattcatttgtagaaactttgaatgccttcagctgttgtattatattcatatgtagaaactttgtgctaaaccccttctggacaagacactaggcattcttgtagaaactttattattcgatttaattattattcagctgttgagttactgcacactaggcattataataatgacttcaacaatatccagtatttattaccagaaatatgttatgtcttttatttaataaaactaggagaatatgcagagattagcaatgtctattcatatagaatttaccacttaaaaaaataaataaaaaaataactggatttcactcactcactcactcaaccaaaccaaattaaaccaaaccaaaccaccaaactttgaatagaaactagaaaaaattccaggacatgggaagatcaccgacgtctttggcgagaatagcttggggatccagtaacatgtgtccctctaaagtttctgctgggtgagtccattggacccctgaatgaagcataagcagacttaacaggttctggcaccaactccataggaattgaatccgcaaagcatgctgtgttgattcgagtcctttcgagttctgactgaagcaactccgaagtatactgttgggcaagagcaattagatcatctggtgacacactcattccttgttgtctctcatcatctgcaagtgcatcttcactaccacgggtaggtctccgtcggtgatgccctggattctccaaagcctcacttgcactctctgttgctttctccaaaatcacaccttgtaaggacctcaaagactctcttgcatcagaagtaaaataagggttcaatatgttctccaaatattcaagctcgatcgagagctgacaaaaaccattcacgtcaaccaacctaagatgtgtctccttgttttcatggaaaagactgaggaaagtgtcaatcagaccttccacaagaatgcctagtgtcttgtccagaaggggtttagcaccagaaaaaacctcggcatgaacagctactaaagtgtgcagtaactcaacagctgcatcccgaacaccttttactgcaggtgcagcaccccactgaaccccagaatccaacaaatagttcgctgcagcagatctgatcaagttagccttagcaaaagtatatttctcaaggactttttcttcaaccccagaaaaagacattacaagatcttgtacgtcactctcctcttcgtccttttccctaccctgcagccagatgtgtttgtatttgttgtacaactcaaatgaaagttggtctttgcaatagccaatattacttaaaaccatcaagagcctttgatgtggatcctgtacactttctgggacatcagtcaatgacttgtcttcttctgattcattcgaatatccaatctccaaatgtgatacttctttgctttgtgagagctcattcccaatacgctccaaatgaccagcgaaatccaggtaacagttcaaaaatgcaagtctaacagattcttgggtatcttgaaactgagcaaacatgtcttcagattttgtggcttcattcctaagagactgatgaaccatcaaactgatctgatccattgctgaggccataacagaacggaaagccagaggcagataggatattgtgtaaggagatttgttcctctcaataattgatactggaacccatatttctttatttgaaatctcctcagtcgatacacgcatccatgagcaaagccttaaaatgtaaatctttgttatctctgattgaagcgtctgtagtgcagtaacagcaacaaggggagctgattccttcgcttcaaaagcttggcaagctttactaatatcctttatagcatcactcataaacgaacgaagaatatttgattcttcaagatcattaaatgtactatgtactttcgcctcataagcagaaatagtactgagaatcattccagcaacttcatcgagggaatgcgttgaaaactttccatccccaattttatcatcaactttatttgcagaagtactagcaaattttccactgaaaacagaaagtgctattttccaaaaggctggaatatgatgaataagtacagcagttaatctacgaatataccttcctctgagtgcatcaacttcttcacatgccaattccaatggaaggtgattgtccaatgaactgttaacatctgtagattgatttaagccttgctgaatttgcttccattttgcattagataaggctttttccttcatctcattctgcaaaatttccaatctactctcatgatcaaaggtacacttatctagcaaaccacgaattctttggttctgtatatttaagtaatgccaaactgggtctgaatcaggttccagctccatcaacaatctcacagtattttcaaggtttgttaagtctatatttggatcttccatagacttatacaacatacctttgaattcatgcattactttctcaacctcttcaagaacacgtttgagtattccaacatgagatggcagagcaatcgatttcgccttcttgtattccctaactgctaaatcatattctcctttactaatgctcccacgaatagtacttggcaaattgaataatgtacgaaatctctgtaacattccctggactgacctgattttctcagcttgagcttgcctctcaaacaaaggctgaaaagcacgattagccaatgaactcactccagaaatacaattaaacaaatttgaagtacctgatccttctgggtcttcttcaatccgtctcaacttcgactcaatatcatcaattgtggttttgcacgagacaaaacaatcaaaattgtcttttactaattttttcttttgctgagtacgtcctttaagatcactcttcaaagcaagagcaccactttgtagctctgctgcactagtatcttggtgaatccgagatagaaacaactttgcatcaaatttctcagaacaatataacaacttcatacgaaggttttgatcttgactatctctttcctgcttagatggagaactttctgatgcctcagttatcaacctaagcgatttgttatcaattatacccaaaccaagtggatcaacacattccataccacgagggaaagattgtagagaattaaatcccttcttacccacaactgatgctttcttctcgaatttttgagcaactggagctgttcttgtctctcgcatttctctaacccttcgagaaatctcagcctcgtcaacgcgtttccaacgatcgggctcatctccatcccaaccgccatcgtcatccttcccagaagctctaccagccccaggacgagacctcgaacccacagcaccaggtcgagaattatctctgtcggtggattcatcatcaccacttgaaatactaagcatttcaacctcggaatcatcgtcgtcatcgtccaccacaactctcgcctttgctcctcttcctccgtcgggcttgggtacctgaggaacagagactttcttcggttgagtccgagcgttattggcggcaggtttgcggttgttggcggaggaaggtctccggtaattgagatctcgctgagattgctctttcagcgccatttgaagaagctcgtcctcgtccaattcattgtcactcgacattatctctcgtatacgtcgttaatggtggattaggttgttgaaaacccttcttccagagatctgaatacacaatttttctaaattgattagtaataagaaaaccacttcaataccaattgaaatctcaaccaaaatatcgtaattatttatggaaaatatcaatacaaaaaaaaacagtgcaaaattaattcttgacttgccatggaaactcaaaatctctagtaataataaataaaattgatcgatgaagaagtagttctttaaattctataaataattttcctcaaattccggtcaaatgtggagaaatgtcaagtatattgaaaaaatattatttttactaatatttgtttgattataaccttttagttgatttttatttctcaaatcatatttggaaaaaaaaatttaaaatttttttatagtggtattcgttatagttacaatattattcctataaatttttaaaaaaattaaattaatttacagtaccaaaaacagagttactaatattctactttaccacgcgtgttcaaaaaatttcaaaagtatttttggcactgtaaattatttgaaatttttaaaaattttacaggaattatgttgtaagcaaaacaaacacagtcgtgaaaaaaaaactgaaaaaaagtattctgatacatatattttcgggcgtgaaagttgactaagaggttgtaacaagagattgaaagtagcactcctcgtatttatttgagagttttattttcagctaaaaacttataaatacatattttttaaaaaaaatttataatcgtgtaagttataattatttaagacattttacaatatagaattcaatgttcaaaatatctattttatacgcgtataaaataaaaaagtcacgcgtgcctctttgaaccctattttggaagtgttaaaattttttcaaatttttcaaaattttacaatcttaaataattataatgaccataaaaattttttagactggatttgtttctagatatcaaaaaagataagagtgtattggtgtactcatgcattgtagaattttcctatatctttaattatattagatattttttcttccatttatattcttaaaaaatatgcctattaaagaaaaataaattacatttcaaatattaatagaaaaaaaaaattaaaaaataaaagtatataaaaatttatttgaaaaaaaattatacccaaattgtttaaaaatatataaaaataaaattaatataagtatttttttaatggaaattaatataagtattgaaaaaactaaagtaaaaaaaaaaatttaaaaaaaaagtaatgaaaattgatttttacaaattattttaagcttaacttttaaatattttggtgtgtacttatcaattttgtggcgttgcaagtagaactctctattttttaaagaaaaattttatttacactctataaaattataagtgcaccctaatattaagaaataattaacttaattaatttttaaaaattacttttaatatcttttggattttttttcatactatttttttgatcaaatttcatataattttttattttaattttttgtcttaatatttaaaacatattttatttttattttataagtaaaaattatgagcacaaaatggatcacttctcttatccattgaccatactataaaattactttaaacaaataggaacaagctataataaataacaacaaagtcatgaaatacacaaaaatattaaaagacatcaaaactataaaaaaaaaaaaatagtgcaaaaaccaatataatcttatgagcatatatactttaaacatgtattaatattatttgaataactggtaaaaaaaaaacagatcaaacattcatataaataaattagtatataaataataaaaaatattaaaaattactttatcatatttatataaccaaatttatgaattaatatcactaaaattaattaaaaaaacatgtaagattcaaatgtgttatgtctctatcaataaatttaaacagaattaaacaaccgtcgcgaagtacgaattatttattagtataagaatagaatacaatattggatcatctctaaaaacagagcattactattaggtaccaatagtgtctagaaccttctaaatgtgtcatcttgtaatcgattaacaattcttctaaaaagttgttacattaaattatgaaatccaatacacgtaggaaggtgatagacaacactaatgtctttatcatttctcttaaaggcaagaagctggtttgacaattccagtagtgacaccatgagcattgttgcaacttgactcaacactcttaagttgtttcgatggtgttatttgaatatcttccaacttaatattagtacaagccactgttttactacaattcaaattcaatgccacttcagaagctgatgttccctttgctccactataaataatattgtctatatgaacagcagtagcctacataatttttaacccattattattattagtcactaataatattattgaaattttatatttaaaatgctcaaaaagaaaaattaccaagtcatgacagccatttggatcgaaacaatagtgttggtcaattacgattggattttgaacgtcgtagaatgttagattgcgaaactcaacgtgttgaacaatcccttttccaacctatttaatgaccaaatttcacaattacacatattagtacatagattatagtaaatttagacttaaaatatttagtacaatatatacctggtatgttttaatacggacaccattggatgtgccaaagaacttaactcgatgcacttttatgttgcttacattggctacgcttccatctttgcccaaacttccaatactgtataaattatattatgacattatctaagttcaaattactttaaattacaattcataaattttaataattgggaaaaaaattcctaaccttacgccatgaccagggccacaaattaagttgataatcgaaatatgagaagactgatcaccaattgacacacaatcatcacctgattcatgaattcatatatatttattaagagaataattaaattaattatataatgaaggccctaatttactcatatatatatatataccagatttgataacagagtggtgaattgagacattagtggaagcttgaatgtgaaggccatcagtgttgggactattagcaggagaatttacagacaagtagttcaattcaatactatcactattccacacaagtatatgagtttgtggactgttaaccaccaataatcgtaccactttaactcttgtacaatgtaagaataccactgtctgcacccaccaacatatacattacacaaaaataaatacaatgtctagtcaagatatagttaaattggaccattttaccaaaaaaatattaagcaaaatcatataaagtgtttgattattaccgttggcattctgccgaagcagccctgtcaaatcaaaagaaaataaaattaggagtacataataacataattggctagtagtaactaacaaagtcatgcaccctcgagtgagaccaacattcccgaattaggccccatatagtgggccaggggcggacccacatagaggcgaggtggggcagtcgcccaccctaaaaaaatcggaaaaaaaaatatgtatgtattttagttaattacaatatatatttataaataaaagtgatatctatacgtaaaataagctttggtataatggaaaagtcatatcatgaatcaaagaagattatgacttctaattccaataaaagcatatttactttacccccttacttataaaaaaagaagtatcgcccactctcaatttaaatcttgggtccgccgccgcaattcggttaattttaggattgagttctacccaagtagttatagcaattacctgtaacttagggtggtctctacaagaggcatcccaccatggtttaccacggccatcaatagtggctgtggcatttagagagagcccaacaacttcaacaaatgatatcaaatccttattctttgtgttccattcattaggactctttggtgctacaatccctccttctacctacaataatatataatacatatttcttttaattaattaatgacaataataataataataatgaaattatacagttatatatatatgtatatatatacctgaaaaaagagattaggggacttgcaggggccattaaaagagaggggttggaccagatatgtatggcctgatggaaccaacaaggtagaatactctgccattgaattacatgtggcattccatgcttttataaatgcctacattatattccacaaaaccaagtaaaaaaatctatatgaataagtgatatgatatagaagaaatatatgtatatatatatataccaaactgtcgtctctaataccatccccaacagctccataattcaaaatgtttgccacattacttgaagtggccatagtagtgtagtttggaaccagtgtgatcactatgcatataataataccaaacagaccctgctcacaagaaaataataagtaaaaaa

SEQ ID NO: 254658 - DNA, 812 bp, Cannabis indica
attttttttttttaaatgaaataccagactttattaaaatattagcattttgaatacaataaggctaaggcttgtaaatcagcccaagcattatgttccaaaatgctgcaatcagaaagaaatcgagagtgtctagcaacgacatgtgctactcgatttattgatcgctttataaaacgcaaagatacattaattaacgaggataataaagtctgacaatcaagaataaccaagccaaaagtagagtccatgcgttgattgctacgtaaagcttgaacacacaacatactgtccgattcaatcactatattgtgccagttattacgcttgacctagatgagagcttctttgattcccatagcttcaatagtctcggcggaataagcacctgtttggtacccagtttttgcttcgattaatcgaccagaactgtccctcgccacaacctcgtaactgtaagaaccttcttatggaaataaggcagcatcaacattgaatttgatatactctgattcgggtttagtccattactcaagcttatcaacattgttttcaagagacaatgacaacaagcatgttttatcctaagcatttttccaatgatcaaaagtgacagtagctgatgcaagagcctcattactaaatgtagttttttttgttccaaacagtatcattccaagctttcaagattgcccaacacaacattgcaacccgacacactttatgcacatcatagctctgtaatatgctgtcaaatcatgttccaaaggaagtggaaattaatgcgctagtatgaataccaaaagaagccc

SEQ ID NO: 254659 - DNA, 567 bp, Cannabis indica
ctgttcagtggcatctctcctcctcagttcttgatcaatggctctatcaaccctgcctatcatcaatggaagaaacgcgatcagctgcttctgtcttggattcgctcctctatgactgaaggagttcttgcctcagttgctaatcaccacacctcctctgcagtctggcgtgcgcttgaacaaagatttgctagtcaatctagggcaagattactccaattaaaaggtcagttttccaatattcataagggaaatctgtccatatcggattatgttgataaagttcagtctcttgctgattctttgttaattgctgggtctaatataagtgaacaagacattgtgcttcagatcttgaatggattaggtgctgaatttgatcccgttgtctctggaattacttcaagaagtgattctttgacacttgatgaggttcaagccttactattgtctcatgaaagccgattggagcatcacagttccctgacagatctctcaatgaaacttcaagccaatctcacggttggcaataacagatccaacccagggagatacatcccaccacct

SEQ ID NO: 254660 - DNA, 609 bp, Cannabis indica
tatattttggctctaaaacatacatcatatgatagagcttgttgaaagtttcgaaacagtatataaaacgtccaaaacaaacacctgagtgaaaagttataacaaaaatatgattctagatcttctcgaaatttccagaatcggcaggccattttggtaaaaatggctgaccatctttgggcacaaaaatctcaaattttgcactcaccgaaacactcccgaaacctatccaaatcactccaaacttcacagggcacatatataccatatatacaacagtccttgcgtaacagaaattaaaatcgagcccttaaacagaaaacgccattaacgttcagactaagctttaaaagttctaaactcaatttctaacttaaagttacttcgaattcaacaagttatcatcgaaactagttctataactacccaagaataattctataaggtcagaatctccgtaactattctaattcacaaaacttcaatataaaaccaattgttttaaacttaaaacagaattaaaccttaccttaagcttttctgctatgagaattttctattctgctactactagagcttagatcgctaggttttggattaaaaatcgaa

SEQ ID NO: 254661 - DNA, 511 bp, Cannabis indica
ataataactttgaagtttaatattcttatgcttaattatatcatgtgtgaatttcgtagggtttgaagaaacttacgtacgtatacgatcaagatcttatgtattacaagggatttaattatttgtagtttaatttaagctattaattaagaaatatatataactctccatgatgttataatgaagtgctatcgattgtataattaattagagcaaatctccatttatattttatttgtaactctccaccaaactttctaaaataaataataataaagaaactcttgcttctttttaatttattgtacattattcacttattaatttgtcttgtgagtggacaatattattattattattattattattattattattaaggtaaatagagctataaataatgggtaaagactctgttattattttaaacgtgacacatataagatttaaattcttaattattgggtgttgacaaaacatgtagtattatttttttctaatgatattcttt

SEQ ID NO: 254662 - DNA, 562 bp, Cannabis indica
tatatatttagaccttaaattactaaaaaaaaatacataacctttatttttaccgaaataaacttgaaagttgtttgtttagtcataaagattcattaaagcaaataaagttcttagattatgatagtgctttttaaggacatggcaacatacgtgcatatgttttagatttgggaaagggattacatcattgacaaattcaagtgtcatttttattaaatttttgttaagagaaatgctaagaggtataagtggtaacaacaccctcctatatatcattatcattattaatctaattaagtatctggttccttacaagtcaatcttaaaacgacatgtttaaaaatattaaataccataccactggtggccaaggcagccgaaatagacaaaaataaagtatttttttattcatagaaagttagaaacccaagtggcaaaacaaaagaaggattgtccgttgtccccctcaaagcccaaaaagctactccacctcctcatccctcccaagagactcacccgactccaacactcctcttccacttacgtctctctctctctc

SEQ ID NO: 254663 - DNA, 1354 bp, Cannabis indica
acaacaacaaaaacaataataacaacaacaaacaaacaacaataacaacaacaacaataataataacaacaataatgataataactaattatgcaatcatctagacgtatattctttttagatataaaaaaaaatattttattttactttttgagaaaaataaaagcattaatagttaaataaccaacattagacatcatatgatttaaattttaatttaaacattcactagtgtgtattatagaccgtacccaaaaataaaaataaaaaaaataaatgataatattatataaaactaaaacatgaagcaacaaatgatcacttgcaagaaacaataataacagttctagtaagtagtaaccattgccacaagttggaaatacaatacaaattatactccatctgttttgtcctcaaactaataaattaaatattaagttttacatattttaatataatatttattataaaaaaataactaactatttataactaataacaatgtttgtatcttaaggaaaactatgcttctaagttagagattaatgttacctataaaaacaagattatttctcccccaatttatgaacaaatcatctaataataaaagcttaattattacatatttgcctttccaaactaattaattactcccttctcaatccaagaaattaaatttttggttgttaataattaagaagtggtattttagttgtggtggatggatcaaagtggagaaattttcattggtgattgtgagaaaatgaagaacaaagaaattttaagcaaacgagttaaaccgattctatttcgagaagaagaagaagatgatgttaatactcttgctgaagctttcataaagaactttcgtaaccagctaaagattcagcgtgaagaatcattcaaacgtttccatgaaatgataggtcgaggtgtttaacaaagaaaaattatttgattggattttcttgataatatgatcaataattactatacatatttctttttatagtaattaaaattgttgaaaaatatatgtgtaagtatgcttgtcaattcaatctgtttgaaaaagcaactctcaatatcttatatttaagaaatcaatttgttaatatgcgttaggaaaatggtttacattaatttaatataaaagtgggatattgtttatggaagaaatgctaacattcatagtgtttagtaatcttatgaggtgtaatattgttattgatgtaatttaatattggatttcacttattttagtttagtaaaaatattgctattgggtaccagtagtacctaacattttttttagtattaggtggcgccttattggttagcgatatttcctaaa

SEQ ID NO: 254664 - DNA, 502 bp, Cannabis indica
tcactactatccaccccaccaagaatgaccttctcaagatcagaccgttcaagtagtttagcacgattaataagaaactcaacaataaggtcatgtccgtaccttgcagccatgagtaaaggagtctctcctcttgaattggtttgcaacaacagttgtggacacatctccaatatcacttccaagaaggttgtattgtgagtggtttttgaagcaatgatattgacatggacaactgtattcttttctggggttaatatttggtcaaggcttggttggttagtattcttgaacacttgaatttttccattggctgcagcttggaacagcttggaatccatgcgtgtgatgatattattgctagtgttgttgttagaatttgcctcagaaagaaccaaagtagttgatgaagaagccatagaagtgtatatattgctcttttaattaaaagtgaccagctacataatcacacaacaccacttatatatacatcaatttctaa

SEQ ID NO: 254665 - DNA, 711 bp, Cannabis indica
tcctctctgtgaggttgctccgttgctttagaataaactttagaatagtaaaattttggagcgccataaggttctttggtggtgtatcttatctagtgctctcccagttcggtctgtgatcagaaaaagatttcatattgaagatgcgagctgccttttgtgtgggatgggggaagaatctttagaacacttatgtctaccctacgatgtggcttttcatgcttggcggtcctctccttgggggtattttatcctgtttgtgacaccagtattcgcatgtgagactgggtcaaattcattcgggaccttaaacacagcggaattgctgctaaggaggttttcctttatgcatcgattgttgttgacaccacctggcgaattcgcaatgacaagttacataataattacagtagatgtgaagaagtgtattgactctatttgtacttcttttgcaaatttacatgcttctttttcccttcccctcctacatgcctggaggaggtctggactccccccctcaggattggattaatttgaattgtaatgttaaagtggggttagaaaatatgtgtacagcagttatagccaggaaccatcttgtagggtggtttaggttcaaacgtctcggttggattttactagttgtttggctttatcggttgcaaaggatattggttccaagtttattattatggagagcgactcgagggt

SEQ ID NO: 254666 - DNA, 1684 bp, Cannabis indica
atagtgtgtaagactttgaagaatccaaacaacaaagaggagtttcgggctcagatcttgttgatactctgctacagaagggatacaagggttagagatttgagcggaaggagtcatttaattccgctacaaccaatgtaaggtttctcataccttttatgtgtttattttatatcgttttaaaagttcatgtttaggatgttaaaaacatacttgttagtaaatctagatcctagtaaaatatattccaacaatccgtatgtgggactgcgtgaaatttttgtggaatctaaacaataggaatatgaacacagataaggtcttcctgtaagcctctattgtaactgacacaatttggcgggtccagaatgacaaggtacacaataacagaatggataatgtgaatcaatgtattgactctattttccactcttatgcagattacagagattccattattcccataattcccccccgacgaccccccccgctggctggaaccctccccccaagactggatcaaattaaattgctagagattacttgagaaggctgatttgggtgtctacggccaagatggactattccgatgccctatgtggagaagctgctgcggtttacttagacaagaagtcgcaaaggagaaaggacaccagtttatcattgtggaaagcgattcaaagatagtgatcaacactctcaacggattggatccctgatggaaaattgaaaactactctttattttgtgaaagtattggtccttccttcatttcttgtttattttgctttacgactaggtcgtgtaactttatggcccataacgtggccaactaggcttatacccataactactatggttatattgatgttgctaccattccaaagaacatttgttgtaacgaccgtaaggtctaatgtcttatgaatgaacgtttcttttcataaaaaaaaaaggcaatcattagttcgtatgtaatggaagcttaagaaagaatcgatgtgtcgcactttgatcgaaaaataatataaaacgtgaaattttcaaaaaaattaataataaaaagaccatttatcataagtatactctttatgtttatttggtttggaaacttacagtgtactgtaagtttcattaatgctcaattaggttcttaactgaggttgttattaggatttatttttctaatttattataaacagttttgcagccaattattgttgattttgttctttgagcaattatgaacttttttctaattttcctattatataaattttatcttttctttaaaaaataaaagaagttagcagctaaaccctatgtatactttaattgttgtacacttaaatcttaatctttttcttttttgtggcataatacccttaactttatttgtatttgcaaattgaagacatttattaaatttagttgttaaatgccgatttcaattgtcactatgtacacatgtgtacaacttgcaagttttcattagccgaaatcattttaataatttaaataataaaaaataataaaaataatatttaaagatataaataaagttttttccttttctttttagttattaggtttttatttttgaattaataaataaataaaacaaatataaaataaagaaagacaaaaaccaacaaaaccgtaattcctaatcctaaatctctct

SEQ ID NO: 254667 - DNA, 509 bp, Cannabis indica
aaaaaattagactaaaaaaaaattggatgttaaaatagtttggagtgcattagtacacattttgttgatgagcattgctacgaggcattcatggtgcttagcaccgtggtgaactatcactctataattggttaacaattttctataatatttattaaagtaaaataagtgatacccaatattaaattatacctcataagaatcaataagtactccctaatatttttctttattgagagatgcgctctctaaaatataaatatattagttaatatatataaatataaatataggcatatatacctaggaaaatttttatggtgcactaatacactttttatctatttcgtcatttataaaaaaaaaatttaatctaatgttctttatagttgtatgtgttaaaactattcaagacagtttgttttaatattataaattattttaaattctcaaaatttagtaaaatgtcttaaataactaaatatacctatctataaaaaataaaaaaa

SEQ ID NO: 254668 - DNA, 610 bp, Cannabis indica
ctatatagaatttcgtaaaaatacaaaaaaaaaaaactattttaaagtataaaaataaaaaagctcctatttttttttttttaccttcattagactccaatataaaattatttatttttatctcattgttattgagagcttcttaaaaaaattggttatgatttttgaggtgccaaacagagaaaatgttattatcagtgacaatatctagctctaccatagaaaagtttttttattttcaaccctgaaaacaaaaattataacagtatagttacaatttactagttttgtaaataaatcactatgaagtcattaaacgtgtaaaacaaaataatgttgggctgtttacaaaaatacaaagaattttttttttatatatatatatagcatataaaattaattgtaccaaatattaaaatatggaataaattatcaataagaaagaatactatacaaaatttaaaaatttcatatataataaattttacttctatataattaaaactaatttttccatcttgatgaaaaaactaattctttttatgaaaaaatcacttaaaattaattttgttaagacaataaattaataaccagttactttcatgtaatc

SEQ ID NO: 254669 - DNA, 592 bp, Cannabis indica
actgcagcgaccactcctccttcactattgtggatgattccacaattgctagttgtaaggtggttcttcgaggatgttgtatctgtattgagcttgaggaggccttgtggaggaagtgtccaaatggtcgtggcaacagacttggcaacaggatgtggcgcattatgtgtagcaactattgctttatacttggccaagtagcttttcgcgaggttaaggatagcatgagcttgatccgttgtttgaattttaatctccttgttctgttataccaaacaaactaatcaattcaaagaaaaatctctacctcttctttcctcataatagtaaaaatattaaaaataatgtcatgaaaagaaacagtgtttgaaagagatatataagggtagaaaattatacatttccatacacttctaactctcttgcaaaagaacacggcgtgagaaactgattttgcatcttgaccacagcgggcacacaaggtggattggcttattttcttatgggcaaggttcttgtgtattggtaaggttgatgttgaagctctatacacaatgtgttttagcttagggataacactagttgagacggc

SEQ ID NO: 254670 - DNA, 1173 bp, Cannabis indica
aaagggacagcagcacaagagggcaaaaaatctgtccaaatacaagaagaatgagtcattcaactccaaatagctaaggcatttgctacagcattacaagctctagggacataagaaaactttacagaaataaaatgatgctgaagagataaaatttcactaattagcatgccccaatccgatgagatatatgtagcagtaagcaaactattgataactcccaaacagtctgagttaataataagctgaggtaaagaccatttgtgagccaataaaatgcccagccgaattgctaccgcctcagcaagatgcaccgatagagtacctggaagaaatgaactttaacatgcatcaaattttactcttaaagttttcatccacgtgagactttttatagtaaaattagacaaaaatcattaaatttaactatcttaatggtttgagagaaacttttaacgacctgaaaaatttagaaagtataatttattatatgtcaaagctcaagaggaaaaacctacattaatcttgatatattattgttgaagttaaaagagtgctcgaaatgtgtggataatttagaaagaatgattagtatatggattaagtgtgagaggaattgaatcctcttccttactcttttctcaatattaaataatattatgccgttaatctctaatttgtcataagaccttgtccacttaaaagttttccattcgatttttcttttctttttcagtacttttttctactagcttaataaagctttagttttaattatctcatactttaatttttgtccctcttcttttttcaattaccaaacatttccaaagtgatctacttgcttgggtttgcttattattgtataaactaattatggaaaaaacaaatttaaaatttaaacaaagttagtcataaaagtgatttattattaatagaaaaatactaattaaatggcaccgactgtgtgtaacataacaccttaattataatactggtgtagttatatattaagttctacatatcttagttagtaattataatggaaaacagttaattattcgtgtgcaaaattttacctcatgattttatcatacattaggctaattaagatttttactccctgaactttgacatgtactaaatcatgtcttctgaacttttaaggtcgtt

SEQ ID NO: 254671 - DNA, 953 bp, Cannabis indica
tttttctgatcgttaaaaattccctctgaactattaagattgttgaatttaagaatttttgtccaattttaataaggaaagtctaacataaataaaagttcataatgtatatgattcgacaaatgtcaaagtataagaaaaataatttaatagatattaaagtccgagaagcatgatttagtacataaacaatcactaaattagtaaaattgaatgaaattagacaaaaattcttaaattcgataattttaataattcagagagaatttttatagtacatgtcaaagtttaaggagaaaaaaaatactaattagctaaaagaaaatgcacccatattaatgcatatatcattcaactttatttgaaagaatatttattgaattgatttttgtaaaatatatataattaaaatatgagctttgtcgtgaacaacatgttgtgattagacaaaagtgataccaaaatttattatgaagtggtgttttatgatttgtattatagagtttttataataaaatacgtgtaaaccggtattaaattatgaatgataattgagtagctctcaaattacaacacaatttttacatgtaattaattataatcacataattaaaatttaagtgatagaaatagttaatatttatacacatcatgtaataaatgtgtgaaatttaagtgtgcatttattattattattattattaaattataccaattacaatattggtgtctctttgaaaattgtctttattttacattctaaaaattaagtataatcttttattaaaaattaattggaggcctaaaaaattagggggttttagatgagcactttatttctataaatataacgttgatatttctttaatggagtattaaactaaattgaaatttgatatttagttttctactatttttcttcataaatttgttaacaataaaaattaaatgag

SEQ ID NO: 254672 - DNA, 732 bp, Cannabis indica
ccctttctcgtcaaaaaaagtttggtacgagtaactttttaaaaataatttattttttaaagtggttcagtttgcattataccatgtatttccagataaatttcgattaatcatacacatatgcccctcaagtaattttaaagggtcatgctttataattacttatcgaaagaaatgatttaactttattcacgactgaagttcaaaatactacatcagtgatgtggtttacaatcattaatttactatcgatttatcaatcttccagaagcatctggttttgatattcagggtcaatccctaacatattcccaccggggttttaatattcagggtcaatccctgccatatcctcacggctctaggtgaactgatcctaattatttatcctgctgctcaaactgccattagttgacgactggctttctatgtcgtgattctacacgacagccatcgcgagccagcatctaattacctcgcactacttctacgtaattgcttgactggactaattgtccatagtgcaattaatgttgggcgaccttctttagaatccccattttgggtgtcaccgttcttttcttgcaatatgttatcctcccgagataaccggggtatcccttcctccaatagggggaggttgtggttcctggtcgcttgggttatctggtagatcgggctggttatggacattgtcctgcccctttacatattgttggaagtgtcctcgcg

SEQ ID NO: 254673 - DNA, 516 bp, Cannabis indica
atatatatatatacttatctatatgcttcaaagatgttatggatgaaatataaaaagaaatcagagtttgaactcttgctaaaagaaaaacaaaatttgaacaacattcccacaatatatagtgcaattcaagtagttcaagagctttaaaaattctaacaaaaacaaaaatgtcttaaaaagaaactaaacttctaatacatattaaatacaaccccatttccaactccatttcgttcatctatccaacctcatttcattcatttttataagtaaaaagataaaagtgaaagtgaaaggtaatctaaaaaatatgtttaagaagaatagagtaagaaaaaaaaatgtaagaagaatagagtaagaaaaaaaaaataacagtttcatgcataacatacacaatatctagaggagttatatactcttaaccaggggcggagccagaaataaatattaagggggccaaaattaccctctttagttctcataaaatttttaacttatttagatctatat

SEQ ID NO: 254674 - DNA, 810 bp, Cannabis indica
tcaaatttcagtatttttgtaagcttccccataattattatacaatataattatactgtgcatcattattacacaattacttccaaacatactctaaaaatatatttagcattattaataggaaaaatgaaatgatgttgatgattgattcatgttagtttaatgcaacgccatttcttgcatcaagtttggcattccaataccaaaatttcacttgttttatttatagttttgtacgaatttctctctctccaaaacaatcaattacaagatttaattattgtaatattaaataagagtaactagttaaagtacgtgaaatgatggagtcatttataaaaagcatgtgctaaatattaattgttagtatatacagcaatttctatgttttaatttttacttcttaggtcaaaaattaggctatgcctaccactactaacttattaaattacaactcagcttgcaaacaaaaacttattggtgttttaggataaataacaaaataagtatttaaagttttaaatttataagtgacataagtttaatatttgtttttaacaacataagtactcagtatttgtaaaattataatttttttttaattctgtcagtacaacttttattattgtcttaaacatggcacatataaaacatagattctaaattattgactctacaaaaatatgtagtaccagacgaaattaaaaaaaaattaaataataatttgttcatattacaaagtataatagtaatttttatttttatttaaattactagtattacgctttcaaatttcaatgattatcacta

SEQ ID NO: 254675 - DNA, 756 bp, Cannabis indica
gaccgggtcaacccgccaacccgactcctattcgggtccgggttcggttttgttttttaaacccaaaacccatgaaacttgcaaatccgaaattcggtaaacccgctcgatgttcagccctacccacagcccaagatacctcctttgggggtcggggtatgtaccccgtgttgcatccccacaccccgagactaactttggccttactatggggccttgagttggggggtcggggtatgaccattttgacttactatgccccgagatcgcccaaagctcataaacaccccgagctacgcacacacactccgtaacccaagcaactcccatacgaccacgattaccctgacactggggtgttaccccgacattggtgagttagggtacaccccgagtaagcttttttttttgaagtcttgaagcgtggccaagattggaggttgggggtgttaccccaagaccaccatatgggggttggggtacaccgccccgaagtcaccccgtggtggttgggggttagggtacaccacgagcttgaagcatgccccctttttcttggactgaagttgggtcgatagtgggtcaggggtggtaccccgagaccaccacttgggggtcggggtactccaccctgaggtcaagagtttaccccgagtgtggatagcatgttatttataaactatctttaatgaggacaatgtgtgcgtggcccgaggctggggattacaccacccccgtgaccaccatgtgggggtc

SEQ ID NO: 254676 - DNA, 904 bp, Cannabis indica
tacttaaaattttaagtttagcaggattaatctttatatttaaatttggggagtaaaactcccaaaattactatttctttttgttatgtattgttccattgatctagctttgctatttgccaggcgggtcctaagtgataataagtaaaaaaatatatgcacttacttgcctctatgtgagatgcaattaagcatattataagaaacataaacaaaaccaatcaaaattatatataaaaaaaaaagcatgattaaaataaaataaaataaaaactaaaacatactcattatagaaaaaagaaaagacaataaacatgaaaaccaaaaaatcaaaaatgaaaaaccaaacggttctccattataaaaaattggaaacgagaaggtgttttggatttagaggaggagttcgattgtcgatggtggaattgtgatatctcatgcgattgtttggagatctcccacctaattacgctaagtttcactggttattcatatttgtaggatttttcattatgggtagtcacatttttaggtttttgttacgggtaatgacatttctagggtttctggtttggagatggttggtagggtttgtgagtgagaaaatgttggttttatagtgggattcttggttgagtatttggttaaaggttcgaggatttgcggcttaagtggaatggcagatgagttgttaatgatactttgaatattgagtaaagagttgaagaagtgagttatcctaaaagaatatttgctatttatttgtctttgtctgtagggtacacttgcacatgctaattttttgtcggttttcatgggggttaaatgttttggagggtttcgcccaatatgtcaaataagttgaagtttagcctaattcaaggctcttacaattgtcatctta

SEQ ID NO: 254677 - DNA, 589 bp, Cannabis indica
tcattttaaggactctaaacataggtctaaccgtaaacacatatctaaggccaagccttaacctttggatacattgttctagagcaccaccttcttatattaatagtgtcaaagtactattttaatattgtattatcaatatatatttaattcaaaacttaaatctacaaaattcactcaagacttaaggttttgaattcttttgcctttaattcgtgtttattttctttccaaatctaatattttaaactttaccaaatttctaataaaagttagccaaaaaaaaaaattacaaaattgatgcaaaattggtggtttatgtcaaaattttattttggtaagataaacttgatacacttcgataatttaataaaaataaaaaactttagaatttagaaattaaaatacagtactaattaaattgatgaataacgatgacacgtgtacattttgaaaaaaaaaaaaactacaatttctaaattaacgaaacctccaacgttttaattagtaaccgtctttttcctaaagtagtttatttaattacttcattttaaacctacctagcatgcagagttactaaaataaaaaa

SEQ ID NO: 254678 - DNA, 536 bp, Cannabis indica
aaataaacattagatatttaagtgtataaaatctgaaatattaggtatttatgccacaatttacccaaaaactaatcatatgattttaaaaccgttgttatcatctatcttctttgtacttgtcactatcttcaaatctgatatcatcatcgtatcttacttataattgttaatatcattatcaatagatttatttagtacataaaataaatcaaataatgagttaaactacttacttttatacataatttaagttgtaattttttctttataaataaaatatatcaaataaaatatattaattaataatgaaaaatagatagaattttatctaattaactttttaatttttaacctaaaaagacatttttacttctaagaatgtaaaagtccaatctttttgagttttcatcgatttatcaatttttgtaaggaatatacttagtactctgtgttttctcgaaaaatatatttggtgtcctgtgttttcaataatacttatttagataattattagaaaaaaatattaaaaaaaa

SEQ ID NO: 254679 - DNA, 1726 bp, Cannabis indica
aattatagcttaactaatagacctttaagtttagatgtcatgaaatagaaactatattcctaaaggctagaaatcctcacttttagttggttcaacttcataatagctaaacctactttttataaacatcatcatgaatacaatgtactgaaaataacaaaatcatcaagtacctaaaaaaagaactcaaaagctaaattatacatagaaatatgtataaaagcttctcactgccatgcggaaacattgttgtacaaatctaatatatccaacagttacagaagactttttagtaagtggcaacctaccaaaactgcatcagaaacttccaaacttatatgtgctctttctagacttaaagccaataatgacttttcatagttcttcatatgctgtaaattgtatagttccatgagaaacttgctggaacaacacatagatctttaattagcatacccaaacaaaaaatcattgctaaaatgttcttaaccccaccttagagtcccgtagttttgtacatacatatttatcagttctaggtatgcatttgtgttgttaccaaaatataaaatgagcaataagaatgatatatatacaagtatacgtcgagcaacataccagaaaaaacccaggaacaattgcaactaacatccatcggacaactgtgccattcaggaagggaaagataaaaccattgttggatcatagggatatttgcacataacaacacctatccctggaactggagtgcttgcagcaagttgtcaagagaacaagaatacaatatccataataaatttaacactagaagagatactctaacatagattagagacaatttttgtcaaaaaatctcaaataaataaatgaattctgcataactgagcccataaattttctaagaaaggcaatgaattggcaaaatcccaaacaatcaccctaactcgcaaaataacgaaacctaattattcactataaaatcaaaggagagtgagggttcggctatcaaacctgcagtgttttaaaatatataatcaatcaaccgtggagagatctgaagctctctcgagctgacccaattcattatgtcaagtgatattctcgtgtttagctgggcaaactaacatgttttaaataggcaggggatgaagaataaaaaaattgtaatatgggttgagagaaaacaaagaagaacaacgcagaggatgaagaatcgttaaaaattgcaccgaagtttggggtttgaatcgcaataatcgcaatcgttaaaactaattctttaaaaacatatatatataggtgaagataaagcttaattaggaaggcattcaaatcaaactcctatcaaaactgattcttaaaaaacatatatataggtgaagatacacagaaataaagaacaaaaacctggaagacgccagagttgggtgatggtgccgattgccgatgtggtggtgctatttcgacccgattaatttcaaataggagcttagcggatctcgcatttcactctgtaattaattaattatagaggaaacggttagagacgaggtcgcgatggccgtctgagagagagacgaacggaggagcgagataaggttggtcagagggatgggagacaagagacgacgaggggtggtcggagggatgtggcgctgccgaacggaagcttggagagagagagggagccaaatcgaaatgggttcagaactgaaattttggagta

SEQ ID NO: 254680 - DNA, 860 bp, Cannabis indica
tttcaatgtgcaacatttaccatcaacagattgccaactccagtcattggcaatattagtccatatgagtgcttgttctcagcaaaacctgactatacaatattaaagccttttggttgtgcctgctggcctcacttgaggccttatcactctcacaaacttgattacaggtctgaacaatgtatctttttggggtattctcctgttcacaagggttacttgtgtgaaaatcaaaatggaaggatgtttattgcacgaaatatcatctttaatgaacatctctatcttggaacttctctcagcagttctacaactcaggtacattctgcaacttcgaactctagtgtccctactgcttcctttttcactaatattccttgtgctaatatacctgtttctggtgttgctaatacaactgctgctgagcctctacatttcacacctcacactgctgctgcaccttcagttatcccaaccactcagctcttgccaacaatacctgagactcgacctatatctgcacctgatcatgctcccaccattaatgatatcccaacccatgtcacacaaatgaacctaccctctctcccaaaacccccaacccctgtctgtcatgacagtaaccacacccctcccaacatctctagcaacacagtcattcccactacaaccaggattcaccctatgatcactaggtcgagaaatgggatatctaagccaaaagcctatcttgcaaccaaacatccactccctgaatcactcttgccctttgaacccaaatcgttgatagcagccctcagagatccgaactggctaaactctatgcaaactgaagtatttgcattgaaaaaagcaggcac

SEQ ID NO: 254681 - DNA, 637 bp, Cannabis indica
aaaataggatatttagtagatatttacaaaagacaaaaatgcccttagattctagattgttctcatctattatattgggcttttagggtccaattcgcagcccacttatgatgtccacgttcaggtgtgtcttgtgggacctactgtgcaatccttggcctgccatggccttgtacttgccaagctggccagccataatggtatccctagcctgaccggccatggggccagccaggggtagcttgccagctccctagaacgagctagactatcacttgatccacgtttaagtgtcgggctcttcattggctcgaatgttgacttggccttccttttagtgagctttactgccatgtggtacaacatcgatccatgtaagcatgccacgtcatgagaaaaaaaattaggatattagagacatttcaagaggcctataaatttgttggaacagatacagatgaacttggacagttttaaacaaagtttccttaaataaataaagaaatacaattctcatttaacatgtatgatatacacggtcaactttgaataggataaatatcaaatcaagaaaaataaaaatgaaataattattgggaagtttttagcctacttgatttcactgaaaatcaacatc

SEQ ID NO: 254682 - DNA, 908 bp, Cannabis indica
ttttaagttttgtttacgttgttgttatttgtattttcagtaagggtcacatggattacaaatagaagcttaaggcccatcagtgagctcaaataacgcaaactgggccaagcccaagatctatttgcctttcgagagaacatcaatacaactcgcccaaaaaaggttctgccaagcctagtcagcatctgcaagagtcataactctgtgtatttagaagaatccctcaggaagccaattatagtttcttgtttactattttgcatggaataaggaattactttccttaaatttcggacaaagaataaaatcttcctaagatatgaaattatacaattggagatgaagtaattaatatatgagcaattgccattgttggccatggagctctgataccatgaaggagaatgaaaaactgataaaaaacagagagaaaaacagggaagatgaactgagtggaaagagagagaattattactgctcaatatgaacaattgaggcagtaggagtcctttttatattactttgataagcaattacaagagagttagttaagaccaactaactacaactgaatttacaactaatctttaatagactaacagaaccacaaacaaacacgtgacataggaagttaagtaattgcttcggtttcactggactcattttcagcttcagatattccaatagttagtacactaaaaagaaatagctaaccactttgcgaaagaaaaagtaataaaagaaatacttaggtgaaagggagagggattatgactaggggtgggcatcatccaatctaattcaattgaacagaatcgacccaatataatccaattacaaaaagttggatatccaattacaattgtattagattgaatgctaaaagttagattctaattggattg

SEQ ID NO: 254683 - DNA, 1129 bp, Cannabis indica
tttgtttttttccctaaatataaagtaaaacacaaaggaatgtaggtggtatcttacatttttttattgtattttaaaaattttgtgacattttcatattttgttaagaaataaactactatacatattcacgtaaagtcccacatagtttagaaacacctaaggtgttatccatgtaggttataaataacacttttttttatgcaactttccatgtccaataaatatttttcttggtatcttaaaattttttcattgtatttttaaaattttgtaacatttttggtattgatttatgtattacccaacaaattttaaaattttatttaatatataaaattaaataatttatcattcatatttagataaatgattatatatctttaataattaagtaatttacaaattatatataggtttttctttatttataatttttctttaacataaaaatacacatatatataataacatatttttttaataatataataggaactataattaattcaatatttttatacatataaatatgttactatttttaatatattatttacacaattttttaaatttataaataaaaatatttttatttacaaaaaaaagtgtcatattatttaaatactcttttaggcatataaataatatttttaaaaaaaaattactacacatacaaacttagagtcctacatggtttagaaatacttaaggtgttatccatgtaggttataaataacacttttattattctacttttcatgtccaataaatatttttcaaaggacgttgatttatgtattacctaataagttttaaattttttatttaatatataaagtatatatctgtatttctaaatatatatataaatataaagaaaagcacaaaagagtctaggtgacatcttagatttttcattgtatttttaaaattttatgacattttcatatgtttttagaaataaactactacaaatacaaacttaaagtcccagggtttagatatacctaagatgttatttatgtaggttatcaataacacttatatacattatactattatgctatgtccaatgtccaataaatatttttcttttagggggcattgatttatgtcttactgaata

SEQ ID NO: 254684 - DNA, 954 bp, Cannabis indica
ttgctgattgatgattgacaaaggtagcaaacgcgacgacctgccacaatataaaacgtgagttatcatactttcttcctttctcacctatcaaaaggagcactttcttttccaggaaaccaataagtaaaatcccttgaaaagaaaaaagaaacaataaaaagaaaaaggggaggacctggttgcctctgccggtgtacttgagttggcaagattcgaaaccaggtcttctaccgaagagattgtgaatctcgcgggccttgacatcgtcggggaggccagaaacgaagagcgttttgatgccggtgttatcgtgtagttgcggctgtggtggttggtagtggaggtaataggggtcgtacggcggatgagccatgaattagggtttatctacaccggcggtggatctttttactttgaatgagagattttccggaggggtttctcagtttagcgtcggaagagacggcagcctaatggagcatttaacaaccagtcccaaagccaaaaggaaatcgacaaaacgacaatagtttcatgtcgttatagattaaaacgacattttaaagctcacatgttttttttttatagtatttttaaaagtaagaatagaaaacggttttttgtcattttaaaaatttaatagtgttagacacaaattttttctttctaaaaacaaaatttaatattttacaccataccatgacatgaacccatcctaccctagatctaactcgaacttggacctcgaccctaacctaaagttggccctagactcggacccaaatctggaccacaaacccgaactcagactcggactccaaacaccgactcgaacccggatcccaaaccgggggctaggtctaaggtccttggctgggtcagggttcggggtccgcgtttggggtccgattccggggtccaagtctaagtagggtttaggtctgcggtccg

SEQ ID NO: 254685 - DNA, 1001 bp, Cannabis indica
ggcttgatgcctgccaccatcacaatcttctcaagctgatgagcgcaaaccaaagtagaatggagctcatccgcttcccagccgttggcgcaagaagtatagttttcctgggcaactggtcctttcataacctcctccagggtggccaaggtatccgcccctttcttagaaggcttagtcccggagacaggggtagacatttttctgtaaaaagaaaaaatccatcagttaggccccaaaccgaaccctagaattcaaaacgggaatggaggtcccctaaccgctggaaggcggccccctccagatgcttcccaaataaggaaaccccaaaagattttccttgacaagcatcggatgtaagaatcccaaaggcagcgaaggtggaaaaagaaaaagaaatggggaaagaagaaaaatgccgagaaaacgcgagtcactctatgccctaaaggtgttattacgacagaagagactatacccaaaagaaaacgcagtaaagaggaacaaccaaggcacaaataagagagattttatgcattacacaacaaacttaggcaaaatcatttccaagaaattcaacattcaacccaaatactctaaacatgaaatacaaacaaacaatagatgagtataaagtgtcctgagaacttacacgaagtttgaagacttggggttggtgttgatcgtcgataaagagaagactgacaacggcgaaggaaaaggagcagagaatctatggtgtctggaatttttttctctctgtggaagctctgagaaaattcggcaaaatagcaaaagtaaccaaatgaaatgagaaggctggcttttataggccagaatgggtgtgaggtagctgtgatcaagcattatcgaacggtcagaatagcaatcgatttgcattctacagatccaacggttgggacaagcactcatcaaggcggttggaaacgtttcagtactcgactgacacccatttaatgcgacagatcattaaatggata

SEQ ID NO: 254686 - DNA, 759 bp, Cannabis indica
aaccgcaaaaaattaaatagacaacaaggatttatagtatttcacccctcatgtcgcgatggtaatggggctacatctacttgtagttttattgattagatctgagacactagttatgttctcaagagtgtgtggataaaattacaacaaaggatttctaagtgaaatcttaatcaagatttatgaatataaggctcataggaggcttgatattcataaatttgatctaaattaaaggttgtaaagttcttgggaacaataaaccaataatttgtgaaaaaaggtgtatattaatggtgttttgaagtctggcgtcgcctgagtatggtggactcaatgaacaagatgaaggaatcaatgtggtgttcttggtttccttttagtaattttctaagagaaggtttcaaagtaaaagatccaaaaaaaaaaggtctcaaaaagaagaagtccaaaggaagagatccctttctcaacctccacttgatgtatatatagactagagggtttgttagtgatctctcatagatcgggatatctcattaacaaatcccatataattctcttttttatgaataaaatattacaaataaataaatatcaataacaatcgccttgtatctaggcaaatatcccaccaatattggacaattagttattttcggttgaggatgcacaaatttgaaatggggcactggacaaatgcattttggactaccgatgctcgtcgcacgaatgctacataggttgtggcggtgtgcg

SEQ ID NO: 254687 - DNA, 686 bp, Cannabis indica
ttttaaaaccattaaataattaaaatattaatataataattaaatctaataaaattaatgcattaaatttatatatatatatatcaatttatcatacaaattcagaaaggtgtcaatttattcaataaattttgaagacatgtattgttattgtatcaatcagtttagagatttaaattggtgttcattaatcattgttctaagagttgatctcaataagattataaaagcaatacaataatattcaataaataagtcaaaacaaatgatcaaaatatggtgtatatcaatgcttaaaattataaaattacaaataatgttgtcctgtataaggtcttgtctattgacatggtgagattgtttctttgatttttgtttgttttgttcaggtctgtccttgttttcggcggtttgttgtggtctagtttgagaagttttcagatggcaacgtcgtatggtaatgaggacgttgaggataggttgtcgatcatcccactcgaggaggaagaggagccagcggttcaatatgattagcccttggtcgatgatgagagcttgatacacggtggagcatagtgggtcattttcttacggacaatccgaccgatttcatggctatgcaaaatttgatggcagtcctttggaagccaggtatgggcatgtatgtgaaagatttgggaggaaat

SEQ ID NO: 254688 - DNA, 798 bp, Cannabis indica
ggatataccctcatgaagccaaatgttcctgcagttccagagcttccacagcaaacaaacaaagagatgataatgtccagtaataaattcagtggcaacaagatataataagtccatacagttaagtgaagagtgtgcagtgataaaagtattaaaatcagttaatttccataccttctgggcagcaggacatctgaagagagcgtgttctagggtctcatcgtgatagtgacatcggctgaaatagggggagcatagagtctttctgttgaataggttttggctagtagggaggatatcataacagacacgccaaaggaaatgtttcaatttaggaggcaaaggaagggtccaaagatttttccaccaggcatttgaggacttttgatccgagggggaaggttcattttgatgaagttggctatgggctaggtggtaacctgaattgaccgtgtacgaaccatgaggggtgagggaccaaaaatatgtatcaagagtggagatgggatgaaggggaatagccattatagcttgtgaaatgtcggtaggaaaaagggaatggataagggcatgattccattgcttgttaggtgtgataaggtcagccactgtcatatcggcatttgaatgatacctcaaataatgcaatttaccataaccaggaatccaagcatcattgaagatgttgatggtagtaccatcaccaattgacttcctaaggcctgattgaagaagttctttgccccaagtaatactagaccaaacaagggaaggtctatgacccttgccagagtgaag

SEQ ID NO: 254689 - DNA, 676 bp, Cannabis indica
ttttttaaaattttaccgaatatattaaataataacaatataaatgattataaaaaaaattagttaaatgccaataagatgaaatcgccttattaatttaaacaaaattattattattatagccaaagacataaccactaggaggaggagcactactatggtccccactattgggtcccattttcctcaacgcgttttttgataataagtcttttgtttttccaccaaacacactttcataattataagtcggtgccacgtgtccctccctaactaaatactaaataaatagtgtccaaaatctaacacactgtcatctaaaagggttggtgggtttactcactactactaggactctatagacatttttaacttgaataatttattcaaattaaattgaaaaaattaataatgaccttgacctctcataatgttttatgggttgaaattttatttattttgaaattaaaaaaaataaacacattaaatcaatttgaaccgactaatccgaccaaattaaacaaattatacttaaattttataacttaatatttacattgagttagaaaatatacaatataatcccaccagatactattaaacaattaattgattataaatattattaggctattaaaaaaaatcctaccaaatacaaccctaattactactatac

SEQ ID NO: 254690 - DNA, 719 bp, Cannabis indica
tcaaaccgcaccgcaccacacattataaaaataccaattttttatatttattttggtctcatatgtgaatgttcaactcaaagctcactaattattgtattgtttgaagcttaatttttttttcatatttatttttcaagtcttatggtatttttgacaagtgttgctcaagctttattgtatttgtgatggtataattatttggtgatagtccaaactgtaaaaactgtaaaaatcgcaccgcaccacaccattttttgtagtgcagtttttgcgattttttaatttcgcggtgcgggtacggtttggaaaattagaaaaaccgcatgtgcgggttggtttgaaaaaatggtcaaaaactgcaccacccgcaccgcgaacacccctataaacaagtaacgcgataaataataattgataaatagaaatttcacaatcaatacataataaaatatctcatatcaaaatttaaactcaatctaatttgtaccaaaagatactagtattttctatagatacccaaaataccattattatttaatttttcctctctctatgtccctctctccctcgtgctctctctgtctcgaaaaccccaaccaccaccgaaaacttaaatgatggcaccccaaacaacagacaatcctccattttaacttaattttcactccagattctctctctctcgcccttgctcaatctctctctctttctctctc

SEQ ID NO: 254691 - DNA, 726 bp, Cannabis indica
aaacacgtcaaaaaaaaaaaataataataatctattgcacatataactcttttataagtgtgtaaaataaattatttgaaagatatttttctatattgtattttattagaaataataatataataataaataatattatttttagtgctatagttggagtgttaagaaatttttataacaactttagtattgttgtgacactaaatttagtattaagattggaaatacttagagcaatcccaacaattattcataaatagctaaatctttaaaaatttgaagaatactgtcaaaactcaatccaaagataaatgtcattttcattttagctaagagcttagctactctttcttacacttttatggtgtttcaaacaattttttttctttttttctttttaatttttcatcctttgtttctctttccaaataattactttttttttttttttttaaattacaaatgtaaaatataatattaaaatgatgtcaaaatgatatgaaaaaactaatatatgaggtaataaaaaattaaactaaaataaagaaactaaatttttgtaaaatattttgaaaaatagagtactcttattcagagccggccttaggtataggtgagttagacccttgcttagagcccacattttttagaagcccgaaataaaaaataaaaagaggaaattacactctataccctttttatattgtcctcttttatttttaccct

SEQ ID NO: 254692 - DNA, 712 bp, Cannabis indica
tttgcttaataccattcatgggtaatactcgttaaaaagtgttccatatatatttatgtatatatatgagtcatccttgatccaacttattagctaagtcatggtgagcactagctgcctctctagaaacaaagttaagtgcaactaaggaaaatgagaccaaaaaaatttaggctatgttttaaaattggattttgataagaaatgaaaaatgtaagaaaaaataaggcgaaaaataataaataaatatttaattaaatttcgtatatactatggaaagaattgtttgaaaaaacataatttctcataaggaacatgacaaattattttgtttaagaaagtattttttttctagataaaaattcaaattctagacaaattatgttcgactttaaagataaacagactagacttatagttaaggtccacctaaccaggggcttaaaaaaaattccctttattttacacgtttgttttactaattttaaaaataatacattttatttttaaataaagggttaagtttttttttttaattatgattgactaaattttaaatcgatcctagacataatttattgggccctaatttattattacaaattaatattgaagaaccctttgagctatgcaaaacattgaggagagagcttgcgctattccataaaaagtgtttgtaataatgaagtcaaaccctatgttgttgtctttt

SEQ ID NO: 254693 - DNA, 706 bp, Cannabis indica
acctaaaaacccgtgtagtcgagtcagattgaactcgaaaaagcctccaatcgggtttcgggttcaggtgtggataagtaggttttttttggtcgggttgtaacccgtaacccgaacctttttttaaaaaaaaaaagttaataatacttaatcacatattaatcacattcaaaaaaaaagactattcagattctataaaaaaaaaaaagactattggtcgggttaacacttgtcaatacttaattaatattattccatatttttaattattttttttaaaaaaaaaagactcttcatatacagtagacacaagacacagtatacattcatatctataaagttattcatttattacgatgatcaacatatgtatatgtgtaatcaatgcaaatatatttatatttataatatattattattatatatacttaaataattacttatatattatatattattacttttttataggatagtatcgtatgtatgagttatgttatatattttatatagtatgtatagttacatactattagttgcttatattataaaaataaaaaaaatagtatttttaaaaattaaattttatttcagcctataaattaaacattcggactcatcccaacaagacccgaacccgactacgcccaacccgaaaaagcctgacccgatacccaaaaacgaggttcggttgtgcatttccaag

SEQ ID NO: 254694 - DNA, 1402 bp, Cannabis indica
atacaaactcgccatttcttgtttggcttgggtaccagtacgagattagcaacccaggctggatagaaagcttcaattatgaaattattgttacgtagcttttctacctcttcttttagagctagggctcactccttgtccaacagtcttcgtttttgttgaacagaccagaaatttggatcaatatttaggacatgtgaaattatagaaggatcaactccgaccatatcctcttgcgactaggcaaaaatgtctaggtttgctctcagaaattttatcaatgctgattttacttcgagcaacaaaccttttccaatcttaagctttttggtcggaatatttgggtcgatttcaatctcttctagtcttccactggtgcaacattgttgtttgggtccccaagtcgaggatccacatcttcatctccgccttcggcggttacctatttggcaatattttttccctgtccgaactctagctagaggatacttcctttttagccttggttagggcaaggttgtaacattcccgagcaacttgctgatttcatcttagacaccccaccccattctttgttggaaacttaagtcatgaatggaaaatcgacgtaaatcctttaagtcatataaacatggtcggcctaacatgacattatatgttgatggaacgtctaatactaaaaattgtgccattatagttatgctcttcagagcttgcccaacagtgaggggtaggcaaatatgcccttgaggtgcaacactttggctggagaaaccatacataggctagagacagggggttaagtctttgagttggagccccatcttttcatatggtgtcttgaataagatgttcgcagaggctacattgtctatcatggttcgggccaccatcttgttggctatctagacttccacgaccaacaggtcattgtgcgggaaattaatcttgacagcatcttcatcactaaatgttatggtgggctcccctgctcgtggtatttttggtttcctttcttcgacggccagaactacttcttcttgctcatgttgtactatttgggcatacctttcccgggctttgccttaatctccaactatgtgcggacctccaataatgacttgcagatgtccatcaactggtggtggtagtaaatctttgttgttatcgcccctttgactttgatcgaccttgacatatttttgcacgtgcaaattattttttcttatcaaaaatttaatttcccgctttaggttattacattcgttggtgtcatggcaataatccccatgaaaacaacaaaacttagtcatgtcactcttgctcacgccttttttcatgggtgcgggcttctaatacggagctaatgattgagtagccatgtaaatagtttctaaatctt

SEQ ID NO: 254695 - DNA, 669 bp, Cannabis indica
ttgtatttgtcattgaagatttcaataattggaacaatataattacatgattttctttaaatttaaggtcgaccttgaaatataataggtcatagaaaaaaaaataggcccttatttaaaagaaaatgtagtatttttcaaaattaataaaaaaattgtataattttaaaaggaatttttttttgttgggcccctgggctaggtaggccctaggcacaggcctagcctgcctatgcccagggttgggcctccttaaatccaatatgtaagaaccataactttgtgtgtggcaaattatgtgtatctcattatttgcttatatgagcatactatggtcataccgagtgtatgttatttttgttggttcaatttttgttagtaatctttcatacattatggtttattcattaactataatttgctaagggagaaattctaagtgccatattttttcagtgtcgtaaattatgtgttagtatcatctatttacctgttagatcgatgcattttgattttttgggtttatacatttactttgccaattcaacatttaagttgaaaatatctatgtcagttgttatgagctgtcattctaatattaagtcggttgtttggaaagttattctatatatttttgattctaacagattctaaccaactttcattcat

SEQ ID NO: 254696 - DNA, 1194 bp, Cannabis indica
aatccatttcttaattccgggataaaatattggggtctgcctctcttcagatctaggcaaaaggatgctgattttaattttattttagacaatctcacggcaaagcttcaaggttggaaggcaaaaactttgtcaaaggcggggcgagcaactcttataaaatctgtgggtctgtcactgccaatgtatgctatgcaaactacaaaactttctactcgtatggtcaaccggatcgatgggttggtccgagacttctgatggggtttcgagaaaggaaatcatggtattcaccttaaggcatgggataaactctaccttccgaaatcttttggcgggctgggtttcaggaaaactaaagaaatgaaccaggccttcttatcaaaatgggggtggaatatcctaaacggaagccaatctttatgttgcaaagtattggaagccaagtacctcaggggcaaagattttctcacctgtaggtacaaaaattctgattcttggttctggaagagtgttgtgaaggctaattctatcttgaggaaaggggcttgcaagttaatagttaatggagagactacggatatctggcgggacccctggattcctcactataaaggtttctgtccgaaaccaagacggggtccccccccccccccccaaccttaaccttgtggcagatcttgttctagataatgggcattgggatacccaaaagctgaatcacattttgacaatgaaacagttacaaccattctcaaagggggtcaaccctctggtgtcggagttgatatgtggatatggactctggagagtaatgggcagttctcgtgcaagtctgcttatcttgctcaggccttggaaagagctccccattgtgttgtcgccccaaagctttggaacaaactctggaatagcaaaattttggagcgacataaggtcttatggtagtgtatcctgtctagtgccctcccggtaagagctgtgatcggtactagattccatatagaggatcaaagttgtttcctttgtggaaggtgtgtagaatccattgaacacctgtttctatcctgcgaggtggctcttcatttctggcgttcatctccttggggtatctatccggtgtgtgacacaggcatccgagcttgggattgggtcaagttcatctgggatctaaaacataaaggagctcgtgtcgat

SEQ ID NO: 254697 - DNA, 648 bp, Cannabis indica
tcacgcttaataataacttctccatctatccgcataaaatattcggtataatcaatttatatgacaacaccaaaataaatgtgtcaaatctattttaggtgttatatatatatgttgtttacatattaattaatcaatagaatttgatacaaacaaaaaaaaaaagaagaaaaatggatcaacagtataccttatgtcattctctttaactcaaaactcaaatttcaatttcaaactaaatccaaacaaaattcaaaactcaattaatatatattcattagtaaaaaaaaataatcgatttaccacatatacatatatccaaactcaaaagcatgtatgtccttataaaaaaaattcatttacaatgaaccaatgcatataaaaaatttctttgacctaccacataaattcaagaagttaattagttttatttttctgtccaattttttcatcaactaaagagacaattttcataaaataaagacaatattttgttagtagtaaataaagaaataaatttggggtgggctacaaaattttactaaacatagatgaagaaaaaaataatctaaacaaagtgtgttgtgtgcaattagaaaagtctgagtacctgatttggagcctttcatcataagttcatacaaagat

SEQ ID NO: 254698 - DNA, 637 bp, Cannabis indica
aaaattgaaaggtaaaaacagttttatagaacatgtttttgaaaaatattttcactttttcaattttaaaaatagaaaactgattaaaaaaatgttaccaaacggcaccttagttttttattaattctgtcactaagtgttgactagactcaacaatgctaacaagtgtaaatatattattattagtccaccttatattttacataaaactttataattaaatcatttttaaattgaaaaaaaataagatgcacttatttaattaataaaataacaaaagcaaaagcataatcaaacaatcaatattatcaatgtctcttactcctcccttttcttttgcttggacgttctagtaaatcttcaataccatcatcacagtttaggttattaaaaaaatgaacacaaatacctcaacacaaataaaaaaaatttacaaaactaaatattgattaaaaaataatagatcacaattcacagcaaatattccaaataattttattggatgagatttatttttcaagcaaagtaaaaatcaagaatcaagaaaaaaaaagactgatctatcaaaattaattgagtaataataatttatctaattccttgtaacgattctgctttaagcttccattaggtcctt

SEQ ID NO: 254699 - DNA, 614 bp, Cannabis indica
aaattaaaataaatatttatcttttgagttaattatttaattcaaaaacaaatctagtggggcctataattatgataggcgcaaatcattgttattatacagtggatggtgccatcttgtaataattttacgagtaaattatggaaaaaactctcaaaatttttactttgctagcaattaactctatgaacctatttttttgcgacaaaccctaaaatctgtgttctattagcagtttatcatttccatctatttttgagtgttaaccgcaattttgtactgtccacatgaacacagtttatacatggcttaatttaattggccaatgtaaaagaatatttaaaaataaaaataaatttaaattaaattaaattaacaaaataaatgaaataaaaatatattttttcttttgttttgcttttgttggaatcattgatcaagaagcattttatatatgttctcaagtttggaatatctagtatggataaacactattcttttgggtttaacataacttcctctctcgatgctcaacgccctctcactccacaactctctcgttacgtttaaaaaagcccaattctaaaatcatatctattgtaatctctatctct

SEQ ID NO: 254700 - DNA, 888 bp, Cannabis indica
tttgtcatgaactaaataatcaatggtccaagttttaacttattcaatacaaagtatcaagtaacaaagctaaggctaggctcacacacacacatatccataccagatacatgtgcaattactacaaaaagacaaagttaaaccacaccaacatcaccaaaatgaccaaaaatacatctctttctgtgtaaagaaacaatattttaaaccaataaagcatacaccaaatataaatagagacataaaggaattaaaaaaaaattgaccataaaatggaatttcatgctcatcattcttaggaatcggccaacccttctttcttccagcatattgcttcttcccccccccccccaatttaggggtgttcaactatcaaaaaataccacctgaacaaaccatatacatatttattattcagatcatgtaagtgagaaactctactaaacttagaaataaacagaacacaaaacaaatacccaaaatctcacctttggccttcgattttcagttactgccttcagattggaggacaagcccaaaaaaaaaataaggcgatggcggaagtttatctagtggatgtgggtgggggaaggttcttctcaggggaagttcttctggtggtgggtgggggaagtttcttcgttcttctcgtggtggagaaaatagggtatttcaaaaccctgaactgaactaaaataaaaaaaaaaaaattacacgtgtacagccacgtggaatggataataggagccacgtcagccctccatttttaaaatgaacggaacaagacagaataccacaagtttaacatcgtcaaaagattagggggaatttttaacgtcaaaaatagtttagttcaggtggcaaaatttggtatgtgtcaaagtttgg

SEQ ID NO: 254701 - DNA, 811 bp, Cannabis indica
gtcactttaaaataaaggttaatttgcagcaaaacttcctcaactttgaagtttatcaccatcaatcccctagattggaaaaatcaaggctaaactcttcaaccttcacaattgttttgatctccactcttatgtaagtcaattattgttaagcatagatctccatgtgtatacataagtaaacatgacatattttaattagcccacctaatatatattatttagatactataaaaataaaaaaataaaaaaaaaaataaaaaaattaaaatcaaattattataaaattttattattttttttcttttcttttcttcttctttgtgtcgaatgttattactaccatcactgttaccaataccacatcactattacggccatcgctactattattctaaatcaaataaaagttgaaaaatagagtaatagagtactcaggagtgctaccgtcaattttctattacaagctcataatcaatctcagtatccaaaaacacataatatatttttttttcatagcagtgttcgtcatagttacaacataatccctgtaaatttttaaattttttttgaatagtttagcttaccaaaaataagtttgaagttttttaagataaactattcaaaaatttaaaaaaatttaataaaaataatattgtaactataataaatatcactataaaaaaaaatttgaaaaaaatattatgacatgtaattttgagtataaaaattaactaagaaattgtaattaggctaattaagttttttttttctcctaaactttgacatgtactaaattatgttccttaaa

SEQ ID NO: 254702 - DNA, 672 bp, Cannabis indica
ggtgtaataccttgttcaagtcatgatgatctccactaatgtacactgagtgagtgtatatacatatatatattcttctcttattatatatatatatgtattatattatatgtgttgtaatcttcttcttctacctttcatatatatatatgcaatatatatagtgtatatatgtgtgttgtaatatatttttaatcaatctcttattttaagcattgtattactttacaacaaagttataatgtatcttgattttcttttattgtaataaaatctccaacaagattaacctctcttataggataatcttaaatctttttaagaaaaaaaagtggattccaaacattacctttaatcttaatactatggatttaacatattaatattttacgtaatttttttaaacaatgtatcagattattgcgttcaaccaaataaaataattcaattaataataatctaactaaatagtaaatattcctatgcataaccaaacactgagtataagtttccaaataatcatattttctattttattatttcatttaatcaaattattttaaatatctagtaccaaacacctctatatagtgtgaagtaaaggaaataatcatgtgctctcccttaatttttttttcaatcatatgaaaataatattttaagttttatctt

SEQ ID NO: 254703 - DNA, 639 bp, Cannabis indica
aacaagaggcagaactggtttaaaccggcctaccaacactttggtgatgagcttagagattacgttacatagagcaatgggtcgataatctttgacaaagagtggtttcttcttctttggtataagcgtgatcatcgttgagtttaaaggtgttggatcagctccatggttcaagacattaaggacagcagaacaaaccgaatcacccacaatgtcccaatgttgttggtagaacattgccgacataccatcaatgccggggcttttatcagaacccatagagaacaaagcatctttcacttcagaaggggtaaatggcttggtaaggtcactgttcatttcttgtgtaatggttgttgggatcgaatgaatgatggcagcaagagcatcttcatcaactgaactactctgaaaaattccttcaaaataatcttgaatagcctcagccatatcatgcttagatgtaacccgaagacccccttcggtttgaagaaattttattttattgttagccttcctcgcagaagctttcgaatgaaagaacttagtgtttcgatccccaagttggagccaatcaatgcgagatcgctgctgccaatacatttcttcttgttccagcaagtcatcaaggatagattc

SEQ ID NO: 254704 - DNA, 2864 bp, Cannabis indica
tgtgaagtgtatgtaacctcttccgatggggaagaccaatacaagatgaagcaagttctagttcgagacactcaaggtctcgaggacatagtcaatcaaataggcaaacacgagagtgaatcagaccttaacgttatgccgattaagagagcatgagcaatacgctaagctaccaattagagagttactagaaaacaaggtttgttagtaattatgagtgaagacaaccagactttcataagcacttgaatcaaaggcaacccaatcttcgcgggtgactaaattagaatgcacctgacttatgccatcaacttcatgcaaatcagcaacagttggatctcatccagttttgaatcattgagttggaggataagttcagaaagtatcaggatggggaacgtgggaatttacccgattatgactcgaatgaagaaattgagctgtttcatcttgatattttgaattctaaattccctcatggatttaaaaacccgcacgtctcgtagtatgatgggactacgaatccagtcgctcacttgaataattttaatacaataatgcgatccaataatatctcgaataatttgcgttgcatattattcccgacttctttaacttgagcagagagtagctagttcgacaaatttactcatcattcaataacatcttgggagcagctatcaaaggaatttaagaaacaatttcaagctgctagagacaggcgacctgaagcatcatccctaactaatataaaacaacaaccaagcgactcacttaaggcttacttgagtcgcattagcatagtcgctgctaaggtcagcttactgctctttaaatagggatcacaacccagggttgacttacagggttgcccagtgagaaacattaatgaattttatgaaagagcgcaagtgtttgtgcacaaagaagaagctagaaacgagatgaaattgttgaagactagctcaggaaataaacccagtacaagtactgtaacagcaagtaccatttcgactaaaacagataatccaagtcgttgaaacaccaagagaaaagatgactcgaaagaaacatctaaaaataaaaagaaacaaaagaagcacgacaaatatgttccaatttacacagtatacattgagttgaatgaaactggtgaaaacatttttcttgcaaatgaacacagggttgctttctgcaaacctgagctaatgagacatgcgagacataagcgagactcaacaaaattttgctgatttcataaagacatagggcatactagtaaagagtgttgacaatttaaagacgagattgagagtctaatctcacatggatattttagacagtatgtgaagcatcatgggaatgagccaaactagcccaatcatcccaataacccaaataaccagagattgcaacctccccctattgagggcgaggatatattggttatcttgggagggctgcacctcgctggagacagtaataatgccaaaaaaaagatatgtcaataaaataaagaatgaacaattagtgtttgctccaaaaccactaaaaaaagtaaaaacaaaaataaacctccgattatattctcaaaggaagctacaaagcatgtgaggtatctatatgtcgatcctcttgtcattacagtttagctcgccaacaagagagtaaaaagagttttggtggataataggagctcggtaaatatcctttatagggatacattgaagaaaatagggtcacaagatgcgaagttaaaaccttgcatggtaagcttatgtggattcactggagatagtgtcgccagccaaggcatcattaaacttccattaactgtaagaattttatttgtcgatcttccatcagtttataacatactgatgggtcaccctgcattgattagactaggagcagtcagttcaatcaaacacctatctctaaagttcctaacacaagcaagagtgggtgtggtacgaggggaccaattgttggcttggaaatgttatcacatagaatttcaaaatagaagagccaatcatcaattgatggtgatcaaaatagaagaaggcgagaagaaagaagaggatctagatcctagaatccaagatgagaataaacagctaaaatcaattgaagagctggaagaggttattttagatccaaacaatcccactaaatgtatttttattaggaagaatttgtatgaaaaagtaaaatagcagttaattgactttctgaagacaaaccaggatcaattctcttggagccattcagaaatgatagagattaaccctaaagtgatctatcatcattttaatattgaccccaattacccagcaaaaagacaaaaatggcgacccctagattttgagagacaaggggaacttaaagaagaggttgataaattattgaccaatgacttcatacgcgaggccttttacccattgtggattttaaatccagttcttgtcccaaaaccaaatggtacctagagaacttgtatcgatttttcagacttgaataaggcatgtccaaagattgtttcccactaccacggattgatcagttagtggatgcaactacatgacacgagctgatgatgtttatagatgcatattttggatataaccaaatcaaaatgcatgtccttgatcaagaacatacaagttttgtaactaatatgagactttactgttataaagtcatgccatttggtttaaaaaaaagttggagcaacgtatcagtgactagtgaataggacattcaaaaaatagattagataaaatatggatgtctacgtcgatatatgttggtgaagttgataaaatgtgaagatcacacgaagggtctcacagagtgttttt

SEQ ID NO: 254705 - DNA, 693 bp, Cannabis indica
caaaaactaactacaaataaacatatttattattaaacactacaagaaagaagatttttatgggtacaaatatacaccggacaaaaatagacacaacacgttgatacaattttgtcagcacatgaacacttagtaatttttttttttgctaaatcaacaatataaaattgtatttcgcaaaacatatttacaaaatattagcaccacttaaggccggacttcatttctatctctttacaacggtccccaccaattcctatcttgtttttttttaggcatgaccatagtcatcttatttttaatattctgctttataacatatattatattaggcaaacttaagactttatactcccataaaactgtattctgattctttcattgtgatacacaatagttgcaatagctaccacaaacacttgctttcggaatggtgaaacctaaaatcttctattcctctgtaacaacttcttcaaactcaagttcggtaaccttcagaccaaccattttgtgatggcttgatagcaactattgctgtaataataggtgaaataaatgttcaacagtttcagttgcacttccacatcttgaacttgaggacgaggtaggggtgttcataaaaactgataaactgaaaccgaccatcaaaccgaccatcaaactgaccagaccgtaaccgaattttcgattcca

SEQ ID NO: 254706 - DNA, 773 bp, Cannabis indica
aggggcatgtttgctcagctgctcatagttgcttttgtactcaagttcaactgaaccgactttatccattcaattttcctttcatactaccatcgtttttcatttacttcttctctctttactatcatcttttcagcaaataaaagactggtctatgaagaggttaagaaagctgttgaaagagacaggtcaatggttaaggtctcagaattgtcgaagcatggactaatggaaattacaagaaagagggtatggttctggaatgcaattttcacaatcatttttgctttatttagtttccttggatttcagttatagcacaacttaaattatagaaaaacaaaattgtactactcttgtccttcaattgtaccatatccaaactatttgggtaccaactcaatttcagatagtccacaactgaggcaacaagaaattcttctggttagcataatgcttgattagtttaactataataattttctatttcatggcatgttttggtacaggttcgacctagtgtgacatttatgattagtgaaccgtgcaattgttgtcacggtactgggagagtagaagctctggagacttcattctcgaaaattgagcaagaaatttctcggttattagtaagtattctacggcatttaacatttttcttgtgttatataatgtttaaagatgacacaacagaggaacatgctaaaaggaataacaaacggctctgtcttgtgattatgtttgttcagttactatgatacaatgcacatccc

SEQ ID NO: 254707 - DNA, 961 bp, Cannabis indica
gagagacacctaactttctaggaacaattttttaggaatgattttggagaccttttcgttttcggaggaactataacaacaaaaaaaaaatgtaaggcaaccatataattattgttttctcttcatttttggttatagattaagattttttttttaaacttgaacaaaaaaaaaatacaaacatagtaataactagtgatactggttagaatatttgatacgacacgaatccagaaacacgagtatgactaggcacaaaaaatatgggttcgggcacggcacaggatgatgctacaaattggtacgatatggaaacaacaaaaaaacaaccccaaaaagcacgacacacgacaaacccgaaaagcacgacacaacatattaaaaaaccttataatttattattaatatagttaaaataataataaaacttaaatataataatgaatattataattctataattaaaactattaaaatataaaaaattaagatatatgttatttatttatatggtgtgatataaaaatttgtatttttataagtaaatatttaaattttaatgaagttaataatttttttatatgattatctgtaaaatattattcaaaagttatataaatataattatagctttgaaatatacatataatttagtaattgtaaaaaaaataatgaaaaaagtaagcacgaatttaagctcagatataaaaatgggctagcctatttaagaaatacggaccgatacgagcaaagcacgacacaaacctgagcacgacacaaaaatattggacttacaggccgtaccgggtttattttttaaaaatattggcacgacaggatacgtatttttttttttttgggcacggcacacactttttgaaaaacatagataaatacaaaacgaacccgcacatgccactagtaataatctcacctgttccttcatttgatctgtaacgat

SEQ ID NO: 254708 - DNA, 1155 bp, Cannabis indica
taacaaataataatatatacaaaaacttaatttttttacagtttggagaaaagcaggaatacaattcaaaaactgaattattaccaatacaacgacagtggatagaatggttgatggcggtgattcacgaaggcttaaatgattgatgctgaaaggccttaaaaaatttcttccctaacttatttttttaggttaacttgtagttagatttattaacttattaatacttggactaattttacaatatttgtgtaatattttattgtaatttatttaattgcttctatgaaatgaaattaggtacattggctaatcataaaattaatttaaataatatttaatttagcttttataaaaataaatatttaatttattttaatttaaataatataatatataaattaataaatatataatttaaataaattaaattaacaaaaaaaaataattattaattatagattagacatcaggttttaagttatatagcatcggttatatgggtgtatggtgtcggttatatactattaaccgacgccatatgtaccctatggtgttgattcctatgaaataactgacgccatagggtaccattcagcgttggttgctttggaacctacaacatcacctggatcagcggtagcgaattttactaaaactgatgcagaaaggccttaaaaatcgcctctaaagcccaattttgtagtagtttgaccatcaacaatggctctagttgtcgatgactaaaaccaatccagattcgacatggttttctttgatttcccaaggtggttaggctctggtcatgaatgacaaaaaccaacccaaatctggttcacatgcctatgaagaaaaataaagtcatattattgaatcaaattgattgatagtttactatttgagtatttcttcacccaagcttgtcaaaacagatattcaccattgactaaaaaagatatatattcttaagctcatataacccagagagtctgtagcaagttcatactaaaaacaatattttcaaaaatcaaaacttgaagtgagaagtacagtcaacaaaccacaaattaaaaggttcatgaagaaaaacgaaaccttgcctagttcttgagatagaagcgtgagtgcattgcaccagcctcatatggcttttat

SEQ ID NO: 254709 - DNA, 703 bp, Cannabis indica
ttttttttattttactaaaatacaatatttttgtaattttaaaaatttaaactcagcatttttgtaaaattaatagagtaaaaatgtaaaaaaattcatgtcacagtatttttgtaaacttttttcaattttaccatatttttataagttctccaaaaagaacctctattattggtattatttaataaattaaatacttaggtgtatttgataatatttttgttttaaaatttgttaagtacaacgataaaaagaaaaattttattttgaaaaacaaaatgtgttgtataaccacttttgttttttaattttaaaaacaaatatgtattttgtaaattttatttttattttcatatgttgattttatttaagtcaagtccgagatcaaaatcggggcaggtccgagtctagagtcgggtccaagtttaatttttaagaaaattttaaaagtgattttttgtttacttttaaaatttaaattcttaattaaaaaataaaaacagttatatattctttatagaacatgattttttaaaaaatgttaaaatattaccgaaagcacccgttaacatttctctttcatttttcattgttccttttcgttcctcgaacacaattaataataataactaaggtgccgtttggtaacacttttgttttttaattttttaatcacaaaatgaaagtaaaatttttgttttaa

SEQ ID NO: 254710 - DNA, 1345 bp, Cannabis indica
tttccaatgaatcattacttccacaacttagtctaaagacgatggttgttgtcgcacattaagtagttctacgaggtccacaataagctctaagttagaggtcaatatgaggggaaatgttgtggaagagtgagcattaccgaaagcagtgcggagctgagagacatggaaaacagggtgaatggcagtggaaggagggcaggtctaaacgataagccacattgccaatgtgtttcacaatcgaaaaagagtcatagtaccttcctgctagtttctcgttcttacgagtagctaaagatttttgtcggtaaggtcgcaatttgacaaaaagcttatctccaacatcaaactccactggccgacgagaaacatatggccttcatcttttgttgggcatgcaacaaacgcatctttaaatcacccaaaaatgagtccctctcttccagctattgatcgacagccaacatagaagtggaacccgaggaatattgaaccaaggaaggtgggtcactttcatacaacactttgaaagaagtacacccccaaagaataatggtaagtggtgttgtaccaatactcagccctcgccaaccacttagcctaagctttggggtagcttaaagaaaaacaacgaaggtatgtttcaaggaagcgattgacaactttagatcacccatctgtatcagggtgataggaagtgttgtagcggagctcagctccatgaagtttaaagagctcagaccgaaaatggttgagaaaaatccgatctcaattagaaacaatggtgagaggcaccacttgagaaaaagcaattgattagtgaacacttcagcgactattttagcaattgagggatgcttgacaccaatggagtggttgtatttactaaggcaatccaccactaccaatatagtatccaccctgtctaacttaggtaagcatgttaaccacaaaaattagcaaggaaaattcttgagattagtcaacaattagtcttgagaaggaaaataaatcgaatttaagagtcgcccaagtagggttgatggccactcaaccaaacactagattgggagccactcgaccatgatttcaacaagtcacttggtgatgcttcctagaaagtcactcgatcatgcacttgagaaagtcactccgtcatgtgccaagcttgcacatcacccggccatgctcttatcaatgacacaaccatgccaagtaggaattttcccaagtgttgaagacgaaggcaacaagtgtacgattgcaaggacaaggcatgcatgcaagatgaatacaagcacgccttctacaagttctaatgccaaggaggtacgagtagtggagg

SEQ ID NO: 254711 - DNA, 545 bp, Cannabis indica
acggtttcagcaagttttaaggataaaggctgatgcgtgtgggtccagcttgctgttggtggaaggaggacgcgccatttggggcgttaggtaagattttcctttttaaaaaattaaaaaagtaaatatgaaatgacctgagaaaaaaaatcattaaacaataagaacaaataaagtagatatattattattattattattattattattagaacaattatgattgaaaaaactaaataaccacaaatattattcactttaatactttactcctttttttaatttattttgaatgaaatatattttacttttaagaaaaatattttattttcttctttattttgctcctttttttatgttgtgtcacaaatgttactttttctacgaaatatttttagataaaaatatattacatcaatctaaaaaaaatattagataaaattaattttattaaaaaattttacatatacaaatatggctgcactcttaatgagtaatacccatgaatggataacattaaaaattttgagtttttatgattaatt

SEQ ID NO: 254712 - DNA, 812 bp, Cannabis indica
ttagttcaaaaaaaaaaaaaaaaattcaaataacaaataataaatgaaaattttaaatttttataaatgcttggttgaaaaaaaatatctatttttacactatattaaaaatatatttatatacaaaatactttcaaactcaatagtttttttatcctttttttgccgaattttttttaaaagtttttttttacaacttcaatccatataatataaataatttttttttaatttaatataaaaattaaaaataaaaactctaaattttcttaatacaacatattatacttattaaaagtgtatttaaatatatatatatatattttaaatttatggcttgctttttctcatatttccatttttgaccatggtcggtgttcaatattgactattgagttaagatatgttgccctaaaacattttttttttctaacaagttccctactattttaaaaaagaaaagaaataatatactacgtggattgtgtaatgtgttggttatatttttaaataggaaaattatatgaatggttattttttttttgttaaaatatttacacttttatatttattttttttaatatttttacggtattttataaagatataaaaaataataaaaattcacatgaaagtaacaagaaaataatattaaaataatatacaaataataaaaaatcaataacaaaataataaaatacagcatcaaatacatcagaagaccatattctatgtaaataaaatattaaaaatcacaaaaatatttaaaaatccatacaactgtatttttataatttctttttgttgttttt

SEQ ID NO: 254713 - DNA, 624 bp, Cannabis indica
tttaccattttcggttctaccacctaaccccaggttttctggtatcaaacctaaagtaacactaaccttttccctttcaccgtcgtgcaaataccagtctctttcaatggatgacttagcttcttctttatctgtggcccttaatcttacagatacagagagtacagtccacaccctccatgaccctacaccctcagttgtccctgacccagatgccctgccacaaatatttttctggttgccaaacttcatactgtcaagtcctttactagaaagttttatggaaaaaatggcaggggattagaacaacatttcccgattccctgtcaccatcactgaacgaactaagggactttttctggtagaatttggatgcgtcagagagcgacatagggttcttttacaaaaaccatggacctatctgagcaacactattctcatggacatccctaactctgtggatgctctaaatggagatagcttaatcaagctcccactctgggttcaagtttttaacactcattttctcaaacaatctgagaagttaggtgagctggtttctacaaacttaggccccctcctgtaaatctgtagacattccctaagagaaacttggggacccta

SEQ ID NO: 254714 - DNA, 1393 bp, Cannabis indica
tccctgctcaggcctgcttattactagtattgttgttaagaaagcaatttgtagtattcattccaataacagtctggggctggacggagtgtagggttcttcaagactatgtatgtgggcagatataggaaatgaaatttctgatgccatatagcaattttttttaaaaaattacggcgttctagaggagtttaacaatacaatagtctctttaattctaaacacgaagagccaactcgagaatgcatctccaaaatattgtgtaaagctagcagaagtgcttcattttctcatacacaagtgacaaccaatgtgctttcattaaaaagaaatccatagctcataaatcttacatctttcaagaccttgttaaaggttacaccaaaaagtgcacctcggctaggtgtggtatatagtaatatattaatttcttaatatgagacatcactatatagttatatattaatgaaaatggcttgaaaagttgccatcagttttgtggtattgttccagtttaaaaaatatctaataaacacttcaaatgtaatggctgagaggggttaattctgttcaaatctaaccatattttatatatatatatttagatatataattctattaaaatataagaatctgttaaaagcacaacaaaactatatattaaccatttacataataataaaatgcttggatgatcaagtaaataatcaaccttgataaataagcaaaagttcttgccccaatatcacaacaacactgttaagaaataagatgagggaaagcgatagaagttgaatcagcaggaactgctttttagctaatatatcagaagcaacaaagggatcagtgagtggttcaagttgaacttcaaatgaataattctgatttgcactaatcctattttaagctaaacaccacaagatgagctgatatgataccatacaatacaataataacatttacaaaagatataacatatgacgaccctatttaaatctgtcttatactccaagtgagcttttagaagacaaggggggcctgtaaagattaaagaacctactctatcttattttacagacgccagaccgcgaggtttttactaggccatcattcataaggcatgaaccaatttttccttcaaaatattgtgacttgtgtgtgtctcctccaactacacgccaatcattgaaattgatattaaaactccaaatttcaagcaaaggaattacccagcagcagaaaagatgagggaatataccttcaggagcgttaccttggtgattcttacccatgtcttgatgcatcgtcatgcagtgaggttgttctcacattggggtcatcctgctaaatgaaaatgaaataatcctagagtgagaaagtattgacaagtaaa

SEQ ID NO: 254715 - DNA, 557 bp, Cannabis indica
tattattattattattatccaatatgacacactttttaaaaaatattatatggcacttacaatgttgatttaatttatatatggatcatgtataatgattttcaatgattgaatttatcaattttaagaattatgtcactttgggagtaccaaattaagaatataagaatatgacaagtcccaacatccacatagttttattacactacattgcatataatatttacatatataatgatgagatatgattataatttagcattttttataccacatatcatttgcttttttatttttttttatggtttttttttatcattatacaccaaataattaaccatcttataattagtactagtattaaatttagtgattatttaaaaaaaaatataaaaacaacaaaaaaaaaacttataaaaatatagttatacgaaatttaaacatttttattttatttacatgaaatacaatctttttttattgtatttttatgttatattcttattattttattatttgattttgtgttatttgtatattatttattatgttatttt

SEQ ID NO: 254716 - DNA, 1268 bp, Cannabis indica
catgcccacctaattattctcacatatttattctccatttcccacaccctaataaaggaaaatcttaactctccaaaactccacccacgcatccgcaccatcgccctcctctctcgccgtcttcctccctctctcgatctccctttcttctcatctctctcgtccatcgatctccacccacccctcctcccgtcggtctccctctactctacatcgcatacgtcggaccaccaccacctttcgtcggtgtccctctcatctccgtctcatacgtcgcaccaccaccacctcccgtccatctccctctctctccgagctcggtataaatacatttgttatttatatacttttttatttattatatatatttattttgttattgtataaatttaatgttttttaaagttagttgttattgtaacaaaattaattagttgttttattttaatttaggtaaaattataaagctaatgcaggattaatggtagaaaaattggtatttttttctctattttttttttacattctcgacggtttaaaactgtcgcctgtcgcctataatagggtataggcgacggttttaaacagtgccctatactataggcgacagttttaaaccatcgcttactgtataaagcacggtttaaaatcgtctcctataccctgttataggcgacggttttaaaccgtcgggaagtccaaattagccacgattttaaatcgtcgcctattttgcccgttttacgacggtcgtataggcgacggttatagaaaccgacgagaatactttaaacgactgtttaaaaacgtcgagaaaaaccatttttgtagtagtgtcacgcccacattaaattttctttttaataatgtaatgtaatgttttcttttatcatgaatgtagtatttttttttctccaataatgtaatctttatatttctacatgcaaaatgatatcttaatttattgagttttaataatttatagtattttttttttattaaagaaacaaaatctttaataatcacaatcacaatacaaaaaagagagctaaaactggccaaaacaactcttacaagggccacacatcaaaattctcctatcactccttttttttttttttctaaaatgctataagctctatgataaatttatcttttaatcatatctacaatataattcacactataagtgtaactattaaaaacaaaagtatttcgattattctaaatgtggtaaacgtctgttgcaaaaacaggcgcaagaagct

SEQ ID NO: 254717 - DNA, 759 bp, Cannabis indica
agtgcaatttaacaagttaagtaccctcacccacgttataaacatcaaagcaaaaagttcatagaactggtcgtgtatctctataaatggcttggtgtttctcagtgtcctaagggtcatgttgctacatgaacaataagtcacagagaaacacccaccatttcaagaatctagtcggttccaacaatgattaagttcgagaaaatgaaaactaaccacatacctcaagaaatggttgggcgtgtcacagtatcccaaggggcatgcgacagttgcatgaacattaagttaatgtgacacccccaccatttcaagaactcagatagttttcatagtaaaaatatgtataacctaaagctaaaaaaggcgtaagagttaaaactatataaaacatggccataaaggttacctatagcttagataaagcttttctaagcatgcgagtatttgaggtgtttttccaggaactagcgagtattcaagatgtttatcttaaaactcgcaaatattcgaggtgttcttcttgaactcgcgaatattcaacttttaggcacttattttccaaaagaaaaccacattttgcatgaactacagaatctaggatctatcattccatatatttcctactcctaaaaacaaaaatgcatacaaatactcaaataagagacaacgatgataggaaaagtaaattaaactcaaaatgctaattccctgtgtaatcttgcaaatgatggaatctcaggaagcaactttcgtagg

SEQ ID NO: 254718 - DNA, 729 bp, Cannabis indica
tatttttttaacactatttctctatcttacaaaaaaattagaacacgcctcttatatctttctcttttttgcatgattaataaaagtatatttttagatgttttgtagtttattcggagttgatttatgaatgatttgcatgttataacaaggttgatgtcttgttatttttctattgatttatagttattttaatgttgttgtttaggtgtgttaattcgaaaaacatttattggtgacgtgaacatcaatatttgacacatggcaaaaaagatgacatctcgaagttgagtagtcccgagtcatagcagtcgaccagggagggatccctagcccagcccccaggttgactttaagaactccataatggaagttcgaacttcaataaatcctttccaactcaatatattttcagcattttgtaccatgaagatatggagcaaccaaatccagaccccatgagctgaaaagacacgaaccaacacctcagaggtcaacctgggcacataaggtttcactcaactcctaggttgacatccttaactagaatttcagttttcaaaaccgtcttagtataaatgggtcaaactttgtattggaaaatgaactagatataccagaaacatttttgtggtattagaatcagatttagagaacgttaatttttaagcacccggagcacccagcgcccaaattgacaatttaccaatttgggccacttccaagtat

SEQ ID NO: 254719 - DNA, 635 bp, Cannabis indica
agagcagtactcaaagatggtgatttggaattggctgtcaaaaccagtggagcatatggtgctgaagctctaaaaaatgagagctatgttctggacaaaattggaacttgtcccgaagtaattcgctgttatggatacagtgaaactttcgagaaggagcagcatgattataatctgttgttggagtttgccacgggaggaagtttatctgatgagatgaagaaacatggaggtcgattatcggaaccttacattcgcagacacaccaaatccatactcaatggaatatactttgtacactctaaaggttttatacattgtgacataaaggtcgacaatgttcttattttccaaaatggaaatgctaagatatgtgactttggattagctatggaagcttcagagaaaggtaaagtggaatcatcaagggagttaagaggcactccaatgtatttggctcccgagtcggtaaatgagaatgagtatgattaccctgtggatatctgggctttgggttgtgctgttgttgagatgtatactggaaaacctatatggaacgaccctcaacaaaatcaatgggcattgttactacgaattggaggagaagaactccccgagattccacaagaactgtc

SEQ ID NO: 254720 - DNA, 1072 bp, Cannabis indica
ccctaggccattaaaccgctcactttagggtaataaccctaatctcaatttctaattaatcacaaatgtaatattcaacataagcgccaccgcgcatatctctacatgcaactattgtcttaccgatgtcccacaaatgtggagattccaaatccccagggcgtctgtagtcctagtcacacgttcccaagatttcaccaatagggttcatcccaaaattcactttcaataatcaaataattagcattacatttacagattaacatatagagcttgaaacgagctttccaacgacataaagaacgccaaaacggagtccagagtcaaaagttatggtcaaaacataattcgaccttccccaatacagtccaactgcaattccagttggaacaaccttgaaccaaccagaatttcgcttgtctgggtagaaacaacacgaaaaattttaatttttaagccaccataacctactcaaatcttccccaatcaccaccaaactttccaaagcatcatcatataatatattaaacatatttcacagctcaaacacaataattacaacaagaattaataagtgccaatgttgagcaagttttgagttcttgaactcaaacttgctcaaccacacaattaaacaatatcaacaggtcaaataggtctaatgtcatcaatagaacataacccaagtagcgataacataaaccaaatcaaaaatcacaaagtgttattaaagctctaagcttcagttccatgaactcaagcttgctcacaacaaccatactttcagttagcacaaagcaataaccacaacaaaaattcagatttaaactcaaagccacatctcaaataacacatcaaaaacatctctaaaggaaatatccatgaattaataacacatgatttaaacatccaaatctcagcagcaaattaaaattaaataagtgatagaaactacctcaagatcctcaataactcaagcaccaaagatccccactaattcaagcttaaccaagaccaattttgtcaagaatcaataaagtgaaaagatgagtaaagagagagagaaagagag

SEQ ID NO: 254721 - DNA, 1282 bp, Cannabis indica
agatattgacaaattctgactctatatatttatctatatattacttgatgatggtgtattatatatataagctgtttgagtcttgcttaccgacatacttaaataatttaaaaatttgtgagagatatcttttgtaactttatctaaatcgtgatattaaataaaataagttacattacagctagcttatttatgtcccaaaaatttcaaaaatatgtgtaaatagttattgaaaataattactaagatagtggtaccaattatgtctattttatgaataaaaaattaatatttataaaatcttggaatttaggttgatgataaatatcaatattcaagtgatcacaaagacattaaggttcatggttggattagttcatacccatctgtagggttttgggtaatcacacccagtcaagagtttctcacaactgggcctacaaagcaagagctcacatcccatgtcggtccaacatctctctcagtaagtttattacccaactattaattttttttttctttaagaataattaattaaatagacatagaaattattagctatgcctatacaattagtacattaaattttgtaaataatatgaccccaacaaaaaaaaaatcaaatgaaatgcaggtcttcatgagttgtcactatgttggaaaggatctaattataaaactcctaagtttttgattaactaataatttaaatggttatcaggcacaagaggaaggttcgaaatgtcactccttgattatttttacttcgttacttaaatctcactctcagtaatgctttgttttgtttttttttacattttttttcagagtgctttaattattttatatttctattgagtaaaacttagttattcaagctttgtataattgtcaccgacaataacaaaaagacaaaagtaaaaactgcccatgtgttcatctccgctttggatgtcttgaacgagaagaaatagtgtctaaagaatataaattctgttgtatagaaagaaatacatgcattaagagctgatctcaccttcaaagcctttacgactaagatgaaaaaaatattctggaaaaaaagacttaaatctccattggaaacatcaaaggagaacatcttgtccactgctttctgaaatttatataggaaagaaagataaaaatatgcaagaaccttactataatattaatccaagtatcatatttaaagtcttgtttttgaattattaccatgtatatttgaagccagtagagttcctagttgaaagtaaaattgtct

SEQ ID NO: 254722 - DNA, 501 bp, Cannabis indica
aactccaaagagcaaccaaaaaaagccttgaataatcaagactaagcataatattattccaacccataatatcttttccaaccatttaattatatatatattttggctttatatatatttataaataaatagaagaagaaattaattaataataataataataagtattggggttaataatctgaatttgaagaatctgtggacacgatttggttgtaccatttgtggtttgagatattgatctatacataaagaaagaaagagaacaagatttaagaaatttgtttgtttgttcagaaaaaaaatttgatgaaaaatattatgagagagaactaaaatttttgaatctatttttcaaacacataaaaaattttggatctctgcacaaaagagagagagaaagaaacaaaaaaaaaaataaaacaaagattcgacagattaccttgggtttcttgggatcttcggtcctcgacgagaaatgaggacatgacgagcgagaga

SEQ ID NO: 254723 - DNA, 753 bp, Cannabis indica
taatcttcttatatatatatatatatatatatatggataaagcttattaggttctattatttatgtttctccttaaaatttacacacttattttgtgagcttttgctttttacttttagcttctcaagaagctctttttttttaagaacttttaagatctaaaagctaaaactcactaagttcttttggagattcagaagcttaaaagtagtacttttaaaaaccaaaccaaccaagacctaagtgttctcacacattatccatatgaaactttttaacaattgtatgtaccatattcttgtcctatacgtatataagtatgtacatatacatgtatgtgaaatgtttttaagattttattaataaatttttggtacatatgcatacagaatgagcaagagagaattcatataccatctacaatagaatgttacatgaagcaatatggcgtatcagaagaagaagcatgtgatgaaatgaataggagagtaattattgcatggaaagaaataaacgaagagtttctgaaaccaactgaagcagcttcacctatattagttcgtgccctgaatcttgctagggttatagatcttctctacaaaaatggtgataactatacacaagttggaaaagtcactaaagatagcgttgctgtcttgctcattgatccaattccataataaattagtttttcatactttatatatatatataaatacatttatataatatgtactcgcaagcaagactacc

SEQ ID NO: 254724 - DNA, 965 bp, Cannabis indica
tcgggcccgaaatgtaaattggattggtaatttggcatttttatttgacatgggataatctgaaatttatttggcaatatttgagtgtgaaatggcaatattgcccttgaaaatgagtatgcatgttatatagccctaagggcaaaatggtcatttgactataattaatttacattgaattaaatggaattttgatgaaatgaaatgtatttttctggataattctctctctcaaccgaaccctctccctctcttactctcttgaattgcaacttgggattgtgaggaaaagcttgggagttttggggattttgtggcttgatgcttggattttgcttgaattggctttgaatttgaaagtgaggtagattccttactgaatttgaaatgtatttgcttgctgaaatgttgtggtagaaacatgtttaggttatttgattttgattatgcatgtgttgtgaaaagggtgcttaatcttgttagtttgtgtgttaaatctcttgacttgtgtggattaagtttagagaataattcatggatgttttcaagcttaaatttgattactcatttgatatttgtggttggttgctgctggaaattaggtgtgagtattgggttttagcgcaaagttcttgagtttgaatattgcaagtttaaagcatgagtttgtgtgccatgcaatctgaattcttggtttagtttggaattttgatgcttgaaatatgttagctgtgcatctattaacttgctagtgatcctaattgttatattgtgagtttggtaatgaatttggggtgaaaagagtgaagttcctgctgaaaattcaaagtagacctgctggttttctgggttctgtacccaaatgccgcgacatgctctggagcatgccgcaccccgctcctttgagtggacctgggaattagtcccaggtgccgcggcatggtctgggcatgccgcggcccgcc

SEQ ID NO: 254725 - DNA, 507 bp, Cannabis indica
tttttatataaaagaaataaaactcaactacaatatcatatatttaatgacaatgttctggtattaaaagcttgaactcaagactgaaactccattttattcctcttatatttttttgtggattagattgattatggaagggctaatcatattaaatggtattggtgactccgattgctttggagttgcgcagttggccggagttcgggttgcagaggcggtgggtggggaggtcgggattattggacttgagtttggttttgatttttggttaatgttgtgttttcagtatagatttggaaaaatgtttgtacattttagtcatgtaattacattataaattattttatattgatattgatctgaaaaaatatttgtaccttttggtcatgtattaattactttgtaaatatatattaacttacacttgataattttatttaattttaccaatctgaattcaatagactagattttaaaaatataaattataatctttttaatttt

SEQ ID NO: 254726 - DNA, 1728 bp, Cannabis indica
gaccttaagattgattattcccttccaaagacctttttatctcctctcctgtattaaagccatatacaaaagtgatgttcattgcttcagtatagcctgccatcttcacataacaatgaagaaactgcgggtcttctctaacaacaataactcgagtaaaacttctccaaatcaccaagatcctattttcaacagtcgtgctagtatagtaatcccagttagtgaacttcctagccatcatctcactaactttattattcttgagcttagtctccaacaaacaacaaactcctaacttattcatgcaacacaattcaaagacagtattctgcttctccattttattcaaccccctcacattccaacaccctatattattgttatccattaactgcatcagaaaaaataatcacattgtgttcagtagatacctgctgttctaccctgctctcagtttgttgcagcaaatgaaacgtattgttgctgctctctacaacttccttcaagtcccctggttgttttgcagctaccatagagactgtattctttggaatcacccagtcttgatgtggcttgtttgctgccttttccttcccttcttttttctgttgctgtttgtttttctcctgctggtgctgctgttttttgaccctttgctgcacaatttcatcatgccggcagtttgctttcgtgtgtccaaatttagagcactaggaacacttagcaggtagccattcatattctactttctagtcttgaagctgcccaaattcattgaaataaggaataaaccgaggtggttcatccataatttccatttcaactaagactctagcatactgtaaccgagttcggtcctttgtgtgttgatccaccataatcggcttccctatggtgctaacaagagcacttaagctttggtaccccagtattgcagacctaaatcttgaagcctgatccacaatggaacagtacgaaccaagttcaaagcatttaaatctgcagaccaggggcgaacgatcactggttttcgatcaaattgtacaatccctgcctccaccacttgatcacgagtagcctcatcattgaacctcaccattatcattccaattgacaacttgctgacttgaaccacacctaaatgaccccaaactcttttgataaacccttcaaaaattgaaacagggggattagcacctagtaccttgcatatgactgttgtgttccagttcttctcctcttcttgaacctcttccaaatcgacttgcgctatcttaattccatctctgattagaggctcagtgaacagcagtcgttgatcccgattcagtgatttctccttcgtaaacgcctcccaagtttgcttagcatatctcggggtttgttgtttctcctcattcatcttcattgcatcctcaacttcctccgcccaactatgtgttcgaacactgcccgatctgctcaatttttctgcttcaaggatatcctgagatcgaaccatctctgctatcagatttaacccctcggctgaacgaacttcatcgttgtcctctgtttcctcctctctatcagtgaaaatttcttcaataggaacacgagtgacgggttttcttcctacttttttcttcctcgccatggaaggaaaagaaaagggaacgaaaactatatttccatcatcttattttcacatttttgttgaaaataataaaatgtgtgactatgaaagat

SEQ ID NO: 254727 - DNA, 529 bp, Cannabis indica
taccacaaaccacaagattttactacaaaataagacaatttgtgcccttctacatgggggaagttttcaaaagaaaggtcacaaaacaaaagccttctaataaggagtaataacttgtacaaagattaaagatttagtacaaccgacaacttaattaacacaaacctaaaaaaaataaaaacaaagaaagtaaagttaagtgtagtggaatgaaagacttcaatggcaagattatatgcacttttgcttccctttctttaatgagtctcatgctctccctgtccaagaacacaattaataaataattaattcaagtcctagaaagatgtataaatcgaaaatatcaacaaaaactaattaaataaaaactcactttacttgggattatgaaatccacaaactttgcagttttacccttgtgagtttgtgatgatgatgatgaagatgatgatgtgcctctatacttcttgagttgttctcttacaaatctctcatacaagaaagctgctcctttgaattggggaagaac

SEQ ID NO: 254728 - DNA, 1093 bp, Cannabis indica
aaattttaaggttgtaattattatggtgggaagccttatatttttcattgttaatatatattgacgttgtattacatgaattataacagtgaacaataaaataacacatgcattaataaataacattcaaatgaaaaattatagctctttgtcaatgataccgaaataccagatgatgtgatgtacggagatgttgcaaaaaccatattatcatgtattgccgtccaattaaagtcgtatgtgaattaggtatattttcacatttaaaagtatatatataatattttcgtagttaagaacttaataaatcttatcctaacaattataagagtaatattaaaaattaattttgcagaaacattgcttgtttcttcaaaaaaatttacgaagaaattttcaacaaaaaacagagaatctaattgtatgcagattcaaaacaaaccaagtttaacaaaaattaatctcaactattattttatattatttaaaaaacatagtctaatttatcatttaacaataaataatatttctatcgataacttttgcaaaatacaagtttaaaataatatttacccttatacaaattttaaaatagttaagccaaaagtattccttccatcactgtaatggcttttccttgcaaaaacactctttggttatgttcatccaaatgaatattcaactcccctcctcttggtgatgcctgaacaggataatcaataatagcacaatacaatcaaatgttggagatcaagagaggtagaaataacaaactgtgaacacggagtataaatcaagtacctgatatgcaacaaaatcacactttcccagctctttactccagtatgatgccaaggaacaatgtgcactccctgtaacaggatcctgaaaccaagttttgactaacttaagtagcgttttattaggaagaatgaaaatataaaaatatgaatgtgaatgagaataggaatgaataaatttaagtgcgtttggttggaggtaatgtaatggaatggaaaggaaaggaaactatcttcattccattcttttgttgattaaagtgtttgaatatcattctaatggaatgaccttt

SEQ ID NO: 254729 - DNA, 847 bp, Cannabis indica
  modified_base (57)..(57): a, c, t, g, unknown or other
ctgatgatgatgatgatgagttgttattgtagaaatagagtatgtgctcctttcccnctatgtaaagttggtccaaattgggtaatggaatagtgaccatgatcttgaggtctttctccgctggttcactaagctactctcttttatcttcactttcatttcacttatcatcatcttcgatcaccttataaaacctttacatataatatttataggaaaattctttggaaccatatatgtgaataaaagtaaataattaagactaattataggatctttcttagtaactaaatggtttgtgactaaaagtattagtcacaaaaatcataatttgttataattaaatatgttttactaaatatttgttatgactaaaactaaattaatgacaatttatatttaaatactatgttttagtcataattagtaactgtttttgtcactaaaaatcatatttagtcacaaaaaatttatgtgtcactaaaaatagttattttttctagtaaattaatttcacatgcattaatattgggggaatggaaataaataactaaattagagtaatatcgattgtgatataaaaaaatgataaaatacaccttatacatataattaagtatcgagtctcgcataatttaatttaatataactattataacatgtcactaactaattacaatgagtaacttttaggtggtgttaaaacatctctaatggtgacatttttaagagtgtcaaaaatctctacaacacttaaaaatatattattttattttatctctctttcacatcgttttagcatttttagttctaaaataatttaatggtaaacatctttaaaaattat

SEQ ID NO: 254730 - DNA, 545 bp, Cannabis indica
ttcccatacagctaacttacccaccccagaaggaatcttgcggaatgatagttgagtctggaaagaagttcttggatgactatcatgtccactcctggttcagtctttaagattgctagccctcctccaaaaaggaatttcagacagctagttatccttcctggaagtttattcctcatggaaggttattcttcctgaaaggtcattctccttggaaggcagtttcggatagtcgacctcagctggttctatcctatttggaagcttcttcacgaagtgcctttggtccgtgatccctgttactagtatatggtcccgaatgcacttagactaatgctgacgtggaaatctcctgcataggagagttggttaagttagttactgtttaactaacttaacaactttgattcttctagccaccgactttagaatctttatcctaagcctataaataccaccaacactttaagcttttgaggaggatcgatatgacaaagttaatacaatttattagattgagactgagagttagagagagagagaga

SEQ ID NO: 254731 - DNA, 1003 bp, Cannabis indica
ctcgagatacattgaataaccgtcgaaaaaaccctctatcacatggttaagctgcatgtcgcctaataataagtgacatgttgcctgggataatttcagcacataaatattttgagtttcaaagctcttcttcgaaccaactcaacactcaattatccaaaactcatttaactaatgtaaatgaatattttgatagtttgaaactcttgaaaatatctctatttgattttctaactcccatattcaattactaacttaattgtatctttatcaagcgtgaatcataagttacaaactcataattagattagtaactcctcatgttacaactttatgtatttgttacattatatatcatataatataatctttgaacatttttatatataataatttcataataaaatatttgtcacaatttaatctattaattatattatcaaataatataatcaaattttactaatattgagtatttatgtcgctaaaaaatcattaattttatgttagttacaatagacaccgctctctttttgagttattgcagcttcttcatgatttcatgacgcaatgaaacaaaaaaacaaacaaaaaaaaactcaaattttgggtgcttatgccacaattatttcttacatttatttatattaatgatcaaatatttagaaattgtataaatatactaataaatatttgaaatggtatttttactattatatatatataaattaatacactttacatattttccataaataaataagtagtagctccaccctttaaaatatatctaacaacacttagcctgcataagtgttatttggagagatatgaaataaaaatcattctacaaaattttttatcaaaatgttttagaaactaaatatttcaagagattaagctaaagaaaaatgattagaaaagaaaataacaaacaatttttacgtggttcaagcattaacgagccttaatcctcgatgcaattttataagcttttagcaat

SEQ ID NO: 254732 - DNA, 792 bp, Cannabis indica
ccgcactcaacagattcgtttcaaagtcgatggacaagtgcattcccttcttcaacatcctctgaggtaacaagaagtttaaatagacaaaagaatgcaaaaatgctttccaagaactaaaaagacaactcgcaaaacctcccgtactctcaaaacccttggacagagaagagttagggatatactcggcaatcaccgaatatgctgtgagcgccgtgctgataagagaagaaaataatgtccaacatccagtctactatatcaacaaacgacttgttgaaggagaatgttggtaacctttaattgaaaagcttacttactgtttgatcttagctagaaggaagttaaggccctatttccaagctcaccctggtcgggtttataccaaccaactcttggaccaagttttgtaaaagcctgatgcctctggacggttactcaagtgggccatagagttgggtcagtataaaataatctttcaatcctgcagaatagttaaagggtaggctttggcaaactttgtggtggaatgtagaacaaaagaggaagacagctcataggatagccatgagccagtacatgagtccctacaagaagagaataaagacaaacctatctagaaattacatgtggacggatcagctaccaatcaactttctagtgcgggaatttctctcatcacacttgggggaaacctctacacagagcaatcaaatttaggtttagagcctccaataacaaagccgagtatgaagcactcatagctgggctaaagctttctcgagaggtaca

SEQ ID NO: 254733 - DNA, 554 bp, Cannabis indica
tgttttgttttgttttctttgttccttgagtttaaatttggaatttcatccaaacgaatcttatgtagccatgcaatctcaaattttctgttgcctgtggactcgataaatgccatgaccctacaaacacatgggcacgtacaaaccacccaaaagatttttttgactaagtttagttttgttttgtttttttttttccttgagtttaaattttggtatgcatccaaataaatgctatgtggcaatgcaagctacgattttttgttgcctatggagttggtggatgtcacggccctatgcacacatgagcgactacggaccatggaggagattttttttgaccaagtttcactttgtttgttttcctatttttttgagtttaacttttggttttcatctaaaaaaaatttatgtggccatgcaagctacagtttttcgttgcctatggattcagtggatgccacgaccctatgcacacatgggcgccgatagaccatgcaaaactattttttttttgacaaagtttggctttgttttgttttgttttctttttt

SEQ ID NO: 254734 - DNA, 962 bp, Cannabis indica
atccgatcaatcaattagaccttaaaatccaatctaatctaattaattggattggatcgactttttaattggatatccaattatacacctaaattccaatttttacttaaaaatatgaaaaaaaaaatacgtaaaaactaagtaccaccttctatttaagtatttttgaaacaaccttctatttaagtttaatacttcatatacatactattcttacaagtgtaatgtagctaaaaattttaaataattaaaacaataacatttccaagtaataaaatagaacaaaatatcataaaatacaccaaacaatcaagtattacaaatttaacatacaaaaaaatctaatagaaatagaataaatatatattatattttttaatattttttattatataaataattttttaatataaataaatgtaattggattggaaaagtttttaattggattttgagattgacattcaataaccgatccaatccaattagaatccaacttttagcatccaattcaatccaattgtaattggatatccaactttttgtaattggattggattggattagttcggttcaatttgattgaattggatgatgcccacccctacctcataggttcatattattcaatttttattttttatttaaaaatttatttaaatatatcaataaaaaaattacacacgtataatgacataacataaatacctataaaaggttcacaaatataacttatctattattatcctaaaaattaaaattaagtatttattattaaccaagccttaaatttaaatatttatactgtttacattttattttatttctcaaattaattttttttttttttttttttttgtttaaagaggtacgtgcttgttactttatccttctctaatctttatcttttgatatcataataatcacaaaaaaaaataaaaaaaaaaaaaatcagtagagaa

SEQ ID NO: 254735 - DNA, 904 bp, Cannabis indica
gtcttttacggaaacaacctgtgaccaagaaagaacaaaccaacatgcataagcctcaaaattcagaaggtattaaccataacaattaaaaatttaaatacacagcataggtaattcgatgggagatcacctattcatgttaatttttcattttaagaagcagttggggtttgaactttgaaacccctactttgtactcacaacacacccacccaaacacttgagctagactagtgttaatggcagatatcaatttgaaatgaccatggtaaaaaaaaaataaaggcaggacacatatcttgaaatccacctttataagcccagaaaaaaagaaaatcttgaaactgcatcatgactggaaatacaagcatgatcttttagattgactagggaaagagcacacgaaaatatctatcaaatttaaattccaataacaatgcccaaacctcaaactaatctcatgctcactccaacttttacacatttataagcctcaaactaaatgatctccgagatatgaacctaaaggatgtgtcaaggccgtatgttatgtgaagtatttgcaccgacaagcacactaaggcgctaaatacacaatcacaaaacagcatcaaagaattcattattattgcatgcatagggacaggttcaaacccctaatcccattttgtttctagttgattgaaacaactactttgaggactagattcatcatcagtttttctttaaccatatcaaaatgatgaatgatggcatattaccataaaatatttgtgaagtgataacatactttgaaatgaccattcaaattacatgaaggcaatgcgaaccattgccagtactctgaaataaaaagatcaagtctatattatctaacactgcaaaagaatataataaatgtaaa

SEQ ID NO: 254736 - DNA, 844 bp, Cannabis indica
gcgttgatttgatttgatttaggactgactgagattctctcacattattcacatttcacatgtgtttacatttgtctgatattattattagaacatatatatatcatccaattgaccatcaaaacaatatactgtcaaaataagtactgatcattataatttggcttgggtttggttggttaatttttccatgtgtaattttagattattagtactaattaattataacaacaaaatgtcaatatcgatcatatgaccattaattcactgctcatctctgcagtataacaatagaattattattacataatcaaatggacaatcaagacgctgctgctgctgctggtacacatatattgtgtttattacaaaattatttgtatgtaatatgtattatgttaattaattgtttaatttgcagaaccggtcaaagccaaagcccttacaaaatacccatttggtgctgcttcagaattgggggtaataaagaaacccctcccatatcctttactcagcggcctccctcctgttactggtaaatgtattaattactaaatgttttgactttttgattttacagagattatatactgttagaatgccaaagtgtattgttgaagaagtacgaataggtgtatatgtaaggtgtacgaggctccatttcaaaattaattgataataaaaggatgtatagtatttagtttccacatgttatcaatattatcaacgtgagattctctaacatatattaattttgatttatttgccggtatgtatatatatatatgtttttttataaattattaattttagtttaaagtcatgcacgttgatcatctgacct

SEQ ID NO: 254737 - DNA, 819 bp, Cannabis indica
atattctgttaaatttaacgatgttaatattaaacccaaaaaattaaacaatcatttttaaaattaaaaaaaaatcatatctctctaacaaactgtaaaatatttgagattttacaaataattcccccgttaaccctaagaaaaagaaaaatatagccaatcaataaatcttcttaccctaaactatcaaaaactaatcacatcgttctgatcctaatttctctctcaataacaatatttttcgtctctcagccctctctacgttttcccttttagcgctccggtgggggaaagagtagctttggttgctctacggtcagttatggtctgagttcggcaagcagtggagaggtctggtccaacagcggaagaggttcgtgttgtggctgtttccaaaaccaagcccctttctctcatccgttaggtctatgactccggccatagatgctttggtgaaaacaacgttcaggagattctcaagaaagctcctcaggtttccctctacaaatatatatttaacattttccaatttttttttttttttaacatgttgggctttgtatgaacaaaatacttttttgatctttttgttttgtttttgaacagcttcctgatgacatagaatggcattttattggacatttacagagcaacaaagtgaaatctcttctgggtttgttcagtttttcttcaaatcataatataaactttaattgatttaacagttggaatgttaaccttataattaaagtgaagctatgatttgaacgatcatttaaatggtaaaaatgttgggtttgattattccaaatcttaaat

SEQ ID NO: 254738 - DNA, 1721 bp, Cannabis indica
cttattacagttattattaactaaaagttttgttcgttggactttattaatgaaatgtgtatataaatatatattaaacaatagattaatggaaacgtgtattttttttttttttggtttatatcgaaactgcttatggtataatctttataggtatagtgctgttgtcaacactcagagttccatcgttaactagtggctgaataatgttagctagacaaatgtacatcctgtgattttaatggtatatatgaatacgataaagaaacgaaagcaacacacataatagcgtcgttattccatattattcattcatgacatatgtgtagatgttttagttgtgtggtccatacataccataccacaatatgtctcatttaacttgtgcattttcctttttcacttctataattctctaattaattggaattgccatcttacctttcatttcatgaaataatttcgttaatatattattaagtagtaactggtggtaagtgaggtggaaaatggctaaaatgtgttgaccacgtgtcagcaagttaaaggtggttttattttttgccatagaaaaaaaaaagttagattataaacacagcacagcccaatgggggccattaaaggagtttcgtagggtggggaacagcctggccggctgtagattctctcgtctcggccaaaatacaaagaaaaaaggggctgtttcggtctttgacacacccacccagccttggtgtcaggtgaccatggacccacccaccttccctttaaaatcttttcttttttagttttttttttttttttctcaatcacatttaagcccctttaaaaaaaaagcattccattaaaaaaaagtgaaataatatcacctaaaatacatttgatctatgctccattcccttttcttcgtttcttttctattacaacaacacaaaataaatgagtttaattacttcacaactataatatttgtttctcactttaggtatttcatatttgggtgattttaggttagtccatttaactcattaactcctttaaataaatgaatgatattcatgtctaaacaaatattcaagatattattttttttaaaagaaacattaaaatattcaagaaattatttataataataagctatatatgagatctctcccgtcgcaaaatctattgtccatagagcatacatatcatacttagtttgattatgatgagacaaaacgaaataaatacaaactcatgaataatgagagacttattcaaatggaattataataattacataattaaaaattaagaaacttaaacttatcaattattgtccaattggcacgaaacaattttcaaatggcttaaaataaaggttactattacctataaatataatcaaatgtaaatattttattgatttttctttgaaatggatgtaaatattttatctagtataaataaaaaagatgtagtttttttttttttcaattaccccactgataaaattttaatttctctaaaaaaaaaagaggatataccatcataacatgcatttcttattacgttattgtgagtagaattgcccacttaatctaatttaataatatgatggttataaaacaaattctactatattggtaggggaaaatgaatactataaccctatacattaattagcatacggttcgtttcctctgttgacctctgtttttcaacatcaattatatata

SEQ ID NO: 254739 - DNA, 633 bp, Cannabis indica
aaaacaataaaaaaataacaaaaatacggtttcacggaatttttaaacattttttatgtattttttttgattttatttacattaaaatacggtctttttatgtttgaaattttgttcatttgttgttaatattttgttatatgtatgttattttttgttgtttttttgttgttattttgatgttattttcatgttacttttatgttgttttcttgttgattttatgttgttttcgtgttattttttggaaaaccgtaaaaatgtaaaaaaatattctttgaacgtaaaaatgtaaatattttacaaaaaatggtgtcttatgtaattattcccttataaaatgggggggtttgtgcaatggcccaaagctgcccaaagctgcccaaagcttgggccgacgttgcccgtcagggtgggctctcgacccgcaaaaatattccagctttccatgcataagattggtgcttatttgtgtgttcttaaatcaaatttgatatatgaaaatattcatttagctaggtgatagaacttatttggaaaaaatatcttatgaacaatattgggaattctagtcaaccctaatgcgttttgctaaaattaatgcttaacatctaagcagtttttgacataaag

SEQ ID NO: 254740 - DNA, 562 bp, Cannabis indica
tggtggaagctcataaaataagaataaccttgactctcgcctaccgggaaaaaccactgctaccagttctagagcatgagtggggtagtgttgttcaaaatctttcaattgtccagaggcataggcaatgatcttccctgactgcattaacacccaacccaagccttatctaaaggcttcacaatctatcacaaacttctcatcactgattgggaggctcagaactggtgcggtaatcaatcttttctttaattcgtggaagctatttttacatttatccgtttacacaaacttacaattctttcaggttagctcgatcaaaggagtagcattcttggcaaaaccctccataaatctcctatagtacccagccaagcctaagaaacttctaacttcagttattgtcttaggtggtgaccgatcccgaacagcttcaatctttgtcagatctaccagaatcccattcttacttaccatgtgcccaaggaaactcgcttgggacagttagaactcacacttcttaaactttgcataaagtgttgtgttctctgagatgttgtaa

SEQ ID NO: 254741 - DNA, 547 bp, Cannabis indica
tgacatttcttgtagttggctttacattaattttagtttgcagtctattttattaaatatctattctttattagctgttgttgttggtggttcttgcagtgtcattccacgattcagcaaatggtgttgttcatacactgacaacctctattactaatttaggaaattgtatttggacatatgtttgtcctccatttttgagttcttctgtaacagtggacttttattaatgaattttgcatttatttcaaaaaaataaaataaaactttcttaggtacttgggcatttagaatcaagtcaatgaccatgtgatagtttatgattgattcaagttattaaatttttattttttttatttaaaattaatttaagtataccaataaaaataagacgtggataatgtcttgatacttaacagttaggtatctatagaaattctaactgaaagttaaacttaaatatttacctcttatttgttttacttcttttttttgaatggaaaatgcatctttattaaccattaaaatctgctaccaaagaaggtag

SEQ ID NO: 254742 - DNA, 569 bp, Cannabis indica
ttcttcgatgccctaggaaaaaaaagacaaaccctcatattttccctaatttttgagaaaaactccgaccaagtccatcaaagacaatcgagtatgccaccgccgcaaatcttccccggtcaaaaaaccatcatcatcaacagcttcagcctcaacagtcatttccaccattaaaaatccttcttcaactgccaccgtcgcctcatcaaactcttctcaaaactcacccaaatcagaaccccatcaaatcgtcgccacaacaataaaggatataagatcctcaaaaagacccctgaaaccctaattcccaatcctcgacgattactaacctcattcggcggcctcctcctccctcctttgatctccctagagaagaagcaaacgatattcctagatctagacgagactctggttcattccaagccagatccgcctccaaaacgcttcgatttcttcgtacggttgagaatcgaaggagaaactctaaatttctgcgtattgaaacgacttggagttgataaactgctcaaataccttagggcaaatgatgataaattcgaggttgttgt

SEQ ID NO: 254743 - DNA, 694 bp, Cannabis indica
ataaaagccatcattccgtgggtgtaagagcccaatggaggcttgaagtaaggacgttacaataaaattgttcaccctttgtacataaaaaataagagtatttataggcttatatgtgggtaagtgcattccctttacccacctaagattttgtactaagtacgctgcaagggcaggaactacaacatgaagatctgactgttggctggtaggaaacttcccctcgtatggtgtacgactgcagtgaaagatttcatgtgaataaggacacgcgtcactcaaaggtttcaccttgaaaagttgttgcctagacaagccgttggacaaaaagggggcttcaaaggctcgtacgcacactaccatggtctaatgcaggggacaagatctgattcagtgtcaaatgatgggtaaccgtcactttgcgttccggatagggtatagtcgaataagctctaggatcaatgagccaaagccttcccgaattacactgacccactacctctctaaaatatttgaagctctgggtaactttgatcctccccaattgcggatggatagtgaaagcattgtagccctatttgtactcgctagcattgaagacctttgattggcttccgaaatataataatctgttgggttttatgccctaataaaactccatttcaatgcaatctattttattcaacatcaataa

SEQ ID NO: 254744 - DNA, 731 bp, Cannabis indica
tttggtacatgtcaaaattagggagaaaagttctaattagcctaaaaactaattagggccatgacacaagtcttacaggtgtttaaccttagtaacgttagcccataccgtttttgtgaggtttgtccctctagcaactctttcatgagcttcgagctttttgttcgtcttgttttcagcatggcttaccatcagtttggtcatcttttagtaaaatttgttcgactttatctccgtcttaagactttatgtcctttttaaccatttgaaaatacctaagtttaactctcggttacaaataaatatctaagtttaactctcaggtacaaataaatatctaagtttaatttttaacggtaataatacttaagttatatttctagaactcccgtatgtacttgtccgttaagagtcaagtcattatccacatgccatttttttattcgtatatttaaattcattttttaataaaaactaaaaatttaatgacatagaccaatttaggatgccacgtgacgattgatttaacacttaacggtcaagtacccacaaaaatttaaaaaataatataaaaaaggggttaaattgtcagaaaaactttatgaggagccatttcttgaaataactctaattttgtggtttgtcaataaaggtcgatcttttatttttctatttctcctaaattcttccttcttcttccttccttgtactcctcgtgtccagcttcaccg

SEQ ID NO: 254745 - DNA, 506 bp, Cannabis indica
tttagagatgtcggctttgaaagagtcaaataatcttagtagttcttgacaagtagtgtctaactttttatccctctccttcatttcatctcttaagatgcagttgcagcatgtagaggatgaggttcctccctggttggataatggaatggaagtgtcttctgtatggccatatgtcttcctgaacataggcgggtgtagaataatctgccccaaaatgagaaaaatttcaagatcactttacaaaaaaaaaagtagcaattaacaaaattgtattggcctattcctaataacaagtaactttgaagagttgtaaaccaaaaatgtaccttcccattcacaaatcccccactcttggagatgaacgaggatattcctttcactcggtcctcattccagtaagccatgggaaggccgaggcgaggagaagtgtacaacttcctttttatatggctccaataatatatctgcaaaaaaaaaaattatttgcaattaaaactacagtg

SEQ ID NO: 254746 - DNA, 688 bp, Cannabis indica
ataggatgtcaagtcactttcatgcttgataacacaatatctctagtagcctgatgtatcagacatcctaagttacactaaaacttcctcttttacttgtacctcaaataaaatgaactttgtctcctataccagtattcattgcatagtcgctatcttgtctgcgatccctggcttaaacatctctagcctcgataccttctccttacttccatttgtatgactagaccagatatgtggtaatcaaaggttgtaggtgtgcgagttgaggaggttgctcactgctgggaggagcagcttgtgcgaggagctgcccttagctgcatggagcagcttgtgcgaggggctaccctcagctgagtcgagcagcttgtgaaggagctaccctcaattgcgtggatcagcttgtttgaagagctgccctcaactgcgtggagcaacttgttcgaggagcctgctcctgctgcatggagcatcttacgcgaggagctatcctcagcttctactcaaggagagtaggtgcatattgcgtggagctgcccatcgttgtgcgtggagttgtaatggagggaagaatgtaataagatgtggggatgtgatgaggataaaaggacaaagaaggtggggacctcctcttgttcctttttgttttgtttcaagaatcttgcaatatccctccctcttattt

SEQ ID NO: 254747 - DNA, 419 bp, Cannabis indica
ttttgtgaaataacttgtcgcacaagttagtgaaccgaatttcgttcttagaatttttaattgtagacttgtaaatcactatacaagttaccttatcacaagttgtgtcatttgctcgcttattttgttcgaatctcaagtgtctttgtactatgcagatctcgtacgctctattatctgaataggtgtagattgagagtccactagggatactactctgatatataccatgataaaaatcatagggttccattttaaaaccaatcaataatgaatggatgctactaaaaaatagttgatttcctgaccgttttaagtagtcagctaatgtattatcatcggtctctataatcattgcctattcgatcatagtggacaaaaaactttatcgacgatcaaggccggccctatgttgattt

SEQ ID NO: 254748 - DNA, 1014 bp, Cannabis indica
tcatgtgtgttttgttgagaagggcatgtgtttgagaagtatccctctaatccggagtccgtttattacatgggaaatcagaattttaacagaaacaatgggggattaaacaattcttacaatcaagcatgaaagaatcatcctaatttggtctttgggggggggggggtcgaaggagaaagctcaagcaccgcaccagcccaaggaagacaagcatatccaccgggtatttcacaacagctacgacgttcagaacaagctcaaaactcccaaccgatttattttgagagaatgcaggattatattgccaaaaatgatgcggtgatacaaagtcaagctgcctctctttgaaaccttgagttacagcttggacatttggctaatgaattaaaagctaggccgcaaggttctttgcctagcgacacataaatcaattcaaataaggagtggcaagcatctaagaaattttgaggaggaaataaagggcagtggggagcccacttcaatccaaactgacaaaaaattgagtaacaaaactgcccaggaaattactgacactagcctagttgatattgaaaagggtcagcaacctgacagtcagcaatccgcaccagtaagttctggtcctaaaccaccccttccatttccccaaagatttcggaaacagcagcaagatgggcaattcaagaagtttttagatgtgttgaagaagctccatatcaatattcccttggtagaagcattggagcaaatgccaaattatgtcaagttcttaaaagatattttgacgaaaaaagaggaggttgggggagtttgaaactgtagctctcacagaaggatgtagcgccatgttaaaatgcaagattccaccaaagttgaaggatcgtggaagttttacaatccctgttcattggagcgggatgttggaagagccttatgtgatttgggtgcaaggcatcaacctcatgcttatgtcgatctttaagaagttgggtattggtgaagcacgtccta

SEQ ID NO: 254749 - DNA, 637 bp, Cannabis indica
tttgaatgctcctgggaagaatagcttacacagaatgcacaccagatcccgatctggtatttataaaccaaagagctttctcatcactaaggaaccatcatcaatcaaagaagctctagctcaagagcactggaacagtgcaatgagtgatgagattcttgctctttctagaaatcgcacttgggttctagttaaattacctcctgatagacaagctataggttgtaagtgggtgtacaaggttaaggaaaatcaagatggttcaattgacaggttcaaagcacgactagtggctaaagggtttcatcagcaagctggattcgatttcactgaaacctttagtccagtagtcaaacctgtaactatcagagttgtactaactcttgctttgcctaaaggatgggaaataaggcagttggatgtcaacaatgcatttctcaatggagacttgcatgaagaagtttacatgatacagcctccagggtttgaggttcctggtcaagagcaccttgtgtacaaacttaacaaagctttatatgggctcaaacaggctcctcgagcctggtttgataagctacagacagcctgacttctctgggattttgtctcatctaagtcagatcactctctcttcata

SEQ ID NO: 254750 - DNA, 363 bp, Cannabis indica
caagtaccaaaactttcttcaaaagccagaattatcctgcaaattccatcttccattacgcacttgcaaagcccgataggcactccttaccgaataaccaccaaaattttcgaacgaccaataccatgtatcaagttctggcaatgcaggcagcgagactttacaaatgagctccacatctcttgggtcaaataaatcctctaagagctccatatcccaaaacattcgatcaggctgaagaagattagaaacagaacaactctgaagagcctcatgagaagaaatcacataaggattatccacagaagggagccacggctgatgaagaacagaaatcgaagcactagaacccacacgccatct

SEQ ID NO: 254751 - DNA, 630 bp, Cannabis indica
ggcgggttcattgggcggtttgggtcaaaattcaacccgcccaatttacagattgggcggtttagaattttgtcaagttatgtcggtttgtattttttttcggttttgtcggtttggtttagtcgggttattcgggttgggcggtttacgaaaatttctgtacagccctaactaaaatagtgtttaagctttcacgacacgaaaaatataaataatgaatagattaactcgaaaacatgacagatgaaaaagccttctaatttgataataataacaataataaatatttatttatcaattaaaataattattattcaaattataataaatataattatttgttatataattgtatgtaattattatttaaaaaagatataaaaataaataaaactataaaatacatatatattttagtatttagcttgttaattgtaaagaaaaatataaaaatatagaatattgaatttgagtccgtataagaaaatatgttggtctatttaaaaaaaatgagccgacacgaataaagaacgatatgaatctgaacacaacacgaacgacactatttatatttttttataatgtttattttagtggcataagtacccaatttttgtaaaactgtaattt

SEQ ID NO: 254752 - DNA, 810 bp, Cannabis indica
tactgtgcaggaaaaggtaaatcactctatcatgccatgagtgcgagaccttggcgatgcttgtacatgttcgggccacactagaccaagcgggttggggtctaccggtgatgtattttgtaactctaattttgccatttaggtcggctcgtaaaatgaacttgtaatatttttatgaaaatatttacaggatcccgaaaaatgtatcttttgattgtaaagtttaaagttgttacaagtttaattttcattctgtttcaaataaagtttaaatttcccacgcttatctttctagtaatcccgatttaggggattagggtttcttaatcggttggtgtagcgtgcctaatttttagggcattacaattacacttttaattataattttatataatggcagtttgttgtaaagtattcgaaaagataattttgttttactagtttgatgaagtattacattttctatgatactctttttggactttctaatgtgattcaatttgttgtttgcagaaagtttggagaataataacaatgtctattagtatggtaatattatggcaagttaccaagacgattcttttgcagagatgatcgatcgatggggcaaagacggtgtctcattgatgttgtgagtgacgagctgatcagagatgaaaataatgtctagcatctaatctattatatcaacaaaagacttgttcaagttgaaggatggtacccattgatagaaaagcttacttatgctttatcttagcaacaaggaagttaagaccctacatcaagactcatcctgtttgggtatacact

SEQ ID NO: 254753 - DNA, 1022 bp, Cannabis indica
actattcgccagatagaagctatagattccatgtttatgttagcgctcccactcaattgcactaccgtgttcccaaaatgtacgtatcaccctgacctaaaagtaggcttaactaacaaatcaaagaacacgaatagcctcttgagattgagcctaatcataacaggattaagatcatttgatctaggatcaactaggcgatattgacttgaatagatattacggtaagtttaataaatctaagtcaaagttcaatatcggtcccttccgatgcatactccatgcatccaacctgagctttactttaaccaatgctctggaaagaacatagcatttctccaaatgcaagtaaactctgttgtagattatcatatcagtaaaaccctgtgtctgataaatctaggaaactttattcacatagtcatgtttactttccaatgtgttgacaacacaataaacaggatcaagtatgtgaaaagggtttcagatgaattcatacattatgtacatataatcatgaaataaatcatgtgaaccatgcaacattaaatgttatttctgatctatattaataagtaaatctgattatattgaaatgagttttatttagggcataaaacccaacagttgtagcattttttttttttttgtgggggttggggggaacaattttctctcggtattatgtaataattgtaatcaatcaatgtaaatttttattgtatttcacgtagcctactgtcaaaagattttcatgagtaaaattatgatattcatacattgttgcttcatcaacatgtctattctccatgagagtatacataaaattatctgttggttttgttaacactcaaaaatgtttaaagattagattagataaatggctcaaccactctagtaaatggctaagattcactcttgggataaagagaagggatagtaaatgagtagctcaatgttcaaactccttcaaggttctttctatcttcttttattgggcccacagatatacatcaagcaca

SEQ ID NO: 254754 - DNA, 771 bp, Cannabis indica
caagcaaattccaagagagaaaaactttaatgtcgatggcttggcaaaattggcctcgcaaaatgaacttgataacttgaatttggtactggtggaagtgttaaacgaaccgagtatataagaaaaggaacaagttcagatgattgacaactcacctactttgatgacacccatagtcaactatcttcttaacgggcaacttctagcagacaaaaacgaggcacgaaaacttttgtattcagtccctcactacacgatggtagaaggaaaattatatcgaaggggttactcaatgcctctcctatggtgtgggtttccccacaaaagcaagtgagataattagagagatccacgaaggcttttgtggagaccatgcaggtgtgaaaagcttgtcaaagaaaataattcgacaaggatattacttgccaactataaataaagacacacacaaatttgtcaaaaaatatgatgagtaccaccaacagaactaagaataatgacctcgtcatacccatttgcaacatgggcgattgatttgattggggcactccccacacggcgacgaggagtaaagtacacagtggtggctgtcgacttctttacaaagtggacagaggctgaccctctggtttccgtaacctcgaagaaagttctcgactttgtcgtcaagaacataatttgtagattcacaatacccatcaagatagtatctgataatggaactcaattcgatggtgagttattcactgagttctgcgaaaggaacaagat

SEQ ID NO: 254755 - DNA, 720 bp, Cannabis indica
gccaacctgagtggaacatctgcacgatgatttacaggcccctaaatcacattattcgtaaaattgatgagtgacacgctaaatcacttttcggggataaaaactcaaaactaaaagtttccttatcgatgaataacatgacaatgccctaaatattacaaaagcgggaaaaactagggtttcctaaaatgccccaatcggaattccggttctgtggggttctctggggaccaactggaattccagttcctacaggtccatctgaaccggaattccggttcagtgcagaaaacaaaaaaaactcataaacatatcaattcgatcccaaatctcaccaaaacctccataatacctatttacaccataatgaagatatttcaagcaataacatcaagtaatagcctctgaaactcaaatcacccttaaagaacaaagcttgagttcttaaactcaaagcttgctcaaaccacaccacaacccacaaatctagctcaaatcatcttaattatccataatttaacttcagaatataaatcaaatactactcacatcacagaaccctaactctaagaaaacatgcttgaacttaactaaaaacataagataatcaaagagaagagctaagaggagttataccttgaactagattactaaaaccttggtaattactctgatttgcagcaaaaaaaatcccaattgttgttggagagagagagagag

SEQ ID NO: 254756 - DNA, 574 bp, Cannabis indica
cgaccatgaggtctagattttatctattttaatataacctacgcttgttttcaaaaaaaaaaacgaggtaggctaaattggcccaaattttattagtatgtggactagacatacccatataacaaggcagcagcccactatgaaaaaaaataaggaattatttttataaatatttaaaaaatgataactaatttaatatatttttagtgattttaatcttttcttaaaacaaaaaaatatggaatgtttttttttttttttagcctaatatattgaaacaatggtattgctacgaaaaacaacaatacagagttctttattttttgttattttagaataaaattgttttcacgttagtattttaggaaaaagaaaaaaaaagttaaaacctagtaaaaaaaacataattcataaaatacaaaggaaaaaaatctgtaagaaaaatgaaaaactgtaaaccgaatttaagtacattgtgtaaaattaaaaaaaaaaaaaattaaacagcaaattaagtatatgtatgataatatatcatgaatcctgatgaattcacattcacatatataatata

SEQ ID NO: 254757 - DNA, 769 bp, Cannabis indica
atatcccaagttttactgggtctatatatgattatcactaatgcttatagcagacaattgcacgtgcatatatttcgactcctcatatctcatggagccaagttatcatacagatacagtacatcccaattgggagagaggctgctgtctcatgaaagcaccctctcctctagggtctacccgagccagaattttttcttactttattttaatttattacatattattttctactagagcagataaagtctttcaaaacataaatatacaaataaatatgcaaatttgttgttttcttttctgttattgatttcaaatttatgcactcctactcctaccacagaaattccaaaaaacattgttattagacactattactctagtagtaactagcactatcatgtgtcgccttacaaagagcttaacaaatttttacactagctattcaattaaattgcttcaataacaatatatcattttaggatggtactaaataccatataggtggccctgtttcaaaaaaaaaataccattggtggcctttaccaattctcaatccccaaagagaaactctcgttcgtttccaaaagaaactctggaaaaatatttgtacagtaacacaaacttcaccaccataaccatttgaataataataataaactataaacataccagtgagtgagtaaccaaataatcaatccatagtaataataataataataataacacccagacccattgtagaagaagaaacgtcaacctaaataaa

SEQ ID NO: 254758 - DNA, 1424 bp, Cannabis indica
gatcccttagttatagggattgagctgatgactcatgatgtgaaagctgaattcgctaagtattgattgctctgcgcggatcgctgtatatcttactctggacatgccagcgaggcatcctgctcggcctaccttcccgagcatatatttcaagtggagtccacgtgtcaccattcccgtgatgccacatcagaatgcaaaatttgggataacactcatcatctactttctttgtcttagaagcctcctctttgaacctcttgatgaagttcatcaaggtttccataggtagttgtttaatgttggtcaaggtgctgacttcaaggtttatctttttggctgcaataaattgacttcaaaaattagtctgcaacttattccaacaatccacagatctgggttccaacttcttgaacttttcttctatagatcctcccaatgtcagtgggaaacataaccattttgcatcattgttgacactcatgactttcataactctattgaatctagatagatgatcactttgatcaatgtcacccgtatacatagtcatttcatgcatcttgaagttcttcgggagttcagcctcgagtatgtttcaagcacaaggctctcggtcttcacagtctgactctaagtcatctccattttgtctctgggagacccttggtatgtacttctggagagtagcaagttcagtcaaaattccttcatttaggacactctcggaggctggagacactttctttttctggtcaagatgcgccctgagttctccgagtttggcattgagattttttcacaaattgaccaaagggtctttcctagtggaacccctctattttcccaactcttggtgcacaaatacactcttctaacctccacggtcttgggggctagttttccctttgggaaacctaccccttgtagacctttatcttttgggagatcagaacaaaatttccatggatctcgggccattttgttctttccaaatacagtcgtagggttcccctttgggttaggcctctcttgagggtacctgatgggactaggctccctatccttctattttttgcctccctcagggtgagaaggctcttcccgtatcttttcgtgtacatataggattgcaattggatatacgtgaatgcccgcattttccattgcctttttcatggcaatcaatatttcttgcattctcgtattttgctccttttgttctgccaactcagcctcatggtcagtagcattttgtcttaacttagctaattccgtatagttggcttcatcgtattcttcttggtttatattctcacggtcattggtgttggaatatttttaccaggatctagatttactaccatgtatgtttttaacatcctaatatgaatttctaaaataatgtaaataaacacatataa

SEQ ID NO: 254759 - DNA, 753 bp, Cannabis indica
gatggagagacaaggcaatcataactctattagagtatgtttgttattggttgatggatagaatgagaaagtaaaagaaagtgtcagtaagtggacaaatctagtagggaaaaggatctttgatatcctttagaagaataggaagtttgcaatgaaatgtcagtgtacaaagtctgttggaggatcattccaagtgacagtgtctactgggcaggtggaatcaataaatttagagaccaaaacatgctcttgcaaatcttatgaccttataggtattccctgtggtcatgcattagtttgcatgtggtattccaatcttagtgagtatgatttttttgctgaatgttacaagaaagaagccttctcagctacttatgaaggggcaattgcacctatgtctagtcgtgaacattggcctgataaaggcctaaatccaatccttccaccaacaaaaactgttctacctggaaagcccaagaaatcaaggagaagagaagtgaatgaacctccacctggtgcaactaaaatgagaaaatttaggcagtctaacaatcgttctaattgcaaataactaggtcatacaaagaacacttgcaaacaactagtacaagaaaaggtatattcttttcttaatgtcaattaactttgtattgaaatttgtacagtatacacactttgttagcctaaaaattattatggtattaggaatctccccagaagaaaaagatgggtcgtcctcccaaaaagaatcca

SEQ ID NO: 254760 - DNA, 653 bp, Cannabis indica
cgatccaatttgactgtaagcgaggagtttagagaattttggaaatgattctattgtggtggttgtgcgacagtaggaattgtggttgtagtagcaaatgggttttcgagcacactagaatccatgacaaactatgaaattcaatgtcaatcgaataccataaatataaagaagtttatcaatacaagactatcaagaacacaaagagaaaattgcaaaagcttgagcttgactatgagctcatgatctttagttatagacaaaagaatacaaggactagggttgttataacagaaactaactgtaactaattctcttaaccaaagtctaagtaactgaaaatataacaacattaaccgaaaataaactaacatatgtttattatgtattattgttaaaatatatatatatatatatttatttttgttctaattaataatatttaaaaatatatattttttttaggaaagtaatcaaaactttattaaccttcaaattcaacaaccaaataaggaagcagttcagttgggatatcccccatactgaaaacacaattaaggtaagaaatagtagctttagcaatcgcatgagctactaaatttgctgaccgtttcacaaaagacatagtaattaacaccacttaaaatcacaag

SEQ ID NO: 254761 - DNA, 708 bp, Cannabis indica
ttctatataaaagtgtgtatacatattaataattgaaggaaaaaaatattaataaagagaatcataaataatattaatatatcaccataataattaataatatattaaatatacaatttcttaaatcataaagaataaaaaatgaccattgatattctaaaagcaataatcatctatatctacatgagttatatacggtttttaataatcatcaatgtctttttaatgataataattataatacaattttagttacacctcttgagtgttaattgggatgacatttcattcatcacttttctattttttttttctatatatatgtacatgtatttgtgttttttagtgtgtgaaatagtttgttgtataattttatttatgcttgatttaaggtatatacactgatataaataatattatatgtatttttgtttgtggtctaagggatatactcataaaaagaatacttttgtgtaaatacatattatatgtagatagatagatattctctcctcgaagctccataaaatagaagttggtttaataatattgatgttcgatgttgttatttcttctacaagggtaagattacttttggatcaatggatgtattgttccaagcatcacaataagatttttcatctattcttttactgcatgctagaacattattttatgctataagtattagtgaacaaagagagaaaa

SEQ ID NO: 254762 - DNA, 2108 bp, Cannabis indica
acatagtaaacaggttgctggtgttttccctcttctcgctccaaaactgcactaattgcactctctgagatagctaagtaaaggtataaagtttctccagttatttttttggccaaaactggaggtgttgataaatgttttttatactcttataagcttcctcacattcttctgtccattcaatttgcttcaatgctcctcgcattaactatgaaacccaaaaacttcctcgaggagactccaaaagaacacttctttggattgagcttcatattatatttccagagtatctcaaagcattccgtgaggtcttttatatggtattcacactttaccgactttattaacatatcatcgacatagacttccatgttccttccaattttcttttcaaacattccattcaccagttgttgatatgttgccccagcattctttaaaccaaagggcatcactttgtaacaataaagtcccatattggttacaaaactcgtatattattgatcaaggacattcattttgatctgtttatatctagaatatgcatccataaatgtcattagcttgtgttttgcagttgcatccactaacttgtcaatccttggtaatggaaagcaatcttttggacatgcctcattcatatatgaaaaatcaatacaagttctccaggtgtcgttttgtttcgggataagagcaggatttggaatccacaaaggatagaatgcctcgcggataatatcgttatttaataacttgtccacttcctctttaagtgccccttgtctcttagaatccaggggtcaccgtttttgtattttggctgggtaattggggtcgatattcaagtgatgggagattattttagggtcaatccctaccatgtctgaatggctctaggaaaattgatcctagtttgcctttagaaaatttgttaactgctatgttagtttttcatctagattttgcccaataaacacacatttagtgggattgtctggatctaaaacaatttcttccagttcttcgattggactggtttttctcgtcttgaattctaggatctagatcctcttccttcttctcgccttcttctgttaagaacaccattaattgatggttggctcttctattttgaatctctatgcgataacattcgcgagctaacagctggtcacctcgcactatacctacttctgacggtgtttggaattttaaggataggtgtttgattgaactgagtgttcgtagtccaattaatccagggcgacccatcattatgttataaacaaatggtagatcaacaactaagaaatcttgcatcaaggttatagataatggtggcttgcctatagttaatgggagttcaatgatgcgttgactggtgacactatctctggcaaatccgcataagttcaccatgcaaggttttaactctgcattttgtagtcccattttcttaagtgtattcatgtaaaggatatttatcgagcttccattatccaccaacactctttttatcctcttgttggcaagttgaacagtaatcacaagaggatcgacgtgtggataccttacatgtttcgtatcttcctcggagaatacaattagaggttcttttgatttggtcttctttagtgtttctggagcaaacactgatttcccattcttgatttcattgacatatctcttttggacattactaatctctcaaacgagatgtggctctcctgagataactaatatatcttctccttctacaggaggaggttgtagtccttggttgccttagttgttgggcagatttggctggtttttctcattaccctgacgtcttacatattgtcgaaaataaactgtgcgagataagactctctatctcgtctttcaactgttgacattcttttgttgtatgccctacgtccttatgaaatcgacagaatttcgttgaatctcattggtgtctcgcatgtctcattggctcaggtttgcggaatgcaaccctatgctcatttgtgagaaagtgttttctcaagtttcattaagctcggtgaaaacagtataaattggcacatatttatcgtgctttttctgtttcttcttatttttag

SEQ ID NO: 254763 - DNA, 644 bp, Cannabis indica
gagctaatgtcaaatagctacaaatgtatataaaaaaaaaactatgagtactcacatccacttctctgttctattagttaaaatgcattacttatttttttttttaattttacctcaaattttaatattacaccatacattaatttctcaattttttctctacatcactaaaatattatattttaaaatatatatttattaattttaaatatataatattaatttatacgctacacatatataaaacaaaataataataataataataataataataattaataataataataatagaatacgcttagaacaatgaataatgattatttacacaattcattgcttttaaaaaaaaattaaaatagctcatgtatgtcattttttaactaatctcttctctgttttaaagaaaagctcattttaaatgagctaatgtgaagcactaaaatttggaaattccttaactatatttagttaagcactattcatcaaatatacatatatttttcttacttttagttatattagtactcccaacaatttctctattttatcttctaaaaactcattaaaagtctattttttcctagtttaccaacacatatttacattacatcatatctaagtttctttacaattttctc

SEQ ID NO: 254764 - DNA, 673 bp, Cannabis indica
ccattgatttgagacccttgtgtgggtcgtcgaatcattttagccatgtaaattgacgaatgtagcccttcttcaattagaaaacccctaacccatatatcattgttatttgggtgaatactcatctctcctttatcactatttcccattttttttctttctaattcgaactctatctacatctctctctctaaaaatataagttgagtgttggatatttagtaatattttgacataatcctaatgttaatcaattttttaaattaaaataaaagatatcgtttaattttttatccttttttttttgttcgatagactatttttttttattctttttatattcttatttagtaatatattttaattcatgatttgtaaattaaactaaattttgttatagtagatatcacgaaggaaacaaattaattatttgaacctaaagaaaaaaagtgaattatttgagatttttattcatctaatttatttgatactccacaatttgtgtttgagtacgtaagtgtaataaatttgtaatgtctttttatcttttccaaaaatatcttcgtgatatttataatgtagtctgattagaaattataataataaaattttaataagagaccaaaaattgactaaaatatatccatacagaaattttttatttttactcttt

SEQ ID NO: 254765 - DNA, 604 bp, Cannabis indica
cacgagcttctcaatttatttttcacagctacaatttgtttccaataccagctattattagttggagtttcataatttcatcaatctttattatcaccccaagtacacactatgaagtcgcttcactcacaaattatattgcttggtagcaatagccagacatatttcccaatagcaatagcataccattgaatttttcttctaaatttcaatcctccatcactttttggtttgcaaatctcactccaagacaagacctgggccatcataatcagtcacccctttccataaaaaaaaaaaaaacaacgacatagcgcattcactttgtgaagtactttcttggatagaattattatttgagcccaataaacatgtatggcgattgggacccagttgattaataccactctcccagcataggagagatgtcgattactccacgccctaattctttgcatcatctattcgattatgatctcattttcagcaactgataatcgcgtggaattaatgggaattcccaagtgtctaggaatcttagagcatatttggtattgttttctgttttttgttttcaaaaaagtgtttttagaaatgagaacaa

SEQ ID NO: 254766 - DNA, 748 bp, Cannabis indica
gctccccctcaacctctactacttctttttatttcttcattaattacgatgacctctcgtagagctctaagaatcttatcctctttgtggcagatatttttcgatcttgagtgacaaaattgttttttatttctacaagtactatttcgtttgacgccttaattccaagagacatatctcatatatctgcaacaattttttccttaactattcagtaagacttaacataagtagatatatatttatataaatcttcattagataaaatataacctctttatttatttataaattctaaaagataacaagctaaaggagttacactaaaactcctaactaaggtggagccatactaacactccttattaagtaaacaagtaaacacataaaataaaatgcaacttgacttttctactcttgaaggaattcagaccaaacaacattattgggtcgatgatatatttcttctttagagccatcagggtgataaatagtgtcggtaattttgtactgatcgactaggttgatcatgaataggtcatatctttcggcctcatctacccccaaaagcccctaaatgttcccagtgtgctcttagactacgttggacatgtggcatattgagagcatgcatcagggctatgtacttctcatgtgacttcaataaacaattccaatggtatattatcttatccatcccctcatgtattttgttaattatatcaaagactttgttttcttctcgcat

SEQ ID NO: 254767 - DNA, 634 bp, Cannabis indica
atggtataactgggtttggtgtgttatgactagagtgagtattggttgattaatagtttataaatagcatctaaagtaaataaacactaagtaaatgaaatattaaaaaaacgtgatgacgaaagcaaaatgatttatatatttatagtttataaatataattgagacttttttctacacatatatttaatggttaacgtgattggtggaacaagcattgaaattattttccaaaatccctacataaaatattaatttgattgctttacacttatatgttataagcgtcattattattagtcagccaaaataacttagaatgaaagaagtatataattattattattaaaagattttatataattaaaataaggttaatgttcttaatattcaaaagagttctttgagttaaaagataggttgtcaagtgtgaagctgaataaaaataattgatgttatgaaaattcaggaaatttgatatgataaaattattgatttaatgtaaatattaaattttaaatggtaaggaatgatgcaagtatgaaaggataatggtaatttgatcttttatggtagaataggtatcattaagtataatttaatgatatttttggaatttagttatacatatata

SEQ ID NO: 254768 - DNA, 1080 bp, Cannabis indica
actttaggtttgctaaggctcgttttcttcaatttcgtcaagtgattcttctaggagagcatgattagccttttgatcataggtcaatcttctgtgggacggaggttctagttctacgggcaacatagcttcataaccataggccatagctaatggagtctgttgagttgttattttttcagttatgcggtatgaccatagtacttttggcaattcctccggtcagttccccttggcttcttcaaatcatttttttttcaaagtatctttaagtgtcttattgactgcttcgacttgaccatttgcttaagggtgtgccactgcggagaaactttttacgattccatggttcgtgcagaaatcagtgaacaattgactatcgaactacatgccattgtccgagactattttgtacgggagcctgaaccgacatattatgtttttcaccatgaagtctaatactttcttggatgtaattgttgccaatggctcggcttctgtccactctgtaaaataatccactgcgaccactgcatattgtactccccctttacctttaggttgttgtccgattaggtcaatatcccaaatagaaaaaggccaaggactttgcatctgagttagctcattggacggtgcacgaaatatctttgaaaatctttggcatttatcacatttctttacataggcctttgaatcttccatcatggtcgacaaaaaatatccttgccttagtattttctttgataagctttgcccggctgcgtggttgccacagaatccatcatgtacttcaaataaaagtcgtgtagcttcttcttgtgtaacacatctaagtagtggcataaagaatccgcttctatacatgactccttctacgatgatataccgtacatctttccttctcatctttcgagcttcatttctatcatttggaagttcttcagtattgaggtaggttgatattggtgtcatccaatttggagctgtgtcaatcattttaatttcttctgcacaggtgatgctaggttcttcaaggaattgaattgggactaaattagccttatcagctatgttgct

SEQ ID NO: 254769 - DNA, 589 bp, Cannabis indica
cctcccttcaacttagcctcacgattaagttgaataagctccttctactgctcaaaatgctcctgagcatacttcttggctcctgcacctcccttcaacttagcctcacgcttgagttgaatgagctccttctcttgctcaggtcccttagcccggccaacactggacttcctcttcccctccttcacacactgaggtataaaatctgttggatgaagcccgtactcaacaaagttggcctccgaagtcaacaaagtgatattctgagcatcatccaacgattgaacaatcccttaagctctatcccttagagccactgtgaggggtggacagtaatacatatagggatctgctgaaactgagtataagttgtccccatgccttccacaaagtaatactcgtcaacaaaattcccaattttgctcacgttcttgtccatagtgtctgtcaacaacttgaaatctagctgagagaagtagaagtaccccgacctttcttgcttgggggtacacttgaggtcaaaaaatcaactgacctcatgcgaagaaggcacaactcactttttggtggtttataggacgaacaaggt

SEQ ID NO: 254770 - DNA, 517 bp, Cannabis indica
gagtacatatcccaacactagtaatggtttagtgaagactttggttggtttcaacaacacattactgccatctctagagtcactttgtgttgtgggattttgcctaaatctaaaaggatggtggagagagattgaagttgatcattcttgttttgatgcaaatgcaaatgcaaatgcaaatgcaaatgaagataatcacacttccttgccttattatctcccttctctttcagaattaactatacgtcattgtcctaagctgatgttgagtaataacgttggatctatactcccaaccacgtcttctttttcacctctctccaaattagaaaggctatatctagaagacattgatgatctagaatgtcttccagactccttcaagagccttacttctctcaattgcttgcatattggttgtcctaaattgaggagtttgtgtccaggtattctacatctctcatcacttcgaagtttgtggattatgggatgcaaggggttaggggacatgcttaat

SEQ ID NO: 254771 - DNA, 1903 bp, Cannabis indica
taaagtagaaagtttgatattattggtaaaaacatattagtcaaaggatgttggaaatctttggttgttgttttcttcaatggaaacatttccacattgttttttttttttttctattttatattattccttatctgtttgtcggtattgggggattaattgctattgggggttaattagaattgagggattaattgttattgtgggttaagtcaaaatgttgggaaagtttaattggttttgcctatgtcacctgtaagtttaaatgtgtgcttagttatatattaactttgcatgtttgaatttggataatttcactgtgaaatttttcaatggtggttattggtttacccgaggtggcaatagaaagtatgagaatggtcgaattacctactttgatttttgcggtttctttggattcagcaacctccatcttaaagaaatggctcaagaattgggatacatattcccttttggttttctgtttaagccaaaaggaaagaacttgaatatgggatttagggttattgagaaaagggaaattaatatgatgttggatgatttgaggggtagaaattacagggaggacaacatatattttgtattgccagatcaagtttttacagttgaatgaagactggatgaggaggcaataaggcatgtccaccaaccccaacctggtaaattggacaaatgcattctggaggagttcccatctgacaattatttagtaccagatgttgttgtcaatccaaaaggccattatgatcgtaatgatgaattcttcaacaagtttgtgcagtgggttgatttagcaacacagtggattgatgaagaggtagattctcatgagtgcagctcctaaccaagtaatactatgcctgagaccatgattatttcatccttctcatcatcagaatctgaggaagatgatgatgctgctgatgatgatcgagaagaagatgatgaagatgatgaccatgatgatggagatggagatggagatgatgatgatggagatggagaagttgatgatgatggagatccacctgatgatcagaatatttctgaaatcatggactgggctgaggagactttagggcatttggatgatattggaggcctaccaacaaaccctataccattgtgttagcgcagattttcgttaactaaatttgagcctaaccgtgataatctcacacagataaaataaaaagtatgaacacacaaggattttaagtggttttgcagttaaaattcttcatagtgcacgagtcaatcttatttagatttctaattattttttagggcctctcttgtatgagtttttacgtccctctttttatcttgcttggcattatttacaattacatagtgggcagttcattacaaagttgactgtaatctttttacaatgattatcccctagaatcatgggatttgattacaaatcacgctaggtaaaagcggtttttatttagaattcacacagctgtgaatattccacttttattgggtcaaaatgaacgcatattaaagatatacggtaagcattatctcatggggatgcctcgctgagaatggagccgagttaactttgatggcgagttggagctcgtcatatatcttcctgaggttgatattgcttttactttcattctgacaactacagtttctgggtataccgtgtcatatacactaagtatttatatggttattatacctcctccacgcgacgaggttaatgcctcgccatgcacacttgcatttacatggtttctcatcgagacacaagtcaacagttagtacatttttatctcgcataagattgtccagtcatccgagttataaacatattctgttaattatgcttttaacgagttattccacgtcaagtgtactt

SEQ ID NO: 254772 - DNA, 791 bp, Cannabis indica
tacaaatgatttgctccatctcagcctttgaatacacaatagagaagtgaaccaaataatcacccttatgcatagagaagatttgtcctaatcaaaaactaactaagatgaacaccaaacggacagggcatatttgcacccaaaaagtgcatgtcttattgatttcccaagccatgttgcagatcgatcatgtatattggtaatggttttcctcctaatcaatgaagtagctactacaagtgcatcatgaaaaaaacaccatacaaagattttttttgtggaaattgaggagactagaagaaattccaccagtacgagtacgacgccaaagaggaagtcgaagattgatcaacttcttctgtagatggcggtagttttatgatgccaaataagtttgtcttcgcttgataaaaaactcaatggaactattaaaattttatctacatccagaactgaataatatatattgagtagggtaacatcccattgtcgttcctctgtaatgagatttgctactatttcatttggaggtcttgtataataagttggaagaaaagaattgtggcctggaatccaagggtctgaaccacatttgacctgcctatctttaccaattttttagcgtagaataacggaaaattataaggaaaataacgtttctttaacagtctactaagaggagagtgtgaatttttcaagaatctccaactttatttagctagcaatgcttgcttaaaatgcacaaaagaacgaaaactcatactgccatctgatttggttttgcaaagcaa

SEQ ID NO: 254773 - DNA, 706 bp, Cannabis indica
tatgtttaaaaatcacgtaatacacctatgctagttagagtgttacaaacttgttatgtaactttgtggtattatatattttttagtttaaatatttttttttttctgattttgaggaggggatttgaatttcagactttctctttattaataaattatattttaattttttattatatcattgtatatattatttattgttaataaataaaatgtatatttttaaaatattattttttaagtatcttaaggtatacttaatgtaactttagttagtatttctttattatatttattaaatcaaaatgtatggactcaatattaaattatactaataacagtttgacatctcttgtgttgcctaactctccttgataataattgaatcacatttaatagatttggacttaatcaatataatccagttatttattggatattgaatttaacatatgatctaatctaattgaattgaattatccgatctaatagatgtattagattggatcagttccaaccattagacgcattgattggttttctattgaattggattacatccatccaatccattttagctaccatttaaaccgatttcattaaaatgaaaaaaatatatataaaacataatttaaaacttaataatccaacataaacaataaatattactttagtccaacctaattctcataatctcttaataaaa

SEQ ID NO: 254774 - DNA, 821 bp, Cannabis indica
atatttcttatttttattaattatatttaaataattattaaaaaaattacatttaaacaagaatataatataagtataagttcgcttgttgaaagtaagatcaccaattattttggctaaatgcaagctcatctgattttctctgctattatctaccaatcagcaaagtttaaaagaaaaataaaattttaactaacaaaaatttataaaaaaatagaataaacaacaaaaaaaaaaaattaatatcataaatatactatatattttttacactattatatatttactaataaacaaataagaaagaaaaactaaaaaaaaaaaagtaaataaaaattctttacaaaaaaataagagaaaaaaataagtaaaaaaatgtacaaaagacttaaaaaaaaaatgaaaatggagtaaaaaattgaaagatgctttaaggaaaaggaaaaaagagttgagagattaaaaaaaagattggaaaatgacaaaattattaataattggtaaaaacaaaaacaaaaacaaaacacacataatccagaatatggtaaataaaaaaaatcaaattactaagataatcctgaatatggtaaagagaaaggatggcgggaaaataaataaaaaatttagagttatcataatttaaataacaaaatatttttatgtatcaatacttattttttttttaaagataaaattatatttcttcttaaatatttaagatatttacaagtaatatacatatatctacagaaaatataaaaaaaacactaaaaaaagaattttttttttactaaagagaatattcattaatcaaagacaaa

SEQ ID NO: 254775 - DNA, 811 bp, Cannabis indica
tttcaggataattgggatttggttggccatgatgtatctgaagcagtcctatcagccttacaatcgaggcagatattgaaagaagtgaactcaacaatgctcactctcatacaaaagatcaaatgccctaacaaagtgagtgaatttcgccccatagcttgttgtaatgttttgtataaaattattaccaagttaatttgtagcagactcaagcatatattgccagatttggttgctcagaacctaggaggtttcgttcaaggtagatatattgcccataatataatgatatgtcaagatttgctaaggcattaaggaaggaaacattcaaggcccaactgtatgattaaattagaccttcagaaagcatatgatacacttgagtggggtttcctagaggagatgctaattgctatgcagtttcctaagaagtttatacagttcatcatgcaatgtgtgtcaccctgaggttctcccttcttttcaatggctctcttcatggttttttcgaagccaagagggagctaaggcagggagatcccatgtccccgctcctatttgtacttggactggagtatttgagctgaataatgggagtagtgggaaagaagaaggaattttgttatcataaaagatgcagatccatgaagctaacacatttaatttttgcagatgatgtgttattattttgtaagggtgacttcagcagtattcatcttatgctacagggtttgaagatgttttctcaaacttctggtttgcttcctaataatagcaaatcggcaatctattgtagtggcatggaggagaa

SEQ ID NO: 254776 - DNA, 916 bp, Cannabis indica
acacacatatattggaccatattttgtctaaaattaattagtggaatttttatttttacactttaaatagtttttttttatatatatttttaaagaatttcacacaaaaatctttatagcaatactaacagagatctaaatcgcaactaaaatctgtatagaatccaccggagaaactaccagagcaacccaaattataaatttaaaaaataaaaaataaaaatagaataaattataacccatgtcatagctatctatatatttagagtaaaaaaaaagcatggctattgagcagaatggtaacaattagtttttataaatggcgttttacaattggttagtgatatttcttaaattatatacgagattcgataattaattacattaataataatattacactgaatagaacattaagtaccaataatatatttagcaattctaaaaaattagaaataaaaaaataataaaactactactacttcggtgtgtaataatgaagataataacaatttccaactgtctagtaggccttgttcattcaatttctctaactgggaggaatggataagttggtttaaacacaatgaccataggccaaaagaagtcagcttccaggcttttcatgaaggagctgcaataatctttgagaagatatggagggagagaaacaagattgttgataatggacatggcacccggccccataacgatccttactcagctgatcaacaaccgcctgcaggaagccctcgatgcctatagtttggattcttccacaatgccacaatggctgcgcgggttggagcatctgcaatactgatgtggctattggccgctttcactcgactggtgcatcagttttcagaaacgaaaaaggggagatcatcactagcattcacacgacccaaattaa

SEQ ID NO: 254777 - DNA, 635 bp, Cannabis indica
tgtttagttcgagcatgcagaataggatttgcagcaagcataaccgaactaatgttatcacaccatatcatgggaggaggagcagcaggaatatgaagttcagtgagtaacgatttgagccaagagatttcagacactactgctgctaggcttcgaaattcagcctctgtggaagatctagaaattgttggttgcttcttggactgccaagatatcaaattgccaccaaaaaagacacaaaacccagttgtggaccttctatcatcagggtcaacttcccaatcagcatcacagtatgcttcaagatgaaaattagggactttatgcaagaaaagtccataatcaagggtaccagccaaatatctcagaatcctcttcacagccacccaatgagattgaagaggattatgcatgaattgacaaactttattgacactaaaggcaatatcaggtctagtgatagtagcatattggagagcaccaacaatagacctatatgaagtaggatcaaggacaggatcactaccatatgtagataacttgagtccactgttcataggagaactatgagttttagcaccttgcatctcagccttgcaaagtaaatcctgaatatacttcttttgagaaagaag

SEQ ID NO: 254778 - DNA, 769 bp, Cannabis indica
attaatgtgtcttttcatttctataacttacactattatgtagtctattattataacttacactattattattactatattactatcaatatctatatcaaattatcaatatatataaaggaaaactttaaagaggtgacatgacatcttatatggcatttctttcaatttatttgcttgctcattctttctcatttttcctagttttttatttaatcatttattattttattcctatacacattaatatttacttatgtttcaattttattgcaatactaattactctttaatatgtatatagatatgttataagaatgtgaaaagaattattattattaaatcaaacataaaaataattacaaagaatatctatatatagatatgtatgtatagatttgtgatactcattactaaaaattataaattattatttctttttctttttcttttggaatctatcaatttgtgaaacacaagaatgtctagagttcatggcactagagctttatggagaggaacacaaataaaattgtagaaatattgcttttggtgtttgcctgtcagagttgttttcacaatttagtatctatatgttgaatgcgttatttaatattatgctgctcaaactttcaaaaagtgacatgagtaagagatttatttgttgttcttatttatttttaccgtgtctaattttctattattttgtcttatttgttttgttcttgtattttatttttataatttttttttttcattatttggtaat

SEQ ID NO: 254779 - DNA, 642 bp, Cannabis indica
tatattcttataaataggggcaggtttcaaagaaaaagggggacgacaaatttgagagtgaattattattattcaaattgtgaaattgtactctatattcaataaatatccctaataataaggactcgtagcatatgtagattttaactacaaaaccacataagaataccttgtgtcaatatatcttttattacttattaatttctgtagagaatttattgctgaaaagctatttagttttggttagcaaaaatttgcattaacagtttcgggctttcattgagagccttggtgataaaactcagaaaaaattcctccttataaacttgatttaatcacattcaatggtgaatgatgatcaaaacgatggaaatcaccctgaagaacaactcatcaccctggaaaagagcccatgggatctcaaaggcccaatacttctaaaagaatggtgatggtgatcaaaattcagaaagaaggaatgaagatgtcaataattcatccagatacgtgcctagaagtgaggatgcttatgagccaacttaggggtgttcatccaatccaattcgtactatttttctcatagtacatccgattcgcactaagtgcggatttcatattttggatccaatccaatccacacaa

SEQ ID NO: 254780 - DNA, 1694 bp, Cannabis indica
ttttttttttaagaaaagcgtaaatatattagaatcagtagcagttagacctcatagtcattataaaataattgttccgggatagagaaaattgggatacaaccgaactttttgtgggtaaacgcccacttagccacattatgggcagcatagttacaatttctactaatattcgaaaagatacaactaacaaaattagaagaggattgcaaacaaaatgagacatggttctcgtttcctcgcggtgtccaaggcaacgcagcaagccaccgcttcaccacacagagcatcggcaaactccaaaaaagaggtatggacccagatggccctaccaagatggtctctagcaacaaccgccacacacatgcgatccaaccccactctaacgtcacagttaagctttatccagtccaatggggggttgccaagcgtccatctgacgcggaggcacgtctggaaagaaagaagtatgataaactgcaaaagaagagcgaacattgttaatacatttaaataaaattgatcgatgttaatcatgtctagcttgttacaaagataattaactcgtacccaatttaaaatctgtgtagaaatgtctcttaattgttatgcagttttcacatattctgtagagatcaagtcttcttgaattttttcataaacaaaataataatcaatctcaatgcgtttagttggctcatggaacagaggatttcaagtatgaagagcaactttattatcacactacaattttgctagtactaaagtcttaaattctacttcagtcaaaagctgatatatccatattatctcacataaattttcatagctttatattttgattttgcactggatctggacacaacattttgttttttcttcttccaagagactttaggtcgcggaagcttgctatgttttgaatattggtcgcggacacgtgtcataatcttgcgatcacatacgcctccacaagtgacttgtaccttgtgaggggtactcgtggtttttactatcttttgtgtggtgaccacgcaatacgcttgaagttgctcctttctccccttcttacttggcaaaacgtgcctagcaagaaaggaagagtgcctctgacggctggatgacatgaggaagatcgatctcgatattcacgggtcccaggatcagcatatgggacctctcgttttcttagtcataagattctttatgacctctccaagctgttgatcttttggagctctttttccttttcaacatacaaatcgtctgtggcggcatcctttattttttattcctttttattcaaagtctctacttttttctctacaactcctttttcttttcctttcctcttgccatcttttgcatgtagaaagaattagagggtttgattcaatgtctacccctcattcgcatcaagcttttttcaaatgtgttccctttagctaaaccgaaaaagttcttcgtcagaggaggcttttagcttccaggctggttgcgatcgttgtatcaactggctagagttttagagtgaactttttggaatcgctaactattccttctgttttgccaagtactctaacctcctgtctgggtttcttggcattttctttctaggacaagaaagggtttggtctaggttagagtcagggccgaacttgggtggtacggcgagactgtgagcatatgaaaga

SEQ ID NO: 254781 - DNA, 642 bp, Cannabis indica
agatatgagtaacactatgatgcaagagttaagttcatagtatcttgtttagtaagggttaacttaattacctcgattatatctatatattatttttatacagttcggatttgatctgtctctttatatataattttcaacatacacatatataagactatctaatatatctgatttgagcatatctcaggaaatcttaataatggtgaactttggaataatttgcattgctttcagtattcaaaagaaacctataaattaataataataataataaaataaagggtaaatttaagaaatagaaatagaatcttacaaaaatttcgttttttctataagagaaaatcaatgaaaacggagactgataattaataaaacgccattatcatcccaacaaaaagccactcacacaaataataaataaataatttcactcatacttaattaatttttaagttttttttttcacctcaatatggaaaactttatttaatctatttaatttttggtacaacaactctaatgattcacactaatgtgtatttgggtaatattttttttaatctagtttttttattttttaaattaaaaaaagtgtaaaatattttctaaaatcatattctataaaactatttttacttt

SEQ ID NO: 254782 - DNA, 1011 bp, Cannabis indica
ctagcaatgttacaaacaacttaggccgtattatacttcccacctcattgactgaggcagcgagcagctggttcaataaattcaccaatcactcaattacctcttgggaacaactttctaaagacttcaagaaacaattccagacagcaagagacatgcaacatgaagcgtcttcccttactaacataaagcaacaactgagtgagacacttaaggcctaccaaagacgtttcagtacagcttctggatgggttagaaacctgaacgacagtatccagcttactgctggtctagcaagaattatgactgatctctcgacggctagaggcgagttatgggatgactgacaaggtcgcccagtgcaaaacatcagcaatttcaatgagagagctcaggtgtttgttcgaaaagaggaagtgaggaaagagatgaagttgttaaggacttgctcaagaagtaaacccagcactctctcgacaagcacagtctcgacaaaggctgacaatctaggaggctctagtacaaagaggaaagattactctaaggaatcagccaaagataagaaaaaatagaaaaggcacgacaagtacatgccagtctacactatttataccgagcttaatgaaactccagaaaatatataactcgcacatgagcacaaggtcgcatttttcaaacctgagcccatgagtcatgcaagacacaaaagggattcaaattttttttgtaaatttcacaaggacatagggcatatgacaaatgaatgtcgtcaactgaaagaagagatagaaagcctatcttgcacggttactttcaacaatatgtgaagcgacaaggcaatggacaaaaccagccaaatctgcccaataacctaggcaaccaaagattacaacctcctcctcttgaaggagaggaaattttggttgtcacgggagggccacatctcgtaggagaaagtaacaattcccaaaatagatatgtcaacggaaattaagaatgagcactcagtca

SEQ ID NO: 254783 - DNA, 654 bp, Cannabis indica
aatcatattcaattgtcaatagatcaaataaataatttgtagcagataaattttgtaatcttctttcatttgtgtataaatctagtaacatgatatggtccatccaaatgagtgtgtatatgagcctatatgttcgcttttgggtctagatgcatatagaaaactcatttaattttgagaattaaaatggactatgttgctaaaattaaaagatcactttcatagtttttatttaggcccaactagtattgagcttattcaattaataacaattatttatttaagattaaattcttctcttttgggacttgtgtgagagttaggagccattagtattgggtacgacatactgaatacaatacaaccattcctcacatgaataaccctaattgtgaatgcacatttaccttatttaaataattgtattaggctaataatattagtttgacctaattaaaattgattagcaacataattaattctaaaatatatgaaatttatttttcatcatattattttgaaattaatttaagaaaaatacacttagtttaatgaaataaattcaagataaactatatgtttttttttttctgttattcaatttaataaagaaattaataattaagtagaatttttatagatacttaattattt

SEQ ID NO: 254784 - DNA, 448 bp, Cannabis indica
cttgaagtatttgaggtaaaaaactctacatttactcatttattgaccatacaagaatatttgtaggtctcattttcttatttttttagaatgaaatatttctcagtaaaattatcatatccctttaaatactcatttgattcttataatctcggtgtctatagaatgctcatgaatttctcataaattcttatgaagaaatatattactaaatcagaattttttttgtgtcaaaaattagtatttctatgatgtttattgtaaattatttttctcatatttcctatttaagttgtttcagtaaaattggaacatctctctgagtactgattcgtttctagcaatcctagtatcacttgaaatattattcaatttcccataagttttatggagaaatatttcatcaattcggagttatactatgtcaaaaagttatttttcttctgta

SEQ ID NO: 254785 - DNA, 780 bp, Cannabis indica
ggttaataaacaacccttcagcactcccaaactcccaactgagtctaaatggtgtagtctaattctataactgcggtttttataaataaccgcttttaaatgtcaattttcatagcgggtatttttacacctttaacttttcttttaataaaaatttgtgcaaaaacaacctctagaatctattggaacatctttaacatgaatgaaaaacttggcaaaagttgaacaaatgcattgcaatcactgtgtggccaaacaacaaacataacagttaaaacagctataatgcaacacattaacaactaaaataacaaaaaaaaaaaccttacttgttctcctggccgagaaggctatcaatctccactactctaagtggagctttaacatcaaatcccggattcaagaaaatggcccataacagatgaaatttttaaaaattatggaaaaacgaaaaagaaatgaaaaaaataaccttgataatatgatcaagttgattgttcccctttttagcctctgaaaaaggaatcttctcagcctcaacattgtttgatttcttctaaggaggatgacgaacaagtttcttaacaagggaaaacaaaaatcatcaccgtcgtcgataggacgtttacctttagatttgttgacccgatctttaacacccatttttcgagatttcttcaacaatagcgaaagtgaagaagagcaccgagtgactgccattatatatagaagcttataaaagaaaaaaaaaaagtaagggaaaattgtgagcagttgcaa

SEQ ID NO: 254786 - DNA, 522 bp, Cannabis indica
gtcgtggcatggaatagagcatgttgcggcctccctcacttcagcaagaaaaaaaaactttaaacctagttgcaaattttaaaggagacttgaaggtgacacttgggggaggccaaaaacacacgcgaagcatcccaattcactctcaagaatttttcttcttatttttttttactttcgaatgctatgtttattttcattatgagatgacaattatgaactaaatcactttttataagattgttatgtgaattacttgaatttcttttatggattaatgtaaaattttaatttcttcttctttgcttatttcaattctatgcaatttgatttaactttgcaattatttattgaacatctataattattttttatgaattcgaatcaaaactctgaaaagtgagatttgattatgctttgattattttggatgcaatttaatttagaacgaaagtatctaagttgattgtatgacttttatgagttgctatgttcattcttttccttgtgttttggctttat

SEQ ID NO: 254787 - DNA, 1398 bp, Cannabis indica
  modified_base (1380)..(1380): a, c, t, g, unknown or other
ttatttaatcacgtctaaaagatttaatacctgagtatcacaattgtaataatttagttacttttactgctaattaattaaataaataattttaggtactgttctatattataacataataattaagttgttaaaaaatataataattgagatactttcaaataaggtagaacatttgtactcaataacccaccaacctagggaacccaacctacccgaactcgaaaacccaaaaaaaaaatagcatggattttaaaaaaataaagggctagctcgagtaaaacccaggtactattcgagtcgagtttgtttttggaaaataaaaggttttcgaaacttgggtcacacccgtacccgtccgaaacccgctaataacccataataaatatatatgtatatgttttttacttttcttgcacaaaccctccaaagaaaaccctaaactaaaacactcatctttcaactcaaataacctatttcactttcaactcctgcctccaaggcttcccaaccccctcttcgttctcactttgtctcggtagccaaggcacacgcgcacgaggacgaccaccgacgacgaggaccaccgacctcagctcttatgtaacatccaaatcttcattattaatctgttttacacctatttatgtgcatataacaaccttgaggtgtagtgtatttgaattctaagtgtgatcacctaaatacgatagaaaaaatgtgtttggtgctcatttggtatactagtttatctatcaaaaaagcactttgctagaaattcttaaaacttagaaatttcaaaagatatttcttagatggttctcttagtgcttagaaatagtaggaaataagtttttgcacaaaggtgataatgctttgttcaagtcatggtgctccctactaatctacattcaaagttgtgagtaaatgtacatatatataagaaagttagaagaagaagatgcataaaaattatattatattatatatatatatataacaaaagaataatatatatacatatataaggaatgaaatatatatatatagtgtattatatgttgttgtaacatctatatagttaatcaatttttatactgttcttgtattatttatattttataatagaattgtaatatatcttgtttttttaataaactctctaataaatattaatcttgtattggtatttattgtctaatgattttattaaaaaaatgatgatgggacaattttttttaagttaaaatggtaagccctaccctgattaaacacccaaattcggtgaaaaacttgttgaaatacgtttagtataacccagacccggaaccctctaaaacccggtgtctaaatagggtgggtttcgtatgtgagtccatntacccagggtcggcccgt

SEQ ID NO: 254788 - DNA, 572 bp, Cannabis indica
cgcctaaaaatagtattaggggcacgatactgtcgccctcattagggcgactttgtcgcctctaataccctagaacgaatttttgcgtagacttttaggggcaaaattgtcacccctaatatccctaaaaaggcgtgtcaaacatttattgttgacttttaatggtcgccctaaagatttttaaattaaaaaaaaaaatttgataattttaaaaaaattggtatttaatttataaaatataaatataataataattataacttaaatatgaaataaaacttgtccatgttaacaaattagcagaaaaaaaatagattaaaaaactgacatataagtatattttgtttaaacgtgtcaatcaataacacgtttataacgtacttatgacacgttaaagtactaaaataactttaaataggtcactaacgggtcaatatcgtgttagccgtgtcaatccgaacacgacccaaacccatttaaagcaaatccaaactcactaactctgttgcaggttttaagtcgtgtcgtgtctgatccgttttgcaggcagctcatacgaagaaggctctccc

SEQ ID NO: 254789 - DNA, 687 bp, Cannabis indica
aatgcggcggaagcaaagttttttaagatactttctttttctaattgaattcctacttcagtgggagtttcctataggttattgtttttaaaaattaaggaaattaaatcaagttttccctttttacttttctttcattattttgggtaaagtaaaaattaggtgtaatttttccttataaataatagagtcattctattatttagggatacgaatcatattttctagagagctcttatgttataaaagaattgtaagggttatcttgagaattcttaataaatccacttttctagctccttgtgattttattaattctttaaagtaatacgagaaaaataggagtaggttgttacaataatcacagggtcgaacttctataaatcttagtgttcttagttggttaattacatataattattatctattattctcatcgttttaattgactcaacgtcgttggctaaaagcgatgttaatattttggttttttcattgatagcaaacagaacactatttatcgctttaattctctccaaacatggttgtaagtaccaaaaggtcccaaaccattaaaacaaatgatctgattcctatagaacctaatgtgcaaactcctattaataggagcgatccaatagtggcaaatccttatctgagtacccgtctacctccacgagttccatc

SEQ ID NO: 254790 - DNA, 682 bp, Cannabis indica
ttacatcttgtccaggcctcatatcttcatcttcttcatctggtgcatgaagtttgccattgataaacttcatcttgttcctggcaagtaaagccaccaccatcgaacgacgccaggaactgtaatctgctccagtaagaactttagggacaagattaacagaaggattgtcaccatgattcaagaaatacgggctgcgaggatcatcagtagagctgcgagtactctgatcaagaacagagaatcgatttgaatcaccattgttggtggtactgcaggtctgagttccacctcctctggccatgatcgaagatcgaacaacgagcggaagagacgaagagcacactcaatcgagtggctctgataccattttagcaattagaagatcaagagaaggaattgtgtattgaatcaatgaatgaattacaacagaatggacatttatatacagactcaagttaaggaactaacagagtacaatcggttaggaggttaggacaaactaactaactccaacaaaattaacatccccttaactaactatgacacgtgtacactacaccttaaactctaagactaagatgcaactttgactgaaataacactccagatttaagattggggacaatttcattatttttgtgtggtattcatgtgtttagggattttttgtgttcataaa

SEQ ID NO: 254791 - DNA, 819 bp, Cannabis indica
agttttggcattggagttgctctaagtaaaaaattagtgagttaattttattataatgacatagatgtaataatgcaataatattatgtctaattattaagtatgaatacactaatctcaaaggatgacatttatcactaatttatagcgagagtgtaaaagagagtataaaagagagtctccttagcacccctctatataaaatgttgtactagaatgttagatatttatatataaattttttcatgcaaaagtatttaaatgttagctttggtgagtcaagaagaaagtggtagttgcttagtttttagtataaaaataataatgttagtaatcctcttataaccaaaattttagtaatattataaaattgccttgtactcttgttattactataatattttccctacaatcatattatctttccaagaaactaacacttacaatttaattactttgaaaaatgctactcaatttgataaaatatatatgttcatttcgattcgaagggttcatttcttacttattttcaagtaatatacaacaataaataataaaaaaaacacatacatatttgagtcgttagtacttaacttaacaccaatacgatacatttattagtaagggtaaatggcggcaaaatctccaatactttagttttagtttcgctaaacccccacaacccaaatttctacgggtaaacccccaaaaccactactttgttagcaatttaccatttccgtccaaatttagctgttaagtgccaggttggcttgtccacgtggacacaatatacacgtggcacaattttattggtcc

SEQ ID NO: 254792 - DNA, 1218 bp, Cannabis indica
  modified_base (823)..(823): a, c, t, g, unknown or other
gacggccatatgcatctctaacactgcatgtattagagatgatagatcttctttaattgaataaaaataaatatcaatctatcatatttttatacataaaatataggtggcgtttggttaacacttttttaatccgttttttatttttaaaattagaaaagtgaaaatattttttaaaaacatgttctataaaactgtttttgcttttcaattttttaattgataatcaaaattttaaaacaaaaaaaattactttcaatagtttttttaaacaatttttttttcttaattaatattttggagtgcgacatgactcaaacccaaattctctcctacagcccttgtgctcaacccgacctctgaccccagatttgaatttgaccgcagacctagacccgacttaaataaaataaaaaaatgaaaataaaaataaattttacagaacacacttttgttttttgtttttaaaattaaataataaaagtggttacagaacgcttttttatttttcaaaaacaaaaagtttaaaaacaaaaattttactttcattttgtgattaaaaaattagaaaacaaaagtgttactaaacggcactataattttttaaccgtttaacaaaaataaagttttaattagtagcaacatggtgaaattagaaataaaattaaagtgggataattatatatttttatattatttaataaaattttaaattagatatagtaaaaatgtaaaatagtacataattgtattgaagtaataacttttatgaaataatgacattttattgtattcattgtactaaagtactttatacataganggttttttttttttatgaaacacaaagctttattgaaaaccaaaaggcttaacagcccaagttcatagtggcaacaaagggtgacacttcccttgaagaaaagaacttgaaactgctacaagaagcagcccaagcagcaaggttatgcgccccggagttcgatcgacgggggatccagtgatagtggcaacttggcatctgattaagaaggctgagagtgtcatcgaacagagcacgagctctccactccggcgagaaaccagcagccaagcccttcacaacctgctggcagtcagagaaaagagaggcattatgccaccccaactgcagaattctgcagcagccccaatggaacgcctttaattccgcagcgaatggagaggaagctttcctct

SEQ ID NO: 254793 - DNA, 733 bp, Cannabis indica
atctccaaattttcaagacaaagattaccacagcaagttctaggtcatgcgtagggtaattcttctcatatggtttcaattgtcgagaagcataggcaaccaccttgccattttgcatgaggacacctcctaatccagtacttgaagcatcagtgaataccacatatggttcctcattattaggaacagtgagaacaagcgccgaagttaatctttccttcaattctctgaaagcttcttaacaactgtcataccacataaactttacttcttttcttgttaactttgtcaaaggcatagaaatccgagagaaattcttcagaaagcgacgatagtagcttgccaacccaagaaaactttgaacttcagcattctttggtctttcgcactatagaataaagtctatctttgtaggatcaaaagtgataccatcttgagaaattacatggcccaagaacttgacttcagtcatccaaaattcacacttctctttcttagcgtataattgatgatctctcaatgtctttaataccattgtcaagtgttcagcatgatcctcacatgtcttagaatacactaagatatcatcaatgaataccaccacaaacttatctaagaaaggtctaaagactctattcatgagatccgtaaatggagcaagtgcgttcgttaacccaaatggcattaccaaaaactcaaagtgtccataacgtgtcctgaaagcagtcttagg

SEQ ID NO: 254794 - DNA, 678 bp, Cannabis indica
tctattgttgttttgagttgttttttttatgttctactagtgattatttatgaaaacatagtaattttgaaaacttttccgtgtgacagtagttttgtaaaaattaactcaaatttcaatatttttgtaaatttcttaagataattacaaaaaaatacatccaactaacttatttacaataatatttctgccacatcaacataaaatatcagattctaaaataattaataccaaaacttgatttttcttttttggaaaattcactttttcgtttttgttacttatgacaccaataaaataccaaatggttacaattggcgccaataatacacatgtaactagttacacatgttattaggtgcaaatataatcaattgattactatgacagtagaaattgagaaaaaataatgcaactgatatggtgggaccactatcaaagtttttacaattagattcatagacttgttaattagatactcatactcctaagatagtaacccagttttattgatggtaattggattacttactaggggtgtgcagaaagtcatccaatccaattctaaccgaccgatccaattctaaccgatccaatagaatcggatatccaatcataattggatcggatcggatgcaaattttaaaaatccaattggatcggatcggatattggatg

SEQ ID NO: 254795 - DNA, 1372 bp, Cannabis indica
gttggggtgatttttggttaccccaatttttgaattttctcaatatttaggatatttcatgctttattgatagaaaaacttttagttttaagtttaagtccccaaaagtgttttatcgagacacttaccagttctacgtgattatgacttaggaccactaatcgtcgagtaataattttcactcaggttggccgacgcacctaattgtggtgttaaggtgagattagtataacacacgcacatatgcacatgtttagcatacatgtttatgttttctaattagataatatattatgtaagagtggtattaatgtacatagagttgcacctggatatcaatgtgatatatgtttggcaatttaataaagtacgaattgatgctactacaccagtacgactagagtgttgagtatagattggtattatggttaattgtacttgtggtgtggattagtacgactagagtgctgaataattaagtgcttgatttttagagtctatttatttttatttattttgttaattaattcaatatgatttaaatggaaaaatgataataaatagatttgattggatagaaaaatatatttatatttttttattattaattaaagatttaaatggtgaaaataataaaattctctttcttcacataaaaaaagaactctaaaaatttcatttagtgtgacctcaatatattatatatatattttttaaggacttcaatatataattttatacaaaaataaaataaaataaaagaatacacaaacacaaaaacaaagtcaaaaatgtcacttcaaaataaaaaaggaaaagtcagaattgtaaaggtaaataatccagtgtatctccaacctacgaaaccaaatataattaattgatgtgtcatttttttattcgccaattaacacccatatgggccatatccatgagatcttttttggtggtgctatgaaagaaacaccctatataaaactaagcttgtggggatgttgcttgaatgtgagtttctaatacttactagaaagttatttgtacttatacacatatctttagatcttatgttttgttattgtaagctgattaacattaatttatcttatctttcaaaaaaaattgctataaaacatgatagagattattgctgctactgttatttggttactcattattatttttccagggggttatatattccaatagacactagtacaaatggaagatcttattttcatatattaaaaaaaaaaaatatcattggttggtgaatatcattcaacccaaaatcatatttagatttttgtgggaaatcttaattgaaaaaccgtgtttttgcaaatgtcagttgtatataagaaaatataaaaac

SEQ ID NO: 254796 - DNA, 554 bp, Cannabis indica
tggagtgggattagcttagggtcgttatggctcgtataggtttcgttgagagatggattaatctaattatggcatgtgctcttcggtcagttataatgttattcatggaagccatactatgggtccaatcatcttcgagagtattcgacagggtgaccctctttcgacatatcttttcatcatctgtgccgaaagtctttcttcacttatcaagaagtttgaatctcaacgacatttacaaggatgcaaggtggctcatggggcaccacttatcactcatatgttcttttcagacgatagctatttgttttgtcaatcaactactagtgctgccggcagtgtctcaaacttgctcaattaatttgaaactgcatctggactaaaggtgaacttttctaagtctactgtgttcttcagtcctaatacgtgtcctgcaacttgtatccagatttgtgatattctccatatgcttgaagcctctgaaggaagcctctatctgggacttccaaacattattgggagaaacaaaaaatgttgtactaggatttctaaag

SEQ ID NO: 254797 - DNA, 1324 bp, Cannabis indica
ttttgtaaaaaaaatcgtgtaacaataaattataaacttttgcccaaaattcagtatttttgtaaaaaccaaaaaagaaaatgtatgtctagattctctctcactggcccattaatggtttatttctcggggtaagttgaaaaataccacttttattaatcaattaattaaatttacctttaattttatatttaattgaaacatacctctttttatatgtatggtactcaaaataccctgacataagaaagtcacatggagagtatcttgaagtgacagaggcaaaattagtacaatatttaaaaaagaggtaaaaatgataaattttagaaaagagagtaaaaatacaagaggacaatataaaaagggtatagagtgtaatttcctcttatctctcccttaaagaagcccacaaaatggcaaactaaattttgtaaacacccacccacacttttatatatgttttttttttttttgaatttaatatgtgttatcgataaatatttaagacaaattgaagttttagaataaatatatttataaacattttgagaattattgttaaatacactttaatataaaatattattttgaacaataaatagaaaaatcaattaatggtactattaactgctgtattaaaattagtttctactaaaaattcgtttaaattattgaaaaatacaaaagtgtacactgccatagccattcaaacaaaataaaagagtatataaatttgaaaaattataatattgtatacgttaattaattttattataaaatatgtgcataataaattaattacatttaaacatataatatattcattggtaaaaatttatttttatttttctatactaagtatataatagaaaaaaaatgattaaatttaaatatttattttattaataaattgataataatcaataattaatcattttaaataataaacatatattgatattagggctaagatgtaaaatgactctaaatctaacaattaagttaataaatgtctttttttttatataataaattaacaaaatgtccttatgaggaaattacaattataaccttgaataattaagtatttggtataattattttgcacaatagtatatcgtttttatgtgcaaaaagaaaataaaaaaaaagaaaaggtggtatattagtttaagattgtggtacattattttaatgtactatggtatataatgaataaccacttgaggctagctcaagtggccatagggggtgcgtgtgtattggagggtcctgggttcgagtcccaagttatgctgatgtaatatataaaacgcttaaa

SEQ ID NO: 254798 - DNA, 616 bp, Cannabis indica
gttaagcaactcgactagccagcaatgcgttcctcaataacactctcaatgaaaccgtttatatgtgtcaaccaccacggatttatagactctgcacacccaactacacagtttgcctgttacataaagcaattttacggcctgaaacaggccccccgagcttgaaatacaaagctcaaagattgtttagtgcagtggggattcacaccatcaaaggccgataactcattgtttgtatatagttcaggttcctctctaatcatcctccttgtctatgttgacgatatattagttacaggtcccaatgctacactaattgacaagcttacaactgatctcaacacacaatttttacttaaagacctcggtgatgtgcattactttctgggcgttgagattttcagggacgtcctctggcatgtatctctctcagacgaaatatattactgacttgcttaagaaactcaacatggaaggtgctaaaagctctcccaatccttccagtgcagccaccaaattatccctcacagatggcgaaccattctcagatgttactctgtataggagtactgttggagctctgcattaccttactctaaccagacctgatgtggca

SEQ ID NO: 254799 - DNA, 1187 bp, Cannabis indica
ctttggtgatgcacctcaggagatgcatagaaaaactccatttgtacattttcccatctacgattaggtacctagcaacttttcttctttgtttgctagccttgtttttatcttctggcaaggcttcagtttggaggcaagttgcaataggtccatgttggtgagtcatccagcatgttgacctcttctgggaaaacaatgctaggttcttctaggaactagatgggcactaggtttgctttgttaactaaggtactgcttgctaggcgggcaagtgcatttactatagcattctgttctctgagcatctgcttgatcgtgtagcctttgagctgacttagaaaatctttaattttactcaagtaggccaccattttatcaccttgagctatatattcacctagaacttgattcacaactagttgagaagcgctgaatatgcccaggtggtcaacccgcacttcatgcgccaacttgaggccaattattagggctttgtatttaccctcgttgtttgaggccttgatgccgaatttgatttctctatgtcattttttgcccttaagtgttgtaagggcaatgcatgcactggacaattagttagtgcaacttccatcaatatggagtttctatcttagatcttcggaattttgatgttgctattgctctcacttcttctctggctcttgctgttctcccgagtcttgacggatctcaagagttgagttggtgcactcagccacaaattctgcaaggtcttcaccttttatgcctgtccttggttggtatttgatctcaaaatggccaagcttaatggctcatttgagtagtcggcctgatgcttcaggtttctgcaaaacctgcctcagtggttgattggtgtacacctttatggggtgtgctggaagtagggccttagctttttggaagccaagagaaagttgtatgtgagcttctccatgagtgggtatcaactttctgcgtctactagccatttgctgatgtagtatcgggaagctatacaccaccttcttctcttgtgaggacaacagtcacagtgtgctctgtgtatgctaggtcatgtctagctcttcattgtctaggggtttagcaacaccagtggttgggccaattgcttcttcagctcctaaaaatgcatcttcacattcctctacccgctcgaatta

SEQ ID NO: 254800 - DNA, 975 bp, Cannabis indica
acaacaacaactcacagattaattatgaaaataatattctaaattaaatataagaactaataacataaagatcatttactcattgattgttccccaagtatgttcaatgctgtaagactggagtcctacaccaaattctctaacttctagtaccttgtagtagcttggagaggttaattgtatactaagaataaaatttaagtgtgaaatggttgagagtgaatgagagaaaatgaggttttgagagaagagagtgaagagagaaagagagcggtagattgagagagtgaggagagtatacatgggcattttgggtactcaacataatgtatactcattctcccaatatatattaacattggcttttgtttttttttttttttttttattttttttttttattgtatgcataaaaattcaaatttccattgtccatttattaaatcatgttcttcgaatttaatatctacttgggttttaaataaagttttgtaaaccgcccaactcgaacaactcgtccaaaccaaaccaaatatctcaacgaaaaatgcaaatcgaaaaacctgacgaaaatataatctgcctaatctttatattgggtaaataaaaataataccaacccaaactcacctgactaacctgatttataatataattaatatatatttataaaaaaaactaaaaaattcaatttattatatttttttcgcggtggttgatttgaattttcaattcaatttatatatttgtcttattatcagtaaaatataatatttaaatgtgaaaaaaatattagtgtttggtttgaacaagttaactttactaaaatgatcaatttattaggtcaattgatattttttttttttgaattaggcgggttgtacttaattttttataaactaatttttactttaaaatgaataaaatataatataaaccgatcagatcgaccgctgatatctactaaatcatgtt

SEQ ID NO: 254801 - DNA, 2066 bp, Cannabis indica
ttctcatataacctattttttcctttcctctttttcatcatcagcatcatcttcgttgtaactccaatgtacagatcagaagaaccaacatgatcccccaactgtataaatgaacctcaaaaaaatagcacaaaatatcataattactatcttcaggtgcataatttttcaaaaagtgcagcataaatactagctgagatctaaaaccaattatttaagcatacctcatcattgatatcattcaaaattctttgcccattaagaacagcctgttgcccttctaatttcgccgtcagccaagtttaatgatcagaacagttccttttaacagaaactgccttgtatcgtgggccaactggtgtcactccattgaataatgccaaatggaattgaatgtttccattgcatgctcattaccagtaccgaacgaaccagaatgtataaggatcaagaatatagttaacaaaacaacaatattagcaatagtgaaagtatggggttctcaatgaaagagagagaaagaaaaaaaaagattaattaattggaagagattaaaaattatttatttaaataattattatttaatttaagaatattatttaaaaaataattttatgaataatattattaactatttatatacactcatcaatttattataattacattaaatatctatattataattacattaaatatctatagctataaaaataagtatattatagagacaaaattaaggtgcttactataaacattttttatatagatatatataataagtgtacatttttatattttatttttttaacactctttttttcctcttacaaaaaaattaaggtactcgttttatatttttctatcttttaaatgattaataaaagtaatatatatatatatatatatatttttttgtttggatattttgtaatttatttagagttaatctatgaatgatttatatattttaacaggattgatgtcttaaaaaaaaataatatataaaataattcccttaattaaaatctaataaatatgtatatataggacctatatataattataggaaatgtacttctacttaagaacgagattcattgttgttttcaaattcttatagcacttatcaaattaactaaaaaacacatgctcaccacgtgacgacaaccgagtttggtaggagtttgttgtgtgtgtacattaccattaccatatatatagaacattttaatttgataatagtctattaatataagttaaattataacacaaatccattatattagtgctacttggaattaatggcacgactagtgcacatgtcaaatatttaatttttagtgaatcggatctgaatttgtaaatgatgtacaacgacaatgtattaattaattaataataaaagtattaattaatcataactaataacgattaaacaaatgacattgacctaaatttgccagccaagttaccattaattcctattatattaacccttgtattatttatagagaagagtaattatcaatgtgacattagaattttaaaaataataataaataaaaatacgaacaaaagaaatcagaaaagagttcggccatctccacaaactatgatgatcccacaaaataaattaagatttggacgtgcatttgtgatgatcccacaaaaaatatgaggctaataatttagatatttatctataacaaagacagggactatatatatatattatttttttttattaagaaaaacaaacaaataaagtaagaagggaaagaagaggtttaaattttaggattttttttcagttttacccgaaaaaaataataataatataaaaatatttttcaattagccaaataaataaagtgattatttcacaaatatacaaaaataacaaaaaattacaaaattacagttttacggaattttaaatattttttatgattttttttttattttatttacagaaaatgttattttgatgtaaattaaatgttatttttatttagttttttttttttgctgttttcgtgttgtttctataaaaaattgtaaaa

SEQ ID NO: 254802 - DNA, 752 bp, Cannabis indica
ccacctaattaaaaattaaaaaataagcttaacttgtctaatatttttgttaatttggtcgagttaatttgtctaaactaattttttattattattagtttaaggttttcaaatattgaaattgaaaaataaatatataacatatatatttcaaatttaaaatgtcatagactaaattaaaattaaacaccattgattgaattaacatcaaactatcaaacaaatattcactttaagtaataaaaaatatacatggaaaaagtacattaatatagtctaaattttaactttaatatccaactacaatcaaaattattaatccaatttcaaattaaacactacaagttataaattttaaattacaaatagtttaatgattaaaaataatttatataatatatcataaataatcttgataaaaattataattacctctttgtcactcattaatactattcattagtaaaaaaaaatttatatttataaaatattaaaattgtattgtcattagacacgagtggtgcctaacacaatctaaacgtgtcatcttataattagttagcgatactccctaaaaattattacattaaatggaacttgatacttaattacaccaatgtacctagcacccttctcagtattataccgctattagtgcaattaagtatcaagtaagaaatattgctaaccaatcgtgaagtagaggtgttcgcggtgtgggtggtgcggtttttgactatttttctaaccaa

SEQ ID NO: 254803 - DNA, 1014 bp, Cannabis indica
acttggtttttgttcatcaaagtctgatcatagtctttttatcaagcatacttcatcctctgtcactctaatattggtgtatgttgatgatataatcatcacgggcagtgattccacacttatctcatctctaatcagtgacctgcactccaaattctccctcaaacaccttggtactcttcattactttcttggtatcgaagtgcaaactactactgcaggccttcacttatctcagggaaaatacattaaagacttactgtctagagctcaaatggagggagccaaaccagttccaacacctatgatcagcactcaaaaactgtctgcttatgaaggagaacctgttgctaatccccaactgtatcgctccattgttggtgctctacagtatttgacaattacacggcctgagatctcctatagtgtcaataaagtttgccaatatatggcaaaccctctctcatctcactggaatgccgttaaacgcattctacgatacttaagtggcactatcacacatggcctgctgtttaaacctttgactgaacttgaagtctctgctttcagtgatgccgattgggccagtgaccctgacgacagacgctctacatctggtttctcgatcttttttgggcaaaatttttatttgcttggcaatgcaagaagcagcatattgtctcccggtcaagcactgaagttgaacaccgaagtgttgctcaggcagtttctgaactcacttggcttaattctctgtttacagagctttgagttcccttcgctcgcacaccagttttatggtgtgacaacctgagtattgttctattgacggccaatcctgttcttcatgcccgaacgaagcacattgagttagatttctattttgtccgagagaagatatcacagcaacttgttcgagttaatcatatccctgcacttgacctgattgctgatggtttcactaaagctttatctagctcaagatttggtgttttttgtaacaaacttggtctt

SEQ ID NO: 254804 - DNA, 1143 bp, Cannabis indica
agctagcctaaattcttttgacacaaattaacaatatattaattattattactattattggaaattaatcaagtagtccaatattttattatcacaccaccacattaattggagtacttcactttaatttggaataattataattaactaaagatatataataataagttcccatttagacacatactttttattattatttagtcaaattaaccaagataagaataattaaaatgaacctaatcttaattggaaggattaaaaggcaacttaattatcccttattaaataaataaaaactaagagccatacaagactaagcaaggaatcccaagaaatctacaatggtgaagaatctgatttggtagaccaaaatattctattaatatttctataatacttttttgtatttaattaaataaatcttttaaaaatatatattatttttttattattaattttatttttaatgggggttgttggtctttgttgaacaatccaaaatttgcccaatcaattagaacaatgagaaatttttcatgggaagtgaattggcaactgaggtgtaccaccactatacacaaacacatattaattttgtatttatatacttatatttattattaattaattaattaattatcaaataaacttaaatgttgttccacaatatcggcccacttactcctacgtcacaaaattaagaaattaaaaaaataaataaataagacataaacaatagccaagtcactttcacttttctttttattaaaatgatttttgtttaaattaattatatttattttttgttggtaatatgtgacatagcattaagttagtgacttagtgcaaagacacttgtacaatgtatataatatagttacaaccttggcttggtcatactatagaaacttattgaatctaaaaaatgaataataaagaaatatatatagaaaaaaaaaaaatgaaaagtcaaactactacaaatgaactatatatatattttctatattttattgtatagtttcttataaaaatgttgtaccttgtttaattagtagaaaattgattttttattttagttatatttgaaaaccaaacttctctccctaatcaacaacaaaatatatagtataagtacat

SEQ ID NO: 254805 - DNA, 764 bp, Cannabis indica
aaaatttgtcccccccaaggcctattccaatttttccttaacatgaataatttctttattaataataataataaaaaaaaaaaagaaaaaattaaaagaaaaaggaaaaaagatataaaagttctgtcatgataagggtatatatatgtatataatactttggtgtatacatttagctcatgttcagtacttttccaagagtttgaacaccatttagatctactaccgaaaagaatactagtaagctcagagagaaaaaaagggtggaaaagaaaaggagaaaaagaaaaaagatagaaaaagaaaggatgtgaggcacaacatgcatatatatttttgagtttaatttaccatatgaaatctaggtatttctttctcttatatttattcagtggtcaatgtgagttgtcttcctatatatggaggtaattttttaccaatgtagtttgccattgaaactgctgcttttatttaagtactagttgtgcttagactctcttcgtcttgcgattgactatatgagacccgattcttaattggacacttataagaaggtgctagacactactactactgataagctttagcatttatcttttattgtaataagttagttggccttaagtaagatattgaagaaataacctgtattgggataattaaaatatatatatatatatattgatatgcatacatattatatacaacccacattataataaagcaaaagattatatatatgaagggcaccaaagtattcacat

SEQ ID NO: 254806 - DNA, 521 bp, Cannabis indica
tggaaaaagaaattgtatttattggagagaggtcagttctctagaagaaatcttatttaaaatcagacttcgtaggtaacctcacaatgatcatatgatcatttgtgtcggtaccgaggtaataaaagtcccctgtacacttcttcctcgcaggaattaccttgacctaatggaagtaagaaaattcagggggagtggggctctcccatcctaatatatggaacagaacctttaagcttacaagaattctgtatgattacaaaactccttgaaatagtccctcaggggaaggaccgccccagccttgatatgttcaaggctccaagcacctattttcgacaaataactagtgcttgccccctacattccgcacgaattactctttctggtggaaagcaattgaattacccaggagcaacagacctaatgcaacattcatggctttgttcaataccactggattttagtatgcccctaacatacgctctaattgacctaaccttggattcaataagttcagc

SEQ ID NO: 254807 - DNA, 597 bp, Cannabis indica
aactcaaggtgagtttttctttttatcttcatctttttcttttcttttctttttttttatcaaattgatttatatttatttatttatttgttttcaaaactacaattgttctaccgaattaccatatgtttttctttattagtactgttttggttatggtaactaagaatatttacaaattacatcattctttacatttgccagatggaagagttggtcctactttcaatcaaaatatatcaaacttgtttgatttaggccaattgcattgcatcatcaaccattaagagtcattgcattgtatttcgagtggtctccaattgattcatttttaatccgacggctgagaattgtttggtttgggggtctgtgtgggcccatttggactgtttaattttgtctctttctccaaacttactcactatttgtatatatatctctgtttctaagtctctctgttatatttgcagacagggacggacacactaataagattgtgggggttatagccccaactacaaaaaaagttagtgtgaaaaaaaattaaatatcttctatttagttaaataattataacaaaatagtaaaaagccccca

SEQ ID NO: 254808 - DNA, 546 bp, Cannabis indica
ctgaacgaaaagtctcgtgctggtgccctaatcacatattaaaactaggtagatcacatgttcgaaaccctaattcgggaaacccaaacctataactctaggctctgctatattcactagggattaccctaactcatgaaatagggaaacacccatctaaggcactgaaatggatgagaattgagaaaatggcacattcggggaaccttgccagaaccaatttacaggttttccaggtattggtaaaccagtaaactggtttatactagttctccccaaaaatgtcatttcttgctcaacactccaccaaatgcaaccaaactttccagagtacctaaacaatgtatacacaacataatccaaccagaaaatcccagaaaaagccaatgaatttaaatatgccattaaagatcaaagttttggtttctaagttcaaacttgcataaatccaatcccatacaccaaaactagctgcaagaagctatattcaactaaaattaagcttagaattcaaattacgataaaacctaaccctaacagccccta

SEQ ID NO: 254809 - DNA, 803 bp, Cannabis indica
cattgaccggtcccatttctgagttttccaatagcattgttgcctcttctggtggtagcagccatatgaaagtacctgctatttttatcaccctccttgagccaaaactgtttggccctctgcttccagaaggtctcccgttggtccataatccgagagagttggttctttagctcaccaaaacgttgcacagaaagtgcatctctcttgccccttaaactggttaattcttgtttgcacttcttaatcctcactttgaaagagcccgttatatccttgccccattcggttaacttatcagcacaagcttgaatttttttcccaatgtcatcattattcatagaatcccaacaatcttttatcagttctacacatagaggctccttaagccatgcattctcaaagcggaatctacgaggataaaaattaaaggattctataacaggttcaaggaaaattggggagtgatcagaagaggaagtttcaagattacttagcttagcttggggaaatagtcgaaaccaatccgaggagatgagtgctctgtctagtcgaacctcgacccaattcgaagtccctctgcctctttcccaggtgaacgggtaaccgagaagctccatatccgtcaaatcacagtcgtgtaaggcttgcaggaagccttcgatcaaagaacggggataaggctgaccaccgcgcttgtcttgctgagaaaccacattgttgagatcgcctaggatgcaccacggcaagcttgaggataatttcaaagtacgaagaaggtcccaggtttcttgtcgatgggt

SEQ ID NO: 254810 - DNA, 1283 bp, Cannabis indica
atcttccatacaaataacaaagtaaatagtattactttgttatatatatatattatatatatatatatatatataataataaaaaaatcacttcatactctatcttggagaatacatgcatctttaatcacacttcctaaatgtaatccttaagaaaacgtttggtataagggattcaaaataatctgattaagaaaaatattatgaaggagaatataattatctgtaaacttattactgtgtttagttattcatggtaatatttaattagactattgttaattaaattatagtgtttgattgagcacataaatcttatatactatttagaatagtaaaataaaattattatagcgtgaataagtataaaataaatgttatatgaattttttatagacgtcgatattttttctttcaaaatcaataattttttttttaggttttatttaaatttattatttgacttttatttaataaaaattctcatcaaatgtttaaataaaatgtttgaattctatttttttatgaagggattaacattacacatttttagggtagttagaatattacagtaaaagtattaaatgacttaaaaaaatctaaaactttataacaaatagggtaatcattgagattagttttcctctcctcacattaatccattcaaaataacccgaaactaaattaaagaatgtgtattgaataaataagttctaaccatataaaaaaataactctagccattagaatttataaaacatgaggatagtatattgcatacaatttaaaacactatgaataaaaaaaaatataataaaaaaaacatatgtgattatcatattgacataattgagaaataatataaaaattagattgtgcaatactaacttagtaagagtatcttcaacgagactgcatttcatcttttgtcgctctactttgttgcaacgacattgcaaacatcagaccattttgtcatgcgtgctacagtgtgcacaatatatatggcatacactatagcatacacgatatttaagagtgttcatccaattcgacatgcacaattttactcatagtgcattcgattcgcactaagtgcagatttcatattttagatctaattcaatccgcatattcactcaaatccaatctacaaaagtacgaatttgatcggttattttagattagttactttttaatattaaattatttaatattcattaaaaactatattttttcacgttactaacaaaaaaaataaaataaattattgttgttttatgt

SEQ ID NO: 254811 - DNA, 1452 bp, Cannabis indica
cacagatcatcacctattcaaagaaaattccaagaaaccctaacatattgggtaattaatttatgaatttggcccgtgttcgtgcaattgtgatcttactgaaacatacatatttcaccgaagacaagggcatcctgagtttgggtctaacatcctcaataatcccaatgggacagcttaattcaatcctaatttccaaacataatcttaagctacataattttttactttttaaaaataaaaattccaacccaaattagatctattttcttgatcgacagtaacgtttagctaagtaaaccagaaagaaagagagacgagaaagaagaaaactgtgtattcattaaatgtcaatggaaaaacaggggagagagctatatatagttgctctgtatattgagatacaacaatggacactaactgattctaactgacacgataacaactttaacaaactttcctaactaactcaagacagcttaacaactaattcttctaatactccccctcaagatggatggtatatatttaccaatccaatcttgtcttttaagtgtcttgaactggttaggaaatagagccttagttagaatgtctgcaagttgttctctcgatgaaacatgggcagttttgacaattccttgcagaaccttttctcttatacaatctatttcaatatattttctcctctcatgaaagactgggttaactgcaatatgttgtgcaattttattgttacagtacattatagctggtcctctgtgttcaacctttaatttcttgagtagagatagcaaccaaaccaattcacttgtagtgtttgccattgccctgaattcagcttcagctgaagatctagaaattgtttgttgttttttacttttccaggatatgattgagctgccaaggaagatacaaaacccacttgtagatcttctagtatctacacaagcagcccaatctgcattagtgaaggcccttagttgaatttctgatgcagcagacagaaaaattccttgtccaggagtgaacttcacatattttagaactctttgggcagcttgaagatgcttggctttaggcatggctagaaattgactcagtttattaactgagtatgctaagtcaagccttgtaattgtaagatactgtaccttcccaatcattctcctgtataatgtagggatcagcaagtatgtcattttcatcttgtgacaattttaaatttggctccataggtgtactaactagtttgcttccaagataactaaggtcctcaagttgttgaagagcataagccctttgagacacaaaaatcccgttgttagaccttgccacctccaaaccaagaaagtactctaaatctccaaagccttttagcttaaacttgttatgtaacctggttttcaaaactgccagctctgcgatgttgttacttgctagtataatatc

SEQ ID NO: 254812 - DNA, 995 bp, Cannabis indica
atcctggtaaaatatttccaacatttaggtcctagtaaaatatattcaaatagctatgtagtagaaatgtattttttttttttttacctttaatttaaattcatgcatgtcggccaacctaagtggagaaatattctcgatgatctcggctctatgtcgcaacaacggtaaaccaatgagtgtctatcccaaaacactacttaatattcacataagacaatataaggttttttaccaaatctcgtgatataaataaccctaaaattaaacttatattttggctctaaaacataaaccatattgtagagctcattgcaagcttaaaagaggtatatcaaatgtctaaaacggacacccgagtaaaaagttatggccaaatacgattttatcctattgacataacaaaacggttagcaatttcgtcgcagggacaaaaaaccaattttcaacttctcaaaaccccaccaaaatctaactaattgattccaaacttcacaaaatacttatataacatccatacaagaattccaacataacagaattcaaaatcatgtccttaaacaaaaagtggcattaaatataatcgtttcatattttattaatttaatatgaaaatatctgatcttgcaataaaaattaatcaaattttaaaataaccaaaatagtaagtttgttgtgaaatcaattttttcaaatttgaagcttactaacatctaaaaataatttaaattaataataaaattaataaaaattaattttaatctgataattagatttttatttgaaaaataagattctacacaaaattctaccaaaatttaaattttatttcattaaaaaataatttttaaaagttaaaaaaatgaaaaattgaacaaaataggggagtatgcatttcatactccccgcatgcatactaggggtgaactttcgaggtcctaggttgcacgcagcctcccataggcatgtttcttgatcaggggtggtaacactcg

SEQ ID NO: 254813 - DNA, 877 bp, Cannabis indica
agctatttacttgcatttctcttatgcatacggtaatgtgataaaataaatttgacacacattttgtaattatatttcaatgcattatagtaaattaagatataaattaacataaaatataattatcattaatgataatcatacattaaatatattttttaaaaattaatagtaatattataattaaaaaaagtgttttaaagcaagtcattatactaaaatgacaataatgtcaaataaaataagtgcattaaatattatattttgtgctaaatttaattaaaactttagcatatatcaaacttaatttaaatttttacacaaagggaattttataaatataaaaaaaaaaaaaaaatgcacaacttgtttgggactcaatagagatgttcttatatattatatcttacattttgttgctaaacccttcaagtctcaactatcattctactagtatttaacttttcaagttcaaactttagtagtaaaatcttttaaattattgaactattaataaatttaagatgttatctattttttacaattaattgataacataaattacttatgtgtgtacttttgtacacgtgatacatttatattagtatgtcttaatatttatttaaaaaattattttaaaatttataaatattttttaatttctaaatattttattttttatttttaaaattttatttaattttaaataaattttgaaagggaaatttgattttctatacttaaaaatgttcaattttttttttaaaccaattacattttacactacaaaaaatatgacacttttttcaaaaccccaaaaataccccccttatctactttgtctctctctctcggaccgaacaaaaaaaaaaagtgc

SEQ ID NO: 254814 - DNA, 893 bp, Cannabis indica
aatagatttgatatttataggatcaaattaaaatatgacatttgtaaaagaaagataaattgtaaataaatggcaaaattgaaacttgtgggctccacttatatggtcggccacttaagtcaattttaagctattatttgatcttttttaattccatacaatttaaaagtcctaaacccgtagaaagaaatccctataaaatagataaatgatagcctcttaatttaataacatacatcagactattctgccagataactgaaaataagagcctctcctcttggatttcgaattcctctctccttcttccatagaattttgagccctatagtgaagagtaccttccctacacaatttaagtcaattctcaatcatagtgtggaagattgtgaaaaatttcatcatctaaggagatccaggttcagatcttcgtaatactttgtgatagaaagaacaagggttagagatctgaatggaaggagtcataatattccgctgacaccaatgtaagagcatcaacaatggagagctataaatgtggtgtattgccattttttagaacattttgttaaaagttaactccaatggtgatgtaaaatttgtgtcaaatttggcctaagctaaaaattgtgccaaatttagcacaaaagatagcatgtgccaaattttaacccacaataaatgtcacatttttaattacctatttgccactaattaatactattcattaataaaaaaacatttttatatttataaattattaaaatagtataaataaagttaattatttgtatattttcaatgagtataaatggtattattgacttttatagctaatttgcaccttgtgcattggagcacaaatacaaaaattgggccaaatataattttat

SEQ ID NO: 254815 - DNA, 675 bp, Cannabis indica
cgattttctttttcaaataaaaggaaattacgattaaaggaaaaactaaaagaaattatttcaacataatacctcgagtcccaaaaaccaaataaaaccctaacaatggagcgagaaaaaaacagagggttggaaatggatggagagactcagattcgccttttctcagacaaaaaaacaaggagggagatgagaagaagctaccggtggctgaaaaggaagccggactaccgctcggggaaaaggactgaaccatccatttttccggcggagaatccgaatcgaccagccaagcaactaaatcttcttcctccgtctgatacatacaaaattatcatcactgtctcacaattaaggtgcgtttggttggaagtaacacagagatttagcatttagggcttataaataagcctcaacaaatgcgaagcatagaaaatcaaatttccccaaaaataaataaataaataaataaaaacagctttgtgagaaagcaacaggctcagatttaccattctttccagacaacgaaagagaaagtgccgctaccaatgccgggtcgacccggtaagcaactggatctttccctcagttgcctgattttcaagcgtcaaaacatcatcaccgcctctgagctccggagatagatcgatatttatatctatctatctatatata

SEQ ID NO: 254816 - DNA, 530 bp, Cannabis indica
ctacatggtcatctccacctgtaggctgtttgaaattaaatgttgatgcagcaatagataatttttctcagacgattggaataggagccattataagggattcgaatggttccatagttacttgtctttctaaaccattaatgggtaattttaattattatttagtgattttttaagaggaactccccttcaatatatatactatatatatttttatatataattttattatattctcaatatcttcattattattattattattattattattattattattagcatgagttaataatttgtcttgttaatttattttttcttagttctttaagagttaatgttattttattggtattatttgtaggttgtttttctgctgttcaagcagagttggctttacttgtagcattggattggactgaactgtgggtctttcttcacattttgttgaatctgattgtttagcagttgtaaatgcgtcctcaactgtatagtcccatacctacacagtctcagaatcatcccac

SEQ ID NO: 254817 - DNA, 773 bp, Cannabis indica
tcattgtacatatcataatgtctgatggtaattatgatgatttctcacatggttttatgatgactcataagtggcgtgagaccattgacgcttttataaatgtggaagcatttgggataggcggaccaggtagaacaccatcaaatcaataccattctcaataattgtaaaatataaaagtgtgcacatagttcgttcctactacatgtgcataattaattcattggctgtcctatatttctcttctttaaattgagtgtttgtaataagaatacagaaaccactttcatttctaatgcaatgttaatcatattgatattggatttggacaggttaaacttggtttctcttcatactttatttgtatcaattgtttcattctgcatatgattaataatttggataatgttagggaaagtggaatgaaatagtgaaacaactgatttttcttagaaaggtcaacaacttttagatgctgcatcattttttttttacttttattactaaaattgcagatttagtttgtcaatctgggatgactgcttctcctgtcaacttaaaaggtattttatttctttttacagtattttcattgacaattcttcaattgccatgtgttaaagaatttattacatttgaatggtttgtttactaatacttctgaaaaataaaagatttttaatttttttttcttctaatagcggctatctaagggttatttatgagaaatgaatcataaagttttgaaattgactttttgtggaaatctgtat

SEQ ID NO: 254818 - DNA, 766 bp, Cannabis indica
cttttctatcccaacatggagtccatttccaacatccttgcccccatgatcatgagcaaaacggtcgtgctgaaagaaagcacccacatattacagaaacaggattcacattgcttgcacaaagtggtttgtctatgcattactgctggcttaccttttaaaatgttgtctatgtaattaacagacttccaaccaagatcattggagacatttctccatatgaatgtctgtttcacaacatacttgattacaaaatgctcaagctttttggatgtgcatgctatccacatttaaggctatacaattctcataaactctccttaagatctgagaagtgtatctttgttggctactctttgcatcacaaaggatacttgtgtgaaaatcaagctggccgaatgtatatagcacgaaatgttactttcaatgaggaagactttccagcctctcaaacaatctccccatatcaggtacataatcaattattaccttatttgccctctgcatcttttaatacacctatgtttcccactgaccacatctctcatgttgtccgtgatgctgaggcaattcatgctcatgattccagaccacctactcgagcctcgagttctgatgttgtccctgatgctggtcacactgctgcaacaagatctgctgcaactaccactgcccatattatgcagcaatcaaacttagcaaatgccaccccacctattccccccatttaatcttgactttactactccaactcacaaatttaacc

SEQ ID NO: 254819 - DNA, 2137 bp, Cannabis indica
ggttagcaaactatctcgagattctaattgttgtgtaattttctataaatttcattgcccttttcaagaccggagttcggggaagacgattgaaagtgttaagattattaacggtctctactattttgaagataagaattttaataatgaaattgctcaagggtttagtagtatcatttctctttttgttcatgatcaaataatggtttggcattatagactagccatcctagtttttcttatttaaaacatttgtcacgttagtgaataacttaccttgtcacgttatatgcataatgcatgtgcaatttgggagttgtaaaaataatatggcattacacactacacgcacgtgagaagtttactagcatgctctacgaacaaaaatatgaagtttttctagtgttcatatcagcttttctgtcaaggtggcactaacctggcgaagcttttcaaatgactgcacattgttttcccttctttgcatctaaaagaaaaacaaacaaaggtactcatcaacaaaaagaaaaacatatgcacttatttcacgaattatatttaaacaaagaatatatcttcatgagtgatagtattatgaaagaagagaaatctatcacccacccttcttgtgtgaagtctgtgagccttttcccttggcctaaagacattatacggattagtgtcattaacaggtggaggaggctgtacaaaaaatatgattgtgatcattagttggcaaatcggctatcacattcacattgtttattctgttaaaatcttccatgaaagcattaatcaataattgaggaaaaaaataagcagctaaaataagagaaaagagaaaggatggattcttattatgtttctaaaataagaactagatttgaaaatgaactataaattcctccttgttttagtcttttcagcaagatggatttgacatattatttggcaacaataaacataataataacagaaatagaagtagcaactcagcagcaataataaactactgatactaatactaacagaagtcatggcaattgaaaagtaataacacagtatcagctacaaatcctaagcatactatgtaattaaactacacacagtgtatgaaaaagaaataataaggatgcagcatacctgtaaacgtcgtaatacaggcttttgccatcgctcacgctgtgtaaaagagaaagagaggaagagataaaaaatggtcattgtccatgaaagggaaaaataccaaacattaaatgtcattatcaaaacatataaaatagcatcaaacactgaaaacaataattataattttgcatctttatcatcttagccctttggaatatgctacacttcttttaaaaaaacacatgtttgagtaactccaaatagtaaagatgaatgatgagacacaaaatgcagccatacgttcagaatgtgagaagggtgtaacaggtgaaactttgttttaattttaatttactatcccaataagaaggttttttttttcgaacaaagtttaaaggtacagaaacatttactttccttggaatggaaagaagcaaacaaagactatttttttcaattttgtaacttctgaagcattttaaatcactcttacgctttaccattttccacagaaaaacagtttttgtggcagactttttttccttctccaaattcctttaaactttcccactggaaagcagttattttctttctatgttatggtacgggaaggaacagataaggaggtgcttcagaataaataatggtttgttgttgatgatcttaggtaggaagagttattatagtggtttgtggattgttttaagcacttttgcacaaagcaatcctccagaacaaccaaaaaaacacaactaacaatggcaattcaacagttcatagtagctttaggctttgtcatgaaagtaaaatttccataatcacttctctccaccggtatttaatccataccttctctttccaataattataaacagactggagaacagcatatctgatagatggagcttgagcttgtagagcctacatgaaaatgattcaagatcaactcgatactaactcaaagcaataattacacaaggccacgtctctaaaattgaaaaaaaaaaaa

SEQ ID NO: 254820 - DNA, 764 bp, Cannabis indica
aaacgcttaaaatacaaaaaaaaaaaaaaaaaaccatccatatagtcagtctcaaactcaggcttttcctaacgttggcttttcctcttagtctttgtaggttgtgtattttagattgacacttattatataaattttgcttttatatatcttctgggtggtaatctttgaactaatgataatattcttatgatctatcctagtagagaaatagtccagagaggagatttagaaagacatatttggaaagataaataagatttttattatttgaaaacttgatacccttaacagaaatgagaggccatatatataggccctcaacaaacataacattacaaaccttaattattattaaagacttaaattacatctttctctagatagggaatctctggcataccagactttttttttttaataactacaaacaaacaaaattttcaaatgaccagaggaatctctgttgtctgaatgcttccttgtcgttagttgtcattttcttacgagagagaatctctattagtcttgtgagtagtcactggtcaaggcacacgaaacaatggacaaacacgtcataaacacagatgagtatttttgcagtggttcaggagttttactaatttttgttaatgggctcatgtgagggactaagactcatgtactcctctgtgtcttttgttgccacttgttgatgcaataggtttgttgttgacaggtggagaaatagacagtcccctacatatttcttcatcaaggtcatt

SEQ ID NO: 254821 - DNA, 894 bp, Cannabis indica
tcccgaagagtgtctaacttgcaatcttcctcctgaagagtgactcacttgctatcttcctcctgaagagtggctcacatgcactttttccttccgaaaaggtgactcacgaataagacttctcctaaagcttgattaacaatatcctaggtgttcaacctgcacaatttcaacaagaaacaatacagagtacacaataataaaatactaagaacttattggactcaagttcttcacacaacattgaaaaatactctctaactttgaaaagtaatatagaattgatacaccaagagagctcaaaaagaccagtgaccttagaatgaatatatacaatttagaaaccctctaggtcgtggacaaataaccaaaaaacgatcaggtcattaaatgaaaatgttcccaaaaaggaaagtaaaaaatctatttaaacatatagttagtccgttcaaatggatacaaaaaacctagatagtttttcagcaaagtttccataaataaatgaggcaactctgacaacattcaatctcatagcagtacacggtttcttggtcaagaaatcagataaaaatttcgaaaataccacacacaatatttttgtctattttatcaaatatgccaataaaatattttacattaactttatttaaaataaaaaataaaaaataaattattaattttttttgtcacaatacttaatataattgatttagtcaaaaatataattttaacaatgatgactaaaattaatctattaataacataataaaatggtgatataattataacaagattaaccaatcaatcaattaatctctatatatatatatatgggtatgctcttaatgggtattacccatatatggatattttattcttgaccattggatcaaa

SEQ ID NO: 254822 - DNA, 409 bp, Cannabis indica
gctttatggagttttaggggtttaatcttcgtgtttggaaaattttttggatcgcagttcggtgcttagttgggtagtgcactgtatcagatgcaatatatgcaccatcaatgaaaaccaatgcttggatcaaagggctgatttttcacaagtttctaaagccatttataatagtttatatgtgaatatatttgatgaggactctaaattagtcccttagcaattaggctctatgagaagttctgttactgttagttcacattctgatttgatatttaaaatttctaaaccatggattaagtgaaagcttgagtttttttcactctcttgatgttttttggttctgctttgttaaaataaataaaatactaaagagttccattcaaaaaaatactaaagaagtgaaaac

SEQ ID NO: 254823 - DNA, 706 bp, Cannabis indica
aaagattaatatgaaaggaaactcaaaaaatatatacatacatataattattatttttaaatgatgaagggtagtgggaattatgagtacctgggctctgaacaaaatggattgaaataggtggttgatagtcattttttttcttttcaccgtaagcagagtgttgaagatgaatagatgatgagtgaggctttattatgtttgtataagttatgagttacagaagtagtgcggatgaaaaagacccgcatttcagtccaagtacattcaggaataataccaacatagaatgaatctatttaattcttaaatgttggggtcttatcttatttgtctctctctctatatacatatataaatcatttggatataataaattaatttaatgttaagtgaacgaacagtcactaattatgtcattggattatgccaattacatctgcctagaaagccaaaaacaagatcacttaaggccaaatacaaaatgagctacaagacaatattataaagtataaattattgtcatatatttacaaggtgagctgtatatatataatgtaaaacattgcattattaagtgtaaattattattattaagtgtaaattagtagcaagtgttaaatttaaattctaatatatagatttgatgttaatgctcttgggcaagttcggtcggtgttcacgataattatttggcattttgatt

SEQ ID NO: 254824 - DNA, 833 bp, Cannabis indica
taaaaaaatggagaagccgccattgccgaaaaaagattatcttcttatgttcttaataagtcaattgatttttgagtcaataatcaaagtcattgtttcatgggctcatataggccatagccactataaattaatataacatatttgcaacgaaattatcttaacattcataataattatatatattactctaataaaataatgaccacaaaagtaatttttgttgcaatcttgtttttttttattaaatattaattaaaaaatatgtaataatatattattaaactatatattaaataagttaaaaaaatatctccacttgttaaccggtattttttttaattaaaaccataaataaaacaattataaatattaaaaaatttaccgcaagtatcccaattaataattaatatctataattaaattttaacatgattttaatcttaaaaataaataaatctagtccatctccgtagataatttttatcaaactttgtttttatatgcaatgcaaccatgtatatatagtgtcattttcttgaaaaattagagatatgaaacaacaacacggtaccgtggggtttggggtagtaataaattaatgagaagtgtaaatatgccaattgaattaaatagtaaatatatatatacattgttggggattattttatcaagatctaaatttactatcatgtatgttatttaacatcctaaatatgagtttctaaaacaatggaatttgaagacgtataaagttcaagaaaccatacattgggtgcagtggaattaaatgactccttcactacagatctctaaccctgtatcctttctgt

SEQ ID NO: 254825 - DNA, 1097 bp, Cannabis indica
gaagaagggtggcaacccttaccaccgatggttgcttgaggggttccaacaaactttgtctgaatgttccttaatggatatcgacttggtggggcatcgtttcacgtgggagaaagggtgagggacgcagagatggatcgaagcttgacttgacagagctctggtcaattcggcttggagtcaggtactcccctttgctaaacttttcaaccttgagtgtacctcatctgaccataatcctttattcctgaaaccgattattgaagactcttttattccctctcaccggtttaaatttgagaatgcttggctaaaggaaccattatgtctccaaattcttaaagactgttgggagaatagtgaagggaataatttcaaatagaaaatagaagcgtgtgctgagaagcttcgggtgtgggggaagagtattactgggaatttcaagcagagaatcaaggcttgtaaatctgaacttaaagtacttcaaagaaagcgagatgcatactcggtgcaacgatatgatgaattgaagaaatctttgtttgctatacttgatcaacgggaaagcttttggaagcaacgtgcgaaaaatttttggctcaaggagggggatcaaaatagtcgatactttcatgtggctgctagctcaaggaagcgaaataatcaaataactgagcttagagatagtcacggcaattgtgttaactgggataacggacttagtgatgtggtggtgaattatttttcagaacttttctctacatctggggctcactgtgatgaaattgtacaaggtgtaacagccacggttacaaggcaagttaatgaagaattgagacagagtgtttcggttgaagaggttaaagctgcagtgtttcaaatgcatccagacaaaatcccagggcccgatggaatgacaccagccttcttccaaaagagttggtctatatttcacaggatgtggttggagttgtccaacggttttttgaatcgatagtgttcaaagaaggatgtgggagtgctaatgttgtcttaattcctaaagaaaaagaaactccggagttcatgtcggagtttttcggtccgtacttgtctcc

SEQ ID NO: 254826 - DNA, 844 bp, Cannabis indica
aaccgacaataacaaaacattttggctgttcatacaatattaaatgtgtgttaattagaaatttatttaaaattatcttgtaaaaaaaaatgaaattacaaatttatttatgtgaaaagatatatattaatatataataattaaaaacaatcacattattacctgatatattttcatatatatatataatagaaaaaatatatttattattcaaaaaaatatatatttattttaaaaataataataaaaaaatatattatgttagtcgaatattacatggatgaagaggaaccacagatggataaaaccaaaattccggaggtattgggttgcatccttcccattcataaacaccaagtatctgcaattaaaaaattattaagcacaagaatttatattgtatatttgtatatagtttaaaatatttttatatgtagataacattatatatagagcgagaataatgaagtacatactgccatccaagtcttcccccaagagccagagccaacagcaccaccatgatcatgaatccattttcgagctttagagcatgcattatcaagaccaccatcaggagattctccaagaatacgcatggctaggtagttaagaaccgtacacatcatcatacttgggccctcaatatgcaatccccaccctccatctttattctgatgacaatacatgtaccataacatttctctcttatgatgttcattgaatactttgtccaagtgtccacaaatatacatgcaaaatacctacattaagaataatataataataataaatctgtcattaaaatggattatatatgatcattaaaattttgtgcatcaag

SEQ ID NO: 254827 - DNA, 909 bp, Cannabis indica
actatattatgtttttcaagatttagcaactaaattgcaccacttgtggaagcgcatatggcagatttggcagtgactatcctgcatgttgcaaactttacttgtcttcttcttcctcttctaaattaagactaagcaggctcccgaggacgagtagcccaaagtgagctcaaagcccagagacgttggaaatactccccatggcaagcaagcctctagcagcctggcgggttgtcaagatacgggccatctgagtcagggtttcctgtcgaagatggtcagcctgtttagacaaaacaccattcaattaggaaaagcaaaaaaaattggtgacatgtttataaaattacaaaagatgaggtatatagccatactacaaaataacacaactcaaatagcctaaagacgaaaaagatgatgaagtgacttcgacattatatgggtgttagtgatggatcaacccaacagacaacatttggaaatccccaatctaaaagcagaagagacacttaatcgattacaatttctcactaaatacagatatgaatctgattatatttaactgcatggtgtatacagtttttaaaccatgaggtgaaccaggggtgtcattgaaatttggtttaaaggtcatacaaactcaaaagcctatttagcgaatggacctcttaagcaacatttttcattcttcgactttaggatttgaaaccatcaatcaaagttcactattcaatgttaaatatgcttttgagaagaaatgatgcagcatctactgtttgtagcacatgggaacattttgaagaaaagtatttatacttatatatatttttaaatagctcgatcaaatgcattaacacattacaaattgatgtgttagaaaaaaattttgatatactacatattttttct

SEQ ID NO: 254828 - DNA, 1866 bp, Cannabis indica
aaatttagatgtaattggatatccaattaaataaccgatccaatctaattggattggattttgaggtctaattggattggatcggatgatgattttcaaatctaattactaattagattggatcggatgaggataaaaatattggattggatcggatgcccacctctagtgcttagtactttctcaacatgtcgtgttacgattagctagtgatactttttaaaaactattatattaaactgtatggacccgatacataatttgatcattaatgatattaacacataagagagtattaagtaccactagtgtccttcagtattctttattttattgaagacgtttaaaagtgtaattaagcatatatggtaattgtcgattaagatttcgaaataattggcttatttactcatcatttatttgtaaactcgtgcatgcgtagtctaatcttggaaacatataaatatatttactctcttttattctatcacccttcttttcttatgatacgtggagcgatatctttatgacacgatgactgtattttcaatagttaaattttgaaagatgattgcttggtaaaatacaagtatggagttaaatatgtacttttcataaaaaaaaaaaaaaatatgttgatgtcactgcatacattgatgtcatctatttttttttaaaaaaataaaagcaaataagtagtgtgataatatttataattaaaataagagtaaatagtgatataaatatctaaagttttaagtttgtaagtggtataatcttaataattgtttttagcggcataagtactcaatatttataaaattgtaattttttttctaatttcgtaagtataaactctgttattttcttaaatagaccacatataagatctagattctagatcattaggtttatgcagaaatatatagtatcagttacttccaaatgttcctttaataaattcaaaacggagtttgtactgacaaaactataggaaaattacagtattacaaacattggatacttatgccgctaaaaataaactttgggtttatgccgcttataaacttaaaattttcggtacttatgccgctatttaccttaaaataaataatatactaataaataatgtgtgagattataattatagtattcttgaagagtgttataacatttaagtatttttagaattaagagtgtcaaaaatgatgtggaaaaaaatattatatttttagatgatgttgaaatttttagtatctttaaaaaaatattaccactggagatgctcttataattgttatgggacaccaaagtatctatcacctttatgacatgtcatcttataattgattagtgattatttatcatttttattaaattaaaataagtgagacccgatattaaattacaccaatatatttttttttttgacaaagtgattaaaatcactcatgaatttacgatgcccacgtccgccaccggcgctggaacctcctcgaaccaggatagctcatcgtctaaccgcagagcatgctttgccaaccataggccgctaaaaaacttagagcgagccccatgggacaaaactgcccccggaaatttagacaataaagatataacatcttccaacaacgctctcaactcaataaaaactgaagttccacctgaaaaaatatcaaaaaaatagaataaaactttaattagaaaattattcaaactgaatagaatcaactaactgccaagactaagcaactagatctccctataaaatactagaactagccaagggtaaaactgggagtaccctttggctagtaataactaaattatagcactctacttcataaccttcctaggacccctatt

SEQ ID NO: 254829 - DNA, 6150 bp, Cannabis indica
ctgaaaaaaaaaaaatatattaagacgaaaacaatctattttatttatttctcactgattgtttctctcagcgtttctcaaagttgtttctcatattttatttattattgacactgcaaattccatctctaaaaaagccatgctacctaataaattaccaaattattaatacaaatatacatcgtgcattattggttaaagtttacagttttaaagtttataacatgttatattgaagttgatatttaatttgataaaattacaattgtgataactaagtttaagcactaaatgaagcagttaaatatctcttttattcaaattaaggtaaagaaaatttggtatatcactaaatcaggcacccctcattctacatcaaaaaacctatctgtgtatttgcaaaaaagaacatctaaatagccaagaaaaatgggtgcaaaacaaatacaatataatatgccggtgacgacaccatggtcgatataaccactactcacaggaacacaggagccattacaagcgtaattgttgcgagcatttttataaggacgtgaagggaaggccccgctgtgtccttgaatggatctccaacactgcagcaccagtgagaaaaatgtaaaacaagatcaatgaactcaaccattatgttaaacttgagttgcaatcattagataaatgggaaacaaaataaaactagccaaaacttgagcctgtcatcccatcctccactttgcaatcaataataatcccttacagtgtatttgaatttcatttctaatttatttttggtgaatcaataccaaaaaaactaatgacatcaggatttttgtcaaaaactcttcaatagtattcagcaaaataatttagatatctctttctcaggaaaaaaagaaaaagaacatagatacataggacaaattgatcatattttggcccccaaaaaatgtagattggttggtagtagttgttttcttatagtcatataaaacagtattcttcacccttgtttttcagtagaagtccaattcatttcaagttcttaacaagagaaaaaacaaaaagagcagttctaattggaataaagatggaagaaaaagaaaaggcactgcattaggggagagtataatttagggccaatgaaattataatactatagaaaagagaacaaataagacttacgtgtctccagtaattgcagctttatgagattcgcttcctttaccaccaagagcacccgtctcaatgtacttctttgcattgtcccaagcaccacctgctgtgttcaggaaaagagccatgagaataccggaaactgttgcaaacatcagcattgaagcgacaactttagccccaagcagaggttgcccggtgtagtatcccaaaatccggaacagaagacctgcaggtgagattagcaaacataattatttccttcatttttcttataagaaacaaaaattaacgatgcattatcaatccctaaaaggatgaaaataattagtggaattaagtcgaaaggaaataaaagtttcattcaagtgataaaatgaacataacccaaataaataccaaaaatcatcagctgaaacaaattgaatgttccccacacagactaatcaatcacaccattatttacttcacatataaagaggtaatatgtaaaggtgttgatgtggtattttgccaaaattctggtataaacaaatttctttatagaatgcttttctgtaagcagaagaaaatgctacagaaaaggtcaatattaaatattgtagacggaaaacattctgtaagaacaatgaggtgcaagaaacactaggccaaaaacaaaacaacaaagaaagaatacaatcacaaacccactcaaattatgttcatcaatatacttaaaacagaaactagaaacagcagtaactcaccaactgctataggtgaaataatagccaaagcaccaggttttatcatttccctcaaagatgcagatgctacaatagcaacacaacgaccgtaatcaggcttctcttggtagtcctgtggttattataaggttagaattccatcttgaaacaatacaaagatcaaaacaaataaagtaccacataccactaggggaagggaataaagaaaactcaccattataccaggcctctcaataaattgtctcctcacttctttgacaacttcttgagccgtacggccaactgctgagcaggcccatgcactaaatagataaataagcatagaacccaatagcccgccaacaaaaacttctggaatggcaatatctacctgaaaatataatgaaagttgaccaatttaagtgcttgaaataaggggaaaaaaacgtctaatgtacaattctgttacctctgtaaaaggtacacgtgcaaatgtagaaacctcatccatatatgcactaaacagcaggaacgatgcaagtgctgcagatccaattgcaaaccctttagttgttgcttttgtagtgttacctactgcatccaagagatcagtgatctctcgaacactttctggctgaaaggacacatttgttcttatgttagataagccaattaaatgaaaataatatatatcaagagtacatccctctatactaatggaatagataaatttctgtttattacaaattccaaggttacctgctgactcatctctacaattccaccagcattatcagctataggaccaaacatatccatagtaagaacatatgcagcagtgctaagcattcccattgttgctacagctgtaccaaagagcccaccagttggatttccagtttcatctaccagtccagaggtttgacccaaccaaaaggctgagataatagctacactaataacaagaacaggaagagcagttgactccagacccaaactgacaccagcaattatatttgtcccatgacccgtggagctagaaagagctaaagagcgtacaggttcatgcttgtagtcagtgtaatacttggtaatccggacaaaaacataagctgtgatgataccaactagcccacataaggcaaagttaaaccatgcagtaggtgcttgttcagtgtaaagcaaccagcgagtagactgaatgatttgataaaccacagcattaaaatatatgggaggatgaaaatgaccagataatattgctactttacaagtgtttcactttctttttttgaaaaaaaaaataatcaattcaataaataatttttagtagaaagcagttcagcagcacactaagatatcaaagaaaaataaatatgtttagttgtagatgaggtattaccaggcaaaaggtcagtacagctaacacaatagtgatagaatatcctttctggagaattgccatgggatcttctatagcacctttcgcaccagaatcacgagtaccccgaattgagaaaattccaacagatgatataacaagatcaaatgagtgaacaacaagagggaacaatatgaagcccgttggatctgcacaaatacagaaagtctttaaaataagggccttttatgaaatcggtcaaagtcgacatcctcaagtaaaattaaaaaaagtaaaaaacacattaccttcaattttacaacgtcgagccattgttccccccagtatcatagcactgattatttcagcagcaatactttcaaaaagatcagcacctctagctgcacagtcgcctacattgtccccaacctttcatgtaattattttaaagaccaaagtcaaatcagcaaattgagaacagaaacaattaaacaaaaaacgcaaaaacagaatctgcttggaaaatagttctcgcgtaaggctactatagacattaaaatgttattatacttatgggtatctagtgtatctgaacaattatggaaggatgtctagtttcaaggcaaatttaaaagcaatatatatgaggaaaaggttggagaaggaggaaggtaaaatatgaaacattattcactaagatttcactttcaataacattttcacaaaactcatccaagttccattttcccaattagacgtatcattctttctacatcagcaagtcattcttttttagctgaaatatttttctttaaaagaaaaaagcactcacctacatcccacactcagctcaatctaaaatgccacatgtaccacttgacaaacacacacaaaccactgttacagtgtaactgattgagttgagggtggctttattaatacaatggctccataacaaaaagccaaaatgacaaaactaattaccagatctgcaataacagcaggatttctaggatcatcttcaggaatgccctgctctactttcccaacaaggtcagctccaacatctgctgcttttgtgtatattccaccacccaattgtgcaaacagggcaacaaaagaagctccaaaaccatatccaacaagaagaagaggcactggaaaacaataactcaaagtcaagggcatgttatgtaatagaatagaaatggtaactagaatccagacatatacaagtcaaagaaaacaagtgtgaaaaaaaaaactataatagggataagctaagctaagaccacatgtccatatttcattcgcaaggaaaaccaaaataacatgtgacaagcaagccataatagtgatagcacttgatactagattctagaaagaaagaaacatggagaggcaaattggtatttacaacagtgatctaggtggaacgtgagtgcaattagtcaccactagctcattagtttactatcatactaataacagctaaatgacagtgaaaagtttctaaaaggtaaatagacaatactatcgatttaaatctgctaacatgattgctccaatgatctagaacaaatagtaattaaacacacacagaattccactttgctttaatgatgtaaaatttgcaatatgaatactttgattgaaagatgtaacatgtagcattacaatataatctattccagcagaataggataaataagaattataagagagtaagcaactttatttggagtgataaaataaaatttatgcctagaaaaaagaaagaaaggtgacacctacaatcagtaaccttcattccaccaggtgtatccacccccagccaaacataaaatgtggcatacagaattgctatgccaattacagccataccaacaacaaccatagcagaaaaaccaccagctcgaacagctatctgcacataacattttcccatatgttgaaactctgaaacacttttaagaagtagtcacactgaaaacaaacctgcagcgcctctcttgcagatcttcttgcagcactggatactcgaacattagcacggacagaaacccacatcccaacataccctgcagcacctgagcacaaagctcccaaaagaaatgcagctacggtgatacatgcagaaatatacctacatcagcaattggaaacataaatatttattggcaaagggtttgatggaagaaataagaagagggtgaaaggagagttatattatcacctcccaataccagcagcttcttgttgaggagttatatcgcgaaacaagtatatgcaaaggataattagagctagcaaaaaagccatcttagagatagttccatattgggtcctaaagaaaccttcagctccatcacgtatagcttccgatatctgaaaaaacaaaagaataccaaataagttaggtatttaacccattgattatcgtgaattgagaaaaacaaacagaatgaggccatacttaaaactaattcatttaaagtagatatacctggaccatctcaggaggcccctcatccttggcgagtacccacttagtaagatatattgacaaaagaaagctgacaatacaaactgagaagacaaacagaatgatgggagaagtacgtgcccctacataaaacactgctcctaaccccaagagcaaaattacaaaaagaacgcgagtgtttattccaagtaggactcggaaaatctgtacaaacaaacaagtttcatgaactcaacataagaacccgtgtaacagaaatacccatggggtgcaatgatgacaaagaaaaccacacaaatttttatcaagtgtataacaaagaaagcaaagcttgcatgaggaaaaaaaaagaaagaaagatagat

SEQ ID NO: 254830 - DNA, 4216 bp, Cannabis indica
tgtacatggagatgattcgaaaatcataggtacattgaaagaattcagtacagaaaacaacacattacaaattgaatctcacttgagtccactcaataaaatacatgagaaagacttttacaaccctccaatccctcaaaattgaaactattttctgtatgaatctatgtacaaaacaaaataggaaagccttaagaaaataagtaggtgtgactgcctttttataggttgcagtagcttttcccaactggtgaagctccaaccgaattaactgccttcttgccactaggataggtatttgctgatgtggcaggggacaaatgagtcaaatccaccacataattcatctcctacatcctacttggcttggccatcaaatccaatattctagtttgagattacaaatacaataagttgatccacacatacaaaactatgttcaatataaacaaactctcctattatattacaaagtttttcatctcaccactcacaactcactacagtggagtcttttagtattttctctcttgcttagtctttttattcaagctcactgcaccttttcttactcacacaaaatacaaaggaatattcattaaaattcatcttatttcgtaaatgttaggaatagaaaatcatatatttccaaccattcttccaatgatgatgccacacgagaacaagcacatcatcaatgatttgctcccatatcaagtgcaacatggacaatgctgccatgtcaccaagcaacttaatgatagaataaaaacttctccaaaaatttccactttgatttgaagattaagatgcaacatccttattacaattggaaaccaaaccaactccatcactatatgaagtttgcagccttaactttgatcaattcaaggcaatgataaaacttgcttgaagtaattgtcttagtaaagatattagcaacattctcatcagtatggaccttctctattatcaccttcttttaagcaacaatgtccctaatgaagtaatacttaatatcattatgtatttttttttttttatgaaaaatataatttttagttaggtgtatagaattctgattctcaccgagtactatcactttcttttgatttatcccaagttctcccattatgccttgaagccacaaaacctgcttggaaacctcaattgctgcaattagttcaacctcaattgttggcaaagcaattactggttgcagtattgcttttcatatgatggtacaaccaaataaagaataaagataacttgttagtgaccttgccttatctaagtcactcaaaatcagaatctacataccccacaagcttctcttccatctctaacattttcctttgcttacagtataaattaaaatataacacgctcttgatatacctgaatatccacttgatagcttcccaacgaccttccctaggatttgacatatatctctaactaatttggcttcatatgtcacattagatcttgtactaaccatgtcatacatcaagctaccaatagcactaacatagggaacattacctatctcaaatttttatttctcggttgcaggtgatacagtagatgataattttaaatgagtaggccaaaggtgtctgtacaacctttgtattatcttttttaaaattgttaagtaccttaagaatataataagttttagaaataaacatgtctacaatacttctatttctctttatatccatacctagaatcttctttactgctcctagatccatcatctcaaactctttgttcaagagttctttcaccttttcaatttttttcatactagttgatgctagcaacatataatctacatataatagcaaaaacaaatcttttccttaacccattcgacatacacaaatttttcataacaacttctcaagtagtttttcttcatcataacttcatcaaatgtaatgtacctatcttggtgactgctttagtccatacagagattttcgtagtaaagatactttgttttctggctatataaatccctaaggctaagccatgtagatcgcttcctccaactttacatggagaaatacagttttcacatccatttgttcatgttccatattgaactatgtaacaagtgctagtaaaagtttaatggaagtaaaaataattcattatagtcaattctagcttgttgagtaaacccccaagctactagcctagtcttatactcagattttccatatctagcattgttagtcttcaattttaagattcacttgcaacttactagcttatgtttagatggtttatcaatacaccgctaggtgttattgttttcaaaatgaatccatctcttccttcatggaatatttctatttcagttgttctttgcatctaacagctgattcaaatgaggaaggctcatttttaactatagacctagctattagaagtgcaaatgatatcaaatatgcataaccataccgagaaggtgcatctttggatcttagcccagtcttttatgagttgataatttgtcatgttctcaagttcttcaacaacttcttcttcttcttcatgctcaccaatatgaggctaaagttgattatcttaattctcagaatttctagctagttctacctcaattcttgaatttatagtatctttatcacctctactcttgttcaaatctaagatactttcaacttcaagttccagataaaactcttcttctttaaacgtgacatcaccttgatgtctgaccttctttataccagagtttgaaacccttttccccatcataatatcctagaaacatgcactattgtgctctaggatccaacttatcatctctcttatgagcataaccaacatagacaagaacttttaaattttcataagctgtaggagtacctttccagatttcttttggggtcttaaatattatggttgttgaggcacacctattgataaggtatattgttataatcacagttacctaaaaattttggcatgtgtgtgcatttaacatcatacatcaacccttttaagtagggttctattcattctttctactaatccattttgctgtggtgtgcctttcacagaattattcctcaccatgccttcaactatatgcattaaatctattggtcaagtattctagaccattttaagttcttaacttcctcaccttcttgttgattctccaaccatccgcttccaatccttgaactttttgaatgcttcatccttagattttgaaacatatacccagacctttcttcaacaatcatctataatggagataaagtatctacctctaccaagtgtttattttctagaaggctcccaaataactaagtgtacataactaagagtatccctagttatgtaattcgagttactcaaattcaccttagtagctttgcccaaaacacagtgttcatagaaactaagcttctcaaacttgtcaccacacaacatttttttgtctctgaagctctcggaagcatcactaacatggcctattatcttatgccataactgagcctttgtcaacctatttcagcaacaattgtagccattccaataacaatactagcatgcattatataaagaccattgcttttaactccattcattaccaccaaagaacctttggtcacttaagactaccatcaccacctctgtaagagtatccatggtgattaagcatgcctagttaaatgagatttctctttagtccaagaacgaaccttatatttgtcaaaactatttctaaaccatcatgtgtatgtaccattgcctttaacacttcatggtttgatgtttcctagcaagactttactagtattacactcaaaccaatctttattgggagtcatatgaaatgaacaacctgagcccaagatctaatgtttgtctgattagtctatagaaactacaagctcaccaacactttcataactattatttctgtcgtaaccatcatcaacaatggcattttcctgctcctttttttccccactatttgctttctttatttgaagacatagccctctgatatgtccctcttcatgaaattggtaacacctcatattctttggcccttttgatttggatcaagttacctcttcctttagatttgtctctcttttttagtcttgcctctcagcgtaagacctttgccaacttgttctctcaacctattctctctctctct

SEQ ID NO: 254831 - DNA, 433 bp, Cannabis indica
tgtgagtagatctaagatcctactaaaataatttccaatagtattttcaggagggggaggaagaattccatcctgagatctggtggaaggccttgccattgaattgggcaggttatcttctgataccatatgagagaattaagactgagaaacagagaaagaatgagaaaaagtgattttttattattgagctgatctagaaaaaaaaaaaaaaaaaaaagcctttatataggcaaatgtacaatatggcatgtgctacaattacacaacttgacaaggtttaaacagaatgtaactaactccaagaaacagttggagtggcctaataacaaccataacaacttttaatagattttatctgcaataagcaaaattatactacaatacgttcttatttaaacatatatttttttaataattatttaaatataat

SEQ ID NO: 254832 - DNA, 580 bp, Cannabis indica
tggcaacctatccatcatgtttacacttatattacactaaaagttgatggacataaataattaatatacacctttggagtttatttggtacttagtatagatctttattaggtttaatttgtaaactattaaataaaaatgatgtaaaaattgtactatacaaaacaaaaatgactttgtgatagatttatattaatccaatacataagaaaatactaaaagacaccgatgtaccttccacgatgtaatattattattaatgcaatgaaatatcagatctcaagtcttatataatttaatacaataatttttatagaatatcgttagccaatagcaaaagatcatctctagatggtgttgagcaccactagtgccttatagcaattctcaatgcacaattgtaaaatatgatgaaaaaatttggctatgtttgggtgagagggagagagagagtaggatggatgaagaggttagagaggatggagagcaagagtgatagagaggattgttaatctcatttgtattgtttggtattaggtgtgaggtgggaggacggagaaaaaattaatagtaaaattac

SEQ ID NO: 254833 - DNA, 794 bp, Cannabis indica
atctaataactacccaaccgctctttgtttttatcctttagacagatattactgacttagaaggttgtatctcgcttgatacgagttatcctccttgtccatcttaataagaaaaaatactaagtgttgggaagtagttcatctcgtcatatgcttttgttggtatcaacaatgcgaggtggcatgcttgctatgtgtgatgcgaggcagttatgttactacatttattcggttcaagtagatgaatatttctttcttgtctatatattttgaggcatacatatgtctcgtttaaactcggcttaataattattatccttgtctcgcttttgactataaagtcaacaagtttgaatattatctatcaaacttttatttaatattaacgagttatttaatatgcatttattgatataatattattatatcattcagaattgattcatattccttctgttgtacacgtgtcaacttttggagtgaagccgaattttggatataacatatataatttgattttttggttaactttatgtatatgtatatgtatgtatatattagtgtaaatatatatatatatatatatttttgtgcatgtgtacatatatatctacatatatatacatatatatatttttttataatagtatgtatatagacacatatatttgtgtgtatgtatatatgcatacacatattagtgtatagaattattgttattatttttgtattctaataattattttagtaaataagtttgtcaatgtcgctttacctgttgtgccagttgatca

SEQ ID NO: 254834 - DNA, 1074 bp, Cannabis indica
agtagcatcaggtgactatcggaccaccatcataccatttttacatttatagatggtaagctacattcattaagcttgtcatgaaggcatcagaccatatcatcgagctaccatcggaccaccatcgaacattcgtcttcaatctttactcatgttaacaaacaggaaggcaactgtgatgaaactgtaatctaacaattaaatctgttgcgagccaactaacatagaactacaaaacaactaataaattcacatatttaatacaaacgaatattataacaatcgtgttttatctgttcaggtcctgtatttgataatttttactatgatattgtagtagcaaaaccattattcaactaacgtgcaacttaattacaactaaaaatgttaaatgtgaatgtgcatatgtaagaaactatttgtctgtattttctttgtcactgatcgataattacttgtaccttaataataatatatggagaaataactattagcaaaatatttatgcaactgttataaaacattaaaaatcagaacaatgtttccacgtatgtaactctatctacatgtctcttcgtgatttaatatgaacaaattcaccattaaaaatttggaaaacaatgaaaatacaccaggataaacattttactatagtattgatgtagttttttttttattattattatacttgagttggattgttttggaattccagttcaacattttgagatatgcatttcaatgatctaaaaattgaagtcaggacaatagttttatgcgaattaaactagatttctggttgaattttagttttgtagtagtttttctgcactttttttcatgactacgaaacaactcctattttgattgattctggttgtcttctcaggtgaagtatggtggttctctttttggttgggtttcatttcgattgtgttggattgttgggtggttgactgaagattgcatcacacgaaggtttcaatcacaagaagtgtggaccgtgagttgatagtgtgtgtaagaggcatttgtgtattttttttttatctgagctgtatatttatttatttg

SEQ ID NO: 254835 - DNA, 941 bp, Cannabis indica
ttaaaataatatttttttttattatatttatacgaaaattcacataaaaattcatataacaaccaacagaacaacttaaatcacagctaaaatttatataccaacccacatagaaactatcggttcaatcaccggaacaacctgaaacgtaaatctgaatgaaaaataaattagaaaatactacatgaggtaattcctctaataaatttgtaagattttacaaaaatatttttttttgtcatttttactgacaacatttttactattaaagtttcaaaattatataaatactatgtttcagtaaaataaaaaacaacttaacaaacaacataaaaataactataaaacaacaaaaaaaaattacaaagcaacaaaaaattcttcaaaaaactatttttttgactgtttaccaaacacatttatatcacaactttaaagctgtgccaaacgggccctttgtctgcaagagaaatattggcatcgttatcaacatgtgttggtggagagagtggttaacaaaacaaagctcagctaaattttcacagccaaatgaatcaaaagccaggcatcagaataaagcttactgctaaacatgttcttaggtcagcttcagcttcagggaaaactgtaaccaattctagatactaatattaacaagggataaactaacaatttaatttcatttcattgaacaaacagttacatgaaggggtaagaactaagagcacatcaaaagaaaatgaacaaaatacaaattacaatgtcactaaactagatcttgtagctgaagaacagacaaaccatgccaaagagcaatgtgtctagaagcaccaaatcaaagatggaggcagattcgtatgtatgtattcagtgagaaagaaatatgtgatctacaattttatgacagaagcatggcttctgaatatgtaatacataacaaa

SEQ ID NO: 254836 - DNA, 980 bp, Cannabis indica
acctcttctagagtcaatgactccttgccatacatcatagtatccacaaagtgttcatagttttctgtaggaagagagttcaaaacgataatagcttggtcttcatcttctaccttgattccaatattttcgaaatcaagaatgatcttgttgaaatcatcaagatgatcttcaacatttttcccagtcaacatcttgaaagagtacaatttctgcttcaagaacagtctatttgctaaagactttgtcatgtagagactttccaattttgaccatatcccagaagctgtcttctccttcgacacctcacgcagaactttatcccccaaactcagaattatagcactgtgagctttgtcgagcatctccaccttctctttctctgtcaaactccctggtaagttctcttctcctagcaaagctccctggatcccttgctgaaccagcattgctctcatctttaccctccatagaccaaaatcgttctttccagtaaacttttcaagatcatacttcgcactgcccattttcttggatgttcaccagattcttgaactgagatcaagacgatcttcttcgaacttcctctccacggctctgataccaattgttggatttgaatccagtaactatgatctctctctaatcctgttgacaatcgaaaaccagtttcatggcagtagtgccataaacacacaagaacagtacttgttatcttaacaaggaatgaatgaatgctttctttattgatgagaaagtgtgtttcataacatgtttacattgtacaagtattaacctatttataggtatctttggatagggtagagtaggcttagactaagtgtgacagttaagttagttagagtaactaacttaactgtcactacagtaaaaaccagaaaaacagtacaaaatgtaaaactaatacaatgtgaagtcaacaccaatatatctacatatatgttagtcatgttattata

SEQ ID NO: 254837 - DNA, 840 bp, Cannabis indica
aaattttgttattaatttgaaaaacagagaattttcactatttttcatactgaggtgaaaagatattagattaggagtatacacgatttcaatgttttggatctaaaattgattacaataataagtgagcgataaagagagaaaataccgaagcaattgtcaaatggtatgagcatgtcactagagtcgatcacctgagcacatagtgaatcttcatcgtcatctccattgccaaagtgaattgtcatcgaacgccagatgaattgccacctccattgtataactagatcatcaccgcgaaacaatctacttcttcaaaattagatccaaaagaatcatgggaaaaatcaaattaaaatcaaagacagaaaaaaataactgatcaaaatacattacaacccactggtgccgaggagatagagaaagagagaaagctgatagtgggtgaaggacaatgtttcaaaatggtggcgcggctctgtggggttttgaaatggggggctctgttagggttttcgaaatggggggatagagatgctgaaatgaatttatatttcgtgaaaattgattttttacaaacttaaatttttttgcatcggtggataaccgtgtaaaatatattaacctcactttttaaccgaagcaaaaacaaaatacctcatttttccactaaagcaaaatgtaaaagacaatttctaaaattttcacttttttcctcggttgttcttttagtgtcggggaatgagctaacgctaattggtatttttcagctccagttatacactgaagtataaaatcttctcctattttttgccttggtcaactattttggtgagacgc

SEQ ID NO: 254838 - DNA, 581 bp, Cannabis indica
aataggcctgtaactttaattcaatatttgaaaccaatctctatctttttttagctatcttcttaggcattacccctttaattctattctttacatcactctttactctctttacaatggagtcaattgtacatactttgttattccaaaaagcttcatttctacacctccaaacatggtatattgcagcagccaaagttgccgaaaaaacctgtttctaaaacttgctgattttggattttgaaatccacttcaatagcccctgaacagtgttgctagtcgaataccagttaagccaggattgaatccctgttaaaacatttgcactcaagtgacaattgaaaaaaaacatggtcctttatttccctattcaacccacacattagaaaaatttcatccaagcatatgttgaagcggtaaagtcgagtcttaaattttaatctatcaagtaccactaaccagaaaattattctatgttttggaatagatagcttgttccacactctcccctgccaatgagttcttggataaggacatagaagtctgtaaccttctttgatagagtaagctcggtttgcatc

SEQ ID NO: 254839 - DNA, 969 bp, Cannabis indica
cttcttcattaaagtaaataataatcattattttatcaatattattgttcttgtacttttcaatttgagttgtattttgactttggtctttctattgaagcacctataaatttccaacatagatatagaaagatgtttttgtattgataaaggtaccttgaaacaagtgaaatgaaaattggaataagaagagagaagaaaacaaatgaacaaagagagaaagagattgatatcaaaagattattcttgctccccacattctcacttatatgaacaatgttaccttgtttaataatattgtgtatatatagtgattattatttactttaatgaagaagaaaaaaaaatgtgaagctgagtaagttagtgcctttgttgggttttcactaagtgttttttttagaatttttatgtcaataaaaacttaattagatcttatcagacaacttattcttcttgctctgtaatttgcaacttatattgtagtgaacttttttcactattagcttggactttgctagctagctaccttttttggtcatatttagtgacggtttttgttttgtgttgtatttagatgatatttagttcaccgataataaataagtctattacattatttagttttttttttttaaactttttgtaattcattataatataatataatgataatgataattacataccaaaatataatccccatataattacactttattacaaaaagaaaaataatatatttttataaaattatagtaaaaaaaaagtcaaaagtctatattatccttttttttcttgaatattttataattattacaatgtttattttaactacaaactaaatattataatcaattcttattaccatttttatatcattatattattattaccattattatttcagtacaccaaactaaacaccatcttatatatgtgctcgaatttatataaaaattattattg

SEQ ID NO: 254840 - DNA, 524 bp, Cannabis indica
aaaaaaatttgtagagaaaatgtgtcgaaatgcacatttttataatatcgttctcatcctctttgataagaaatgaaaaagtgaacgaaagacatttagagtccactctgcctgaccatataggatcaaactgactaattagaacaaaaaaagaaattaccgcaaacaagaaccaatgggtttccaaaaatcagttcgtaactcaaaaagaaatcaattttttacatgctgtttcttttcagcagcacaaaaacttggcaaaaatattcattccttaaagttagagtttttttatcaaaaatattcttgttaaagaaaaaaattcattggcaaaacaaaatctctcattgaacattcagtaaaacccaaacttaagcaagggaaaaaaaactgcttacagaattcaagagtttgtgggttttgtttggttggctagaaaattgtaacattgagaaaaataaaagtgaagcatccgaatatgatacagaaagtaaaaagtgaaaagttgttctctctctctctca

SEQ ID NO: 254841 - DNA, 656 bp, Cannabis indica
tattctttggcttggtctccgtttaataccattaagttgggtaccaataaaatataaaaacggttaagtttagaaatttgagaatttattttactatttttcaaatttcagtatttattagtaataaatttaatattttaggtatttatatcacaaatttattaaaaataaattaaaatttcaatataacttactaagtaattattattaattaaaatacataatttatttttatgtataatttaaaatattttatacatccgcgaagcgtgggatgtttacaaatttttaattcaatgtaaatataatacgcttccttaataattgaccaaatcaaagatttattattttctcatttaatttcacatttattagataaaaaaaaaaattattagtagttttggaagtgtgaaaatgtgcaagtaaatacatcttgcccgttgtgctttgctgctccagaaactgcactacaagtcttgctccattgcaactttgcgcagcctgctgaaaacaacaagtgtgtcggttgtggctcctgctgccatgactttcatgagctggtttgaggaaatgatggtcccagtgacgaatccaaaatttctactttgtaggagcttatttatcattaaaaaatatttatatttatattataatca

SEQ ID NO: 254842 - DNA, 609 bp, Cannabis indica
aatttattttatatttttcaaatttcagtatttattagtaataaatttaatattttatgtatttgtactacaaatttattaaaaataaattaaaattttaatataacttactaagtagttattattaattaaaatacataatttatttttttatacataatttaaaatattttatacaaatttttaattcaatgtaaatataatacccttccctaataattgaccaaatcaaagatttattattttctcatttaatttcatatttattagataaaaaaatttatttttagtttttgaagtgtgaaaatgtgcaagtaaatacatcttgcccgttgtgctttgttgctccaaaaactgcactacatgtcttgctccattgcaactttgcacaagcctgctgaaaacaaacaagtgtgtcagttgtggctcctgctgccatgactttcatgagctggtttgaggaaaggatggtcccagtgacggatccaaaatttttactttgtatgagcttatttatcattaaaaaatatttatacttatattataatcactcttactaggtttatttaattttgtgggggcttttttattattttggtttataattat

SEQ ID NO: 254843 - DNA, 704 bp, Cannabis indica
actgtcgagtacaagcctgtactcctcggacacctgaaatcaatcacaaatggaaaattcagcaatcttcataagacaattaacaatagcataataatatggctttgttgaatctaggtacctcaactagccaatctattagaattgccctcatgcttggagttacatcattttgaactgtctccatgaaatctgttgaaggccgtttattaacttgaaataattccaatgaattgagcaaagctaagaaaaaagaaataaagctcaatgcacaatggtaacatcatgaaaaatagttcaattcaaacctcagatgcacgcaaatttttataaatatcacaagcaatggtagcacacaattggggatctatgaaattactatctacatcaacactttgaacataatcaatttccatgtccactgacacatctctattacaaatgttcccaacattaaattttaaaaagtaatttcagcacaataaacaaaatgaaaatgcagaggagattattggtacaaacctgttgttgacttggaatgttatgaaatgtaaagattgctaaatgtcttcttgttaatagaagcaaagctcaagactaaccctaaaaggacaattactgtaacaagcaaagctcaagactaaccctaggtaatcaagtctaacaagatagatagatccataataatatgcaacccacattat

SEQ ID NO: 254844 - DNA, 580 bp, Cannabis indica
ttgacaccccttagtccttttatgtgtttcggtgaagctagtcacacattctcagagatgttgctgttttgcaaaaacgcaagactcgaaacttcctgcttccgtatgagccaaagttgaagttgtgaatttgattgatctggcttcatggatcattgtacttgtgaaaaacttgacgaacggttgaaacaggactctgattcggataagcaaaacccagtgaaccagaatgttgacatgggtgctaaggccttttaaacgagctcccaggattttgtttttgatactttcaaggcttccaaggcttctaaacttgaggacagggtctctccccctatttttgaccatgccaaattcaatagtcacatctgatttggcattcaagcaattgaaggcagcgtcccaagttgattgtcaacttgggcattaggccgagcaccaagtcaacatgggccctgggccctgtttctaggcactcgagtttgtggttttctccttgagtttactcgaatctttgttatttctaatgacggtgaagatgcctggagcactttttactgttttgaattggaaaaaggcc

SEQ ID NO: 254845 - DNA, 470 bp, Cannabis indica
gaagtccttaaatctaatcatttcaataatccagaaagaatttttaacggtttgaaaagttcagtagacatgatttagtacatgtcaaagttcagagaacagaaaaatcctaattagccattttattttgcaaagaatttcatcgaaatttaaatgtaagcctaacttcatcaaaattaaatgttagcttattgagaattttattaaacaaagactaccctctctataacatcaactagccaattatgaattcatatttacgaacattaaaattttgaaccaagtctaaaactagctgacacagaaattattcattttgtttctcaaaaaaaaaaagttatattatttgagtatagtttttggtgttattcattaaattgtttttccttcttcataaaaaaaaaaaaaaaatgttttctttaattttttttagttaaagaaagataaaacttacattaaaataagtacat

SEQ ID NO: 254846 - DNA, 514 bp, Cannabis indica
tcatatttgcttttgtgtcactgaatttacagggaaagacaacctcttaagcagtgcattagtgcattgaaggcaaaagattagatttggtttttttttttaactttaaataaaatagataaaatattctgtatttttatttcattaaatgaagcaaaacaaatttcagcttctcagtctgttaacggaagtactatatatagagttagtattatttgttcatttgcatatattacagtttttgacacctgaattttactcaagtttctatctcgatttttgtcaccacaacctgggttgccataagttgcttactaggccatcaatttcaaaaaatttgcattaatatatgagtgaagttaactttgcattctgtttcaatccacgtattaataatatgttttaaatcaatgggtctatttacatggtgttaatactttgaaggattaatttctatacactgatgctctaatattaagcgtaggttctttctagcactcgtaaatgtttgttg

SEQ ID NO: 254847 - DNA, 703 bp, Cannabis indica
  modified_base (677)..(677): a, c, t, g, unknown or other
gacactagattgctaagagataaacgaagaccttccaactgatcagaagaaaccttcaataatttgtagatgaatataaacaattatatttgcctacaaataaattgcaatatgcgtacccaagaggggctcaaatggttagacatatggtttgctcccacaaggtcttaggttcgagtcccacctgggtacctacatagcaatcgttatagtttcctcgtccccaaatattgtagggttaggcgggatcctagttttttttttaaaaaaaaaagaagaagaagaaattctataagcatgaataattaattttcttttcattcaaggaaaatgaatgaaaatatatgtttagtgaatatacaaagaaaattcggaataccaaactacatagactaatgcagagtgaattgccaaaaaaagaagatttttttttttaaaaaaaaaaaagtaataatgtaagtgaataaacaaagcaaattcagaataccaaactagtaactacatagactaatgcagagttgaattgccaactatgtgggtctaacatttggtgaagctgatcatgatagcatgaacacgtactgcaatgttcccaatgtgtgagaaagtagcagtatccttttactacacatcaaagtgacagagaccttgaaactaaaagcaaaacaaccagaacngggaaaaaccgtaactatcaaaaata

SEQ ID NO: 254848 - DNA, 708 bp, Cannabis indica
cttgcgaagaagccagatgaatttactcctttgtaactttgttaaagaagaatgtttgtgtcgatcctagtcccacactaaagtttgttaaggacactcgtagcgatgttgggagttttgttccagaaacaaattcagaggtgttggttgccgatgtattacctggattagacactatgatgtcgagtgctgatattgtagcacaaatgcccttcattgatggttttttttatgatccagaccctgaatgttatgttgagggcaatgatgacgtaagagatgaccaaggtacagaggtttctgttgttgtagctttgaacttgactatactatcgtactaaataccactcaggccaccgacacgaaagtgaatgccccgtagagaaaatcctcaaacacctggtactagtagtagtcgtccaggcaaaactagtaatgctagagaaaccactgacagtacaagtcctaataatgttagaagaccaatgatgctggtggtcctagtgatgctagaggactaatgagactggatttagcgatccattttcttattcgacaagttacagtaaagtcaaggagaaaatgtttacaagagaagacatcgaggatcatagtcattatatatctatgggtggcacaccaggtggggagttacatgtaggaaagttttttagagacaaagagcatttaaagatggttgttggcttg

SEQ ID NO: 254849 - DNA, 3228 bp, Cannabis indica
cagtttcaatcgcaattattaaattcaatcgcaaactgcaccacacttgcacggtttggaaaaaaatacgaattgtaactataccgcaaaggatttcaaactgtactttttatgcggtgtgatgtggtgcggacagtttatgcagtgttgtgtggtgcgggaagtttatcgatttaaccccaaaaacttaagacttgaggatcccagtcgaagaaaccttgaatgctcaggtctgcgttttgaaggacaactgattgcaaagctagggagagaaaatgacggtaccatcaagcagctcttgcacgttgtcagaatgagctgatctagtggatttgggcgtataaccttcccttggtccttcagctgcctcccagcaatctttaaagacctctattttggatgatcctcaaagcaaggcacacgattattgaagccatcaactgagaggagccaccattgaagccgataaagagaggagttcccaaacctaggcgccattagatacctctgattagctaagaacactagttggatgacctaggctatcaacactttagtcgagagaagaagtgaagtaaaaaaatctaaaccccaaatctaggtgaagggagaggggaaaaattttattatctttttcccacttcgtgtaaaaaaattattgatgacatatttgatatttttacatattttttatatcgagtaatgtatatttttaattttaatcataaaaagcattaagtgggaacaaattagttttttttttattttttttcgttcgacataaggatcacattatttacaattatattgttaaaattaattacatatcatgtatcaaaaatgatgtataatttaagtgtatcaatcattagtccttttactatacgtacaaataggattggacatctcatccaatccaacttttttcttctcattctatccaatctaattagtaattaaatttatataattatcatccgatccaatccgatttgacctcaaaatccaacctaatcaattactaattggattggatcaatttcgtaattacacactaaatttttttagaaacttaaaatatgaagaaaattacataaacctaattgatattgaaaacactttaagtaagagaaaaggaaggagctactaggtttttcctagggatttaagactatagacttgtttgaaaaaatacaataagccaaacatgctattcttttagttttaggtggagttgaattattttttaggaatactaattaatcaaatgtattaataaataaagagagcctaaaatataattaaacaattttctttttaaatgttttactatatataaatatttttataatatatattaattgtaattgtattgaattggtttttaattgatttttgacattaacatttaataacctatccaatccaattagacatttaaattttaatattgaattcattccaattgtaattagacatttaattttttataattaaattaaattgaattagttcaattcaattacatcgaattgtatcatgtgtatccctacttataaaaaaatattaggcaaattattttcgaaacaatgatgagatatgcaacctttatgagtaatgtactttgcaaactatttcaaagttaacttaagttcttaacaattaaatggaaaaaaaataccaaataatcacaatctttaaatattatttgaacttactttcaattttaaacaaaaatatcatttgaacgtaactttaaataataataataaataaatatcatttgaatagcaaaaataaggtgggagccatttttcttcttattctgtattagaaaaaaaaaaaggtaacaagtagtaacacgtgaatagcacgtgcattatagttggggacaagagagcccacaaatcaagcaatattcaggtgatgaaaaaaattagaaggcttttttttttaaaaaaaataaacgttcattaaatagagaatttagacctctcggtcattacataatatgttcttaggaatgggagagatagaaagtcgaccaaataagttgtgggtaaacgcccacttagccacattatgggccataaaattataagttctaaaaatattacaaaataaacaactagcaaaagaggacatgactctattacaaaaggaggagtaattttaaatttcccacctagggtccaccctagtgatggaattgactactggattagagtcactctcgacgataataaatttgaattcttgttccaaagccacctctaaagccaagcaaacagctgccgccttaccgcaaagagcgtcaaagtaatccaattttgctgaggtcacccaaatcacctcaccaaggtgatttctagcaacaactgcaatgcacatgtgttctgaacctactttgatgtcgtagtttagcagcaagtcttagggaggcagacaccaagtaagagatcgactaaggggaggaggatggataaaggaagatctgcaatatgcaaaagagtgagaaattgagtcaatacattgcttcgcgctatctattttatgtttatgtaccttatcattctgaactttccatattgtgtccacaacaacagaggcatataagaacacctcgtccgggttaacacctttgtgctgaagattccaaatgaacttaacccaatcccaaactctaatctcgatgtcagtcataggaaagattccccacgaggacaagcgccacaggtgataagagagattgcagtgaagaaacaagtgctcggtcaattcatcttccattccacaaattgggcaacgtgtgtcctcaataaggaaacatttaattagagttgacatggtcgggagcgcatcaaagagaatgctccaccacagaaccttgagatgctcaaggatcttgctattccaaagcttgttccagagaactggagccacttgacagtgggggttcctattgagggcttggataagataggccgacttacaagagaactgaccattaccttccttcgtccaaatccaatgatctttcccccgccctgtaggtctacccccttcaaaatggccctaactgtttcattatcaaacaggttatgcagcttctggagatcccactcccctatctgttaacagatcaatcacttttccagacaaaggaacatgcacccccttagcctttcggaaaaaaatacttaccatgagtgatccaagggtcatccc

SEQ ID NO: 254850 - DNA, 797 bp, Cannabis indica
actaaacttatcatttctctacgatttgacgtactctacatttcggtgagcaaagtttgacggtcgatcattgcataaccatagacacaggaagtatctatttacattttcttatttttttttttctacttcacactttaagtttactgacttgaccgtcagagtgccttcgaccaataccaccccggtgtcccaaggtttcacgatcatcttttgtctttgttccgcaggttgtcgttgcccataaacgctcattccgatcattgtagattttaacgtctacaactggtttcagcaaatatatatatattaatactatggttcatacattcaatatattgaggagaagggacctcaaaatttatgataatgagagaaacaattcgatagagctcactaacaagaactcacaagaagaaaagctccttagaaaaaaagttagcggctgcaaaggttgaagaagatacaatcctttaccctgaagttcagtctatttggattgggccaacgaacaaatgggcttttgaatttgttttatattttgaatgttgtttgtgctttgtttttaacttttttattttttttatttttttttatttttaccaccttgaggacaaggtgattttgaagggtggaaagtgttagactataaaaatactataggggcttattagtaatttataaaggctgtgaaagtttataaatatgtaattgtgtcagctattgttggatatagattgagaaaatagaactttggttcaattggaagattgacactatctcgaagagtgcatttc

SEQ ID NO: 254851 - DNA, 1417 bp, Cannabis indica
tatcactcctatttactctctttgattctaatgaacccagaattctcgacccctgtctcagtgtattttggggatatttatagtatttttctggggggatccctagaacggaatcacttgtctttctgtgcaggttcagtaagggcacataatcccagcagatataaaataggaaatacatgacctataccgtaggtatcttaggagttaggtgggtataatcttttatcccttcttgattgatgtgatccctcataaagtagccgtcactagccttattaatcacagcgtaatagctgcaaaagaggggttacgccgtcagacatattgcttatggcagttccaatacgttttctcccatgcggcattaaatgtgaggtgactgttcaaatagagtccagtacctcccggagatgccttagcatggccctggcctccaggagtacgcggagccttctcccatcttctccggggagttatcttctcattgacactcctgttgccaaagacttagctgatttctttaagagttgagcttctcagctccacgtgttgtcgttgcactagtccacgattttgggcaaaatagagggcaacagcggagcatgagacctaagtttcggctgccataccctctagtcgatcatgtatatatgcatagtattaatatatactattttcccaaacaatgtatcgatgcatacattatagacaataaacattacaataataaagaaagtacacaaacgtgataaaattagattgaaattaaatatttttggttttagctctgataccatgctaaaattataagatgcataagattacatctcaaaactaaatggtcataaaagaaatagcacatgtatcttatatgtcatgactgagccctaagtggtgatagatatgtgatatccacaagttgaatggtcaaaggtcacactttgatccttgttgagaaataatacttacaaatggtcttttaatttatattataaaattatataaaataaattttttaaataatgaaatacctattagaataaatagagtataattgtaataaaataggaccacttgttaatatatataaaacaagaatactctcacagttattgtaaaattttttattggaataattgataaaatagacaaaaatagtatttatgatagtttcgaaattggttatgtatttgcatttagtaatttcaaaaatatgttcacttttcttagtgtgaaaagtcttttaaattagattgtgactattatcctaaattttgttcgcttgatgtggcatgtccacatagtcaagactaaggacacatggaatacatgttgccaataacaggacaaagtcaccgtacacggcatgtccattgtcaagggttctaaaacaatcaagtaaaactgtcaatca

SEQ ID NO: 254852 - DNA, 728 bp, Cannabis indica
atgttatttttgtaatttttttgctcggcgacaacagaaaacgcgatggatggctagtttgatcacatgggtacgtttagaaccttatttcttggtgggaaatatattggagaaaataaaataccgaggttaagcagggctattgaatttgaccattttatccctagtcttaaaaatgctgaagttgtaagttaaggggcattttagtctttttgttaaatggagagtaaggtggctacctagacatgtcacacctagaaactaattattcagcaaggttaattcaattaaccttagtttcattttagggaaaatataggaaaaataagaaattaagaaaaagtcaagagaaactctttctctttcatcctttctcttcgagcagcaccacaccaaggaggaaccagctgatttcttgctatttttctggaaattaagaagggattcaacggttcttgaagccaaggtaagccctagtaaaacccttctttagttcttgaattttatggttggttgagtatgtgattttgggttttggtggctgttagggttagaaatattagggtttggtttttatgatcaatttagcttgattaaaggttctattagctagttttaccactttgtgttgaatttatgcaagtttgagcttagaaactcaaagcttaggtctttaatggcatattgtgatttagtgtgtttttgtgggaattattggttggaatatg

SEQ ID NO: 254853 - DNA, 846 bp, Cannabis indica
agagagagagagagttttcagacttagaattcaacttatgacttttgacttagggttttagggtttggttaaagactctttatctaagagagcttaaacccttattttatcagataaaataagtagatatttacatattaaattagtaaaatataaatgactaaaattctcttaacaatagataatttccctcaatttttgtgggttgttaaggcccaattcgcagtctagcttgttgaccatgcataaagttgtgcaccaaagtcctgccaggccaagttctggctagccatgcatctacatgatgcaggctggtcggccttatgctgtccagaagctagccagcctatgctggccatagggccagccagcctcctagagatagttggtctgtcattcatcatcccatttgagtgtcgagacttcccgttggtcgaagtgttgagtagatgacttggccttttggttggcgagttgtactgccatgtggcgttgatatcggtcacgtagacatgccacgtcaggtgggcaaaaaccgagataacatttgcctcctaagttcatgtgtggacgtctatgcggatagggactttctagcttagttgggactgatgtagccttagttgagtaaatattgctacatttttagtctttgaaataactgctcttgagtgtctgatctcacttgctgcagtaagttaactgcattgtatttccacatgctttttaattgaacactgggtggcaagtgaagaagtggtcccacaaaaactatataagtcttatggaaggaaactcctcttcacttttcacttttcgttctctcactagaaaaattaactttga

SEQ ID NO: 254854 - DNA, 1116 bp, Cannabis indica
tagaaacccggtcttctattcgaaacattgagattcaaaagtgggacaattggctgactaaaatagataataaattttccaagcactacataagtaaattcaaaagaaaaatacaaggcaattacctgagaagtggaaagaattacagaagtcagttaaagaaatggttaggtcaacaagcacaagcaccgacacaagaggaaatgtagtgcaattttacaaaagaagctccctcctaatttaattgagagatcctgagtagttttaccacagttgggaggatggaatgaatcaatgttctatgtggtttggggcaagtattaacctaatattgcactggttagtattcaagagattgtaactagttgactgttgtttaactaattcaagggggtaattaaagatgtcattgtcaatgtggtcaaatttatttttccatttaattaattttattgtacttgacatggaagaagatagtaattacatgctcatcttcctgatcagtgcctatatatgcaattgatctaaaaattaaaagatactgattagacatcaacacaacatataaatgataacgtacgcatgtttttatatagatgagaataattatatattaattaagattaatttgtgtggtccatgcaggaactaaatgattgattatataatataagatatctatataaattaaaaatatcttcttcctttcatttagagtaaaatttatggttaaattaaaaaaataattataactaaacatatataatttatattattattattattattatatataaaaagttagttaaatgtattaataacaaaaattataatttgttctcatgtatttttagccgtaatatttgatgtaattaaaattaaattaatgacaattatatttaaatacaatttttagtaataagtaatttttttaactgaaaataacatttagtaacaaaaagtataaaaggctgtaacaattttttggtgtgatatatataattgcaagtgaggaaatggccataaagtagtaaaaagaagctataaattaataacacttttatgcaattctctgcatctgtccatatatcttttaggttatcacttttatttata

SEQ ID NO: 254855 - DNA, 903 bp, Cannabis indica
gattaccaatttgatatgataactatagaagtcaaaaggtgtacaaatgtatattagtgtggcttaaaaatgattaaagtaaatgtatgaatttgtaatttttgttctatgacgaagttagaactttaggtaatttgatacttcaaggtgatgctcattcgtggagtgggatttcaaaggtcactatatccagttagctaagaggtacagagttatgggctacagatatagcttgaattttcatatgatttgaaaatggtttatatctatttttattgttaggaattgtagtactaacctgtatttcagggttcttagtattaaattggttggcacaagtattggaggccaagtgatggagaactgtgatgatgaagatttgtatttataatcactgacttgcttgataattttacaatgtgtgtaagtacattaaaatggttgaagcggtactagaggatttgatattgttagaaggaagaataaggactaaatgttgtgcattgattgatcagttttgttgattgttaccaacctaatatgtagatttattattgtctttagaataaaactaaacatacgtgattttggcacgtaacctctacctagttaactatatagagtactgtagattaattttgatggagatgacaaacttaggcatgtcaaaatatattgatatgaaagccaacttcatccaaaattgatttcaattactctaataataactttacaagaattttgatgtaccaatcgtcatccatatcattgtataaatcatcgattcaaccaataaattatattatttatctaaaaaattaatactaatctcataatagatacatcataagagtagctttaacttaaatctggattgaatacaatccatttttaagtcaacca

SEQ ID NO: 254856 - DNA, 608 bp, Cannabis indica
taagtcccctccctaactctataagtacatattgtctcatcacaatcatatacttttgataattagataaataaactgtttctaatttagagatatagggaggaagatttagttgatagtattgcactttcaaattgcaataattactatggatcaatcaggtacgcatatacctaattattatatattgttattgtgctctatattatatacaaatagatcttgggtttattaattaatttatctaacaagagggacatgagacacgacctaatcgcatcgtttattacatcagtctcttctaccgtcgtagatccaaagtcttcaagaaacctcttcaccgtccgccgcctgagctcttttgcatcgatctcagccatgaacaggcaattcccgtcagatctcgcaactgtgagagagcctaaaaaccatcgacctaggggaagaggagttgtcaatacaatcatcctgtggatgcttccacaggacacccttagcgtgaagcctctggaaatggtgtctctactggtcttcaaggccaagaaccttatcccaagcagtagaacagatcaccgtaacaggataatgttgttggattttatgcccta

SEQ ID NO: 254857 - DNA, 1712 bp, Cannabis indica
gataagccacctgtcacttatgtgtatgctaggaagaggataggaaacttaaagataggggtgccacagggaattaattggctgtgtaagttgttttgggagtagtggttgtgggatataaataatgtgtagcttgtttgggagggtttagaaaaggttttgctaagtgtaaggaccaggctctcgaattcctggggaagtcagtaataccagtaccattttcatcttcatcttcttctttcttctctgtactgaattaatagataggctaaatcatgctggcctcaaaaatcatgctggcctcaattaaagaaaccaaggaaatcatgttagaatttacgataagatgcatggagttccatgttagaatttgggataagatgcatggggttcctaaaactatgcacctaaaaatcggatactcagagtttagtttggctctgataccatgttagaatttgggataagatgcatggggttccatttcaaaacaaattaaataagaggagtagcccattcattgggactaactctaataaagacaatggatcgtctattggtgaacccagctctgtggcggtctgtccagatcagcagcctccgaaattcccaacgaagatggcagtacaacctctctcaattccgacaggaccaccatttcagctgggctcaattcaggccggccaagttcagggactcgattaccgtcctacgaggatggagataccccttttcactggcaacaacctcgatgataactctataaaaatagaatcatttaactctttttgtgcattaaattaactttgttcttaagcatttttaatttattttagtactctttttatttaattttatataaacattaattttagttctttatatattaattttcataactttgaatttaatttagttttctatgttataagttttaatctcaatgttgtgtatttttgtaaaaaatttaaatgtatattttggacttattgtcaaaattaagagaaatgatgttaaagtccatgaactcatggaagcccaaatatcttgtacaaagtattcatacacactaaagctcacagtgtattcattgtttgtagtgtggataatagaagaaagtaaatgggccacgtgacccatatgtgaacccatatgaagagcaagcttttgtaacatatatggaaagaagaaaggaaatgggccattaaatgactttgtaattttggatggctcaattactttctcttcgtatatgtaatagtaagccaaaaagaggagggggaggcagaaacaaagaagaaaatgaagaaaaagaagaataaaaagaaaaaaaaagttttatttgagtgttatttagggtcttagttttatattttaattttgagattggcaaaaatcaagaggaagaagaggaattcgaaagaaaaacttagagtcttgtgacagctctaaaatgggtttttatttctatctttcttttcttttaaactttgtaatctttgcacaatttattatgaattaatttttatttttgctagaattattttgttgacttgaaattgtgatttgatattttgttgttatatttaagtgaattgattttgtttaatcaagagtgtttattttgtaattgcttacttttgcttgatcactattagtaaattgcaagctaatcttgattttgacaataataggattagtagaattacttg

SEQ ID NO: 254858 - DNA, 1058 bp, Cannabis indica
ttttctgaaaactgctttcaaaacacaaggccaaacaggccttgtttttcgaaaaacaattttttgtttttaaaaataaaaaacagtttttcaattatgatgtcaaacatgcacttatataatatgtttttagtttggttcttcaaatacaataaaacatctctattttagatgatcgatatgtgacactaattataggagacatgaaataaaattacgtttagtgtattttattttagcttgaatgcattgcatacatttaaaaagtattaaattatataagattaatgttatctaattttaaaaacactttattattctttcaagaaaactttttttttttaaataaatataagtacaattttcataatctagaacacttttttcaactacctattttttttttaaaaataaaaaagctctattatttatttatgggtaaataatagcataagtacctaaagttttaagtttataagtagcataatcctaatgtttatttttagcggcataagtacccaatgtttgtaaaactgtaattttttttttctaattttgtcagtacaagctgtattattttcttaaactggccacatataatgtccagattcttaatcattcggtctagacataaatatatagtatcagttacttccaaaactggaaaaaattacagttttacacattaggtacttatactgctaaaaataaacattgggtttataccgtttataaacttaaaattttaaatacttatgccgttatttaccctttatttatgttagagatattattacaatggaagataaaccaagatatatacaactcaattgtaaaaataatacaaggacaataaaagagatttgattaaatatatgttacaatacatatatatacactatatattacatatatatatatatatgaaaggtagaagagaagatgatacaacacatataatataatatatgtatatattacaagagaataatatatatgtatagactcactcacaaccttgagtgtagattagtggggatcaccatgacttgaacaag

SEQ ID NO: 254859 - DNA, 1091 bp, Cannabis indica
aggtcaggtttctttcgattcaagtgctcttaaaaatccggttgggagtaattgctgacagtcctcgtcttactcacagattgtgtcctactcatagacttcgtcctgctcatggacctcgtctttgagtgacttgcggatttactggttcccacgttttctcgatcattagctcgttgagtactctctccccttcgagttgatcgactgtgagtccttgaccgttttgaggtcacacttgcttcttcacgctctgttctttccccctgagttcggtttgtcgtatttcccccattagggtctgtacaagccctcacttttatgggttcgggaagaatgctggtgatttctcgtaggtgacctacgttctccaagttgagtcccaagatcctcctcattgtcatgaggaatttcttgttcatcagtttttcagttgcctcccattctcatttcggtgagagggtttctagctgatcattctgattttcaggaggcatctcattttccctgggttgttcttcctgggcatttttctatctcctagttcgtgagccacgaggcctgccttacagttttctcactccaagttcaggttgattttgagcatttgtcccctgtgccgccctggccgcggctgcatcacgttctaatttagcgttccgccgctgcgcctcttccagacggcgtcttaggcggtagttttccgtttcataagtactttctcccataggctgggtacctccacgattgggcttttcatcccttgtcctagggttctagtcactcccacgctgagttctcctcgagcgtgttgttcgcgtactaggaccaacgtcaggttgggtcctccgggaacgtgtggcccgagtggtggggccacacccagtttgagtcctcctagaacaggtggtccgtctggactaccggttggtagatcttctggatcccatgggctctttcccaggacgatgatggctttcctcatgtggggtattaacattttttggattttcagccatgaaggaggtgatttttcttcaaaagaaatgagggttttttctgagctttttcagaaaggctctcaatgaaag

SEQ ID NO: 254860 - DNA, 560 bp, Cannabis indica
ttctaatcgcttattaattgactcactgtcgttggctaaaagcgaggtcaacattttggtactttcattgagagttgaactcaagttttctctttgccttaaattttagcagacacacagaatggtggtgcaaactcgcagaggcgtggttgaccagagtgacccattgctgacagacctgccttgaaaactcttgggaatacaagggtcccaccaagaaccaatcctaggcagccaaacatttagacacctactgtgggccaaggtgtgacatcccatctggctgagatcacaccaggtgtgcaagagactgggaataccagttcgacagccgatcaaagcactcctagcactggaatcccatccacaaccaatgctcagacaatggtagaggatgacactgagattcagaacctttgtaatgcccttggactcatgcaaggtcacactaacaccttgcatcatgatcaggaggatctccatgctgcaatgaaccttgcgttcgaagagcggagacatcagttcattgagtggagggatagagagatggaaacattgaa

SEQ ID NO: 254861 - DNA, 493 bp, Cannabis indica
aaaatatagagtatattttgtcatttgacaaaatagagggttcaattggcaacttttataaaacacagagtccaaaatgatatttattacccttaataataataataataataataataataataataataataatagagaaacgtgagtagttttaataaagggataatttataaatacataaaaataataaaaaattataaaaatacgactcgtacataattttaaatatctttaaggtttttaagatttatttacaaaaaatatggtatttttatgtacttttatgatgtacttttattattttgttattgatttttcgttatttgtatattatatttttgttgttttgatgttagttttctgttaccttcatttagtctttcttttctgtaaataccgttaaaaatatttaaaaaaaactttaaatgtaaaagtgtaaaaattttacattaataaaaagaagggataaattgaggaatgattttttttt

SEQ ID NO: 254862 - DNA, 542 bp, Cannabis indica
ttaatctaaaattaatactaaaaataacctaacagtattatgtaagtaattatttttattttaaaatttgtaaaaaaatgattttttacactattaattatttatattatttttcacacaaaaaaaaaatttttttcatattttttaagagttaaaagcaaattacttaaagattatgttatatttgtattagttttgttaaaatctttttattttaaagctgtatcaattttttaatttttatgggttgttggtatatagattttgtagtatagtataattctgttttgttgtatgatatgttattattcttatatgatatttattttttattttgttatgtataatagtaatgtataatttggttagcataatacaaatattttaatgtatgtgttatacccaaaattttgctgtacttcagaaagtgacttgtgtcaattaagtggaatatgaaacaccagatataataataataattaaattattaaataaaaatagaataactcattaaatatagaattaatagagtatattcataa

SEQ ID NO: 254863 - DNA, 636 bp, Cannabis indica
taactgagattgaatttacaacaaaacttctggtgttactattaccaatcaggcaacttccaaatagaaggcaagggcttttctactgtttatctaaaatacatactaatgagaaagtgactaaaagaaaaacatttagactggttactaacagccaaaaaactaagaaatccattgtaggtccattgcatttagtaaagggaaaactggatgttctgtctcatcatttgttcaagaagataaaaggcttttccaattagtgtaccagaattaataatagacagagagaatcttcaaggcaaatatgatcttctaaagttctttaggtctctctacaataggcaaacttacatgaagttgacatcataaatctaatttaatgagagagcagagaatagagataaggagcagtaatatacattgcataatctgaatttttaagtcaaaactagtaaaacatattatatatcaataaggatacgcaagacattgaccttcatcctgttctcctgccctgcaacacaagacctcaatttgaaaatagtccttaaaatatttacacgtacataataaaaaatacaattttgtttttggtcttgtcttgactatcatttttttttttgttgttgtgtgttt

SEQ ID NO: 254864 - DNA, 1130 bp, Cannabis indica
tataaatatttaattttttcaagaaaaaatttgtaatactttaaaataaaatatatttaaaatcttaaaaaattaaaatacttaaatgaaattagcaatacgtggctcggcacgtacattcacctagtatgtatataagtatataatgtatataaaaaaaagaagggtaaatgctattttagaccttgtgtttcgcaaaagttactaattaggccctttattttgttaaatgacaaaatagacgttgtattttctaaaatggtaaaaataagaccctaagcttaatttttgacaatttttttttaatatgaccaacttaaaaacaattcctaacatgaacaaatatagaaaatgtaaacagttttttcataacacttttagatcagattattattaaattttattttgacaacatatcaattcaaggtcctatttgtaccattttgaaaaatgtaaggttcattttgtcatttaacaaaacagaaggtctaattggtaacttttacaaaacaatgggtctaaaatggtatttacccaaaatagaataaaatgatcacataggtaatatttgaaatataaataaattaaaggattaattttggtaaataataatttttcaaatattataaaaaaagacactaaaatatttaacaattatattttggaatcatggtttgaaaaataaaaataaattaatgaatattcaattaaatattttaccaaaaatcactacctatgcaacaagtcaccaacaagttgcctatttttatgtatttttttttattcaaaatgttattcattggatttaatatttttgtttcaaatataaagataatattaactattaaattaagatatgagggtcataaataaattattacgatagtaattaattttgatcactactaaagaaatacccacatagaaaaaacatatatgtatttcatttgtaatttgaaattaattgaaatgagcatagtctaattgtttcacatatctcctcacaaaaagagatctgaagttccagtctaacctcccctaaagtcaaaaaattgggagcaccatcaaaaagcagtttttgaaataaattattttatttcccaactctaattttagaaaaaaaaaataaa

SEQ ID NO: 254865 - DNA, 526 bp, Cannabis indica
aagaaaagacttaatcattttatttcctctcaagaatcttggttaagttgggctcaaatggaagtggaatatataatgcaccatgatcctaagttggaaagtcgcaatctcattaaacctttgaagcacctcggctgggagccgccccctttgaacattttctgcatcaatagtgatgctagtgtgcattatacagaggctgaaattgggctgggagtggtaataagaaccaacaaaggtgaggttactgctgctgcaactcaatatgttaatggggtgttctcaattgagttggctgaagctcttgcaattcaaatgggaatctctttggctgtccaaacctcagctatccctttcataattcaatctgattgtcttcgggtaatcgagtatattaaagggaagttccaagctaaatccgattggggggctctgttggatgaaatgagagaagatcctgcgtttgttcactgccaggcagcgtctcacaccagcaggaacagcaatagggtagctcattctttgg

SEQ ID NO: 254866 - DNA, 626 bp, Cannabis indica
gagggaaaaaaacacagtgggatagtggcaattcgatccacatcaataggcaaaaaatactggtttaaaagagaaagattccattctttatgctctgtgatgaaatgtgccactggtagattagatgggcctgaatagcttattggcttgaaatcattatgagcagggatccatctatcagaaccagccaagacattgaaaccacttccaattttaaaacgcaaaccttctaccagcagttctcgcccccaatgaatggcttgccatgtgagagaaggagagtggccaagtcttgcctccaagaagcaattatttgaaaaatatctgtgtttaagcaatcggcttagcaaggaattcggattctcaaagattcgccaagcttgctttgctagaagagccttgttaaaatgtacaaaagaacgaaaccccatgccaccttcaaatttcgacttacacaacaatttccaacttctccaatgtatcttagaaccatctttgttagaaccccaccaaaaattggccatcatagattctaattggttacagaatgtcgaaggcaaacggaaacaactcattgcatatgttggaattgattgtacaacagctttcaaaagtacctcttttcc

SEQ ID NO: 254867 - DNA, 635 bp, Cannabis indica
ccatcacaagtgataatagataactttttatttgcatgtaatctgtttatagagtgaataattaacaacactgaattatggtgttagaaactaaacgacttgtcgttttatcgtttataccatcatcatttggtttaggtttgttcacgttgatgttttaacataattgattttactctcatgatgtttagtttatagtactgagtgttcgttacactttatttcaatcatatagattaatattcacctccaaaattaaataaacggattctatgatattcagttgttacattgtattgaactaaatatttaaactgtgctaagatatttaattgtttgaacacattatttttttttacaaaaagaaatgcatatattcattactggacaaattatccaccaaatagcttgaaaagtagtagagactgactgaaatcctctgtcccaattgaatgtcccattgcctgtcccaataatcaaaaattgacacatgtcttcctaattaattctctattaagatttgtttggaaagaaaaaacccatgcgtgccttttatttttctaggaagttggaagacataacttaataccaataaataaatcaaatcatagaatctcaatgcaatatatatactt

SEQ ID NO: 254868 - DNA, 568 bp, Cannabis indica
acaaaacaaatctcagattcaattcaataaacaattataccatctatcaagaattagttagttatagttagttggtattagctgtccaagttggtatgtttgttactttctgttatagttgttacaactgtaactgttttccttttgattgcttacctgtatatatagcttttctctcttgtatttttctcagattgtattcttttctcaatctcagtaataaagactattgttgttcttcttcctctgttttctcttcttctggtttatgcttactgatatggtatcagagcagggtttcgagtaggcttcttcttcgttgttcttctttcttcttgcttccgcttctgtgttgtgttaatggctagaggaggaggagttagaactcgaaacagtcgtgatcctgaaaacaattcaaatgattctaatcatttttctgttcttggagagaattcaaggtcgactaccttcaatgatctttccaatccgtattttctttccaatggagacaatccaggtgctgtattggttcccaaaatcctcacaggaagtgagaactttagcacct

SEQ ID NO: 254869 - DNA, 731 bp, Cannabis indica
aatgtatcattaattcgaccgacgtagcctttcttccacgtttggagtcactcatactccaacaattaagaagcttggaaagcatatgtcgtggcaataaactcccaagaggctcattcaatgaattgagaacggtggtagtgagtaattgtggtagattaaagaatttgttccctttgagtgtggccaaactacttcatcagattacagtagaagaatgtgagatgatagaagagatcatagtgagagaagatggtgatgaagttggccataacattgatggtgatgatgatcactcttcttctttgcaattacgttccttgcatttagagtatttaccaaagttggtccaattctattgctccaaccacagggcagtttgggagtcagatcattcgaagcctttattcagtgaaacggtacaacattaattcatctctttatatatatttggtagtacacttgtttttatagtactgataacccaattgtttatatatcacttaccctactattaatgccattttgaacatttttttcctttccatgaaaatatatacaaacaatatatatatatagcagtttaatggaatcaatagaaaagatattattaaataatattataaacattaattaaatatctatttatggtaattagtttaatcattaatgatttatattatttaatgattaaaatgtatgatttcatgtaatatgttttcaaaatgtat

SEQ ID NO: 254870 - DNA, 1933 bp, Cannabis indica
gttacacacaatgtaacaatcgaaaagatttgcattgaaattgaggagagttacatcaacattgtctttccataataaaagtaaacccccacttaaacctatcctagggacttcaagtctattattgaaatttaaagactgacgaaaacgaaaaacaacattacattctaatttagtttctataataaataaaacatgaggagtttgctctttaacaagcaaacgaagatggcgaaatgcgcgtgggttccccaaccacgtgcattccaactgaagattttcatggctggttgggaggcgtgggaaacagcctccgcaatttttccaaagctaccagatgtatccacaatagattcagaagcaatctgctttaagtcatcattaagagacaaatatgatgttgaaattgtaggtttgggtcccctacatcgcttgactgtcttccatagagacatgttttttaggttttctattacacactcagtttggtgagcaattttccttgttgatggcatcttcaacaatcatataaattatcgattctgttataagagcagtactatgtgggagtaatgggactgtcatggattgatgattacgattagccttagaatatgtgtttggtgggtaggtagcaatagagccaatagagtgaccagtagtgggcatataaatgttggtcagatcagattcatttggtgaagaagtctttgtcaatgaagatttagatgttgttgttgcagcaatttctttagcagcatcctgaactccatgatgtatggtttgttggtcttgttgatgcttgttttttgctccaaaaccaaatgttaaacatggatctgaaggcctcgaattgttggttgttagacgtgatgcatgattcagatttgctggtgcaaaaacaagtgatccttgttatcgagatgcacattcctttggtgaattcgtggatttgtggcagtttgtactgcatttgttgttgatgattggccctgggagttttctgcaatgtctgaagcttctccaaacatcaatttctttgggtgtggttggtttctaagttgaagagaaggtattgtattattgagagtatttatttccaatcgagtgagtaagggccatgcgtttcctttttgaaaaattcgttcgatattgatcataggcagaagttggtagagcagcccctttcaattctggtccataggctagttcaggttcaataccattttccataagttccatgaaaattgcacctttttggtaaggatgacccaagcatccacattccatacaccactcgggaagtctttcataacgaaaatccacccagaattttccttgatttgctgcatctttatgtttcggcctcttctcaaaggctttgtaacatcaagtttcacacgaatgcgtaagaaaggtccccatctttcacttagtgagtccgtaaaaactttccgaaattcactaagaatgtcagctaaagctttagccaatgctctggttttacttaaaaaagggtagcctataaacttgtacccaaaatgggaagtatttgagatcagtaggcataacattctgtaatgcagttggcttgtagaggatgatggggtggttttaaaagttccatggttcttgagtgaggactctctctttgtctccttcacaaccaaaggagagtgtgtagaggtcaggttgtttatcaccaattcacacaggaaaacgcccatcccagtagacattcatctgtttttgaagtgtaaagaccgcttagtttaatttggaaattggaagttaatcatgtttaattatggaaaattatttatagatatttaaataattatttatgctgttattattgaattcagaaatgcattttatgtcatatagtgaatttcataattttgcatttccggtgcccggtaacatgcaactc

SEQ ID NO: 254871 - DNA, 4015 bp, Cannabis indica
tttaggagattatgatgggtggtggtggtggtgtagtctgaagaaagaaacagagagaaagagaggagagcgagagagaatgaagagagggaaaaggaaaggcaagaaaaaaaaaatatttaatgtaatttttttaaaattttaatttttttgtgacttaaaaaaattatttttttattctaattttaaatatttatctatgtgggccaataatattgtgccacgtgtacattgtgtctatgtagacaatatcttatgtacacatagacaaccaacctagtagttaactgtcaaaaacagataaaaagggctaaataaatgctaacagactgctggttttggaggttttgctgtcaaaatttggattttagaagttaattgctactaaaataaaagtattgaggattatgccgcaattaatcctaataataataataagctcgtggatgtttattagacttccttgacattgtagaaagagagagaacaaaagataaagaaagatagatagaaagagatcgggaaaataaatagaaagaatgaggtgaaagatgaaatcttatcttattggataaaggaatatttacaggtatttatactagtcactagctagcaagaaaagagtgagcaacaataacagaattggttagagtcctaaccgactcctctaattgtaatggttgtattagcactcttgatattctccattaaaattataattgaagcaccctttaatttgaagtttgtctctaaattgattgaagcggttgaaatagcttttgtgagggcatcagctatttgatctatggttggtacatgcttgactttaacatattgttgcaacaccttttctcttacaaagtatagatcaagttctatatgcttggtcctatcatgtatagctggatttgcaatgagcaaaacagtgctcatgtacattctagctaggggatgacatgtgaaattcaaaaaagagagtgaattcaagtgatttctgcaactacattagttagagttctgcattcagcttttgtactggaccttgagatattttgttgcttcttttaagaccaagtaccaagattaaagccaaaataaatttcatatcctgatgttgaccttctgtcatctagatctgaggcccaatcagcattacaaaatacaacaacttcatgatgttgaggcttcttaagatgtagaacaaactccatggtgctactgtgagatatttgagaatttttttttacaaacatcgagtggacttaagcaataactccttgattgattcaagtgataattatgttatccacatacaccagaattagagtactaaatttaaaagagtgttgaataaataaggactggtcagatttggctgagataaaaccaaaagtgagaagaggttattccagcctttcaaaccaggctctaggtgtctaatttaacccatagagagccttgttcaatttacacactagattaggggcaaaagtatcctcaaaactagggggttggctcatgtacacctcttcatggagaacgacattgggaaagaaattgtttacatcaagttgcctaattttccatccttgagacaaagccaatgtgaaaataatgcaaaatagtaagtggattgaccactagactaaaagtttcaatgaaattaaacttgaattgttggtaaaatctcttgaccttacatttaataatttatcatcctagtggtaagcgaacaagaatgtatgtcttgtttttgatcaaagaaagtatttcatcaccatatagttgcctcccattgaggaagttgaagggcttgagcaactgtggaagggattatatatggagacgctgaaaactattcttggtttatgaacaccaactttggatctggttctcatcaaatggacatttagaaaatgtggtgcatgagcttgaacaatagttttaggtgctgcagctcgtggagcatagacaatatattgtaaaaatgatgtcatctataggactaggtgaggcatgcttaaacaatggtgaaccaggtggaacatgaattattggtgctcgtgtttcattagttgattcctattgagatgcatctgtactagactcagatgaagagccttgggtagctggtaacatttgctcttgttgattgagacaactggagatacagggtcttgaagataaagatccccataagatgagacaaacgaagaattttctggtgaattgggcaaattttgtgtggttctttcagtgttgatgattggaatttgagcaagaagatccattcttaattaaggaacaataataggtgaggaattaggcttcttttggaaggaaaatttctattcataaaaaatgtcatatttaaggatataaagtcttccattagaagcaagacacttgtattcgttttagtccaaactatatcccaaaaaagttaagattccaatctaaattgtaacttgcgtatgttgtagggtctaatattaggagaaaatatacacccaaaataagtcttgaacctgatgtactcaaattacttttaaaacagaacctctagatgtgttttgaagttaattaaaataggagtgggaagtcttctatgatgaacgcggctattctgaaggcctcatcccagaactttaatggcattgatgcttgagctaagagttaagccattttccacaataatgtgcttgtgttttctctatgccaagtcattttgttcatgtgtagttgggcaaatatgcatgtgaagaacattcaattgactcggaaactttgaaaaagttctcaattcaccacccttatttttctacaacatttttattttgctaccaagttcagcttcaactttgaacatttgaaacacttttaagactttatatttgttttcaatgtatagaccgataaatctagagtacacattcacaaaatggatataatatatgtatccatttgaaggagtgtgagaaggacctcacagattggacacaacaagttacaatggtgcagtgtactcagagtactgagaggccttgggaaaaggcaatttgtgaatcttttccaaacaacaagcagctcaaacatattgtgcattttattatcaacagaaatattataattttttaggagagtttggacaaccttacttggaaaggtgacccaaactattgtgtcaaataacgaaaggagaaaaacttaatttattacattattaacaagcaaattaagtagaagtatagttgatgtagaaataacatgagcaaagatgggtgagctgatattaagagaggtattggtgcatgtaggatcatgagtgtcagcagctggaagtatgttcaagtataagatgcctcaaaaataaaatatataggtcattcttatgttttccttaaagaaggatcaagtgattgtcctcatcctttaaaaagtaagatgcaacatggaattcaaacaacacgttgttatttttagaaaatttagaaacaattaacaagttcttagttatagcaggaacatgttagagattgttaagcactaaaggttgctgagttttttattagaagactggaaggattgacctatgctcaatagataaacctgaaccatatcccacaaataattgctcctgtccattgtagtgagtgctgtgctgaatgttagatgcatctagagtgcaatgattaactgcactagaatccatataccaattcatgtcccactcatttgatgaagtgagaatattagcttgagtaagtgcatcattagtattttcattagaaaagaaggttggagaaggaccaagaaatttcttatcaaaaatgatagtaatagttttggcattgaagtttattgttagagagaatcaacctcctcaaattgaaccaagattatctcgacctgagtgaaagtatagaaagctaaaggaatttaaatttaaaaaaggctaattagtaatttttccccctgaactttgatatgtactaaatcgtgccctctgaacttt

SEQ ID NO: 254872 - DNA, 575 bp, Cannabis indica
gtcacagatgtggtgaggatacaaagactccggagcatgctttagttttttggtctacattgcttccaatatggtctaagcttcggatttggaatctcctatactgtggtaggaatgggtctttagcggagttgcttgtttatctttttgatgagcttgatcagaataattttgccttgttatctatgatttggtggtggatgtggtatgataggaactctgttctgtttgggaaaaagcagtctagattggaagtgattattgagttagctaaggaagctttggaggagtttcaggggtcggaatgagtgctggaagtcgggttttgggggcctgtgctgctgggtttgggcaggggcggtcgaggaggggtgaacgtgaggcttggtgaggacggtggtgcccacctgtgttgaatgagtatgtgtcgtcggttgatgcggcagtcactccgggtaggggatttgcggggttttgggggttattcaaggaggtgagagtgtggtttgggcggcatgggttgttggtggtgttggggattttcaggtggtggtggcggagctccttgctttgcg

SEQ ID NO: 254873 - DNA, 1153 bp, Cannabis indica
gaagattcaagaatttcatcacatgggaacattgaatatcatttctcatgggggctcactgatacatactctcaagtttgcagtagcattctgctcatggacccctatcccctgaaaatcaatacggggttttttcatctcattactcaagagaaaaccagaagggaaacatggctgcagcaaataactccaatactgatatggcttttgcctttcaaaaggacaaaaatatgcagaacaagagtgacaatcaagggaacaaaacctatcctcccaagaaaggcagaccattttgcactcactgcaacatacacggacacacggttgaaaggtgttacaagattcatggttatcctccaggattcaacaaacaaaacaaacccaaagaagctacagcaaatcaggtgcaaacgggtgctgaaactagtagctggactgaagaaagccacactctccttccgcaactaagtgcatctcagtaccagcaacttctaaaccttctagccaatcagcaaccggttcaaaacacaccagatgctagcacttccacaaacaacactggtattgttctaacatataacactataaacatgacaaaagattcttggattatggattcgggtgctacaagacatatatgtaataatgttaaactttttcaatctatatgtttagctcctatcactaaattaattttgcctaacaatgattctttagttgtgcaacagtgtggaacagtgcaaattactaaagatatcatccttaagaatgtgttgtttgttccaagttttaagttcaatatcttatctgtgagttgtataacccatgatgatagtgttgtggttaaattcaatactaatgatttttatatccaggaatctctcagcaagaaagtgattggcaaaggtaaagaatgtagtagactctatgttctggagaaagacaccactcatgccttcaactttgccgtttctgctgacacttggcactcaagattgggccatctttcaaacaaaagattggctcttctctgcaataaattgcagtgtaatgttgatagaatacatgaaaactctacttgctatatttttcctaaagctaaacaaaagaaactcccttttgttaaaaataataactttgctgaaaataaatt

SEQ ID NO: 254874 - DNA, 1312 bp, Cannabis indica
ggaaaaatttaccgttctacccttcaatgtattttatcctttaaatacagagctacttgtaaataatatgtcaataaactaatataattattgaaatgaatactccaccaattaatctcgtttagccaagctcgaaggaaatcatcgtttcacttctatttatagaagttattaatttcgtatctatgattagcactctcacttaactgcactactatgtttccaagatataagtactgggccagttcaattagtcagctttaatgaacaaatcaaaaaacacaaataatacactcaaaccagaacctaaccatctcaagattgagatcattgatctaagatcaactaagtgagatttacttaaaaaaatattacagtaagtttatgatatctttttcactgtgaatatcggtccagtccaatgtataactatacatccaatacaagcttactttactaatgccttgaaaaagacatttaactataaaagtgtaagtaaactaaattattgattatcatatcagtataaatcttgtatactgataagttatgggactaattagtttaatcacataattttgattatttttcactgtgtagacaacacaataatcattaatagcaatgtgataagaatttaatagaatttatatatcaaacatatgatcatgaaacacacatgtgaaccaaaaattatattaagcaagtaataaaacaattatgtccctttattgataaatgtaattcaacacaacattaaattaatagggttttagttagggcacaaaatccaacacaaaaagtcttaagacacttgtgaactgccgctcaaagagtcacttgaactgtgatgtctacgccgctagtttaactagtttgattaatcaagtcggttcctaaatcgattagttagatccaaatcaacgcctaaaaaataaaattaaaaaaaatcccaaaaataaaatcacaaatcagatctaacaatataaatgatcaaaaaatctagatctagacttgtgagtcattagaagacgaacagatctgactctcgatgacgacgatgatctatcacgggtcatcctcatcgctggttccaccgaccccaatcaaagttttatgggtcagacggctctcttcctatcgttctttccatctacacccaaaataagaaaaataacgaagaagacgaaacacgaagatttgagaaatgaagattggagctcggatggcggagctcggatggtgggaatgtaggacaaagttgtttctgggaaaagaagagaggagactcgaggagagagagagagagaga

SEQ ID NO: 254875 - DNA, 1171 bp, Cannabis indica
gcaatgatctgttttttgctgcgaaatgtatggagcatccgacaccatttttccaacacacactaaggcctcctgctgaccctaggggagggacatatgaatgattgtagaaattgagttttgacattaaagagttgaggttttcatttgagagcttacttcagagagaaccaagacttcgggatcgaacttccggataagctccttcagttgcgaactgtcgctgcattcccgagaccacgacagttccaagctaggactctcatttggatggtggagacatttctgggcaagtctccacggccccaaattgaaaaacctggcttttttcttcattagtctctgaaatgtcctgaatggtgcacgattgtgtcggcttatttttacaatcaacaatgacaaaatggttgctgaggtcgactttgaggtcaatgaccttattttcccaatttgctcgtatggcgttctgccttttcctggcttcactcttttgttgctttttttttgtgaaagaattggagttgcagccaagggaagactttgaaggacgtccccttcttctgggagggggagatgtctcatgaggctcaaagggggttgttgcacggggtgggaggttagtcgcagacggtcttcctcgtcttcttttggatgtagaagccgatgaggatcccggggagtaagcagggacataacttggttcagcaagaattgaagatgcagatgcttcacatgtaggatggtcaagtggtgttaatatttcagcagaggccttaataggagatgggcctatggagataccatcaagggctttccttttctttgggccaaggtcactttccaaagatcggaaatcctcaatgtccagcaaggggttaaacaatgatggctcacgtaggtatttgtcaactgtgcccaatccagttagggccctgtaaccagaagtccataattcttttgagggccatgggagttcgtgggcctggcttccaagaaggttgtcatagggtctgtgggcctttcctcctcggcccaaacccaaaggatttggaataaggttgagagttgaattatccgttggggattttgggcgaaagacaggttcagtagggagggtatcagggggtgatgcgcttgaaggggtaaggacctgtgcctgcacctggagagc

SEQ ID NO: 254876 - DNA, 1288 bp, Cannabis indica
gtcttaagaaagcacccataatatagttggagaggttacaaaaatctctatatagggtttggttttatttcaacaaagtcagattattacttattcattcaaccctcttctcagtctacaacactaatattggtctatgtagatgacatcatcatcacatgcagtaatcctcatgttgttactcaacttgtctctaatttgaacaatgaattttctcttaaggatcttggtgagttaagctatttcttgggaatagaagttcaacacattgcaagatggtttgcatctctcttaagggaagtatacacgagacctgttgagtaaaattcaaatgcaaggtgcttaaacagcatctgcacccatgacaagtggtcttaaactatcactagattgtagtcaaaagaatactaaggtacctaagtggcactatgaactatggtttgcatctgagaaaacctccacaccatgaatggttgcattctatgatgctgattgggcagcagatgttgatgacagaaggtccacttctggttatgctatttactttggtactaatcttgtttctttgtcctccaaaaagcaacacactatctccaagtatagttctgaagcaaagtttcgatctctagctaatgtggttgctaaagtcacatggctccattccctcctttttaagcttcatattactcttcccaggccacctatagtgtggtgtgataacttgagcactgtgctcttaacaacaaatccatttctacacgccaaaactaaacatatagaactcgatttataacaaattgtcgatatcagacatattccaactatagcccaaattacagatggcctcaccaagttagtctctagcaaccgattcagtcaatttagacataaactcaaaattaaagatgcttcaattctaagtttgagagtgagtgttaagggtaccaattctgttagaaaagttggttagaagagttagttgtttgtgttctaactgatttcttctccttctctttgctttgtttggttagttagtgaaccgttcggctctagctctatcttcttgtatatatgcttttcactgtacttttttcaatatatgagaattcactctttcttttctcaatctttctctatgcttttctctgtctttttctttattttttcttcatcatgttatcttggttgtaatgtctaggaaatctaataagattggatggtaaaatctaacatcccatatataattagatcaaatctaaacaagcttaaaaacattaaatgtggtcca

SEQ ID NO: 254877 - DNA, 595 bp, Cannabis indica
gaaataatttttttggtatgaaattaagtacatgtaatcatccttatgaaaaagaaaagtaaaaaaaattattgatcaattcaaggtttgccaatcaataaatgtaggtgtgttataattttttgtggagaaaaatctataaacaaaaaatttactatcattatatattaaaagtgtctatctaacggtatttcttggtttaacagaatatactttacaaataaaagaatattctgttaaatttaaccccaaaaggaaccatccaccattttttttaaactttccttttaacgctgttaactttcctttccctttaaactttccttttcgttgaatcattttctcactctcaattggagtcgacgattgaagaatattctgcatatcatcgttcttcttctgctgctcctgctccagatgcctcgcccaagaacttcatcctggtcgtttcgttgaatcattttctcactcttaattggagttgacgattgaagaatattctgcgtatcattgttcttcttctgctgctcctcctgctccagatgcctcgcccaagaacttcatcctggtcttttcgtttaatcgtcttctcact

SEQ ID NO: 254878 - DNA, 1353 bp, Cannabis indica
agtcattggatcaaaattactcgaaaaagacttaaatattagatttgatctttacacaaagaagaagggtttgcgtattcttccaaatggacttggttacaaacaacattttttttttccatgagaagccataccaaactatttcttaatgccccatgacccatttcatcaaatcaagaaagagctcatcgaagtctcatgtgccaataatcatgcagagttcctgaagaaatgtgaccatcctttatggaaaaatcaaaagttcttcgtaaaccttccttttaagcttaatgaagatataaacgttacacaggctagtcacccaagcatgatccagaacatcaacaaatggcgtctaatgaatgcaaagagttacatcaccagggtttaatagagtcaacttcctctccatgtgcatgtcaagcattttatgtcaataatcgatcagagcaagctcgaggaaagtaaaggttggtcatcaactacaagctcctaaatgagttcttagcagacgataaattcccaataccaaataagaatttattgtttgccaatttatcaaaagcccatattttcaaaatttaaccaaaagcgggattttgacaattaggcatcaaacaagatggccggcccaaaataaccttttacattttaaatcatcatttttaatggaccgtcttaccttttgggctcaaaatttccccttctttattccaaaaagctatgactaagatatatggctcgatattagaaaaggctctcatctatattgacaatattttgcccttttctcctgatgcaaaagtccatcaattgttattgacccaatttacttctatcattaaatcccatggtttatgttatctgaaaaggaaatgattattggacagacgcaaatagaatttcttgggatgaaattatccaaaggacaatatgaagcccaaccacatatagcccatgaactactcaaattcccaaatgaaaatctcacaaaagttcaagtgcaacaattcttaggcatcatcaattatttacgagactttgttctccaactgtctgtactaataaggccactcagcaatatgctcaaaatgaatagtccagaatggtcacatgaccaagccgtggcagccagaaagctgaaagaaatcatgtaaaaatctaccacctttacagattctctctgacgaaaaacatattcttcaaatagacggtagtataaaaccattgggggtgttggtccttctagagcaagatgagcaagggaaaagagaaatatgtggatataagagtgggacacttcaaaagattcctagctccattatcattcaacactcaaagaactaattacaa

SEQ ID NO: 254879 - DNA, 508 bp, Cannabis indica
ctaatatttttgtaaattttccttaattatatgatcattgaatggtattatagggaacatatatagtgtccaaaatcattgtgagtattgtatgaaatcaaatctgataatgatttgcaccaataacaatatgctacatcttatgatgcttgacaccataaagtgccccttaacattttcaacttaattatataccttagaaaatgaaaaaagatctatttccaaaaaaaaaagaaaaaaaatacaaagaaaattttatggtacatccctaaaaattggtatacgtcacaactttttttttttttttattatttaaatcattttaatctttttttatgctaatatatgtacatataatagttatttaaggggtaaacactcattttgatatcttatgttttgctaaaattaatttttcatatcttatgttttgaataataataaattagtaccttttgtagtttttaccaagtatggatttggacaaaaatattaggagtttttttat

SEQ ID NO: 254880 - DNA, 1502 bp, Cannabis indica
catactcaaactcaaaccaattctttgtcttggaaacttgattatagcacttggtacaaaaaacttactttttaggattgtcatgtaaattgttctttcagtattcattattttaatttaggctttattatttctttgttagttgttgtttttctctgagacaccgtccttgccaactttctccatggcttttgctattagctcaccgatttccctttccccattatctgatattgttccgaccttccaggaaagttatatttccatctcttatctagttttaaaacacaattagagcttttaaacccacctgtacggatcattcttgccctgctcttcaaatttgtcacgtaaatatacttgaatggaacaagtttcatcttgttctttctatcactttttgtctaaaatatttgttttaactaatcagctcaagaatgtttctcttgcagttgtaactgggaacaaagaagattgatgcttgccaatgtagattatgttaaagataccttagcagctggtagggggatgtggaatctctctgattgtcatgttcttggatgcgagttgcattataatgtcactgatacttcaaagaaaaaactgtttgaacttcatgaaatttttcagagtttacctagcattacggagatgggatatcccaattcttacagaatacaacctgttggtgactatagtggatctggcatatgggaactatctgatgacattttgattaaaatactagctcttcttggcccaacagatttagttaggactgctgtaacctgtcgtaacttaagattcttgactgcattaatcatgccgtgtatgaaacttaaattgtttcctcatcagcaggcagctgtgcagtggatgttacaccgtgagcagcatgctgaagtcatgccccatcccctttacattgctttcacgactgaagacggattttcttttcacgtgagcactattactggtgaaatagtctctgatataccacctactgtcaatgattttcgtggggggatgttttgtgatgaacctggcttaggcaagacaataacagcactttccctcatcctcaagacacaagggaaatcagcagatccaccagatggtgtaaacgtgatcaggtgtactcacaatggtgatcaggcatgtggctattatgatcttaataatgattatgtggttggcagtattgtgaccccaggaaagagggttgtgaataataaagcaaacacaggtggtgagaagcttggctactgctcatctaaaagaggtaggccaagttttcctaatgagcataatacaagagttaaggaattatgctctaataaacaaaaagaaaccccagaagctacttgctctgagcccgcactgcctgtgactcgttgcacaaggaacttgagtcgcgtcaggaaaagcctattttttactgaagacaaagattatggtcacttaaatgaaaaaaaggcagcattgaattctcgcaaaggtaa

SEQ ID NO: 254881 - DNA, 663 bp, Cannabis indica
aataaatataaaattagaggtaaattgattaattgattaataaaaggggcatttttcaactcggccctaaattattcatctcaactcaataaaactaacccaatctctatattagtgtactaaatagggttggattgtacaataaaaaatttaggatttttacaccacatactgaaatttttaacttttttattttttttattgtgagacagaatttttttttccaaaaatactgtatatttttttatattgtgtattgtgttaagttttaactactgttccactgttgttttaattgttctgttttattattttacagttgttttataaaaagataatacttttataaaaaattccgtgtggtagtaaaattataaattttttctcaaaattcaatatttttgtaataacttatagcttctgcaaactgtaatcattgagttggccattaaaacacctatgtggacatctttcttaaaaagaagaaaaaaaaatagagaaaattacactatatacccattttttattttaatttttacttttattttactactctttaatttatcgattaaaagtattttaaagtcatatttaattaagggtaaataccattttggactctctgttttacaaaagttaccaattggacactgtgttttgtta

SEQ ID NO: 254882 - DNA, 758 bp, Cannabis indica
agttttggttcttcttgtttttgattagtctgcttgttgtatcgataaaataataagtttccacttggttttggttcttcttgtttctgatcagtctgcttgttgtatagataaaataataagtttccacttggttttggttcttctagaaatttctccgtttcttcaagattcacatagtttcttgtagaatctattgtatttgcgaagcacttgatacgaaagggagataaaaagaaggaaataagtaaatttgtaagtaataattactatatgtatttttataaagagagaggttaaatgttcccaatttcaggaacatgttatcttgtatatatgatgacaaggatgatcatttgaatcatgttatctttcatatatggaagattaatttggatgataattattgagatggccgatatatataattagctagtttatttatatacatatgtgatcaacaattattcaatcattcattaataaatacacataattaagcaacatatatatatgcttccatgactataaatatgaaaaattgttgggtattgattgtcataaatgtatttttatatttttgttgtgtgttttagctcaaaaatatcaacactagcgatattaattagcttcggttcataatctatgctaaatattcttttttgtttataatattgaataatgtcgttcgaaagaacctaacagaaatttaacattgtttatttgtactaaaacacaaagcgtgtgaaacaagaaaa

SEQ ID NO: 254883 - DNA, 960 bp, Cannabis indica
aaagtttagtacattaagatataaatttgtagagagtatgaggtgtagatgttgtcttgtatgacagaatgacattaagtcacacaggtaggcaggaggtttgatgactctgctggtgcgtctgaggatatgctgagtttcgtttgttgagtctgtagtgtcattatccattgcagcatcagtggaactttctgtagtgctgttatcatcagcagtagcagcaggaaccgagggttcatatggcacattagttgccaagggtgaattattgacctgaggagaatggttagtgcaagtatcattgtgaacaataggaggaaattgctgaacataagtatcagatatgctttgagatggaaaaacaatattggaaaaaggatcaataatatctttagttgtgttgagccgatgaaaaggatatattctttcatggaaaatcacattcctggagataaaaaattcatggttattaagatcatatagtttgtaacctttgatgcctttgggatatcccatgaaaacactagttcgagcccaaggggtgaatttgtttctgttggcagtgagagtactagcaaaggccaagcaaccaaaatttcttaattgatcatatttgggcagttcattaaacaacaattcattggggcatttattatttagatttggtgtaggagtgcgattgattaagtaggcagcagtaatcacacactcactccaaaactgaatagggatcttagcctgaaaataaagagctcttgctacatttaaaaggtgtcgatgtttcctctcagcaacggcattttgctcaagggtttccacacacgtgaaatcatgtattatgccgaatctagcgaagagatctttgaaaattaattcaggagcattgtcggatctgaaacacttgaaaatgcaatggaattgagtttgaacataagataaaaattcaggaataatttggac

SEQ ID NO: 254884 - DNA, 2034 bp, Cannabis indica
agccaaagtgacgtactcgtgtataagagccattcagtccgtgggtgtaaggacccaatggaggcttgaagcggggacgttacaagtaaaagggcagggtggggaagtaagacactcatcatatttctataaataagcatgacaatattgcctggtatgatcaagtttcccacagaaataacaaaaatcaggtagtctctcatacttcaaatcaagccacttaataatttcccttcccatcttaataaacctaacatttcatacccctcctaatagccaaattgacatcaagcaatattctaatccatagatacgacccagtaccctccttaacaatagactaatcaacttcaataagatctccaatttcagacgcaataaaccttcctaactcataggatgtgcacatgaacggtatcccataaatctgaacccaaaaggagcataatgcagttgttcagagagaataggaaaagcactatcaaggacaacaaaaacaatgatacttggggcaaaatgccaaggttatccctctaaaatcatatccttgtcaccctcacaccaaaagtcacaaggaacaagccatctgcatgttcaaaaacaacaagaagaaatcggcattgtgatgaccgaatttcagagagagtttccatgagtgaagaacgattgaaatgtctaatagtatgtaaacgaagaagaagactaatagtaataggagaattagaaggacccaaatcataagtatagacaatattttcttctgaagttaaagcaagagaatttgaaacattaacaaaaaaatcatccatatttggaaacacagaatatgaaaataagaactcaacgaagaaagtacaggagggatgaagatgaagagaatggtaccttatacgacccttaaataggaaaaaccagaaagccctatgaggtttcctgaaggatctgcaagtcccatccagaatcgtaggcaaggtaggagaaatgatgaaatggacatgttgagcttcaattttccagctctccgcctccattttgccaaaatcgaagggttgaatggagataataatgagattttggaggtgaagagatgaaagagggagagagaggccaggtggagcaatttgggcgaagagagaggagatgtttacatttaatgctctataaaaatattttaagatgggatagaagaacaggataacactctgagcaattaatgctggaaaaagtgtgtgatgaaaggaaatgctaagggaaaagaggtcgatgggtgcgaagtgagggatagaaccaccacaatacactcttgggtgaaccagattcaccatggttggtacagagagattggtatgcatatattttattttaatagttttctaaaataattagcataaaaacccttgttgtttaacaacactattttttttttgaatagtttaagaacattagttcttttttctttctttttttttttttgaagcaattaagaacactagttgaatgcacataaagcaggagtatttttttttaaggaaaacatagtaacttattaaactaaattaattgttatagaagcacataaaaatttaaaacaagcatcagtccaaatataaaatcgtattgaactacaagcatttttcaacttaaaataaacatacatattaatatgttggattaatattattatagaaatgtatcttacaaaagttatcaattagactatttatttcttaaatgacaaattaatttttcaataatacaaaatattactttgaggtttatttttaatattttttgtttgttaatataatcaacttaaaaataacatttgacatgaataaatgtataaaaatataactagatttgtatcgacactttttagattttattagtattaagttttatttttgacagaaaatcagctcatcattgtactattttgtactgaaaaaccgtgtttttgcaaatgtcagttgtatataagaaaatataaaaactgtaagcgtttgcagcagcagaaagtaattctgctacagc

SEQ ID NO: 254885 - DNA, 719 bp, Cannabis indica
ttttttctaataaaaaaattattacgtggttattgtcggtattaagcaacacttcacgtaaaattagttttgaaagttagaccacattgcatatgtggcaagatcactttgataaacaacttttattagagatgctctaaatgccaaataataatgctctaatttttaatatttttttccaatttataattgtaaaacttaatacaaaatttaatatttttattaaaagtacaaaaaaaattaatatttatcattaatttatattttatcataaaaataataaaatataaatataaatagttcataattaataattaatattaatgttatagttagatattctaatttcaactctaattgtaaaaactaaatatagtgcttaaccaacactaaaaaaataaaattttaacacttaatttttttttttttttttgcattccaactacaaaacgaaaagttacactaaaagatatatattctttattatctttatatataaatataaataatagttaagaaaaattaattattttaacaattatttaattattaaaaactaaaaatattataaaagaacaattttagtgtagtctacatacattaataatagttggatattgtagacaatttcatatgtttagttgaattatttgtagctgaattatttgagtttttagtgtgtggatggagagggtataataatacattaataaaataac

SEQ ID NO: 254886 - DNA, 1392 bp, Cannabis indica
ggttcttcaacaatccaggttctattcttcctaagagactgcatctcttcttggatggcctgtagccatgctacaacatctttacttctcatagcttcttcaaagctagtgggttctgaactgtcaacctcttctgcaatcataagtgcatatgcaatgaattcagcataaccaaaacgatcaggggcttttctctgtcttctctctctatctctagctaattgatagctgctgagttcctgctgatcttcattgtcttccctttcagttgcctcagttccatctggaacagcattagttggtgctgtaggagcaacctgctccacctcaatctggacattctcatctaaaccagcttcactgtctttacaagtgctcttggttttcatggccatttcatcttccttgaaaaccacatctctactaatcaagcacttcttgaatccaggttctaaacaccacactctatatcccttaaccccttcagggtagcctagaaacatgcatctcaatgctctaggttgcaacttatcttgtctaacatgcacaaatgcagtacatccaaacactttcaagtgatctaaatttggggttttacctgtccataactcttgtggggtcttgaagttgtttggcacagatggtgatctattgattaggtaacatgcagttttaagagcttctccccaaaaggttctgtccaaaccagctcctagtaacatgcacctaaccctctcaatcaaagttctattcatcctctcagcaacaccattttgctgaggggttttgatcacaattctatgtctcttgattcccattgtgtcacacaatcccctgaactcatttgagcagtactcaagaccattgtcagttcttagtaccttgattttgttcccattctggttttctagtagccttttccatgtatcaaaggttcctagagcctcatctttcctttttaataaatacacctagactttcctgctgtaatcatcaattatactcataaagtagtgtgctccacctttggaatcctagatggcccccaaaggtcagaatggacataagctaacttttctgtggtggtgtgttttgccttgttgaacttcaatctataagccttccccaaaatacattcatcacaaaattcaagtctttttgttagcttctccttaaacagtccttgcctgttcatttcctcaagtcctctctgactcacatgccccaatctgaggtgccatagccttgtttgactgtgttttgttgagtctaaaacaggtgctgcacaaattgatattctttccgtccaaaaaatcaatccattactcaacctttctctcaacacaatttctgtgccttgtgcaattttcattacaccttcctcaactttga

SEQ ID NO: 254887 - DNA, 1620 bp, Cannabis indica
attattatacatatgaccttaatcgaaaaaaataactgcaaaagtattttatcttataattctgttacaatcgtactcttttttagttgttaaatgtcaattaagcccgtcaagtgtcatctcaaaaacacgtgacgatatattttttttagtttatttaatacatagtccaataataagtcaccacgtgtttctgagttgacacttaatggccaaaaaaagtatcactgcaaccaaatcgtaagataaggtacttttgccaccactttttttaattagagtcatatgtgtaacaattataaatgttgagaaagtttcaccacaaatatctctaaatatttaaataaaagcacgatttacaataacatgtttgaatctaattttagcattatttaaaactttttgaaaaatttatgtgcttttcgtataactaaattatataccgtcgtgtaaaaaaaatatactttctattaatgtactgaaaatacaaaatatatctatagataaaaatttcggataagttaaggttaggagatttgagtaataatttaattacgtacactggctaagctgacagcgtctcgggtagcaatggcgataatatcagcacaagacacgatttggcgacacttactctccaaacttttcttaatagtatcaataagatcataacctcttacgcttagatttggtccagcattcttctcactttgcttaccatcaagtagaagtgaagcatcacatccctacaataaaattcaataatatttattaattattatacaaatatatatattaaggaaaaaaaaaagtagcgctaaggacgttagagagtcccacatatagttgatgttctagagaacccaataataattaaggctaacgatctaatagagacattggaaggactactggggttatacctttaacattcctttattagtaatatatgagaacttaatgaagtattatactgttatttgtgtaaagtatattgagtgttaatgaatattgttattagtactactaattagcgatttttataataattatcaaattaaattatgtaaaacttaatattttatactgatagcaatattacaccttgtgtagtgctattcacgattgatcgacacatttttatatttcccaaacttaataccatatatgagtatacactactcattattaattcactcattagtgcgattcaatataagatctataccacataagatattttaacaagtgatattaaatcgctataaatttatagtgtcatcatttcatgtgatgttgagcattttaaagtatcaaacactaaccttaacaaagcaatcgtgaaactgtagacgaagaagtgcagcaacaatagtaggatctttagtgaaagcggctttaacaacagttttaacggtggcctcaacattcacttgtgttgtttgagatttagaaagtggccaaaaaccaggggttgtagtggtgcattttttgttgtagtactatttgcaggttgcaacaccacaccaccataaccattgcccactcaaactcaacaaaaagagacccatggtcaccatagccaaaacccctatgttcatcatattactcaccattttt

SEQ ID NO: 254888 - DNA, 579 bp, Cannabis indica
ttgctagtatatatatatatatattgcactctttttctccttaactcaagttttgtcccattgagttttcttggcatggtttttaacgagtcaactttaaatcatactaacatacttatactttatgaagcaagtagagaatgtgtagaaatgaaatcattgatataacatatccggaaaacatattatactcaataaagaagtatcaacaccaacagttctctataaaaatatactacttgcatcactctactaaaaaggagtacattgaatgagatataattaaaacgtattttatcaaattcttctttatatattttaaaagagtaaatattgatgtccaacatattcaatcaaatgtcaatcttgtagacttattcacacagtcattgcagacttaatcacacagtcattgccaacatatacttccatccagtttgtttacttccaaaaaagaaaagagatgaataaacaatcaaatttgagaagataaatctttctcgtatgtacctttacattattttggctaatccttgtgactgccagtttgtttgagtatggataaataaggtcaatggt

SEQ ID NO: 254889 - DNA, 1251 bp, Cannabis indica
ttgatgtatattgacacaatttgcagcctaatacattcaatgtaataagtttttagacataaattaatatcatggcccagcacagctcctacagtcgatatttttttactctagtagtgaataacaacaacaaataatataaatataatcaatcatcatgtatatcacaaacacaaactatatctatatatatatatatcatgtatagtatatatatccatattatccaagagccaagagtgtgtctaggttcattgcatgtgccacatcccccaaatagtttgacacgtcaaaaaaatacatacatcacttatatattttctattatttttgtttgatgaacaaaatggaattacgttgtaaagattatttttctacccttttaatattttgtaattttcagaattatatatatttttagcatttattaatggatatttgcctgaaaaaaatacttaaaaaaatatcattctttatagatttttttaattatttaatatatattaaatagtaatatagtattattttaataatttataaaaatgataaaataaaatatatattatatttttaagtgatgtagaaatttttgacactgttaaagaatatcatcattggcgatattcttatatacctcatgctttacttgaattatttcggtatgcactttgagagtttctatccaaatacgcctagtcccgctacatataccaagataacctctcaaagaatcaaacataatctatctcattaagattcaaacccttaacttaaataaaaaagaatgctaataattaaactatcaccaccacacacaacacgtggtatattattattattattattattattcacgatgcatcaaattcttatatattattagaaaaaattgtattataataataaaaaaagattataaggactatcaacatcatcccaataataaaatttggcccataattagtttgatggtggaatttcttattaagggcattttcttttcttcgattattcttattcattagtaataatttgattcactttttgttttttttttttttttattttttttgctttcactttgtgtttaaaagaacatatatatccaaatctttatagtttttttttagagtaaacaaatcttacagattatagtaattaataactaataataataattaattagcttaagataatttgcccactagcatctgtatgagcctgaattaaaggctaggtacacctatcata

SEQ ID NO: 254890 - DNA, 709 bp, Cannabis indica
taatagtttcatggaccaggaaactgacacctctgtaacagacttgaaaaaaatccatgtgtagatttggtagttcattgtacagcaagcatagagttgactgatagtacactaaggaaagattttgttgatagtacactacatgcatatagtttataatgatagtacactgtactctgtacacacagtttataatgatagtacattgtactctaccggttgcataatattaaatgatagtacaatgtacaacaagcatgaagtaagattgatgcaatcatacctcaaaagacttttggccaccagaaacacccaaaacaacttctattgcatcaccgagagaaaatcccaacatttttgcataacgctcaagtcaaaatcttcagttctgatgagcttttactgccggaaattgaaccgttgacctcaatattatccttgagtgatgccgaagcactgcgaatagacagataaatcatccgaggaagaagagatttcctctcaacagctcttcgaacacttccttccctttctttagtctagttttggcgccagcatacagaagataatttgcaattaataaaataaataataagaaaaaagggaccaattattaaacacatggattgttgtcataaatttaacttcctagagcaagagaagaaatgttataaacaagttttagactacgaaaaactatgtgcaaaaa

SEQ ID NO: 254891 - DNA, 607 bp, Cannabis indica
ataaactaattaaaaaaacaaaactcaacaattgaccatattaaaaatgtagatagacaatattattgacattttttcttggcatgccgaaatgtattattaattattatcatttatcatttaaaatgaacttatattgttacaaagtattactgtatctaacactaacactttagatgaagtagcatcatatttttttttttaaataatgatatatgcacacataaatttaaaatatatttatgttgtaaataattttaatcaattcagttttttaaagatcagtctcacttgttaaaaataatttgtcacaaaaatgtgtatcaaatttatgtatagacatcattattttttatttttatttttactatttcagaataacgcgcttaaatacaagaccgaaagctagaaaaataaaggaaaattactgtgtataagtttttttttaaaggaaaatttctcctttttaacggcttttaattattatttttttttatttttatactttattatttataattttacattaaatttatattttttaatttatttttacgataatatctttttttttcacattttttgtcgtccttttttcttcctcctc

SEQ ID NO: 254892 - DNA, 839 bp, Cannabis indica
aatcacgtaatacgcctatgttagttagggtgttacagagagcttctgtgaaaaagttcagaaaaaccctcacttcttttgaagaaaaaccacctccttcatggcttaaaatctagaaaatattaatattccacatgaggagactaatcatcgatctgggaaagagccaatgggctctagaaggtctaccaactcgcgatctacacaaaccaccggttccaggaggactcaacctgaaggtggccctagcacacggaccacacgttctcgaagaacccaacccgatgttggtcctagtacgcagacaacacgctcgaggagaactcaacgtgtgagtggccagaaccctgggacgagggatgaagacctcaatcgaggaggtgtcgagtctatgggagaagatacttatgaaatggaaaactgctgcctgagtctaaaagaggcgcaacatcaaaacgctgaattagagcatgatgcagcctttgccagggtggcacaggggacaaatgctcaaaatcaacctaaacctggagtgagaagaccacgaggcaggactcgtggctcacgaactaggagacgggaagatgcctgggaagaacaacccagggaaaatgagatatcccctaaaaatcagaacgaacagccagatgggaggcaaccggaaactgatgaacgacaaatttctcatgacaatgaggaggatcttgggactcaatcaggagaacgtaggccacctgcgagaaattaccagcgttcttcccaaacccatagagcgaggactcgtacagaccctaatgggggaaatacaatgaactggactcaggggaaagaacagagcg

SEQ ID NO: 254893 - DNA, 484 bp, Cannabis indica
ctcctccttattctttttcgatccttattctttttcgagttgattttttcttttaggcactttattttcgcactactacaaaattggattttagaggcggtttttaaaggcgcgtcgattttgataaaattcgctactaacgctgtttcgggtgacactgtaagggtaaaaacaaccgatgctataggactcctatggcgtcggttattatgatagggtcttcctatgattttttttttctagcgttacaattttgtattttagcataaattatatataataaccataaataaaaattaaattgaaaagttgaataaatacacatctacattactctaaatttccttgcactttaactcttatttcctaacaacaaacaaggaacatttagggtctgtttggaaacaactgtgtaattacactgtgtagtaattacattgtattttaaaatacaatgtgtgtttggatgtcaagtggtaattac

SEQ ID NO: 254894 - DNA, 1176 bp, Cannabis indica
aatattttataaatatataagtactgaaatataattacatgctataatataattttggcacttaaatattataaataacttacgtacgtactacaaacataataattttgatataattttcacaatgaaatatttctatgtaacttgatcctaattaaatttcataagaacaatgagcatatatctaattgaagtctaaagaattatataaaaaaatatgaatgatatatataagtgctcacatagtcacacacacatataaatatatatatatatatatatattaaatgtaaatgtaataataacgtagtcaacaagtaatctaataattaaccaaacaacaatgagtatattatttcttgaaatagcataatttagtaacattgtatctctttattaatttagtaatttagcatattggatttgtgattgttcttaaagaaaataaataccaaaccatatttcattttatttattaactttttgtgataaaataatgtcatatatatacacacttcaatactttaataatttttataaaatgagagatgatacataagcttaataatactgaaaagagatggttacaagtttgaattatacactgttaaaatattagtaattttgtatgtatttaaaataaagagaaataattatagaaaatatataaaaaagtgattgaatctttattaaagtttgtttgaagattcgaaaaagaaaataaaaaaaacgaatttagtagttggaaagctgaagcaccaaataaaaagttaacctttttcagactttacttaattaattaaactttaactactttaattattacaaaaaaaaaactttaattaatttaaatataaactctttcactttagttttggaatcttttatttgtacttgaaaataacaaaataaaaaaaaaaattagaaaaaaaaaaaaaaaaccaaagcggccatatgcatctctaacactgcatgtattagagatgatagatcttctttattgataaaaataaatatcaatctatcatatttttatacataaaatataggtggcgtttggtaacacttttttaatccgttttttatttttaaaattagaaaagtgaaaatattttttaaaaacatgttctataaaactgtttttgcttttcaattttttaattgataatcaaaatt

SEQ ID NO: 254895 - DNA, 779 bp, Cannabis indica
aatacatcatcgtagtgggaggattataagacaacctgtctgctatgaacatgaaacacatgttcttatctgtgagacagacaaggacgatccattgacttataaagaagcaatggatgaccctaagtcagacaagtggagcaatgccatggattcaaaaatagattccatgagtaccaataaagtttgggaatataaaactccacccgaggatattacgcccatagggtgtaagtggattttcaagaagaagaattatgttgatgggaaggtagagacctttaaagctaggcttgtggccaaaggctttacatagtgagaagacatcgactatgatgaaactttctcttctgtggcaatgcttaaatctatttgtattcttctttccatagttgccgcatatgattatgagatatggtatatggatgtcaagaccgttttctaaatggcaatcttgatgaattcttttttatggaacaaccgaaagggcatgttttaccagggaaagatcgaaaggtgtgcaagttgcttagatttatttatagattgaatcaagcctctagatcttggaatatcacttataataagactattaaagagtacgacttcaacaaaataaagaagaagcatgtgtatacaaatacattaaaggtaatgtaattgtattcctagttcattatgttgatgacattctacttattggaatcaatgtagaacgattatcagatgtaaggaaatggttagccgaaaaattcaaaaatgaaggatttgggataaac

SEQ ID NO: 254896 - DNA, 765 bp, Cannabis indica
gatattttttgatatttttttaattaagtagttaaattaagaaaaaaatttaaatttgtgatttcattattcgttattagatcaaaattcgatggtttgatatttttaaaattaatatttatagtttaatttgtttagtaaccattcatgagtgatactcattaagaagtgttccaactatatatatatacctatatttaccaatttttaaaaatttctaatagttaattattaatatctcaattgttaattttttatttactttttattaataatttagagttatttcctctttattttctaaattatctaaccttataagtctctttcttcttttttgtttgtggtggttattgcaggactttgatcttattgattcaaaaatatttaaatatacaactcaagatggatatgttttttagatcggtatgagtgtacatatagatatgttacactattactttcttaattaattttttttggtcccacactttatttttaatgttttattcttgattgattttcgtctgatagaacctagggcagacttaatcaatttgtaggctttgggcaaaaattaaaattgagcctttattaaatcattaatcaatacttcataaattactttaaaaaaaataccttataaattcatttacatttatttagtaattaaatatctaataaagtacataaatatattcaaatttgttgatcgatctatcccaaagtatatcttcctcttcaaatttgtcatatcgaacaatc

SEQ ID NO: 254897 - DNA, 520 bp, Cannabis indica
aatttaggttaaatttagttatccgcaaattgttgggattccacttcaccattgaatataaggcaaggactcaaaattcagcagcagatgccctttcaaaacaatcccagtattcatttttagctctccaagtggtcatgagtgtggctcgctttgatttctcagaggaactacgataagaaaacatttgttgacctgatcttcggcttttacacgatcgactacaacatggtgagttggcaggtaccccttatacactggcagatggtctgccttaccatcatcataagcttgttatcagccaacattccaatttaaagcaatagctacttttagaatttcactcattgcccatgggtggtaatgcaagtgtcatagaacttttctaaggctgagcgcaaattattttagcttggtatgcgcaaggatgtccgcaagtttgtttcatcatgtgtggtgtgccaaataatcaaatactcaacaacaacacctcatgaattgttgcaaccattagaactgc

SEQ ID NO: 254898 - DNA, 524 bp, Cannabis indica
gttaataacacacaaatggtcatagtgttgggatgcaattaccaaccctaataacaatccttaaatgcaacgtgtaagttaatactcaatgccagttcaaaatggatacaattgatttacattgataaatgcaattgatccctcaatagcgtcactgataaagtgacgctaaacttttacctaatcaattatgtcaatgagcgtcattgctatcacgttgaccgacacattgacatttttaaactagtgtgtgcaatacacttttggattgcattgaaaaacaacttgaattataatgtacaatgagtagcaaattgtacacaagtaaaagtggctaataatattattttacattatacaccagatctgaaaatgaaagagaaaggagatagtggtaatcaacttttatttcacgtatagcataggctattgctagtacaaaaggaaagtggtgttttttttttttttattttaagcgtttatatattacaatcatgttttacttgagactcgaacccaggacc

SEQ ID NO: 254899 - DNA, 8088 bp, Cannabis indica
tggcggtcaatattcttggtatttctctttttaattcagttactaaggattactagtattgtgggtttgaatcttctcacaagtatacagttaaaaatgcgtttaaattattacaggcaaaccgtgaggctagagtggatggggaggttgtggcattttggaagaagttttggcaattaaagcttcctctaaaggcaaaaaattgtgaatggagggcgggttagtgtgtgtcttcctatgagagttcaatcgaagactaaagatgtcgatgtctctttgttgtgttcgatttgtcatggggcaggtgaatcaattttgtactgtttagttgcttgtaattttgtgtagaattgttggcgggtagcgggtttggcaatgattccaattaatgtagggtcgtttaggggctgatttcttcatttgttttcacgattgggtgagaaacaaagtgttcatgcaatgatgttggtttgggcaaattggtttgcacgaaactcttgtggaagggtaggaaaagttaggtggagttcgttgtcaatttggctagtatcactcttgatcagtggagaaaagctcaagaaagaagtttgtttcctgcgtttgatatacttgatatctttcagatggggttgagctatggtctaaaccaggttatgaaaaattcaaagttaatattgatgttgcgttgtttgacgaggaaggaaggcatagttttagtggggttgtttgagatcacaagggtcggttgtagttgggattacgagattgtgtattaaataagttcttctagagattgcttaagccatgactctcaagaaagtgttattatggttgaagtgcgattttttaggtattagtattatcaaatttgattgtgtggtattagtacaagctattagaaatgttaatgtattgtcaaatatttttggtagtgtcgttgaggattataaacaatttttatcttcttttaggatgtttctttacattttgtcaaatagtcaactaatcagactgctcattttatggctagagcatcttatttatatattggtcgtatttttttgaagtataatctcccttttaatgttgctaatattattgagattgaattaggtcttgttaactgaaatttacagttaaaaaaataaataaataaaataaagataccttacatgtggggtaaaagttaaaatacatttatttatagttttagggcagtcctagtcttgatgcttgaaaccaaaattaaatacaatactacaaaagaatacagcaatgaattcttctgtctgctatatcacccaaataattcacataacgtaaacagtcaaacgcttcataatttttcaaacttcgtactctgatcacacacacatatagagacactattacaattattatattacacttaacggtcactgattcagattcaaacaactctacatattttattccctacttagatctatttattttgctccattttttataaagaagaaaaaaaaaactataataaagcaaatttcattttcttcttcttttttctttctttttaaagatacaaaaagatagagagaaaggtactgtaattgtacaaaacatagattggaaattgaaactgttcaaaagataataagagaagctatgtgttttcattttcatcttcttcgttatcactcaaaagttcaaaaaatgagtttagatatgtgtttgttgatttgatgaaaatagttttgtgggactcacaaacacacaacacaaacacctctatttcattctgacactctaaaactttttctattgccatctgatccagtgggacctttttcaaattttgggtcatttgtcttcttctacctcgaaaaacatttgggtttgtcataggatcccacgtggcggcccaaaacttgattccaaagcccaattgactcctcagatggaaatcacgaaaaacaataacaaaaacaaaaaattttaaaaataaaaaaccctcttttttttatatataatttggatcttagacaaaaatccaagaggttaacggctacatttttatgaatattttttttgggcacattaaaaaaaaaccaaaatgcagactgaagccacgtgaaaaaatcagaatagtccttcggatttggcgggaatcagttacgtggggcccaattttgtccaattcgggctatttataaacagcgatagtctatgtagttgactgagacacttggacttttatgcttcgaatccacgtggaccctactcaaaaccaattttttttttaaaaaaatgaaaatgggaaaaaagatgacaagaaataacagccaaaaactacagttaaccaaaaaaaaaaaagaaaaacgaaaaaaataataaaaattggttaagggtattttgggaaacggaaagtttcagcttcaggttaagccggagaaggttgagaagtcgggtcagctgaagatggtatatcgggtccgacccgacaaccttcgagcatgaatacgatatcggacatggtgggtcgatcaagaggatccggagctgtgcagagcaacccgactttgactccgagcaaaaactcttcccattctgaagattcagggtcaagttcaagcaaccccggttccaaaagctcagtaatttgacctttttgaagttgtttcttaacccatttgacaatatcttcttcgtcttgattgaacatcactggtctttttccggtgagtagttccagcaagacaataccaaagctgtaaacatcggattctttgcttaattcccctgttaacacggcttcaggtgaaacgtagcctaaagttccgacattggtggaagtcgaggcttcagatggggtggggagtgtgagacgttccaagccgaaatctgataaatgggcttcgaaatctgcgtcgaataggacgttttggggtttaacgtcgccgtggactattgacgatgtgtggagaaaagctaaccctcttgcgattccaagtgctattaggtggcgcattggccaattcaagacgtgaccgtcttggtgtgatgcttcttggaggagtgtagcgaggtttccatttggcatgtagtcgtagaccaagagtcttaagtctggtggtccagcgtagtagccgcggagaacggtgaggttgcggtggcgaattcggccaattgaatccgcttcttttcggaagatgttttcgtctagtgctccgtcgggtagacgcctaattgtgagtaccattccgtcgttgtaacaggctttgaatgctaatccgtagcgagttctgcttagtacgttttcttcgtcaaattgtctagttgcttcgactgtttcggctagggtgatcttggtgttgaacatggttagtttcgggccaccattgtctgtgcttcctctgcctccactggcacccgaacttgctcgggctggactccttttcttttcccctgaagccttttgtttcagcctttttcgccatcttaagaggctgaaaatgtagaagcaacaacataatgctagtaagcaagctccactggctgccacaacaactaacaaaattagtctcttctttctgtctttgtctgttacttcttcgcatttcttatctaatggctttccacacaagcgttggttatcagcaaatgcagatgggttattgattctagaccccagagtacccggaatctcgccttcaagattgttttttgatacattgaagcttactaaaccagtaagtaatgacagattatctggaatctttccactcaagttgttagaagaaagatccaatgttgttagattcgataactgagccaatgatgcaggaatgtcacccgaaagcctattcgagtttagtctcaaagcttttagggatgagcattttgagatttcctctgggatttcacctgttaagttgttggtacccaaattgagctcaagcaaatgtgtaagccgagaaagatcagccggaatgtgtccggtgaataaattcgaatcgagctgtaaaacttcaaggccagagcaattaccaagctctggagtaatcaatccagaaatgtggttatttgacaatgagagaacaactaaagaccgaagaaaaccatagtttgatggaatatgaccagagaagtcattggagctgagattcaagtatcttagactcatcaagctactgaaaccttcaggaacatccccagacaacttgttctcctgcaatgaaataacttgcagattaggcaaaccagagagctcaaatggcaattcaccagagagattttgtttgctcaaaatcccaaagtagtaaagccctgaaaacgattttcccacactagccggaaaccctgccagaaaagctattcccactcagattcagaacctttaaccggctaagattcccaatactctcaacaacatcacctgagaacttgttcccactaagatccaaactagtcaaattgctcaaacccaccagctcaacctccggcattgctccagtcaacaaattgcttctcaaactcaaagtctccaaccccgaaaggttggtaaaactcccgggaatcgaaccggaaaactgattctccccaagagctaagattctcaaacccactaaagaacccaaaaacacaggtaaatcgccagttaagcgattcccttcgagatcaagaacccgcaatgagctacatttctcgatatcaaccggaacatcgccgctaaaagaattattggtcagtttcagctcttccaatttcgacatgttaccaatcccaagcggaatcaaaccagagaaagagttaccggaaaaatctaacctcgttaaggttacgacttgtcctaaaaaggaaggaaactctccttgtattttattgtgttgaagatcgagaacttgaagagtactgtagcattccccatttttgggaccaatgatatccgtgaacgcattaaaccctaattgaacgatccgaagcgacgccgtatagacagaaacattacaaaacatcgaagaaggaactgaaccagagagattattaagcgacagagaaagcacctgaagcttcggtagagctccaatggcggccgggatcactcctccgagaccattcccttccacactcaaatgcatgagtgaagaacaattagctaacgcagaaggtaaagtacctaccaagagattataatccagccatagatactgaagctcttgaagctcaccaaaactcgccggaatttctccggcgaactgattgtaagagaggttgacaagctgaacctccgtcatgttcgaaatacttctcggaatatcgccggagaaactgtttgaggaaagatccaagtacttaagcgccggagggaggttaccgggaatgttaccggagagatggttctgtgcgacgttgaggatttgtagactggtaagattcccgatctccgacggtatattaccggaaaatgagttgtactgtaagaacaaagaccggagaagcgtgcatttggagatagacgaaggaatcgagccattgaacgagtttgaacgaagactgagtttctgaagcattcgaaggtttccgatatggtcactgagtcgaccagcgagttggagactcggcaacctgagctcagtgactctgttattagtacactcaactcctcgccagtcacacggagccgacggcgtaccagcgtcccagccgccgagcgagccgagcgggtcgtgaaggttgatcttaaaagaaatgagtgcgtctatctcggcttgagtctcggcggcgccggcgcaggataagaagggtgcgcagagcaccacgaagaagaaaaaagcaatgaaagccatttaaagaagaggtttagaataagaaaatgggttggttattattatgagctttgtagtggttaatgatgggggttcaggttaagggggaggaagaggagtgcgcataggtggcgtatgttagaacagagtgccggagaagagtgcattggaagagagtgatggccattttttttttggtccgaagaaaaaaaaaagtgagtgagtgaatggggaaggagtttagctctttatttcttttctttcttttttgtattgagcttataacataatgttttttttaaaaaaaaaaaaaattatactaacttatatatattttttatatatattttacataacaaacttatcaaaatttatataacaattcacttaaaaattatcaaaacaattattcactatttgcctactgtaattacatcttcagttttagatgatttgatttaatgaaattttcataattattcaaaaaaaattatcaaaacaattattaaaacaaatctaaacaaaaattaaaaaaaaaataaattaatatatgagataattctttaaaataaattctatattttctaaaataatagaaataatactttaagttaatttataatatttttttttaaaataactaatttaaaaataattcttaataaaaataaatacaaaacatataaccagttttattataagatatctaaattaaattatattcaagttttattttggtaaaaaaatttgctatactattcagtattattttaaaaattacatcatctaatttatcatttagtaaatcaaaaaattaattaataaattttgcaaaataattcaaaataatatttattcattctaaaaaaaatagtatttattcttttttattattagtttttttaattttttgtttttatttccctctttaaaatctcaaaacactttgaataagcacttttttgaataaacggcatgtggtttggaggctaatgtttttatttatttttatttaattttaaaagagtcatatgatatgacgttggttgaatcattgagccttgtgtgaaagtgtgaaccttcttcattttacacttttatttctatattttagtatttagcttaacaacaatttttattatatagtattcttatctacattttttaataataatttgggtcctctcattatataattaaaatataacaatttgaattattaggtttcaaacaataaaaatgacaattttttatcttgtaaaatattggtctcaataaatttaattctttctttctcctctcaagtattagatttccacaaaagagtagcaactaacatgcaaataatttttagattttctatttctaaactgacttgagagtaagagcaagactacaaattttcactaattttaccgtacaaattttcactaataaagactaattaaaaaaaaaaatcaatatatatttatagtaatttgtattttatttcaagtagtgttgttaattttcgtttggacatatcaagtgggtggtattaaattagaaaaaaaaatgaagatcattaacatattatgtaaactttaggttagaatagaatagaaaataaaataataaatataaaaattgaatagaataaaataaaattcaaaaaaaaaaaaaaaaaaattcttatcttgcttatttattcttttttttttaaaaaaaaaaatgtaaaggtcattatactaaaatagtaaaaaattattctacgaataatatttacattatattaaatgcaactaaataaataaaaaaatatataaaataaaaatttattgaataatttctattttattaccttcaaatccaaccaattaatttttactataataataagatcgaacaactttattaacaataataataaatgataatatattaatatatggaggtgtgagcccatataagtgatagtaacatagatatgtgagagttttgttgttaaattagtggggttcccaattcaattcaagctaagctaagctacaactcatcccatccaatatagtgatgttgctccaaccaaaacctttaattttaattctaatattattatttgatttcttttctacaaaataacctctaaattgatttgttttctttttgttggctctaatttcaaaaatacaaccaaaaattgagaaagatatcaatatagataagtaggtgtgatatggtatatggtatctagctgggtcttactcttacattactttttctcaactctttttattttttgccc

SEQ ID NO: 254900 - DNA, 613 bp, Cannabis indica
caaaaaattctttattcatatataaggttgtggtatctatagtgagcatgaagctcgaggttctttaactttttattataatggatgaatgtttaattagttgaataaaactttctatcaaaaaaattattacacattatttattatttattatattaaacataatttaacatttaataaaaatgacactaatatagtacaaatataaactataaactactattaaaagattaaataaaatattaaacgagtcctcattaagatggggagtgtcattttcgtctcctactcatttaacattcggaaacataaaataatcctcgtttccgcctcgttttctatttagttagagattcctcacatcattagtcattataataaaaatatacatcctaagttagagagatttctaattaataaaaaaaagaaaaaaaaaaccactggaattttctttgttaaagactccaatttccaattccaattccaacacatttataggaatttttacaatagacacattttttaatcttaattacaaaactaacttaatttttttttgtaaagaaaacttagaagtggttattgtctccggtggggcttttgatttcggatt

SEQ ID NO: 254901 - DNA, 573 bp, Cannabis indica
gcaaacaacgtttttttgatctcgtcagcactcggagtgctaacaagagccgacaactcctcctgagagattcgctcatgaaacaactgggagcaattataatccagacaagtcactgcctccgtaaaaatacccctaaaaaaatcaatgaactcattcccaacggcttcccgcccagagatccagacattatttttatccataatgctctcagtggtatttcttcgccctttaatggcagccgaaaggaagaagaacttagagcatttgtccccatctttgagccaagagattcttgccctttgtttccagtagatcgcctttctttctagaaactcattcaactctcggcggatttctcattcccgagacccagccgggaggctctgcagagagttgagcttgagttcaagatcttttatagccacatcaagcttaccaaattgggacctactccagttttggagggccaccctagtggccccaacctttttgaaaattcttgtaggggcccaatcatgattaatagaattccaagcattgtccacctccaggttgcttctagtatcccgg

SEQ ID NO: 254902 - DNA, 1420 bp, Cannabis indica
atatatatatatttaaatgaatacaatttctattattggcataatagttttgtattaccagatatctgtatactgatacttattcatggtagatgctagtagtgattggaatttcatcttatgaacaatgcgtaatggtttgattctgattgtgtataaataataatatttgaataatgaatcatatgatttttattattgtttttcttgatgattccttgtgactcatgggtgctatgtggtgcaagtaagagcaaggaaaagttagagctgccatgaggtggctaccttctccagcaatgtacatattaaccccaccggcctgtgtgccgagttgctagtagttaatttggattggttgtatctactgtattttgaattgctattgtctatagtcttttgggtaaatctttttataacatggatccccaaaatacctttttaatgttgttatagtgtctgttttcagtcttttattttagtcaagtttttaatattctcataatttttaataattaattaatatattagtattaatctaatttataaaattacacacgtggtgtccctatgaaatagagcgttacaactctattaccatattatttaatgaaagaaaatagttatgtgaataaatatgataaaagaattcatattacgacatcaaaacttgaaacacttatctgtcagatctaaaatatcgtttgtagaaggtatgagtacaaaatgaaacatttctcttattcattgaccatatcacaaatctaccttaaacaattagaggcaagccatagaaatggcacaaaagtcacaaaaggcatgaaaaccataaacaaatagtgcaaaaaccagtatagtcatcaaactaaaactttattttaaaaggtcattttctacctacaaatttttaattgagctttaaattataaaaaaacaaaaaaaaaaaaaaaacatccaccatataaagcacaatgagccaccaaaaataacacaatcaacccccaattaagatacaaattagccactatatatggctaaacaagtgttaaacaaaataattcactctacaaatcttactcacaaatagtaaattattaaagagaaaaaataaccaatatatcaaaatataaattagttggtttgactaaattcaaaaatagaatctaattaatatatattattataaaagttgtctattaaaagtaaattataaaaaaaaaaatattacattattcgtataataaatatattactattaagtagttttaactaaaaactattaaacaaaagagatactaatagggagatttgaaaaactatactttaaaaatcttaatattttattcttaaactaatacatttcaaaataaaacatatataatacttttataaaaaaaaacccaagaataaccctcaaccc

SEQ ID NO: 254903 - DNA, 1267 bp, Cannabis indica
agttataattatcatttgcaagaaaccattggcatcataaattcatcaaggaaaacaatctcaaaaacttaaaactaaaagctcgaacaagggtatgtaagactaaaattttgtttaccttccggcaacagtggcatcgaatgtgaaagccacaagaaagtgcccaggattttcctcatcagcctcaatcctaagagtctccttcttcaaattcacatcgtttcttatagtcacagccttctgatgctcaacataaggtgccacgggttgcataaccggtccacaagggtacctgccaccgacccaattcccgtgacccgattcagcatgtgagtgtgctccgcggtggtggtgatcgtacggcgccggcaagggcagaggcgtggtaggcggcggaggcgggtaataacctgggtattggtaatactggggagcattcgggtttgtgtattgggcaggatatggcgttgccgcagtaacaacatagcggttggctgagagttctggttggggtggtacctgaggtggaggaggagggtggttgtggtggtggctacgccggctgccatggtgtctccggcgattcgttgaaccgctactacccatattacccatataaaaaaaattaaaaaaaaaactcccttgaaaaagtttttcgagaaatggatcctgactcctgagttgaagaagaatcaaaatcccatattatgcaaagaagtaagatgagatgagagaaagatgcagtgatgtgatgaaggaaaagataagagaagggaaggttggccaagggaacaagaatctcttttatgggttataatggattgcgtaaagctccactcagaatcagaagagaagagagagaaagtagagagaaactcattctgctaaactaaaaccaaaccgcactctcattaaaaaaaaaaaaaaaactaaaccgctcgcttctttcttgctttgtctttttcttaggtaagtatattgaaggaaaaatatatagagaaaaatatgttaaattaagaaagagacaaacaaagttaagttaaactcttctttccagaacttgaggctagctcaagtggccatagggagtgcgtgtgtggtggagatcctgggttcgagtccaggttatgcatgttgtaatatataaacgcttaaatcaaaaaaaaaaaaaaactcttactttccaaaaaaatatatatatgtaaaattatttttcttaattttctctaaatattttcaagaaattatataataaactaaaaatttg

SEQ ID NO: 254904 - DNA, 638 bp, Cannabis indica
ctattaaagaagcagacgcacaaaagggataacaaccctcccacaacttattacaatctgaaaccaaagcttccttggccaaggagtgagcagaccggttgcaatctctgctgatatgctgcacggcaaggcagtggacaaattccggggtctctcttatatcgtctagtaatgcagtccagtccgttttggcttgggaaatactatttaggtagttcacaacacggaggcaatcgatttggataatgtaaggataggcagccattttgatagctaaatggatgcccatccttaaagctagcacctctgccacttccaccgaataagtcccttgttgctgttggatttcgacagccaccacttcacccaggtggtttcgaattagagcacccagcccaccattaactccattctttggcacgctagcatcactgttgaggcagtaaacacctggtttaggcggctcccatctcttttttggttttggattcacctctaaggttatttccttcgaatggtgatggttcaacatctcctcagcttccatttgagcccaattagcccataactcattgggcagtagtttgagattgaggctttttttgtttctcctattccattgttggaaattattttac

SEQ ID NO: 254905 - DNA, 849 bp, Cannabis indica
gggaggttcctgaccgcgagtcacatgaggaggaggacactgcagggagtggaactgattcagtggataacactcaattgaacgagcccttctcatgcgaggagttgatttagcgagtcaccaaatccgacctcaccacctctacgaggttaaatttactacgacttagtaccatgcgtccccgctctactcagagaccgcacctttctttcaccaatcctgcgataatccccacatagaatgtggttgtttctatacccattctccgttgtggagtatcgcttcccttccatccattcatcgctgctattcttaagtggtatgacgtatctcccttccagttaaccccaaacagttatcgcatagctcttggattttatgcgatgtacatggagtacgcgcatagggagccttcaatggaggacttcagcaatttttatgacataaagaatgtgggccttcataacggtttctattgtttcagcaagtgggccagttctgaaatcaacggggtggaaggcattgtttccaatatgggagaatggaaatctaaatggttccatgtgttcaaagtaccagggattaggaccgattttaattgtcgacctagtacgtcgcacattttagcacttagttaatattcatgttaccttgtgatattgtctaacacgctcttccttattgaccgtagatagaccggcttgacttgtactggactcggctcgcagagaagtcactgaagttctcggaaacctccctgttcaagatcgcgactggcgactactgtgcacgaccttgaagttgcaggaacacaagctaattccaaagaacgctagccttcatcgggag

SEQ ID NO: 254906 - DNA, 867 bp, Cannabis indica
tgttgaataaaatggattacattgaaattgaattttatttagggcataaaacccaacaattgattggacaaccgctgtgagtagcacttcacgtccaccagccgagaaatttttttcacttcaagtgtgcattagcctccatattttctctttaatatcgctgaaaagtttcttttatttctcccagagtatgaaggtaaatagagatacttctcatgacactcacatatgggcattgacaattgtctgtgaaaacaaacttgagcgacaagcgtggtgtttaagcgaaaatgacataatgaattgtcgaaattgaggacttaacttgaagctatgtggtagatatccaagactctcttaattgcaagacaagaactctcatttgcttgatagaaaagaagactattatcagcaaaaaaatagatggaaaatcggtggagcatgtctagtaagtttgaacccacttagatgaccattattctattctagctgcaacattcttgataatccttctgagcaaataagaaataagtatggagataatgggcaaccctgtcgaatacctctagttggaattatgagcctgtgacctctccattcaagagaaatgagcaattgttcgtagtcaagcaacccataatatgagatatccttctatcattgaaactcattttttgcatgactttttcaatgaaatgtcattcaacgcaatcgaaagcattgctcatatctaactttaaagaagcaattccttttcggcttgctgttttgtttttgatggtattgatcagctcaaaggcaacaaggacattgtctgtgatcaaacgatttggcaaaaaagaattttgtgtatctgagataaccact

SEQ ID NO: 254907 - DNA, 746 bp, Cannabis indica
atataacacatcttgtgtccattgtctaagcaacgagctcatgtgttagtgcaataaagcgaacaacctttgtaacattttgtgcttaagcttgataaattactataagttagaacatcgctaacaatccataataacactgctttcaaattaaagaattatttttcaaaactattataggcctgaacaccattctcataaaattttattaaatcgtcaatcaatggtttcaaatatacatcaatattatgtccaggttgttgcgggcctgatatcattaaagaaagcatattaaattttcttttcatcactaaccatggaggaagattgtacataacaaggaagacatgccatgaactatgacgattacttagagatctatgtggaattactccattcgtagatagactgagacgaatatgtcttggttcaaatttgaattcatcattcatgtagtttactttttttcgagcttgggaatctgtaggatgtctgagttttccatctttcactttcttagtctcgtgccagatcaaattttcagaatgttttgtaccacgatataatcgtttaagttgcggaatcaaaggcatgtaccacatcacttttggagagataagtttattattctccttacttttgtgtattttatggcgagataaactacaagttgggaaattatccatgtctgcatatttcttacgatataaaatataatcattcggacatgcattgattttttcata

SEQ ID NO: 254908 - DNA, 445 bp, Cannabis indica
atatattcatatcgataactcctatcaataataaccgaaacttcccaacttttttgcaaaactagtgaaaactataacctgtcgagaacatgttgagattctatcgaataatcgatcgacaatccaacaatgataacccacataggtaaaagataattctaactcatattgataacctattgtacaactcgtcgataatcaagtccatagtcaagcaataataattaaaaaaaattacaattcacataaaattctgttaactataaagtttttaatttatataatcgtaaatttatttatgtatatatatatatatctctaattctggatgtgcaaatgttctctaaactaacaaaaaaaaaagataatatatttttatgtatattgatccatatatataggctttaaactctgtgtgagactctcttgaattaattatagagga

SEQ ID NO: 254909 - DNA, 1133 bp, Cannabis indica
tcctatgtgtcaatatcgctattagtctaactaagtatcgggtcccatataatttaatataatagcttttaaggagtatcgctagtcaatcggaacgcgacatgtcgagaaggtgctaggtaccactagtgcctaatagcaatgctctaaaaaaataatacaaatagcatagatataaataaataaaaaagtagtgcatttagtgtgatgtaaattttacatcatagcaaatgttgggttaaatttgacacaaaatttactatgtgccaaatttacatcactttttggcacactattaaacacattttttgttaaatggactatattttagctttttactacttatttgcatctctattggagatactctaatatagtaatttgaagtgatattactgtaatataaaaggggtactgatagtttatgaggttatcgaagttttaaatttgggtttattgctttttttcttttccttaaaaaatataaaaaacaatagtgtttattgtatctctagccaatgtaaatatttattattattattatttttgttgattaagaaaaaaacttcattaatcgcaccaactaaatacactctcaagtctctccaaaaaaagagaccaatctcacaactctattaaacacaagtcaatctctttagtaagttaagttccactttgaaaccttttctatttttaagcagataccatctgtatttaacatcttttttaattttactaactatacaattaatagtatttgagtagttaaaaaaaaatacagttgtttctattcctccaaagatgatagattgtggcagcaaatataactaccaaaatcttcccaatcaagcttgaatgactagcatggagccaattgttccagctctcataagccttcgaccaacctttgaaccccaaccaactgaacacttcgactagcaccagacttgacaacctgcaattgaaaaaaatatgctaatggcttcaagattatttccataaacatcagctgaaatatgaaatttactcaacatatctcttgtgagaaggtttgagtgagcagcttgccacaaaataaaaccctgttttggcacattgagcccacactaaattgctctgctgcatggtcagga

SEQ ID NO: 254910 - DNA, 4232 bp, Cannabis indica
taactattaattattttgctaaataagatattaggaatttgttaataattattattttatatccaaatacacattgtattttaaagtaaagtataattatacaattactttcaaacacattcttataaaatctaacttgtataattaagtttatttttattcgtaaattaagtagatttaactactaaaccacataaatagtgtttatttttattcacatatcatttttaatttatttaatacttatttattgttgatgaaattttgtattacttaaaagaaaattgtagtttgaagaattatttcacaaattattagaaaaagaatattattttacaaagtatatattattatatattttttaataaaagataaactcaaacacatgaattattgtaaaattatataatataaatctaaagtatataaatggataaatgtaataatatttggcaccgcttgaaagttgaaactgaataagtgtttttggctgcatctttgaattgaataatgttgtcctatggaaaaagaaactacttaaaaactgcagttgcattaattgactaaaattcataaatttcaaaacaaacttctacaccactccaaaccaaaccaattcaatgcttttattaccatttgtactaaacataaatttcaataatagtaataaaagaattataatttacatgagaagaaaatgaaaatattttcttaattcacattgaaggatgtgccaatttatatagtgtttatgtgcggataaatgctaaaatgcattagtggtgtttagtatttttctcggtgtcatatcactgttagtaaaattaagtatcgagcctcatataacttaagataataacttttaaggaatatcgctaaccaatcgtgcccaataaatactcttatgtacttgttttttttctttattttctatatgagaatgctaaacgacactattaatgcttagcaccttatgacgtattatattgctactggtaaaattaaatattgtgtctcatgtaacttaatataataatttttatgaaatattattaatgaagacgttagacactactaaatacaatgcttaatcaacacctagattaattatatttgacttataaaacaacattaaacttgcaacccttttcatattttcttgaaaaatattattaatcatcattaaattaattatagcatgctttaaatatatttaaacaattataatttatttcaattgattgtacattatatgatagtacatatttttgttagagtaaacatcccattttgaaaaaattatgaaaattatattttttagcttaaataagtctccttatgaacattgtttaatcaaattattaatgattgggcaaaaccaaaaataatccctcacatacaaaattataataaaacaccaaaagattcaaaataataaattacacatgcataagaaaaatagtatgcaattagatatttgaataataagttaatcactataaattatttgatttgtttaaaaattagtagaactaaaatacatattataactataatatacaccatcttatttaagttataattatcggtatgaaataaattgtaaccctagtatagaattttcttaaaattttattttaatgatttaaggaaattttatgagatgattaaagattggaaattaaaggcacaagtttcacatatatattgtattgtttccactataaattatttataatattcaatttatatgaaaggaaaggacaatgtgttttggtatattcaaaccaagtataacttatggctaacatttcttcatcttattttttctttcctctatggtcttattaagacataatttcacaaaatggggtccattcctaatcattgggcacttagatcattcttattgggtgaaaggtcaactccatacataataatctttctcactaatacacacaaagcttccattcatataattctctcctaaatttgtaggctacacttaattttttattattatgtaaaaaaaaaactaataagttggtttcatttgaaggcaacatataaatgtatacatgtttataaaaatagattactataaaaaaatatatatattatattgtagtttattgcttagaaaacaagtaatgacttaatctagttacaaataatgttcaaagagataattaatactactaggatatctatagatgatctagaccaatcacctttatacaaatcatataacctaaaaaaatgtcataaatgaaaactatttgaaggaatgtgtaagatccaaatgaaatcaattatatggtaaataaaaaataaataaataaataaaattaaaacttccacttgaagaacatgtttgtaaggttttttgggaacaaaagtgtgatctttaattaagcttatatatatttaaaaaagaaaaacctaatccataaacattttttatgtgaaccaaacctttttcttctttagaccaatcattaaggaataatgggtaggaggcatatttacctataaagttagtatagatgtgtacaaaaacattcattatatttatgttttcacctctaaattagaagatttaattataggctttatttatttagtataaaataggttatatctactcaataatgttggtcttgaattatctaaaaaatttcccacccaaaaaatataattttggaagaaaaaaaacccatttcttaattacttatttctctttctatctaatcctcaaataataaaaataataaaaaatttatagggtttctcctaattgggattttgccctaaacaaaggcacaaaaggttgatttaacaacaaacaaaagcatatacctaatattggaatttgggagtggccttataatttctaatattcatataaatataaactaatttctattaatagaaaagaatctaatgtggcatggttttaggtgatgacaaggattggatgttgacctatcaacaaaagggataataccaaacaaatccatttcaaatagtaatggattatatatatttaagtgggttttttttcataaattattattaattattaattaattaaaaaaaaacacaattagttgaaatggtacaacaagcaattttttttttaaaaaaaaattaataataattaaaccaacccctctccctctcaaaggcccaagttgtcaaaagtaaactcaattctaatttgggtccaaaaaaaattgttaaaaggtattattgatactcagtatttttttagttgttatatcactattaatataattaaatatcaaatctaatataacttagaaaaataacttttaaagaatattgatattcaattataaaataccacttataaaaagtattagacaccactagtactaataaaaaaaatagttcaacaacaaaatatcaaggaaacttgtttggtgttttgtaattttactttttactatattttatataaaaataaaacatttgtctttgtctcactctaatctcaatgtggatttttcttttatttatatattattatttttaattaatttatttgtttatccatccaaacaagtacttgtatgtcttctgagctcaaaacaaaaagaaccaatagaaaagctcaggcggttagaagagagagaaagtgtaaaaaaagaggagagagaaagtgaaaaagaggagagagagagaaagagaagaaaagatgagagagaaagtgaagaaaagaggagagagagagtggagtaggagttagtgattctagtgggttccttcaaatgaccccattctttcatttcattcttaattaaataattaaacaaaattaacaattaattaaataattaatatgctctttggttttgtagtttttttaatggagtataaacaaaatcaaggctttaagagtttaagttctttagataattgtctaatttgctttttaataatattggaaatgtcagtagtagatcctcttaaagaattattttagtagattttttttatctgtttcgatatttaaaaaaaataatttaacttttttttattgattgcgaacattgtagttatctaagaacacttgtaaattttcataaattctaaatagtttacagtgctgaaattaggtttaaatagttacttacaacacatataaaaaataagttgtgtgtgttactaaaatacgtaaatcttatttttcagcattgtaaattatt

SEQ ID NO: 254911 - DNA, 691 bp, Cannabis indica
ttagaaagttcatatttagggtggttaaaacaacataacttgtgagtagatctaagatcctggtaaaatatattccaacaatttctccaataaagatagctacaattatgcactctttaatcaacacaaaaaactcgattcttataaaatatttaaaatattaacttaaaagcttactcgatcaacatcacactaacactacaaaaaatcttacttttagtcacagcaaaacttgtgactaaatgtaaaaaagttgtgactaattatacatttttattgctacgttgtgactaaattccgtggctaaaagtattagtcacaaaaattactttgttgtgactaaatgtgtttttagtcacaatacttgttgtgtttttagccacaagaaacttttttgttgtgactaaaagtcacattttgtcataaattttttttgttgtgactaaaaggttgtcactaaaagcagtctttttttgtagtgtaatacctacacataattgaaattaacatttttctaatatttttaaatatttaataaaaaagtttaaatagattaccaatgctaatatagcatctcaaattttttcaaacggtatctccacaaataaacacctatagaaattaaataatacataattaaaaatttattaaatcaaactaattaaaattaaggaatattggcagctaaacc

SEQ ID NO: 254912 - DNA, 533 bp, Cannabis indica
aatagtttataatatcaaaaacataatttttgatattttagtttatcacgaatatttaaaaaactttaaacatatttttaacattataaattattcgaaaattttcaaaaatttatagagataatgctatgagtataacaaaaattaccatgaaaaaaaaattccaacatatatttttaaactacgaatattaaccaacttaaaaaaacagtttttaacatgaacaaatacagaataaataaccaattttgtcataacatctcttaaacatattattattaagttttatcttgacaaaaaatcaattcagggtcttatttgtacaattttaaaaaatacaaggtgcattttatcatttaacaaaacaaagagtctaactaataatttttacaaaatacaagatccaaaataataattaccctaaatacttatagaataattaattaattatggaatattttagagccacaaccacaaaacaaagaccatagttacaagcatagaatagagtagagaatcaaagcaaatgaggt

SEQ ID NO: 254913 - DNA, 720 bp, Cannabis indica
tgtggtgaccactgtccactgtccaccgtctgagtttcgttttttcgtttacacgtgtggtgtgtgtgtgagagagtgttttggtacatctcatcatcaacactagtttcctaaactaaaagctgtagcttggtgtttctgcatccaaacaagtttatgggaaacataagcttcgtatactctgccaatcactgttgcttttcttattttatttttttattttttatctttcatattattggatattttattattaaattatatatatctctttaagagcattttcaatgaatactattcatatttatagttatcaaaatatacacattattacaaaatattattttgtattttcgctttcattacataaaatttgacattatttcttcaaaaaaaaaaaaactattttaataattgacaactttaaaaattgttcactcaatatcacattacattaaattaataacttttttgaaaaaaaaaatcctcaacaaaaaaaaaaaagaaatatgaccgttgtttatattgaaggatattttacataaaattaattttgcatatgtgacaagaccacttcaatgaactaccgagatgctctaagcataaggctctctgttgtgcgtctggtctgtctgggcaggggaatctcgtggtactgaactgatatcaatagtacagagagttttgttgtggcttcccactattttttttttttttttt

SEQ ID NO: 254914 - DNA, 530 bp, Cannabis indica
catgcatttgttttaggaacctgaccagttcatggccagttcatggcttcaagcatgagaacttggccagttcacagtcttgtcctggaccctggctggcacatggctttagacccaataacttggccagttttggccttaatgttgaatattcatggctttttatgcctattttgcctttatccattacttgattcccataagaactctgtatggcataggtctagtctatcttggccaattagcagcctaaactcaatgttgtttgatttcttgcacctagatcttgtactttgctgattaacaactttgtacattgactagtacccttaggtttagttgactcttatcttgtctaagtctctttattttgtccagttgctcacctccctctgcctttttttgtacatagatgaacccgcatgacttttgggaggtgacaaccgaatcgataaagacttacttagtcttctcttggaagaccatcgtccagctccttcagctagttcttcttcctgggattctttggg

SEQ ID NO: 254915 - DNA, 1013 bp, Cannabis indica
gaaaattacgttcaagtagtgtgttgcacgcgtgactattttattttatacttgtgtaaaatagactgtttgaacattgttttctatattgtaaattattctgaatttcttaaaattttgtcggatatcttaaatagctataacgtacatgaatataaaaaaaattagactaattttttttctgaatgccgaaacaagtagaggatgcatcaatacatctattttaagggggtgcattgtagaatcacccaaaaatatatattacatcctaaatcatttattctctatttttatctccatatcatttacataggtatataaataaattaaaagagacttcaataaaagaaagaaagtggtggaatgagagaaaaaaaaaaagagtaaaaaaaaaaattaaataatcaaatataaactcaataaataattgtacagtaccatattaagtaattataaattttttttacattaggataatatatggagaaatagtttaattctctttaaaataattttagaatagttgatgcaatgtatgaactatttgagtatttttagctaaatatttagaataattattaattttatcttgtaatttttcgataatatttattttattccttaaaatatacggcttgttaagaatttcttttgaacttttacatttacagatttttagtccttctattaggttctgtctcataattttgtttaaataatgatgtgtctttgtaaattagcaactttcctccttaaacattgacaactatcaaatcgtacccccttaaaactaaaatgagaaagatttaatattttttaggacatcttaaaatattcatttagatcttaaaaaaatcatttacaatggttaagaaaattaaaaaaagaaattaaaatttaaaactaattaagcgattttaaaaaaattattattaaaaaattcatttagatattgaaaaattaatttttgtaaaagctaaattttacgggaataaacttgagtttatttattt

SEQ ID NO: 254916 - DNA, 518 bp, Cannabis indica
aaacaataaaaataaaacaaaatggtaagttcgattttgttgatttgaaactaattggatcaaaaagttacaaatgccaaatatagtttcaaatataaatacatatatgaaagtaaaaagtaatttaaaataataataaatttattttttatgttgtatgattttttttttcttcattctttttgttgtgttataatattaataactaatgtaattttctacaaattaatataaaatggaaaacgagaatgtcaattttaattattaaaattggggtgtaaatagaatttaagatttaaatatatgttacttttaatataataaaaaatattgatgcttcatattttgagtgtaaatataacaattaaataataaatatgactaataatacaatgacggtttataagcttccgtaggagctttttttaaccacttattcatccttacactaaaactatcaatttatagattgttgccaatttctcaaggaattagcttcttcctcttcttcttcttct

SEQ ID NO: 254917 - DNA, 539 bp, Cannabis indica
ggaaatctcaagttgtgcccattgtgattgggcatgatcttgatgacgtcgtcttgtttacaggtgttcctcctccccaattcttggttactggtgctgttaattctgaatacactcaatggaagcgacgtgattgttcactaggtcggttatcttcatctgtcactaggtcagttattgttctcgttgcaaaagtaactaattaatttattatcaaaataaaatatatatgcaaccaattagtatatttattcatattaattttctgatttattactctatgtagatgaagtatcttattacctaaattggatatttgcagtatgtataaaatcaatggtatctcactacatgattcttgcaggcaacgacaagcatccacaattgctttttctttagctcttcatgctttttggtaagataatgagacactgtagtcgtctgccatatcatccatagtttcagttggtgtgtaatctctttttgggtttacaacttattttttattacatttctaactaggttgcttgtagcttgag

SEQ ID NO: 254918 - DNA, 1558 bp, Cannabis indica
ttgagaacctacttcgcgaatctaattgtgaggattgggattgcacccttccagctgatttcttcattgtacagactttttcccaggtggtacgtgttttgcaaaattaataggttggaggttccttttccagaggaaatcctttatttctactgtgtcaaggccaatataatgatgaccaaggttaaagttggggtttttctatctagacaagctctcagattcctactgtctgactttccagacagatcgcacccacaatctttgggagtactagttcttttcctttgggtttcctaccggcaggatgccatctcttcagttgagcttctaactcgcaggtatttaagcagttcatcccaagctttatttgttttcaagtcgcactaattcatgtgtatgaattaacatctcttaatttgcagctgaacttcccctctagagcattagatcaaaggagattgcccagaaaaagggccaatatagagccttctctgaagaacaactgaaggttgaaggcttggtgacaactgagcttcttcgtaggtcgggcctaattaccaggtttcagagcatagacacagtcagtcttcagggatagcgtcaacctcccaaggaagtaaaggaagcaatggccaccagtctggctgcgataatcactgatgtagccgagaatgaccgtacccttcgccctgagcgagtgtcgtgtcgtcctgattctccgactgaaaaagaagaaatcttagaaagatttgcaaaatcaatatttttcaaaggataaaattggatatgatcacctcgacgagctttactaaaatgaaaagggtctgtatatggtggatccaagtagtgtgaacgctttggtactctctttgaattttctcgcacaagttgatgagattcaccttcaacatcatcctatagaggttgctcttcataataagcagtagatttctcttcaacataagtgtgttgcctttcagaatggggagaatgttcgtcttcaacatgagtatgttgcctttcagaatgaggagatcgttgcccttcaacatgaatattctattattgcagcgacataattatctttgaaggacacagtgaaatttttgatctcatcaatgaaatttcggatctcattaatgaaaattgttgatctatgtaagccttcacaatacaccaatccactttttcactttgtctcgcttttggtccatacattgtggatggggttgacatatggatgggagaataaccaggggtgaccactggaagatcatctcttatggcttcactcatgggttgaacaggaattttgttatcaacttctgtagcttgaccagagggttattcttcatttgtaacagtgtgttgttcttcatttctaacatcgacattaccacaactctcatgtcaatcactatcatcaatccaattaattgtgcttcctgactccaacacagctttcaatatatcaatcaagttgtttgactttgatttagagatatgaatgaagccttgcgtgtgtggtagtttttctcccctttagtaggtgaaa

SEQ ID NO: 254919 - DNA, 613 bp, Cannabis indica
aaaatacagggtccaattagtaacttttaagaatccataatagtatttaccctatatataaagatatagatatatacataaatatccagaaacgtccacttaattatgacgtttttttaatcttgatcgtatatagaggtagttattagttatatatttttcagctcttccatcaaataattaaatgcatgcattagatcaattggagtcgtgtgtaagtaaattaggggttttcaaccaaatttacaaactgctcaattctaataaattgtccaaactaaactgaataaatcgagaataattaaatacaatttgaattttgaagtaatacaataaaaattcaaaccagccaataaatatattaggtgatttataaattattctaaaccgctcaattaattcgaataaatcgaattaaacagacttttatattttttaataaaaagtatatataatatattacataaattacattttttttaataacgtaaattacatttattagttaaattattttgtatttaaagtttagacgttttagtgtttaacttaaaacttagactttatagttaataattttattgtgttaagatattaaagttgaagtttaaaa

SEQ ID NO: 254920 - DNA, 558 bp, Cannabis indica
agcaccaaaatgttgacctcagatttgatcaactgacaacagaaccttatttatgattgataatcacgtgtaaataatataagtatacaaaaaaaaaaattgacacaacaatttaaagaagttcggcccccttatttagcgggtaataatctactccccttttagttgtattgattcgagagataacaccacacaaattacaggctttcaccttataatttctagtatggccctctatgaatgtttcaatggtgagaatgatgtataacagattctaaacaagtgagatgagacacaaactttaatttctaatgaactgaaggtggcgtgtgaaagagaaagtaaaagtgctctaaggctttcgggactttaaacttagatctttttccatttagtctaatgctctttatatagttttgagctctcatgggtgaactcatgtgttgatccgtgcaggaggataactgtggacccaccatttgactgggccttcttaaagctcttcacctatgcttgccaaccctccctttgcccaagactggccaacacatgactacc

SEQ ID NO: 254921 - DNA, 590 bp, Cannabis indica
tagaggatcatatcgtgtgggaaaatcggcaaaaacctgagatggtgatggatcagtatgtatttgagtgtttatggaagtgtgagatggtggctgagctatggtggcatcgaccaagagaacagtggtggtagcaaaggcagtggctcttgttctcaccattattgaattcttgaagcttcaattgatttcttagagctttaattgatttgttaaagcttcaccttgtttcatctgacactattaaaactagtataaacgaaaatagagcaatattattaattgatattattgatacaataaatttaggtccttatatacactaaataatagtgtataacagtaataaccaacctaactgtgtaaaaataactaacttcttaacagatttaatataaggtgtgcaagtaggggcacacccacattgaagtgagggtaaagtcgttccttaaaaaattgagaaaaaaatatatatgtattttaattaattacaatatatatttataataaaagatgatattaatatataattaattttgtgttataaatattaataattatgtggatgtccaaatcttttatttattacc

SEQ ID NO: 254922 - DNA, 1228 bp, Cannabis indica
atacctaattattatatattactattgtgttatatgttatatacaaatagatcttgggtttgttattaatttttctaacacgtcctttaactcaaatttttagtgtattgttcttgttgtttttgtttgttgattcttgcaggtgttttaacaccacagagagatcatatttatgcatttacggagctaaatactttttttcctagttttgtttttgctacatagcaataatatatggaggagatatccaaataggccattttctttcttgtttttgtttttcttccataaaaggacactctcaacacatagaaaagaaacccttcattaattaaacgcaagaagacaattaagaaacatatacatccaaacaagaactcacataaacaaataaaacaagacaaacacatacgagaaataccctaaagtcataatgatgttaaactagaccaaaccagcacaacaaatgtcccaagggcacttgtgattatttctgaaacaaaccacaccagtacacacacctacaatattctcaaacacagagcatagaacataacaatcagaaacatacaagactacgtactgtagccttgttacatagttttctaataagttaaagtttttgatgatggggtgttttgttgaacatcatctaaggccaatccaggggtataacattctccctgcgaggtagctgagcacatcattgggtagcaacagggatctgatagcaaagcacaaccttcgccaacttgtttacagcttgagacaggttcacatcttcgattctcaccccattccccatcacctacacaatgcagtccttcacagcaaatcttgccttgtgcccagggctggccctagggataggccggctaggcccgtgtttagggcccacactttctgtgggcctaaaataaaaaataaaaaaaattattaggcttttatttaagtaaaatttaaatgtattataatcaacaaataatcaacaaataatcatagtttagttggttgaggtaaatgagataatgttcaaggtgatgggttcaaatcccataacaatattcaccagctaccctacacggctcatcatgaggttccaaattcagatgaatatccggttgtagtcaaccaaagcaccccacaaccatcacacccactaccaacgccattaccataaacttcttcatcatttactctcctatacttaattaatatttttatttct

SEQ ID NO: 254923 - DNA, 827 bp, Cannabis indica
gtataatgtatacaaaagatgttattaatagtctcatcaacttgatgaatcttgtgtgttactattacataaccaaaatttcattagtcaaagccacaaatgggtcaaaattaaaccaaaatctaacacacagcaattagtcagcaattttactttataatataattcatatgttgtttgtagctaagctaaagctaatgaagtggttgtcatttcaattataggtggtttgcaagtgggagttgtgtactcaaaataaccaaatttgacattaacaatcttccaactatgctaattctaaattaaaaaaaaaaaaaaactaatagctaatcctaaccagaaacagataaccaagagaaatttagttcatttttgccttaatggacgatttttatatttcaatcaaatctctgaatttattattttttctgtcgtttatcaatttataacaaactttgacacaaaatattatattgaataagtttatagtatgttctttttttttttaaagaatgaaagtagaaccttcataaaatagctaactccgctattacaataaactgaagagcaaaaagaatattgttcttagaaaaaatacgaccagaccaataataagaattgcgagctagacaatgtgcaactttgttagcagattatttaacatgacaaactttaacattattcaaagaaataagagatttttgcaatcttggactagaaaaccaaagatagatagcatttcaacagaactattaagagcttgaatggtaacaaaacaatcaatctccaccacaacatgttatattattttataatataataagtgt

SEQ ID NO: 254924 - DNA, 1317 bp, Cannabis indica
ccacctatcagccgtagcatgtacactcaattgtattgacagcacaagattcttatccctctcatcaaatagatcattgataacatcaaggtcccaactcttagattgcatcgagaataagctagacaccttttgattcactaagccaggatgatcagataataaaagggattagaagggtctaggaagccatggatccaacaaaatgcttacattatctccattgccaatagactttcttacaccagccttaactagtccctgtgcttccaaaatactcttccaaataaagcttgggttttgtcccaaggtagcattaagaaaactaccagaaggataataccgagctttgtatatcttgcttaccaaagagtcttcattagtcaacaaccgccaccctcgtttaccaaggaaagaaagattatagtctcgaagatccctgaaacccatccctcaatcagtcttatgtctactcaatcgtttccaacttatccaattcacacccttcgaacccgaacgcaattgagatttccaccagaactttgccatcatgccttcaagattagaacagatctcctttgttaataaaaatacgctcatggtatagcaaggcaacgcttgagcaactgacttcaataaaacctccttccccgcttttgacaagaaacgactctcccaagtaaaaatcttctttttcatcttttcttgtaaaaaaccgagaatagctttcttattgcgtcccaaaatacaaggtaagccaaggtaaaagctattatctccagcgtccaccattcccatataatcacacaaactagcacgagtatccacagaacaattcttactaaaaaaaaaaaaaaaaaaaaaaaactgaggacttagagtaattcacctgttggcccgacgcttggtcataaacttggagaaggtgcatcacatgtgtagcttcaccctcattagctttgcagtacacatagctatcatcagcaaatagcatgtatgaaacacgaggcgcactcctggccactttacacccagtcaaccatctacgttgctcatacaaagttaggagagaagagagaccttcagcacaaatcaagaacgatacggagatatgggatccccttgacgtattccacaacctggtacaattggacccaacttctttcctccataagtaacatggtaagacaccgtagatacacagaacataatcagagccactaatctcaatctaaaacccatccgaataagcatagcctcaagaaacgccaaccaactcgatcataggctttgctcatatcgagcttgactcgccat

SEQ ID NO: 254925 - DNA, 597 bp, Cannabis indica
aaaaaattatttttattcaaataattatttcttttttttatttattaaattaaacatatataatataacaataaaataaaaataaaataaaataaaagtaacatagttatatatataaatcaacagttcttttccttaaggagttctcttcaagaagcttgagtatcgtgcaagaaagtacatgtggaacataaaatccaagcctggcaatgccacaatataactatgttaaaaataacattgaccaacacaaactgtttttttaggaaacacaatccactaactttcactagagttacataaatttccattttgcttgggtggaaggatatctaacagcaaggagtttgtacaagagaattgacaataaaccttttccatagtaaaatgttaaggaataaacaaatacccattttgcgaaagtacaagaaattcgtgacgaggcgccagaattgatactgcttgacaactagtttaggattcagatacaaattgtaaggagagattatctacaaattatttccctatgtatgaactatgaggctatgcctaggattcagatacaaaattattttttaattaatatatataatgtaa

SEQ ID NO: 254926 - DNA, 635 bp, Cannabis indica
aactctgcgattttcctttgtcatgattcatgcaatttcaccgtccgtaatgtttgctttttgaaccgcataatgcctgtctttcaccttgcttattctaagcttcatgaaattttttgccctaactcgagaaaatttcaaacttcctgagttttggcttttagttgaagatccttattctttaaactgttgagtactcctggtcggcatattttcttgttttaacgtttgatatttcgactaaacacttatcttgtgtgttgtcttttgatgatgaacccaggtgagttttggggaagcgaacaccaaatcgaccaggacttgcttcaactcttccacgaggatcatcctcgtctctgttctagcacaccttcttcgagtgaaaggcattcttccttaaatcttatgtccagccatagaatgatggcttgtactaaaagtaaggacgctaatgatgctgatgatgctagggtggacttggccaagaaggacactgatgatgctagggtggagctcggagctattcggatggagcttggtgaggtcaacaaaaagcttttcattgctgagaagaaagtagctaagttgactaaggaccttgaggcttccgaccagcttgaggctaccattggctc

SEQ ID NO: 254927 - DNA, 516 bp, Cannabis indica
ccttgatatatgtgttatagtgtttatcaaaaaatatccttatgtactctcaaaatcgaagcaaagcatgagcaacatctacaaatggttttacagcgaccacgagaacataataagctttatgctaaatttaagaagtgtgaattttgattaacctaagtgtccttcctagggaacattgttagtaaagatgggatcatggttgatcttagaagatttaatccgttagggattgaccaagttcgaagatagtcactgaagtaaaaaaatttctaggtttagctgggtattaccactaatttgtagaagggttttccaagatttcaatgcccttaatagagttaaccaagaagagtcaacggtttatatggaaaaataagtgtgaagcaagtttccaagagttgaagtaacaatttatcacaactattatgttagctctaccgttaaatcaagaaaagtttgtggtttattatgaagcattcagacattatcaggggtgcgttctgatgcaagcta

SEQ ID NO: 254928 - DNA, 630 bp, Cannabis indica
cccaaccggaagtccaaaactgggacactaaccggtcaaccggttggtacacgtcccccacgaaccagtcgatcggttctgtgctgggaacccgaaaaactactcccccttgaactcaaaacctaaccaaacttaaccaaactctccagaacacgtgcgcaatgcatttacaacattttccaaccaacaaaacaaagaaataacctaagtcaaattatgccattaaagacctaaacttgagtttcaaaactcaagttcacttaattcccacactacaactcaagactgaaatccaaagcttaaaatcaactcaaattaaacatacaattcaaaccctaagcattctcaaacctaacagccccctaaattacaaaaccaaaacctcaaaccaagcaaaagcttaaaaactaaaggagggttccattagagcttaccttagcttgaatctcccaaatttctttgctcaaaacactaaaaatcagcagctcctccccttgaataagccccagccgaaagagaaaacaaaaagagagagagagaaagttctacttgatttctctacaaattttctaaatttgttttcaaaagaaaagggaattactaaactaatcccttgctgaaattaatgag

SEQ ID NO: 254929 - DNA, 837 bp, Cannabis indica
aaattgactctcttgtgaccaacgaaacctggtgcgttgtaaacttaccacctggttgtaaggctataaattgtaagtggattttgaaaaggaaattaaaactcgatggaactgttgataaatacagggactgtttagtagctaagggttttagacaaagagagaatgtagatttccttgacacatgttcaccaatcactagaataatatccattagagttttaatttcactatctaccatacacaacttagttgtgcaccaaatggatgttaagactgtgttccttaatggtgaattagaagagaaaatctacatagatcaacctaaagggtttgtgatccttggctaggagcataaggtctgcaagttggataaatctctatacggtctaaagcaggcacctaagtagttgcatgaaaaattcgacactttagtcatttcaaatagcttttaagtgaatgaaagtgataagtgcttctattacaaatctgaaaaataacatatgcacaatcatatgcctatatgtggatgacttgctcatttttggctctaacattcatgccgtgaacactgtaaaattaatgttgtgttccaactttaatatgaaagacctcagagaagcgagtgtaatccttggaataaagattattaggtatgacaagggaatttctgtagatcaatctcattatattgagaagattctaaagaaatataattactttaattgtaagcatgcttgtaccccatatgatgagtgtaaaattatttaagatcactcgagatggagtaagacattcagattatgcgagcataattggtagcctccgatatgctac

SEQ ID NO: 254930 - DNA, 988 bp, Cannabis indica
tcagaaatgcttaagacatacaaatgtaaatatttttgctgcacttattttaagttgtattcttatgatatttttggaatgggttaatgttagcaaggtaatggtaatgttaaacattaccttagttgtttggagtatttaatcttgaaatgttattcccttagtaatgtaaataccctttaggagggtaatgttgatacattaaaaaatggtgggattaattattccctttcattatattaatttgaataatattttttaattaataaataaatttaaatgatattatgatttattataaataaaatattatgatatatatatattaagtctgtaagatcgattttttttttttataacttgagttatttttatgttattagcaatacatatatatgcttatacataaattttatgagaatggtacataaatgacatagcgaaacaaaaatatataacatagcgatataaaaaatattcattttaattaattaaaaatacaataaaatttaatattttctaattaatgaatatgtttctttaatgaataattattttatttttatatataattaacattatatagatacaataaaaaatattttaattttaattttcttataaataatatataagattcatgtactcagtcaaacaatataattcaattaacgggaatatgattacatattaccctacacagccaaacacagtttacacatttctctataatcatattttcctttatgatattccctataatcaaattattttgaacacctcatatcaaacgccctctaaaattaatctcacgttctctgaagtcaccctaatattttaaattagcaataagtaaagttttatataaaataaagtataattataacataaaattaaatataaaatttgaaattaagtaaaatgaataggtattaaaaatatttgagatggatactatacaatactttaattaattattatgaaaata

SEQ ID NO: 254931 - DNA, 1140 bp, Cannabis indica
tttcagcaagaaggagtttgagcaccaaagattcagagaaagagatccaggttcagatcttgataacactctgcgacacaaacgatacaagggttagagatctgaacggaaggagtcatttaattccgctacacccaatgtaaggtttcctaaactttatatgtgtttatttcatcgttttagaaagttcatatttagggtgttaatcaacatacttttgagtagatctaagatcctggtaaaataatttccaacagaaagctacatataaacataaatgatttctaatcttctattgataagagatcatattatattgaaatgggttttatttaaggcataaaatccccaacatcgagttccttgtccgagtcgtatccagactgctttccatgttccccgacttgatacctcttgaatttgtcctccaactcatcaattcgcaattggataggatccacttgcttttgactgagctgttggcgaaggtcaagagtttttctagttcaaataattacaaagatccggttgttgctggttataattactaacggacctcgtcctactcatggcccttgtccttaagtaactttaagttctacttgtgcctatactctctcgatcagtattgcgatgagttccgtcccctcctcgcattaatctactatgggttcttgtgcatcccgagctggcactcacctcgtcacatcccgaccttctcccttgggtatggttcgttgtatgccccctgctggggtttgtacgtgccccttccttgttggtttgagaaagacgttgacgatgcctcggtggtgacccacctatcctaggttaactcccaagatttccctcattttcatgagggatttcctgttccctagtcccaggttgcctcatgttctaatttctgtgagaaggatatgattgatcatttagttgttcattttcaagggatacctcagtttccccaggttgttcttcctgagcgttctaagggttctcatgggtcgtctcctgcctcctagttcgtgagctacaaggcctccctcgtggtctcctcactccaggattaggcttgttttgtgtgttgtttccctgtgccgctctgtctgcggctgcctcccattccaactcagcgtt

SEQ ID NO: 254932 - DNA, 946 bp, Cannabis indica
tcagcattaaaacacttaaaatagtcctgtaaagactcaccaggttcttgtttgatgttagccagagtggtatagggcggcttataggtcatcgtggcttggaaatgcgtgcggaacaagtcgacaaaggtctcccatgtcgagatagaagcctcaggcaattggctgaaccaatcatgggaattctcttcaaatgttgccgcaacaatgcgacattttgcgagttgaggtacctgatccacttccataatagtattaaatttctctaaatagtctatgggattagaggtacctttgtatttcagggatttggataatcgaaatcccttggggagtcgagcttgtcgcacttctgcggtaaaaggagaggtcccatgcagcttgtatatgggctttctctactgctcgagcatttttaaagcatgcaaaagcatgctttgatcaatattcgtagctaagggagcagtgactggtgctgctgcaggtgctgtcactactgcagcgaggtttgctgggatattaaccccagtagtcccagctggtgcgataggcggattggtgcgattatttattccctgatcgcccattcggggatcacggggctcttcaacgtcacggggtgcctgggagcgcgacttgaaaacaacattaaggtgatcgcgtagatcacccctatgaacctgatatcgtcctccctacggcgtctccacagaacctgacctagtgtacctgctgggtgtgcgaccatgtgaggatgaggaggcggattcaacgtcattgtctcgcgactggggtctgctgcgaggattgcgtcgttcagggttttcctcagtctgtgccttctggtttggatatctcgcagattggtccctcgatggttgttgattcaagtcgagtcctactgggttggcccttcgttccccgcgagtacgattattacgacgtc

SEQ ID NO: 254933 - DNA, 1864 bp, Cannabis indica
atcatttgaacgacaatggtggaaaggtaaaggtcagggtttgggagtttggcttcaacagaaaaattgtgagaagagagaaagataaaatggttatgaagacttggagatagagaagatgcgtgagaaaaaatgagagaaaccaaatggtgtgctgacatcatcaatgtagtatttttgtaattataatactttttgaaacttaaagaggtaaatctggttttgtaaaattgtttaaaaaattgagaagcattaaaaatgtaaaaaaaatagtcaaatttgacacctagtgttaaattatcattttataaccatcgcaacaagcaaataaaagtatttgcagcaagttgtgcatcatttaagaattgaaagtatacgttttttttgttagttttgaaatggtacaaccttgttcacgtcacttttaaattgacgcataatgttataaagaatattttatattttgcatccgtttcaaaaggatgaaaattattttttacgtctcttttgaaaagtcacaaataaaaaaactatttgcgtcaacaagttatacgttaattttttagactgacgcaaaatctttatatgtcacttagaaaccgacaaaaatactcctttttgtagtagtgagttgtggtgtttagcaagtttgagttcaagaagtcaaacttggctcaacaatggtgatttatgattatgtgagttttggctgctgttatcgattgatatatgcttattaaggtgtaatcaagtgttctggatctcggtttgaagtttggggtagaattgagtgagattcaaagttctttgggatttttacagaaaaacagttcactgttttctcagaatcagtaaactattttcttagacaggatcccagaaagcggtttaccattttaggaatccagtttaccagtttggggagttttgggagcctcagttttcatgttttctcgatatttaggttttggccacactatttattgataggaaacttttaatttggagtttaggtccctgaaaaggttttagcaagttatttacctattttttgtaattgtgacataggacctccgttcagcgagtgaatttccttttagattcaccgacatacttgaatatagaaagaggtaagattagtataaaatatgtatatgtatatgtgtatgcatataatatgcatgctgaattatgtgattgtatattactaacactattatagttgcggggcggagtgcattggtacaatatatattgttaagggatatgacatagcgttaaaatattagtacgagacgagtatggagtgtatgtggtatagcaatcggttgtgcccagagtacgagtaaaccctaccaacactagtattagaaagatccttagtgcatatggtatagatgaagtacttccattaagaacgttcttaattcatctgaagccttgttggtagcttaaggatgattgtacatataaggatggttaggtctggagtgttcggtctcggaatggcatggacttttatttttgtagtcacgggtcgacacttttgcgaaaaatgtattttgtatatagttataaacttttaaatagctatccaaaaattatggaaagtatataattattaaagttaaagtttaatttcaaaattttaatttgtcacattttttgaaaaatcctttgattagaaaatgtgtgcacagtaatttaaaaattactgtagcgtgcctaagaaaataggacgttacattatcattcataatcccacataaattttactatataaaattacttgtaattttgaagaaattttaatatgtaattgtctaactaattaaatttcttaattaattacaataaaaataat

SEQ ID NO: 254934 - DNA, 857 bp, Cannabis indica
atatttaatgttttaaattttatgcacttaaatattttatttttatttttaaatgttaaaatactcaatgttacaattaattctcttacacccgatactattacttccgttaactcataaatataaacaaattaatgcattacattgaattattttattttaaaatttaatattcttagtatcaaaaaattaaatgctacttgtttaaaaaaaaatgtgagagatatactaccaaaattaccatatagctgagtgaaccaatactgcagtttatggaacatggttatcgaattgaagtgccaataccatgtgaaaattattgtgagaactgattttttttttttaaactagtaacatttagtttctgatattaagaatattaaattttaaaataataagtaaattaagaaaattataaaatatttttaagtgtataaaatctaaaacattaattgttgattctctaatttaccctatatttaatgatagatacaatattaattttgatatatgcaccaaccttcaaattttggaaaggtttggaaactgtttggattacatatccttgctgtcgaaagatcactactattacaccaaaataaacaaataaaatttagtaataatacagattttattatttgtgaattaatatgaagatataataattatatatatacacaatacctttttcttcgaaatgagtactgctttataatttgaaaattccaccaaaatgaagtaatgaaatttagaagagaaccgaagctgttcatcagtatgcccatatcttctttttctacttaattaaacatctttatcatcaaaggatagctttgtatttatagacataattgagt

SEQ ID NO: 254935 - DNA, 566 bp, Cannabis indica
tgcctcttctttttcttcttattatttcgtaatcagattttctttttgtcttctcaactctccttaaatttctctatggatagatctttgttatgtggtattacctctgactctcttgttgaatctgggtttgaatattttctctacagatcggtggaagatctgtatcgatggggctcaaaaatggttgggctcgagttagtttcagggcacagttagtcagggacagagatcagagctagaatccgtgggattcaattatttttctaactattttatttgattcaagtgttcatactcataattttggattttcattgttaatatgtaacaccctaactagcaaaggcgtattacgtgattttttaaacatattgtgcagctcgttgctaatcaacgaggtttattgaaatcgtgattaattaaaatttttgctttttaattaaacttataaaatatttatacaaaatactcgggatcccgattacaaaacattttacaaaagttcactgactatacaaaatacttgtcgcctagcgactaattacaaaaatagccttgctgtc

SEQ ID NO: 254936 - DNA, 682 bp, Cannabis indica
aaatttttgaagagatgtcgcaatgcacaaggaatttcatcctctattttgtcaagagacgatgatattgagactttagtttccgattttgaggattctattttctcccatgactcaattgcggaggttgcaaggcaaccccgcaactcgccatgaaaataatcagctggaatgtacggggtttggggaacccgagtgcattccaaaaccttcgattgcttgtccaacagcaatcgccccatattttgtttcttatggaaacaaaactgcctgttaactctattaatcgtgtgcgacaatctctgtgctttccaaatggtctcgaatcgcctcgtattggtcttcgtggtgggctcttacttctttggaaagatgaggtgaacatctctctcttaaatatgggtcctacatattttgattgctacatggcgattcacaatgggccaactatacacattacttgcttctacggtgcacccgaagtttctaatagacaagcgtcatggactttattggaacgacttgcggatgttgctcctcaactcccttggtttgttattggtgacttcaatgaaattctttccaacaatagtaaatccggaggggctctccgtagtgaatctcaaatggatgcctttcgcaaagctcttgacaagggttgtcttcgtgaaacattggttga

SEQ ID NO: 254937 - DNA, 3107 bp, Cannabis indica
aggcataagtgcctaatggaggttatggcttcaaaatccaccaaagcctgacatcccattatagcattttaagctgttgggcaatccaccacaacaaaggtacaatatttgaatgtgctttgaggagtctcagggcacaaattcattgggagccttatttttccaatgggaatgagggaatttccattgaaccccatgagctagaaccacttggagacaagtcttagtccgtgaggccaatggcaaggaaatcttctttgaacaggatatttattgaactccaattgtccactacaattcggttgactatcttgttggcaatgggagtttcaatcaccatcaggtgatggtgtggaaaatgcaccgttcgggcatcttcttcaacaaacattataggatggtccatgagatgaggtctttgcactggcagtgggcctacttcccatacctcttcattgtgatccaaggctttaccgtagcattttaactcattgcgggttgagctccgatatgggggcctccagagatcatagtcactctcccatttggcctaggcggctgttcgagtagagccccttaatttggtggattgctcctaaagaagcatgtaccactcctccgggtggtgcttgagctctggcttgcccttctctcgtgtgtgccaaatgatttcttatctactcatacaagtggcctagccgtatttagctctcaatttcatcttttaaatgtttgcatccattgattgtatgcccaatgtcattataatactcgcatcgtttgttgtgatccatccgaaaactatctcaaaacaaaggaggagccctctggtaatgaacattttatcatgtagataaatatacgtgttctttagtgtccaccaaattggtatactgagtatactgggggttgtatccagaccctctctttggtttcttgttctcactccaggtgcttccttttgatgaccttttactccaaaaggcttggggagtcgtagttgtacttgccgcaagtgaagcggactgagtggggtactgcaaacatgctcctggagcggggccactgtttggaaacccataattagaatgggctggtgctaaagcgagattttgtgcgtatcctggcatttcctggaactgcacactaggcattcacactcatttgagaagtggcaagaagtactcccctagggaattgcaccccaaaagcatacacagggcctccaatagggtaataccctccaaaagttgttactttgacctcttccatattgatgtatttctgagatcttttctaaaaatcttgaaggctagccaccccttcttgttgtagttcatttcagaagtgagtttccatccagataccggcttgtaacaaggctaaatgttttccatcatcaaccttctttgttttggaagccatctctttgaacctcttaatgaagttcctcaaggtttccataggtagttgcttaatgttattcggggtactaacttcgtggcttatctttctggctacaatgaactaccttctaaaattagtttgcaacttattccaacaatccacatacttaggttttaactttttggtgtcattgctgacgctcaagactgtcatgactcggatgaatcgagacaagtgatcgcttggatctgtgtcaccgatgaacagagtcatttcaagcattttaaagttttttgggagttctgccttgagcacatttctggcacaaggctcccgatcttcacagtcagattatgagttatctcccttttgcctctgggagaccatttctatgtttttttggaggatagcgagttcagccagaatcccaacatttagaatactctctaaggccagatcaatcaccattttctagtcaagacgtgccctgaggtcttcgtgttttgcattgagcttttgtcgtaagtcaaccagggggtctttcctagcgaaccccctcttctcccctagttcttggtatacagacacgctcctccaatctccacggtcctgggggccagttttcccttggaaaacctacccccttgtggaccttttgtcttttgagagattagaatgaaattttcatggatcctaggctattttgttccttttagttacaattgtagggttcccctttgggggtggtctttcaaaggggtgccttatggggctaggctcctttttcttctgcttttggctttccatgggctgagagggtccttcccccatcttttcttggcttctcgcgagatgaaagggtccttcccccatcttttcttgcatggacgagactgcagttggattgacatgaatgccatcgcttttttcatagcgatcaatatttcttgcattcttttattttgttctttctgctctaccaactcagcctcatggtcagcaactttttgtcttaatgccactaattctgtgtaattgtcttcattagtagtttcaaactcatcttggtttgtatactcaggattattagtatatcctattccttcaaaatccacctgagaagccacgtcttcttcttctggatcttttgggtcattaggggtggacgtgaagtgttccttgttaacaccattatgccatgagactttttatatttcctcttttagaaagcttcatacaactctcaattaaagcaccaaaatattagttgaggttttcgacaactattaataaaagttatttgtagtaattaatggaagttaaagaagagaacggttatacctaaattttggctagcaataagaagctgacatgtgtatcaaaattggaatatgaaccaacccaaaccgtgcattattaaatgcacattaaaagactcgcctcaaaaagtacatttaatagaaatatccaaactcgccgccacaaaggcaatagcgagatgtgattaaaaactattaaatgataagaccatcaagacaaataagtccatctcacgataaatagaaaacataattaatgaaggttatttagaacaggttaataatgagcttccaactcattgaactacatactcgtgagtaagagcttacaactcattgattcacatactcgtgagtaagagacttgtagctcattgatcc

SEQ ID NO: 254938 - DNA, 967 bp, Cannabis indica
aaaattacaataaaactaataaattccaaaataattaaaaacttaatgaattaattaaaaaattaagaactaaactaatttttagctaaaaaaaagtgaaaaataactctaatttctaaagttatcaatcataatcaggacgaactgcgtgctgcagtaaatctcgcgttcgacgaacaaaggcgtatgttccctaaatggagagataaagagatggaggcattgagggctcaccatgcagagatcaaagatcgtagtcggcaagccaccgtgctgattcgaagagcctaccaaactgtaggtcagcaatcgccgaacgtcattcccctgggagaaacggaagaggacccaacaatgaatacttccagactactaatggtcagcctcccaatccctgatcacgagttccgctcatgggcccagtagtaggcgagcaaactttgttcggtaattcatcaggaggagtcatacctgacggctccaactagactaattgtgccattccgcctgtcaaccaagcgaatcaatcgctaaggaaaccagactcttctatgttcgaaaggttgggagcaacccatgacctaaggaacgatctaaacagaagaaggggaacgtatgaacagaacactgcaacgatcgtgcatcctagagcccgtactcaaatgcccgctcaaaaagacgctgatataatccaaatcgaccagaatgtcgagcaggtcagcccagccgtacaggcccagcttgacgagttgaaaaatatgtttcatggcaaggctggacagcataataatgatcttgagttagacctagcacacggaactcccttctcaccaaagatcaatctcctgccactaggagagaagatcctttttcccatctcaagtactttgagatgcaaatggatttacaaggagtacagggggatgtatacgcagaatcttcccgccactctgtcggaagtcgcaca

SEQ ID NO: 254939 - DNA, 2141 bp, Cannabis indica
taccatttctacaccttccatatgatacgaattttcaggttaagattttctgaaattttgcttattactttgtttaattattgcagaaacaagcgtaaatatacagttttagatgagtcttcggcgattgcccaagctatggaaggtgttaaagtagtcaatggtttggagtgtaagatagcttgcaattcatccaaggtaagttgcttgttattttaggccttcattcttttcgagtcaccaaaccgtcataataagataaacgatcagttcccctaacttgatgtttctttcatttcctagtctgatgatgcatgaaatgtggcagatttcctacgtactggacacagaagatttcttttaccgatcgaagaggaaggggactaaatcatcgggaagcaaatcttcatctgatgatcaaagagtacaacggtttcataaattcatatcaacctcgaataaacattcgtatttgttagaatacaatgatgttcaaggtagacagtttcagacatcacgagatgcatcaccgtgttagagatgacataaggcgtgccttctcttctttgagaaaactcgttaagggtttgcctcaggtgatcgatcaaatcttgtaatctgacaaactatagaaaaggatatttgacttggattttttttattattttttacttttagtgtgttacttcataggccatataaatggtcctttaatctattgtttgtacataaggaggatgatatgtatgatatttttgtagagaggtttttaatttaattgtcaatttttcattcaccatatcacccttaaaattttagtctatgtatgatatttaaactttccaaatttgtttccacaatacaaatcaggattagataatgacctttatctttttcttcactcttttggtttgttatataggataaatatccatatttcaaaacaaaacaaggttagtgtataatgtataatattaacagaatggatagggggattgttttgggttggatgataacagttttcttctgttataatatagtaatataacgttggcagcaatttgtttgttggttcaatttgttgatattattacattttcttatcggaagggatcatataaataatagtgttcttataaattttaagagatatgcacctcagctatgtattcaaatccaggtgcaataatcaaataccaactctctggataacaatgacttaagacattattagcataaataacataaaacacattttctgccaattctccaggtggcttgtactttgctcaatattattatcactgataatgactttcccaatgttaatccttgatctaatcaaaattttaatgcagtcgaggctaataaggattgtaaggtggactcccaattctgtactatcaagtggagacaacaataaagattcagcaattaatttggggtcatttctgagtagctgaaatggaagattatgaaatcagcttggtaaggacaacagcatcagcacatagcttgtagtgtcagtgaggcagaagaaaatcaaatgatgatgaaaaatgataataatgatgaaaagggtgcctggataaaataaaaccaatctcataataaatcagtctggcattgttgtagccatggagtagcagtactgaaattttgcttgttttgtcataaactaattcttgatgaggttaatcaatctatgagtaccaaagtaatagagagttcatcacacattaccaacttgtaatattttacagtttgaaaatgtaaataatggtacaaatgaagtttagagtaaggcatcttcttctcacgttataactttgggatttgagattaaagaaattgcctttaataatattctaactaaaagattaataaaacaaaggatatatatatatatatcatctttcaaaacattattttatgtcaaatttatgtatacgaaattgcagaaaaaggatttgtcggtgttgaattgatttcatgctttgttgttatgccattttgtggagccaaaagcaccgtcctatgaagtacttccatgcgtttttttttcttcttttggagtgaacagacagactaaactagacttgactcaccattatttctttatttggctctttttaataatg

SEQ ID NO: 254940 - DNA, 519 bp, Cannabis indica
ataagtgtctcccatttttcaacttcttgcgaggcaataagaaatttgagaggaatgaagattgcgagaaagaatttaaaggaataaagaagaatctctcaacacatctagttttggctaaaccaatgactggggaaacaatatacctttatcttgttgtcttagaaaatgccataagtttagcattagtgcaagaagagggtaaaaactagcaacctgtttattatgttagtaaaaggttactaagggcaaaattgagatacccacctctagaaaaactcacactttgcctaattcatgcatctcgcaaactgcagtcatattttcaagcacatccttttaaggtcctaacgaatcaaccattacgacaagtactatcaaaacttgatgcttcaggaagattaataaaatggtcgattgaattaggacaatttgaagtaacttaccacccgaggacttcaatcaaagggtaggctttagatgactttttgatagaaggagtaaacacaggagaagatt

SEQ ID NO: 254941 - DNA, 619 bp, Cannabis indica
tgtttctaatcaaataaatattctgtttaataaaaaaaataaactataaaaaattattataacgttttgttttagaaagagaattaacattaattaagaaagagaattaaagttctgacaattaataattattttaatatatataaatgagaacaagtggagttaacaatattttggtgccttggtggtttgtttaatgtctatatgacattttaaatgatgtggcaaaagataattagtggggacagaagtggaataggaaaaatgggacaggtgattttttttccagaaaaaattaagggatgagatgcgactttaaatttagaaactaagttagtaaatttttctttcttaaaaattatgaaaatggctaaatataataaattaactaataagaattataaaaatacatttatcacatatttttattttaaaaaaatatataataataaaattaagttatatattgttttagtattgcatattattatattgtaacaaaataaataaatatattagatcattaaatatatactgtagtatttgatatatcgtagtactgaaaattaatataccgtaataataaaattatataccataaagaaattataataatatt

SEQ ID NO: 254942 - DNA, 633 bp, Cannabis indica
tagtaattttttgatattggtatattgtttattattttatcacatctcaaggaatgttagaaaaatcaaggtgtatagacagctatactgtggaggtgttaactcaacataagaaagagtttcgaaattactaaatacggggctttatccagaataggaatctattgattttctccaaattggttggaccataagtggcccattcaatcctcgtttacccctagttcccatttcttttcttcagcgcagggtagagcagtttggtgcccaatcaaaatatagtttttggggaagaaatttgtggcctcaacctagtgtacaaaaccaacaaacttttttaaattaaaaaaaaaatatggagaacaataattccacttcattctgaagagtaactaggaccaatttcagtcacgttttcatttattttgaatttgaaattgacataatccatacaaattattcaacaggctaggggcacatgaaaatttagaaatctagaataagaaaataccgtttccccatggtatactttaggtacatttaaataatgaaaatcagagcatctgttcgtaaagtttgtgaaaaatgtcgactgatccgtaggtcgaggacgaattatagtaatttgttcca

SEQ ID NO: 254943 - DNA, 768 bp, Cannabis indica
tgtcaaagttcaggggggaaaaattactaattagccttattttgttattagtaaatttaaactattttttttaaaaaaaataaaaatttaataatttatactaatcaagaattatcacgtgacaatttacttgacacttaataattaaatatttacaaaagttcaaaaattataacttacaacaaaaagttaaacttaaatatttatgccgcaaattaattatgttttcttttcttccttcaccaaccacgagagctccatcagaacacaccacaaccacctttcactcgccattcctctttaaagtactctaatggttgtaaaagggtataagttcataaaataatgcttagaaggaaataaaaatcgactcaaatagtctccgacatgaaactcgtatcttgagaatcccctaaaaccaaaattcaaattcccaatttctctgaactcgtccataccctttattttttcgatgaaatcttcctcatttttaggcctctcgagacttggggaggccatccatggcctctatttcggtctgcgatgaccgaagctggcaccattgtgcacaatcgagaatgagagaatgagaaagatggacatcgagggggcttagtattttgataaataatagctaccaaactttattaaattagtcccaactaacaaaatttaccacagatgaattattaaaacttatatgattttcaaaatcgaagaaatttgaaccacgtagtctactttttcgataaaaataaaacataaatc

SEQ ID NO: 254944 - DNA, 505 bp, Cannabis indica
aggtaaaggacaaatttacccttctcaaagaagtaacctatctatttaggggtaaaatagtccaaaattataaccccaattattcacaacattcccaatgtctaactaaattacccctctaaaaccaaaatattagaccttgtctatgtgactctataggccaaatgtcgcattccactgttactagcataaaaatatgaaaaacataaaatttcatatataacataattaatacatctaaaattcaaatatatctccataatcatattataataattaaaagcttacttctaacaacaagccctaattatatactaattcttaaaataaagctaagcgatcattacatgcattttcatctcgttgtagccagagtaagcatccatgaaactcaataatctatatctagatgtggcatctaccatttggtctatcagcgggagtgaaaaacagtccttcggacatgcctttgttaggtccgtgaagtcgatggacattctccatg

SEQ ID NO: 254945 - DNA, 1669 bp, Cannabis indica
atattagagaatatataaaatacaattatgagataaatgatatattaattataagagtataattattaaatatctaaaaattcattattcatatggagaagggtataatcttgtaaagatgtacatgagaattaagattatacaatatgaataaaataagtcggtagtgtataaagtaatagaaatctttaatatggaactactaaatacattttattatatactatacttctagtgtgtgagattttgattcggatcacatatatacatggacatgtagtaaagatattgtgtataattagattattcatgactagaccgatatgtaataaatttattttattaacttattgtttaccatgatagagttattcatatcacaatgataatcattagtagatccgcctgaatcttgagtatacatgaactcctatttgtgtccattaagttctttaattcactcattaaagtttttcagagaatatgattcttaaaatttctattttaggagcttaataacatgagtggctaggaacatgttatacaatagtagaatctaagcttttttaatgaatcaaatattagttctcttgtagtgttaattatgagagtactaatagttggatccaaatctataataagttatagattaactgttcaaattgaatcaatggtacataaggaataaagagataattagaagggtaaaacattattttgaccaactctaattatgaactaatagttagaggacaaactacttatattgattatattaatggactacaagtaagaattctgtaaatataattctatattatcaaatagtgtaatttatatttatagtggagtaataacagaattaataaacttgattattctattgatgagatcgataataatttattagagcttcaaaatatacgtcaattgtcccgagtgacctttatagaaaactgtaaggggatgggttttatttgatgaatgaatttcgagtgaaaattaatttctatggaaaataaattcttaaagggaaaaatagtaattcgtgaaattattattttgattaattatggcaattatgaattgtatatttaatagtatttaactatttagtattattggataaaactatattatttaattaaatataatattattattaaataatattaaagagaaaaatatattactttagagaaaataatgtttatttcaatccttgtgaaataagacattaatgagaattaatcacttattatttattggtagaataaataataaatcttatttatagaaaaaataaaaaatcaattttggatcttaaaatatggccacgtgtaggctcaatctacacgtgtaaggtgacatataaaggcctatgattaaattagtttaataatgttattagttaaaataatttaaattaaattaagctaattatcttttagttattaattaaatgaattattggataattatttaattaaaagttaactaattaaaataaaagatctaactgatatttgttattcaattattagatatttatatttgaatttagattctaattcaaatcaaattagatatttacttttattttaaataaagaattaaaagggtttatttataatactatatataggatatatgagtgactattcaatgg

SEQ ID NO: 254946 - DNA, 661 bp, Cannabis indica
tctgctgttattcttacactgaatcattctcaatctgttggtcccgatatcagatctgtaaccactaaccataatgagccaattttggcaagttctctgtgcctgtgcaggttaccattacaccagcaagcatcactccagctgcaacatctgacattcccactactacaactaacaatactgcttctatacatgggaatactgtcactcaagatctcaccaatgataatctacaacatctggggttccctggagttattaatgcctctggtgtgccaaactctgctgaaacacaacctactgctgctgttcctgagccaactgctaccactaactctaacaatgatgttgctactccgaatcctttggccaattctcatcccatgaagactcaggcaaagtcagggatacacaaaccaaaggtctacatgaccattaaaattcctaaaacagtcaaggaagctctacaagatgagcagtggaacaaagcgatgtctgatgaaatgcttgccttgattcggaatgccacttatacattggttcccttaccacctggtagagaaccaattggatgcaaatggatttttcgacacaaagagaagtctgatggtactcataacaagtttaaagcccgtcttgttgcaaaggggtttcaccaaca

SEQ ID NO: 254947 - DNA, 558 bp, Cannabis indica
ttgtcattcaattttgggttatttggagcaaaaccttataatcttttaagttttgttacacataatcggccaagaaaaaaatttagttgtaaaatctcttaaagcactttattgttagtaaatttaaagtattgtttataattcaccctttaaagggtatatggcctattctgatacacgatagattatacaaaagagtattattattgggtactaatagtgtgcctagtatcttctgaacgtgtcgtcttgtgattgattagcaatactctttaaaatttattatattaaactatatgagactcaatacttaatttgaccaataacgatattgacacgtaaaaaagtaataatacttaatttgaccaataacggtattgacacgtaaaaaggtgatagactccattatttcttttagcatttctccatacaaaaaatgccatataaccttaagtggttggctaacatggaaattcaaataacaaaaataaacaaaatatttagaataaaatttagcctatttttttttcttttttctttttattgttctctctctct

SEQ ID NO: 254948 - DNA, 1118 bp, Cannabis indica
tgtctcacttcttcaccacttcaaaactgaccttcttcattaacgacaccaatctagtactcatcccaaaaaaggaaaatccggccttagtctttgactatcgccccattgctctgtgcaacgtggtgtacaaatgtatctccaaaatccttgcgctccgtctgagaccaattctgcccttcattatcttccccgtccaaacaactttatcaaaggacggttcatctctgaaaatataggagtggctaaggagattgtgcactctatgtctaaaaggaaaggtactaaggggcacatgatcaacaaatttgatttggaaaaggcatttgataaaatggattgggattttgttggcgaggcacttcaatttcatggtgtcaaggaaccacttctcaagtggatcagaagctgcattcaaatcaagcggtttaacctgttaattaatggggctaagcatggtgtcatttctccttcttgtggtcttagacagggagacccgctctcccctaccctcttcatcattgctgctgatctactatcccgtttgattacggacttttgcctgcaagggaaacttagaggcttcaagatctctagaatggctccacctatcacgcacctcatgtttgcgaatgatatcttacttttccggcgactttgaaagaagctgaggccttccttcaatgtatccacacctactgttcttggtctggccaagcggtgaactttcagaagtccacggtgtacttctctaaaggagttcccagggcaagtagcagtgagattgctgagttcttaggcttgagcaagatgaaatctaaagctaaatacctagctctgccactctttcgctcaaagaaaaacgaattgcataattatcaattcctagtgaagaaattcctggctagaattgatggatggaagtcaaggttactatccaaggctggcaaagcttatttaatccaaacagtgggggcttcgcttccgatttatgcggctttctcagagattatccttgttagcatcacaaacaaaattgacaagggccttcgaaacttctggtggggtgagcttgattcaaagaaaatccgccataccattgcatggagttccctttg

SEQ ID NO: 254949 - DNA, 1374 bp, Cannabis indica
gactctgagttggataaagaatcatggctgatccaatattctactggagactgattgtatcaaatgtggtgcatgcaatcaagagcaaagtcagtacgatttttccatatgacatttaattcacgattctaaacttttattgtctgagtcgttaaaagtattttttttttattttattaaggagcttttgcaaaattatctatttttttggtatttttatatttctactatcattcttatttattttatttattttacatttctactgtgaagttttcaaaaatattgtcttaaagtttcaaaataataaaaatacagtgtttcagtaaaataaaaaataactatagaacatctaaataacaatatgaaaacaactataaaacaacacaaaaatattaagaaattgacatcgttgaaatatgcaaaaaaataccccaattcatctttgtattacgaagttctttttttttacttagttttaacaatttgactatttttttgaactactacgttatatttttttttcataaaatttatttgttacaatttcatactttttttctctcatttttttgagttagtgacaattaaaatgacaatttattttttaaaattaaatgaatgattaccttaataataaaaataataaaatcttataattttaaaattaagtatataatataattggtaatatataattaaaaaaaataaaaaataactagaaaaaaatataattttaatatgtcaatatctactagtgcacattgtgtcaatttaaaaaaaactaaaacaaactcatcactgtatattaaaataatgtatcaaaaaaataaactaaatatttgtatatacatatacaatgcaacacaaatacaacaaaaaaattgtcaagaataaactaaaaatatacatcatagcaaatgcacataaatcaaaaaacaactaaaaataactatacaacaaaaaatattccgaaaactacgtaaaaataactaaaacaccacataaaattgttaggctttatactctaaagcaactatttaatggataatatattagaaaagatatgaaatacaagtataagataaatgaatgcgtaaattataaaaatataattaataaatatttgaaaattctatattcatacagagtggtatgatcatgtaaggaagtacaagagaattaagatcatacaacataaacaaaataagtcggtagtgtattaaagtatgaaatccttaatttggaattaccaagtacggttttctaagcactatactctttaatttggatcacatatgttgatagacatttagtaaaagtattgtatataatttgattatgcataactggaccaatatgaactaacatctt

SEQ ID NO: 254950 - DNA, 629 bp, Cannabis indica
gtatgtccataaagggtctgacataacaactacaacaatggaatctatcgacaccactgaagagatagacaagattaaaatatatcttgactgcagatacatatcaacaattgaagcttgctggagaatcttccaattcgacatacattatcgaaagccatcggctaaaagattgtcgttccattacctggagagcatacagtaatatttggagaagataacatatcaacaattgaagcttgctggagaatcttccaattcgacatacattatcgaaagccatcagttgaaagattgtcgttccatttacctggagaggatacagtaatatttggagaagataagtgcacagaagatgtcttggtcacacctggagtagataaaataaagtttactgaatggttagagacaaataaaaataacgaggatgcccgagagctagcttattctgatttccctacattttgggtttggaattcgaaagataaaatatggacaagaagaaactatggagttgcaattggaagaatatactttgcacacctttcaataggagaatgcttctacatgagaatgctattaaattttgttaaaggatacacttcgtatgaaagtattagaacggtgaa

SEQ ID NO: 254951 - DNA, 901 bp, Cannabis indica
aaaagcaacattaccgtgtttgattgtccagagtgtttggttgacataggaatggaatgtgacaattttttttcacaataataacttgattttttttgtaaaataaaaataattcagtactttttttcttccaaggcatattatctagtttataatccaaaagatggctattatattgccaaaagtttcatccaaaagattaaattaaccagctaattaaaagtttttccaaagtaaaacacatataaattcaccctaatagtattttttgaaataccatcaactattaaatctcaccttacttaaacaaaccaaaaacaaataccaacttgtattcatcatccgaagtaaataaaagattcgtacaaattttggacaaaaagttttctagcttcaattcgttgttcaaatgacagtccttcaatttttttcagttcacgaacaatttcagtcttctacttgcaccttctatctcgaactgaaaacaatttgtggaagacgagtcatatctgcatcaagttttaaataataactcacttatatgcacatatagaaccatcaaataattacattaaaaaaaaattcatactctacataattttctctaatttgaaatagatttctcagtgtgcaatccacagtcgttatctaacatatcacataaaatctaattaaggagttggaagataaacacgctattattgaactcaaagaaataacagtacaaacacataacatacatataaacttatcattgaactcaaagtcaaatatagacaagtaaaattagaagtgaaagaccattgcaccaaataagcttgggcaatccaattgagataatttcactgtgaaaataatttcaatactaagattagaaataaactcaaaacaaaaaaaaaaa

SEQ ID NO: 254952 - DNA, 951 bp, Cannabis indica
atgtaaaatttacgtaacaaatgatgtgtcgcataactcacatttatgttcatcctcaatatgaaatgtatttggattaaatccagtagtagaaggcaacaattaaaactaaaaaatttggaccacatgacatgaccactcaaaattggggctataactttgacaagttgaacaagattcctatgtttacttaacgtaatccaaagaaaattggacccaattttaaggcctaggaagagtttcacactattactactgctgttactagcttagggaaggtaaccttacacaatgacacatgacaatcccctcgcacgtgcctatcttctcgaacgccctcctcatccacttcctcacacgtgtccttacgcccttgcacgtgtgtgcggtgtgatctccttttgctacgtggactactggagttggcgccctacatatatatatatatatatatatatatatagtattagtatatacagaggcttctaaaatttatgcaaagtgtttggtgttagttagcttaacgaaaaagcagccgtgaaaataaatagataaaatgaaaaatgaaaatttgacatgtttttggcttttttgatgattgggcggtcgccgtctttactagtcctttttacccttgttaagagagatccacgtgtcaaaagggaaatagatttgacaacttggttagttgtggccggcgtttaattacttagcttaacatctcattaattggtttatttctctgcccatatggcggcacgtgctcacgtgataagtgtgattagtacatcatggtataactaaaataaagagtcatgatccttgatcatgaatgaatgagctgcttaggtagtaggtacattgtattaagatggtatattctgattagttaataagaagtctttacatttttaaatttgtatatttgtttatgttttaattaattataat

SEQ ID NO: 254953 - DNA, 610 bp, Cannabis indica
aaatccactccggggctcttctcgtacacactgcatcaaccaccaccttagaatcagagattatagtcaggtcgtccagccggttttggatggcccaacgaaggccctggatgatcgccaacatttccgcttccagcgccgaattgcaggagccagaggaaacgccagtccaccaatctgaagagcatctggacggagacagcatcgcataaccaaaactccctgcttgaaaagatccatccaccaacagacagtgtttggtggataaacggggaaagagcagcggatttgtactgatagtggccgattgcatcaaatgaccatcaccaggatctaactcagagaatcttctacaaacctccaaacgaattgattcgatactctgaagaggacccgtggaatgaataatcatatttctgtgcttccaaatgctttccataatcacacccgcgtaaacaagcatccttgttctcgaaaaacgatccaagttggagcaaagattagtaataagggagctgatacaattcccaggaatagactcaattctgaccgaaagaggaccagcaaaccaaataacagaggcaaaagcgcatcgagcaaacagatggat

SEQ ID NO: 254954 - DNA, 1068 bp, Cannabis indica
atgtcatggcggcacgacctggaatgtttagtctcgggacatcttgagttgttaatttgtagtcgatgtgcgacttgacatctgtatttcacaatatgttgtaaaaagtgaaaaacaggatcccgactttgtatatatttatgtaaagattataaactttaatatttaatataaaagttttaatttgacatgatttttgagtaaattctttggttagcaaagatagcactgtaattgcaaaatcactgtagagtggctcagcattagggcattacatcgtttgataaaaacactagaaacattgttaagatcagagattaaagtacgaaaataaaaaataactaaaccaaaaggagacaataaaggacgcaaactatacagagcatcaatgatgcttttacaattcgactcaacaacaacttgatctaggccccattctttcatccatctcaaagcttcctttaacccaattgccttcgccaaaagaggagagacacgactaggcaattatttggaccaatgataaaggatagctccatgatgattgcaagccatccctctaatcccaaaataaaagccccagaagtgacagagatatctacattgactttaatatactcaatactgggaaccgaccaatgctccacccgaacacaaggactgaaatccattgtgcctgtagaattttcttgagcaatatttcattaattaaagtaagacaacgcagcagccaccaccctattaattttactttgccaaacaagcttatttcttactttccaaatagaccaacaaatcaatgcaacatgacaaaccaaagactttggaaatttgatgaccaattgataaagcattcctgaaaaatttgtggacgaaaggttacaaatagccccatcaacttgttgccaacaagctttcgctaaagaaaactcaaccaaaatgtggaggattgattcattcataccttggcgcatcggacaaatgaggactttattaacatgtcgaccttttaactggttcaatgttggtaaacacctagaatataccctccagagtaagtctttaacc

SEQ ID NO: 254955 - DNA, 713 bp, Cannabis indica
tttttgacaaagaaaaggaggcttagcaagtttgaaatggttgttttgacagagggctgcagttttatgttgaagagtaaagttccacctaaattgaaaaatccgggtagctttataattccaatttctattgggagtcgagatgttggaagagctctttgtgatttgggagctagtattaatctcatgcccatgtctattttcaagaaattgggaattggagaagtaaggttaaccaccgtcactttgcaattagcggatcgttctatggcccattcggatggaaaaattgaagatattttggtacaagttgataagttcacttttctggccgatttcattattcttgactatgaggaagatagggaaattccaattattttagggaggtcatttcttactacaggaaagactttgatagatgttgaaaaatgagagctcaccatgagagctcaagatgagcaagccacattcaaggtctttcatcctatacgtgctccggatgcaataggagaatgcttagcaattggagatatggatcctaacatggttgaagagtccaaattcaaaaatagtaagaaggtgagaaagaagattccccttaaagaaattgctaaggatcatgagccacgagaaagcaaagacaaaacatcatttgaccctaaaaaaccacccaaaagaagagaaagaaaaagaagattagcagaaaaatt

SEQ ID NO: 254956 - DNA, 637 bp, Cannabis indica
tttcattgttgttgttcgtgtttgtctattctataaccattatgatctcctccaaaattacagaaatgttataaaattgtttcccacggatatcgctaaatattgtcaaaggaatttagacaacaccaaaagtacgagtatttgagcaaagcaagaactctcccttccagttatgcaaacacacatagaataacgagtagttaaagtttaggctacaaaatagacaaaaacaataacagtaaaataaagaaacaaagaagtatagtagttcagtcataacttggtctgttaagtctacttttgcaataatttcagcttagtttatttaatatgaatcacccctttatatatagaaagcaagtgtccattaatattacataactgattaaagtggactgttattacaataactgtacaaataattaattaagataagcgtttaaagaaataaatacaagtacaatttcatttgtttttgtcttaattacagcaacgtctgcgacttgcaaagtcgcatattgtctatccatattccaaacacgcgagcttgaaggctttgtggcagtggcggacccagaatttaaagtgagggggggcgtaaataaatttaaaaagataatataaagtgtagttagtg

SEQ ID NO: 254957 - DNA, 1013 bp, Cannabis indica
tgtttgatggacagacctgaaccatcaccaacataaagttggtctgctccttcatattcagtgctcatgttgaggttctgtagattaggtgtgcaatgattggatgccccagagtccggataccaattgatgtcatcagcttgagtagtagttgctacatttgcttgagcattgggagtattgggagagggaaatactcctgtaaagcttttgtcgaatctgtaaaaacagtcgagaaccgtgtggccaagcttgtgacaaagctggcactgaacacggtttgaggaagtggaaaatcttcctcctctgctgaaaccagtagcaccacggccattagaattagagaaagatgagggaataggaaagttacctccactgttggcacttcgattggtaaaggcacgactatttcctcgagctaaaccagcagcaggtgtaggtgaaaaacgattttggttgggaaatctgctggtgcgattttgatactgctgaaatgcgatattggcttcaggatatgaatcgatttcagtcatggccaaattgacactcagatcattttcttgatcagaatcaaccttttcaattcgaactcagatgctaagagaagtgcttctatttcagcaactgagtattcctcaactctagtgttggtagatatgataaatgtatcatattcagatggtaatcctttgaatatggcagcgatgtgatcccttgagctcagaacctctccaactgaggcaagaaggtccacatgttgttttactatgagtagatactcattcagagacatagttccctttcgaagtttctgcagtttggttctaaactccaggatctttgaggatacatgcaaggtgaagtgtttctccaaagcgctccagatttgtctcgctgtgttgcatccaaccatgcgtgtaaggagactttctgtcattgaagagagaagccaaaaaaactaaaatctgatcttgaacctcccattcaagaaaagcagggttgaagttgttcga

SEQ ID NO: 254958 - DNA, 1263 bp, Cannabis indica
atctgcctcctgatatcaatcccatctcgagaccacaactctaaagacaatgcacattcgcatatagcttctgagaactcaactcaacctcaatcaatacctgctacaaaaataaaaacacgatctggccgcatatcaaaaactccaacatccctcaatgattaccaatgtgccacaaccagcacagactatcccctcacaaatttcttatcttatcacagattctctcctcattttcgagctgctatcctctcacttaattgcattccagaaccaacaacttacaagcaagcttccaaacataaaatttggaacaatgctatggatgtcgaaatcgatgcactcgaaaagaatcatacatggattgtagtcccattaccaccaaatcaacatgtcattgacaataaatgggtctataagaagaaatataaaccagatggttctgtagaacgttgcaaagcacgtttggtagccaaaggctacacccaacaacctggcatagactacttcgaaacatatgcacccgtagccaaatttaatacactaaaaatcatgtttgcccttgcagccatcaataaatggcaccttcatcatatggacatcaacaatgcattcctccatggggaattgcatgaagatgtctacatgaaaactcccacaaggatacaaacctaaagaaccagtcccacctaatgcagtgtgcaaactacaaaagagtttatatggccttaaacaatcttcaaggcaatggtatgccaaattgagttctcatctcctacacgaacaattcactcaacccccaaacaatcattctctgtttattagacactaatcaggtgattttttggcccttctcgtatatgtggacgacattattgtcgccacaaacaacacatctgccttaactaagttcatcactactcttgatgcacaattcaaattaaaagatcttggccctctccatttctttctcggtctagaaattgcacgatgccctcaaggcatctctgtatcccaacgaccatttactattcaattgctcaaagattctggctgccttagttcaaaaccagtgtccactcccatggagccaaacattaaacttagcaatgaatcaggggacttactaccaaacccaactcaatatcgcagcctcattggcaagcttttatacttcacaatcacacggcctgatataagttttgctgtaaataaattgagtcaatttttacaatcccctcgacaacctcacttgactgcagc

SEQ ID NO: 254959 - DNA, 1087 bp, Cannabis indica
taacatgataatcagtgataaggtatacttacaccttggataagtgttatgtacttttccaaggcattgataaagtataccagtatcagatgtatggagtatacattaaattggaccgatattgaacttcgacaagatatcatagacttactattatatctttctaagtaatatcactgggttgcactacaagaatgatggggcatcaatgaggacaagttttcgttggtgaaaagcccatttttcatcagtaatgtctatcaatgaggacatttcgtggtaaaaagtcgttaggaatagttcatcgacaaaaagtattatgaacaacgacatttaatgttgttggaaaattttaatatcaataatgacaaagtcgttgctgataataatttatttattttttattattctggtaaatcaacgacgacaatgtcattttgattatattatcaatgacgacaatgtcatcattgattatattatctgactgaaccactatattttcttgtgtctttattatttccagatattcttttatttttggtagctcattgttgaatactcactactctaagtgagtattcgcactttcattatctagattatttaatacttgcacgaattttgatattatctaaatttttctgacaacaggtcgtgtatattaggatcaactataaaaatttcactagtatttttttagaaaaaaaatttgtaatgtttaattgatttaataaatattttattttactaaattattttaaaattgtaaattcttactagtagtcgtgatataattatatcaaaatcagctactttagattattaatgtaaataaataaaatgcgagattttttaaagtaaaatatatttatttagttggatatttagtgtaaatcattaaagttgttataccaaaagtaaaaaattttacaccaaaaaaaaatgtaacccttgaagatgatcttcgtaattagtaatgtgggaacatctataccaaaaaaaaaaaaaaattggggtgaaatattggtacggggacttggttgcaaaaaaaaaaagtctctaaatatcaaactgataaatcaca

SEQ ID NO: 254960 - DNA, 530 bp, Cannabis indica
ttaagaaattcactatctggccagttacttcgaaataatcatggagcaatcgctttagacaatgacactcttcactattagcctttaaaacataagactatcatccgcaaaaaataagtgtgacacctggactccatttctaccaaattgaagcccattgatatcaccacgagcctccgcaggttgaatcaaacaagataaggcctctccacaaaatagaaaaagaaaaggggataaaggatctccttaccgtagaccccgactcggaataacattacccttaacttccccattgataaggaagcaaaaggatacagaagtaacacaatttattatcttagccacccatcgttcatcatatcccaaccttttcatcatcacttcaacaaatttccactccacccgatcatacgcctttgacatatcccactttagagccaccttcttcccatttccaaatcaatccttatgcatacaatgcattccttgaaacccaatgatagcattgtcatgaattaacctcccactca

SEQ ID NO: 254961 - DNA, 1075 bp, Cannabis indica
ttttatgttttgttgttttttttttaattttttttttcatattaataacattgttgtgttgtatgtgcatgttggccgaactttttgcgaaattgatcgccggattgagtttataaagaaaatttaaaccttaatatataatacatatgtgtatttttgtttttttgttgaatatatgtgtatatattgtgtgtgtatatatatatattgtatatatattatttatgtaaatataataatgtaattgtattgtatatattctatgtaatatatatgtatctatatatatttattgtgaatgaaagagataggagggatttaattggtttagaaataaagttcttaaaattatattagtgtgagatataattgattatatatgtatgtataatttggtaattaataacttgttactattttttataattagtaagtaattaataattaaaattttaattttgttgtatttcattatattgtaggttgtgagctaatttttgaggttcgacataatttggtgtcgatcggattttaacttgctataggtatatacatttactaactttttgttattataattaattatcaatgcatgcttaatggagtttgaatatcttaatatttatctgtagttaactgagttctgtgatatatagtactacggtcggatgggtgtaataatatgcattttagtttagtttgaatatcttaaaaatttaaccatagtgaagtaggttctgcgaatacatgtactgcaatcggatgggtgggtggataaattttgtattcttaatgttatcctgtttgttctatattgttatatttgttttgtttgttattttaagcatttttaaaatttttgggcccatccaattacagctgttaagctgccgaaatttcagtagaattaattaggataaattttactaaaaaatataaatattaaaggaaaactacataacacaaataactagttaattactcgctagttgtaagaaattaggtgacataacacaaataattatatacacatttaaacttctgttaggctatttttagcctaggtttcggatct

SEQ ID NO: 254962 - DNA, 626 bp, Cannabis indica
ttttgagttagtaatagttaaaaaataaaaataagctgaaaaacaattaaaaacaacataaaaataacaatacaaatacacatatatatataataaaagcattgtttagaacaaattaaaaaatatatacgataaaaatacacataaactaaacttttttcaaaactatacataaattataaaataattacaaaaataccttaataaatctcatttacaaataccttgtcacatcattaaaatttgccttaattacaaactaatatgcctcaaatgtaaataattctgaaattctgcttttttttctttcttatttttctgtctttaaaaagtaactttttggttacttatgatactaataaaaaaccaataagtcacttttttcataaaattatttatatattatataatttgtctttgagatacattttatttacctccaaaacttatttgtataaatcttaataatcaattaattatttttaagttatattaatatatttgagtaatcttcaagtttatttttagattagttactttttaaaaccatatgtttattttttgggatattggcggctaaaccacctaaattttacggtttgtaacacttaaccacaaaaaccgaa

SEQ ID NO: 254963 - DNA, 724 bp, Cannabis indica
aaattgcagcccaaaatgccaaaggtgattgcccaaaatcgctaaaaatatacaagaaaatgaaatcatggatataataggattaaacacacaccaataaatataaatgtatattgtttgatggaagaaaacccaccggtgtcaaagacgtgtattttgttagtctgacagttatctttgccataacccccaaagacatagagaaacctcccttccttaatggcgttgcaggtgtgtccccacctcttccctggcccagaaatctcacccacttgctgtcgttgttgagcttctccctggccctgccccgaatggagttgttgcaacctttcccacctcattcttcttttcccagagaatcaatgagaaaagtgtttatattatttttatatatatatatatatatatatatttgtgatatagacaaagggagacaataagagtgattgggtggaaagaaagcgaaggaagaaaagtgaaaaatgggaatttttttttttgaaaaaaaaagcagactgaactctatgggtttggatatttagtggattttgagctcatgcaaaacacagaaccaaaattgaaaagttaaaaagaaaaaaaaaacaaaggaatggaaaatttataaataaataataaaaaaaaaacgtcgaaaacaagtgtcaatgtacgctggagaaaaagaaggagagagagagtttagtacgactacaaaaataatagggat

SEQ ID NO: 254964 - DNA, 529 bp, Cannabis indica
tagtgtggaagattgtgaagaatccaacacctgaaggagatccaggctcagatattgttattactctacgatagaaaggaacaagggttagaaatctgagtagaaggagccataacatttccctgctaccaatgtaaggttatctaaactttatatgtgtttatttttaatgtgttatgaattcatggttagggtgttagattataaaatataatctaacgtacttgttagtaaacctagatattggtaaaatatattctaacatatatgtatatatatcaataataatatgttaacaataaaaagttaacaaaaaaaaataagaataatttatatggatgttctttaaatttaattgtatggcttggacttaagtatatcatgagttgttcatatataacaaagagaaatcatagtttaaaaattagtatttttataatatataatgtggtgcggtttgaactgcaaaccacaccgcaccatgtggttaaaaatacaaactgcacccgcaccacaaagaattttaaat

SEQ ID NO: 254965 - DNA, 614 bp, Cannabis indica
acatcataatctcttcctattaattaaacctaccctttctctatagatctccatatataaatatatatacatggtgtttgtatatatatattatatatatataagttatttatcctttttattcaagatctatgttttcttcaacttcaaattgatttttttgtttataattaagtaaggggagcataagagttaggtctagatggcttaatttgcaggagcaagatgtcttttaattaattaatagtttctcaaaattatatatacttcctgttattgtgtgatccaacaattaaatcctcataaaagaaaaaaatctcatacacttgaactaattttgtcctatataatattaggttttgctttgtcaaatatgttcgatatatacttatatataattatatatggcccaaagctataaaaagccatgattgttctctaatttatacatcattcatcttcttcatttcgtctagtttgatctcatcaggaaagatcaaatctaattctagtgtaacactttattttattagataatttattctaacaataacaataacaatgatattagcgttaaaaaaaatgatatatatatatatataatatgactatat

SEQ ID NO: 254966 - DNA, 423 bp, Cannabis indica
tttttttagtaatatgtatgttttattaaggctccaccattgttggtggtacgatttatagccaatgtgattagagatgtggcgagcccccatcgctgtgggagggttcatgctccatgtgctatgatgggacctctagtgtgggtcagtaatgtgcataatgggttgtttgtggccattccatgtcccaataaattaaaaaatctatagtgtttgtgtggttttaatcttttctatatggagtcctttcattttcatttctgcatgtgattttcatggggatattttgcttaaattttttacattgcatttggtgtgtcctaaaatgaccataggtccaaatagcctatttttctatttcagactcttgcctctatttcgtttaaggactagagtattgtagtttccatatatttggatagg

SEQ ID NO: 254967 - DNA, 645 bp, Cannabis indica
ggtgttcgttatgcttataacatgatccctgtaaattttaaattttcgaatagtttacagtgccgaaaatacgtttgaagttttttgaacgcgtgaggtaaactagaatatcaggaactcttttttcggtactgtaactattcgaaattttttaaaattttacatagatgaactgtaactataacgaataccgctatgaaaaaaaaatttaaaaaatatttcagtgatttcgaacttaaaaattgacttgaaagttataataaaagattgtaattaacactcctacttttaactatatgagctcctacttttaattagagcattgctattaggtaccaatggtgcctagcaccttctcgacatgtcatgttgcgattggctagcgatactctctaaaatctattatattaaactatgtgggacccgatacttagttggaccaataacgatactgacacataggagggtgttaggcaccattggtgccttttaacatttctctttttaattatatgaggtgattattatggagaaatagagctaacaagaacagaagtgaccgaaagataattaattgactaaaagaaagcaaaacatataacagttatttattggagggactgaataagaaaattgactaaagaa

SEQ ID NO: 254968 - DNA, 872 bp, Cannabis indica
aattatgctaatatgactgacaaatttgataaaaatctgattatgagaaacattccctactggtaagtcgttattgaatcctcaacaattacaatttcatcttgtattgtgactccataagcttggacgcaaattgatttgacaaaattgtaaaccctcatgtttgctactggttgaatttggcattttaatatagtaaattatctttgttttataaatgatatgatacatcaagttataatttacaaaatcatgaaaataaaatcacaatgtgacattaggctgatggtttgattgaccaaattgataaactgatgaacataatcagattgataaatcatatcatttataaactgatgagatacaatcaaaacccaaaactgggtcatatttccataagagcctctataataaaagaacaaaattaaaattgtaactcttttcaaaaacatagatatatcgaattcagggcatataaaacagcaagaagagaggaacactatcagatatccagtaagatggacgatcataatgtgctaattgctaaagttgcaagagaaattattttactatgttaaacagatataatctttaacataaggtttcagggttactgaagatatggtgcgaaaatgatagaacttctttataaacaggcttcttaaaatcaactgcctgcacatattaatggagaggaaaagcaaaaatgtagtcaaatataagaagtgtgttaataaataatcttttgaacttacgatatagtatactcaccaggtcaatgtttgttctgctgacaccatgaccactcacaaactcagctttctcagttccatcccccaagagattgatttcttcatcctttccagtaattt

SEQ ID NO: 254969 - DNA, 877 bp, Cannabis indica
acaaagttagaagaaccaaccaaaaactcatacgtgaaatttgattttttatgcacgttgtcattatctaaaaatttggctagtagctctaaccaagttgtgcactaaaagtatatatgtacacacactacactccattattgtgaaaataattaaaattaaatgattccatccttcgttatataaatataaatatatatagtcattttcatttatgttgcctagctagctacctttccttatttcttaattatactcttcttcttcttataatttcttttgtatgtatgtatccatatatatatatatatatataatatttacttatataaatgtatgtgaccacatgcaaataatataaactaattaattaaggctaataaaactatttaaattttgcccattatatatagtaccccattttcttattattaggctaatgaatttgaccttatatattgtgttgtatattctaataattaattattaactctaatattagttgtccaaatctcaatcgaaaacaacttaatttctatattcatattttcaaagaaatatataaatgtatgtatatatcttgccgtatgcttttatatttccttagaaaaggaatccttataattatttgtatatatttttcttaaaaaaattgttagatatatatatattgttaattaagatagtcttactcttaattggtgaaatatcaatagcaataccaagttggttcttttatgaatcactaaaaaagtcataattatcatgttatgtcacttataaataattaattaatatactatatcaccatatgtcttttgcaaataaaaattggtgatatttatatattcccaataataatattattaattatata

SEQ ID NO: 254970 - DNA, 642 bp, Cannabis indica
catctctttactggttgtagcttagcttttggacctataaaagacaccattgaaggtacttttactaccttgtttgattatggcattactcactagttaaagcaagacactgaaaatatctcaatgttatgttgggctttatggaaatattgaaataatcttatttacccttaaaaaaaaaagggtaaataggcatatttgctaattaataattctcccctcgaactttgacatgtaccaaatcatgttcttaaatttttttgaccgttaaaaattttcctgaattattaagattgttagatttaaggacttttgtctaattttagtaaataaattctaacatggatgaaaattcagaaggcatgatttagtacgtatcaaagtttgagagacatgatttggtagatatcaaagtttggggagcatggttcagtacataaacaatcactaaaatagtaaaattgaatgaaattagagaaaagttcttaaatctaacaatttcaatagttcaaggggagtttttaacggcaaaaaaaaatcaggacataatttggtacatgtcaaagttcgggagaaaatttcttatttagtctatattaaattataatatttataactgaaaaaattaaattaaatatttat

SEQ ID NO: 254971 - DNA, 721 bp, Cannabis indica
aaactcaatctttaacacttttaacaaaaaaataaaaaaaaataccttggacattgttgttcggttagtgggtgtccgtgggagtcgtctcgatcggatcggagccgtgggtctccgtcggagtcgtctcggtcggaggagggggtcgtctcgtggtcggagtggggatgagggggctgggtcggctcgtacgatgtggtgagggggttgagggttcggttgggttgagagagaagctagagagatagaggaagagagagagttgggttgtgtgttatgtgagggttattcttggattttttataaaagtgtcatatattttttattttgaaatgtattggtttaagcataaaatattagggtttttactgtatagtttttcaaatttcccttgggaaattactttttacaatgagcattgctattaggcaccagtgctgcttagtacattcttggcatgtcgcgttgcgattagttagcgatactttttaaaagctattatattaaaatatatgagatctgataattagttgaacaaatagcgatattgacatataggagggtgctaggcaccactggtaccctttaatatttttcttttataatgaatatgtctatggtaagcactttagttttgtctctatagtaaacatatttttatagccataaatatttaacctaatggttataaattgataagtgtatataaatagttaatatg

SEQ ID NO: 254972 - DNA, 1320 bp, Cannabis indica
ccgtttgactgccaggccatatagaccccatcatcaaagcgcttgaggcaatgcttgcagacaactggggtcaggagctcatctcttttggcctttttcaaggcctgatctttaaagtctcttagctccttcacctccacagtcaggttagctgccgactgcaagtctgcctgatgcaactcctccaaggactttaacttggcagccatttcatccatagcctccctggcttcccgaagctcgcgcttggccctggctgtagcctcgccctccgccttcagctcctcccggtgccttgcctccgccttagcctccctttgcttggctgcctccggactttgcctccgcaagggccccccctttgttgagcctcctcctggaacgccctcctttcggcagacaagtcccgcaggatcctcacggcctcgtctatgccctcaaattcggacatgacgaacccatgattgatcagggtcttggaaaggcggccggtcacggcagtaatctgggaaaagaaacaagaatgaaatcagatgccttagacaaaatataagagaagggaataaagtacaagtactcactgcagccagagcagagctgatgtcttgcacctggtatacggagttcatggaggcacaagccgcgtatctcttggttgggaattgaatcaggtgggagacaaactggttggtcatctccgaggcgaacggagctaaggtaggcccgacaaagcggttgaaccaatccgtcaaagggtccatgttcaggtcccaaggatttcggaaggcgtcctctcgcaaagtattctgctgctgctcccgcagaatcttctttagggcctccacctcagcatgcccccgactgaactcgcccagggcgtagttgtgtttggcaacgcagagcatttgcctctcctcatccgcagggactggggtcagcacaatgtcgtgcggcacagtatactcctccccctcggaaggaatcccggagtcagtactgacggctggagtgtcccctttacgggtccgcttagtaggctcggtctcaaccatcttggccttccgcttgcgctcaagggaggccgcagccttcacctcatcctcctcgacttccccctcctcgtctatcaaaataatcgtgcccgaaggggcactggacgaggaccttctgggggtcaccaactgggacggagccgtaggcagagaggcatcagggctatatgcctcggcaagagtagccagaagattttccataagcctggctgctgcaacaagaaataaacaaagtatagaataatcatgagaaaggcgtgcgcccaac

SEQ ID NO: 254973 - DNA, 1049 bp, Cannabis indica
gtctcgactcatagtttctacctatgtggattcaacctccatgattgaggaaattacattgtatacccattttactttacatatttcaatttttacttttatttttatgttttttaagatataccaacttttatagatgaagtcccaattatagcatttaagttaatgtaaattatgtgctacacttaagtgaaatgtgagagtatattggacaactcactcacaaaagtcggtacattttaattaaatttaatatgaatgtatttttgattaatggaataaaaaaaaaaaaaagtatttctcaacttctccctccatgattgctagtttgctattacttggtggaattagctacacaaccaagacattgataccagattatttattctattctttaaaatatatcataaaaattcaactttttatattttacaatatttttacattacatcatacatcaccaaaactctaattttttaaaatctcaatatattttattcattttaaatatataatattaatatatacacatatccctatacaaaaataattattaaaacctaaacaattaataaaatatgtttaaaacaataaatagtattctataaatgtaaatcatgaatagtaaattttaaataaactttaaaataaataaagaatttagaacatttgtcgtagcataattttagtacgatttttttttgcggtgcagtttttgcggttttttagttttcgcgatgcaggtgcggtttgagaaattgaaaaaaccgcatgtgcaagttaatttgaaaaaatagtcaaaaaccgcaccacccgcactgcgaacacccctagttgtaagtgctctcaactccaacgtgtctttactcagaatttatggagattaatgcgtatttaaaaagagagaatatttggggtaaaaaattaagagaaatgctaaagggcaccagtggtgcctaacaccctcctatgtgtcaatatcgctattggtccaactaagtatcgggtcccatataatttaatataatagcttttagagagtatcgcta

SEQ ID NO: 254974 - DNA, 961 bp, Cannabis indica
tcttcactccctctctctctcgaatcccttggagactcagcagcaagttggtgtttctttagctgattcttggtagtttagaaagcttcttagttgttcaatacaaggtaaaaatccctagcctttttctttaggttttcttaagctcaagttaaggtgtttgcatactttttagaattagggttgtgtgattgtttcaattgtttgaattggtgttctgaagttaaaataatgttatttgagttgaattagagtttgtttgtggcttgattttgtcgttggacaaggtttgagttttagaactcaaactttagtctttaatggtgatttgagtttcaaggattgtttctggtttttgttgcatgaattttcttcattgtgatgtaattagcaggtctggaagatttggtaacatttggggttaaattgaatttcttggagtgagtttggtgtttcctgcactgaaccataattctagttcaaggggacctgtaggaaccgaaatttcggttggtccctagggaacttcacagaactggaattctagttggggaaccgatctacaggttggggaaccggtctaccggttggggcattttaaggaaccctagtttttcccgtttctgtaatatttagggtatttccatgttatccatcgatatgaaaacttctagtttcaagtttaagtccccgaaaattaatttagcatgtcacttaccaattttacgaataatgtgattgaagggcctgtaaatcgtcgaacagctgttccacttaggttggccggcacacatgaattcaaaaatgtggtaagattagtataatgatatgcatttgtgtttacatatttagcgtacatgttagttaagcctgttaaattacattataatagcggtatgagtatatttagtattatattggatatcgatgaacgtatattggcttaagtactaatcgacaa

SEQ ID NO: 254975 - DNA, 787 bp, Cannabis indica
aactaatttagtttttcccattagtcttgtctttttgacattggttcttttagtcttttccttttagttttttcccattagtcttgtctcttgacattgatttttttagcttttccctttaattttttttggttcgagtcttgtcttttggcatgggttgtgtagctcagaatcatcatggtgctatagtggaagcattcaagaagaggaagattggatgtgttcaacccgaaattgttgagataataggaattaaagaagcattgtgttggattgcaactcattcgtgggatagaatcatgttggaaacaaatagcttggtctgtgtccaaacaatttagagcggtatttttatgccttcaaagtttggtcttattgttcaagatgttcgaaattcgcttttggctttatcttttattgatttgtgtttaataaaacaatctgcaaatacgttagctcattgcttggcaatagactcttgtttctctagaggtcgtgtgcttcagttagaggactgttcctctaaagtgcgttctattgttttgaacgaatttattaattaataaatcttatgatttttattcaaaaaatggccaggggtagttactcatgcaggagttactaatgactagttggctggtttgttgaaagtggtggagattttttttattatatctttacgtgcctaattaatttttaatttttttacagaattattatatattaaaatatatataactgtaattatttttcttaccgtttacaaagaatatttttatttaattac

SEQ ID NO: 254976 - DNA, 896 bp, Cannabis indica
agagagatgaaggagttacagagagagacaagaaaaagaaagaaaagaaaaaaaaaaaagaaagaaaaaaaatttatttaatctatttttttaattttaaattaatttaattttatttattttttaatttttttaatataattatttacgtcactacaacaattataggtattagcgatggagttattagcggtggacccactccgccgctaataataggggtattagcggcagactccactgtccgccgctaattgtggccgaaaataattttttttttgaaattttattagcggcgggcagtccgccgctaatgcccgccgctaatactggtagcggcggaccccaccgcaattactatgctgctattagtattagcagcggaccccaccgcaattgctccgcagctaattaatgggcgggataaatcccgctcatccaattcaaaattattagcggcgtactatagtaataaaaaaataaaaaaataataattattactattagcggcggacccccaccgctaatagtccgccgctaccccctttataaatagggaaatttacatctcaacacgtttttgttaaattaatgctaatattaacgtcaatttttaaattattgatattaatgtattgtattaccctttttttatatattaatatattggcacatgcttaacataatcaattttcacatgtctaacatgttttgggatgcgtgcacccatttttcaattttttttgtctttttggtttgaatcctaaatagaataaggagagtttatttgtacactttctattttttttaatgtaaaaaccaattagaatagattatttatggtttctattttcttcactatgtgaattgattatttatggtgaacatatattttt

SEQ ID NO: 254977 - DNA, 670 bp, Cannabis indica
tttttttactttattttttattaattttttttctatcacaaatatattctaattatataaaattttaataattatttattattaatttattaatggaaaaatatattcaaactatcttatttaaaacttcctttttcttacgttattactttatttatttttttatgttttttcaaattaaattttttaataaatctatatctatatctatacatttattcgaaaaataaaataaagtaaaataaataaataaatatacataaaaaaaattaaaaacttacgtacaaatcttaactatttataattattaacaatttaaaaataaaaatattaataatttcaaacctatttaaatttagtttctaagtttaagaatctattgagtgaaggttctttgtactgtctgcaaaatttaaaaattgtggcaaccacatgtgagtacagaacactttccaatgactataaaattttatttttgattacaacttcaatagagacactagaaggagaaatagttaatatttcgatcaatggatttcaattcataactctaaatttaactcatttatacgtgttaatgataacacaatactctcaggtattcatttaattattaattgttgcccctgattttgcccaatatacgtggaccaaccggacaatgacacgt

SEQ ID NO: 254978 - DNA, 966 bp, Cannabis indica
aattgacccaaacaaacaaaagagtatagcaatctgatgagaatcaaaagtttcaaaggcagcaaaaaaaaaagtatccatagaactagataaattagtagtataaaaaccaataaaactttgaatttttccaggctttcctagcatacttacaatccaagatggcatatttcactgtctccgtggtttgataacagatcgggcagacaggagatggaattatgtgtacgaaaaaataaagaggaagcaacaggaactcagtgggacaagactcgccaaatcaagtgtttaactatagggggaacatttgaagaccaaactgtagtccaaaaccgcctagctattatgaaaagaagaacccgaagctatactacggttggtcaaggcaaggtgataagcactctttacactcaaaattcctgaagattcctgaccccagatgagattatcagatccacttgcaccagaaattggaacattaaggatactagttaccgtggaggagtcaaaatgctagttaagcctatctaaattctagccacccgatggggagagaaaataagaaagagttgggtcaggaggaggaggggaggcataaaacttataacgaagcccagggatccaatggtcctgaatcgtatgaatatttgagccatcaccaactttccaaattaaccctctcttcattagatcaagcccccagaggagactacgccaggaataagaaggattaaaaccagggcctgcctcaaggactgaagaatgaggaaaatacctagcttttagagtttgactaagcaaagagtggggacacattaggacccgccatgcttgtttagcaagcatggcctgattaaagtgaacaaaagatctaaaacccaaccccccaacaaacttagattgacaagttccccaacttttccaatgaagtttcgaattatcccccgaggaaccccaccagaattt

SEQ ID NO: 254979 - DNA, 563 bp, Cannabis indica
cagcttggactttgatggtcttcccgacctcctccttcgccttcttgacttcctcttttgccttctcggcttccttctttgctttctcggcttcttccttcgatttttcggcttcttgcttgaggcgagtaatctcctattgggcattgtctcgttgctcactcacaaccttgtattgggataacaatttgtgagcctcgccctccaaatacttgagcccctcaaagagtagtcaattggaagcaaaagaagccaaagaagcatggagaattgcaaacagatgaatatgaaagaggtataaaaaaagtaatataattataataacaaagccgacgtaccatgaagtgatagtccaagctcctgaaaagaatctcttttggactcctaagattgagaaaatttcaatcagggggaaggagagtttgaagtttgcgccaaaaagcgacgccatatgcctgggcaaattcagacccaacttcccctgctgcgaccgacagggtctcaatggcttgactcaaagaagcagtagcgggggtcggcctcgggatgaggagcattggcgt

SEQ ID NO: 254980 - DNA, 566 bp, Cannabis indica
taaaatacattgaagggtaaattgtaaattttctccctactccatgtaaaccgtctataaaggatccttgattattgagaatgaaattatggacaattcatagtgtatttatatttggtatatatagtattctatgtaattaagagtgtgattctgaatctatagtggagtcatgagaaattaataagttagaaaatttacttaaaaatttcagatctacttattgagagtttgattttataggcccatagttcccacattatttaggataatactactttatagactcaattaattgatttaataaatcaattggaatgctaaaataagactatgtcttatttgaaaatttcactaagatttgagaaatttgagaagaaaagagaaataaatgtttatttgttaattaagacacttggtgggtctaattaataaatatatttatattataattttgtttattaattatttataattattaaataaataaaattgatatatgaataaatagattagataaatagtatatttagaaaaagataaattgtttcatttaatgaaataaa

SEQ ID NO: 254981 - DNA, 550 bp, Cannabis indica
gatcagcactaaccttggcccacgtaatatcacgtactgttttctcaagtgttttacaactttttccataaaaattcattcgaagccctactcctccatgattcttatacatatgtctgtaatcacctttattatttccgcctttctcttgatggtgatcatcatcataatctcttccactaacaactacaagaaatgaaaccaccataacaataatatgataagtacctttcatgatattcatcgaattaataattaattggtactttaatatatagctagctaggtataattggttggttttgatgatgaaatgaaagccaccaaaggtggctttatatatagcaatatattgggtgcaattttattaattattatttaatttgcgacgtttacatatattgaagaaagccagccatggtttattccaaatgcagcaagttattagatatatgatcaataatataatttacttcccattatttatgatatattgaacccctatatatagctgaattgatattcacgctagctaccaataactttttat

SEQ ID NO: 254982 - DNA, 749 bp, Cannabis indica
  modified_base (631)..(631): a, c, t, g, unknown or other
aaaaaaaaatccagaaaataataatgttggaaaaaaccaagactacaaattcccaagaaacctaatcaattaggaagaaaagcagctgccacttgagaaaatttcaactaggtgagagtaatggagaccccctaatttatctaagaaacataatccaacccaaaccaaaagtagaatctactacccaaattttccaaacaaaagaactgattttaaacataaaaccagtgattggggtgaccggtgagcttgtgaataatacacgaagcacggccatgaacaacaaaggagctcaaccccataaagtgaaggaacgaaggaaaggataggttatgaacattcccacttatcttactcgagttggagagaggagctcggaggttagccttgatcatttttctataattaaggaaaaacaaaaggatgatgaaaggagggtcctgcttacactacagatttgtcaattgaaagaggaataagaacacctactgcactttggcttttaatatgatcctagggacgtaaaatgagactcaccggcagggtaaacagagtaaaagagtgcccaccaagaatcataagagttcttggtatgcttgcttagtattaagtaagttggggttggggcagngagggagccagacaacaacatgccaggacccacacagcttcatctcaaacttacaactctttttggagagagagaggagaggagaggagagaaggagtaggtacgttcgttcggcttt

SEQ ID NO: 254983 - DNA, 567 bp, Cannabis indica
ttccttaaacaagaaaaaattaagccagcatgatatattgctacactatcttccttatcaatcttaataagaaaattggacgagaacaagaaaatagtttgcaaccccacctttgaactatacgctcccaagaagcaccttttagagaaagttcagtgtacagtgatctccaaaagattatttttgagaaaaactagactattctactagaaatttggccaaaaatagaagaagatgctccatgggaaatgtttccctcatatcattcactactcatagcaaaagctctagaaaaatttcaaaattttgaaaatagtcacaatcaggtccaagtccctgaaacaaagaagaaacattcatcactattcaaagaaacagacattgtaggggtcttactctaaaagacaagtatttttgaggattcacaagatccataaatggactaagaaatcaaccaggatccctatctctttcagtacaataaactagaatgagagattgtttattttgaatatgatgcatgtccaccagatggaaatgataaagatgatgaaccatcaggttggc

SEQ ID NO: 254984 - DNA, 627 bp, Cannabis indica
taaaagttattttttaaaattatatgaaacatgatacttaattacactaataacaatatgatactaaaaagagtgctagacactaataatacattttagcaattctcatcaatatatgccctatcgttgataaatgatacacatataataatcctttatataagctacatatatatacacatcaccacgaaacaggttttcttggtgtggtagaaagagaattgtacgtttgttttatttttttggttgttgtgagttattagtttgttactggtgttgttttattatatataatatcttcaatgttcctaaaagattttgaaaaaaaaaaaaacaataaattaaagaaaaacttaagtgaacgtaattgtgagattggatttaattgtacatttaaatatctcatattttataaaaaaactaagtggggtctcacgtagcagtctcacgtgcttcgcacctgtgactcttaaaaatatatatatatatatatattatattttttttttgcctgaaagactcttaaaaatatttatgcaatacattttgtctaaaatttacaatattaccaaattgtatcttttaaaatgtaagtcatgatgataaaatttttgtgtaaatcttcta

SEQ ID NO: 254985 - DNA, 687 bp, Cannabis indica
caattatttaattaaaaaaattaaacaatacatatattatacttaacatcacctaattaaacctaattaaaaagaaaactaattatacgtgcaatgcacgtaacatcaatctagtatataaaaaggtataaaagtttaaaatacgatgtattagtattttagtaaataaagtgtatttttgtattttttatgtaaaaatttcatcattctaacccctcttaaaataaataaataggctaattaagatttttacccatgaactttaacatgtactaaatcatgctccctaaacttttctggccattaaaaattttctctaaactattgagattattggtttaaggacttttgtctaatttcattaaattttactaattcagtgattgtctatgaactaaattatgcatcccggacttgattactactaaactatgcccctcgaactttgacatatgccaaatcatatctcttgaacttttatcatggtaaacttttctaactaaaattagataaatgtccttaaatctaacaatcagagaaatttttagcggtcttcaaagttcaggggtatgatttggtacatctcaaaatttagaggataaaaatcctaattagctaaaaaataatctaatctctttgcaataataataataagagaaattttatttacaccccaaaaatttctaa

SEQ ID NO: 254986 - DNA, 825 bp, Cannabis indica
tgcattagaattctttcttctaattaagtctccacgaaggaaatccgtatttgttaattagggattatgccctaattaaaaccacaattcaatttgtaacctttattattattgtaatatcctaaaatttaaaaatagattagcaaccctaattaatttaattaaaaattaatgtagaattatattataatataatcaattatgtgatattatttgaggatatttgatttaagactctatttgtgtgttaggggtattttcgtaattttgacccaaaagagtaaaattgtaattttattacatattgttgtgacgtcatgattaaaggaacatcacatgccttacattatgctaatccccgttagtcaggatcaataaaccaattgagtaaagcaaaataacttgtaataataaaatttatctttaactttctaaaatattacaagtcattcacatacaagtcgacctaagcggcaaaataggatttctatacaatctccctttggacccaaccctttcggtctagcttggcttgaacatatgcaattcatcttcaaaaccctcgagttcatggttgactcaacactgctttaccttttcctgaataataaagcacctgtgagtcaagacccaacaaaattataaaataaatatgacacgagaagattatatacatataacatacaatacaccctacgtagttaaacgtgccactgcactagtgtattacactatctcatttataatgatgcatctgcatctaatgcctatatagcatagataccatgtgttacgctcacatgtttactttacatatataaggcc

SEQ ID NO: 254987 - DNA, 556 bp, Cannabis indica
atactaataaaatgtcacatgtcaatttttcattggtttaaataataattttaattaaaaataaaataaaataaaaaattattctagaatcataaaattatttattttatttattttttaatttttcgtcttcttcacctatccacaatctgatcctcaccctaccccattcccagtcacgaccttcaattatagacagattcaaacacaaacacatattaaatacacaattatgaaaaatgaacaatgaattaacatatcaaatcaaagccaaacaatcaaagaagagttttttttaaaacaaaacccagatcacaccatgaatgaaatattaatatattagccctgttcaaagatgaaggagatgatgatgaagaaaaagaaaataaactggcgatgatgaagaagaagaagataattggcgatgaagaagaaattgaagggaaatctttagcagtcaagatcctagcatattgagctctcaaactttattgagctttcatactataaccactactaaggcttaacccaagtcccaactcaagcccagacttat

SEQ ID NO: 254988 - DNA, 509 bp, Cannabis indica
tgttatttaagttatcttgaaacaagtgggaagttagaattgtccagttatggaattaaggttattctggagtttggataagtgatttaccaagtttatttatcatgacatatgacctaggatcatcgagtttgtcccacttaggtcagtgcgtacacctgattattggactgaggtaagaaaagctatatccttataagcatgtaatgtgagaaatgattattatcgtttgtgactcaattatgattgaagtaatgatgagaaatgattattattgtttgtgactcaattatgattgagggaaagatacggtcaataccgttgttgagaatggataaaaatatggtcattaccgttaatgaaaatgagtaactactcccttgaaactgctgatatgtttcttacttatctggtgctttattgggcaacaatagtgacatacgtagctcatggacaacaagcgtcaaggatgctttatgaagcatcagagtcaggttgtcttataatac

SEQ ID NO: 254989 - DNA, 10433 bp, Cannabis indica
aagttccttctttttttttttttaattttgattttttataaaatgaggtaaataaaatgagttttattaaattaatatcaacttaataaactacaaaaatagattactaacttaattaaaatcccactaaaagacaaaaccaacttagggcaaaaagactaaaatgcccttgtccacactaaaaatcgtaaaaaacacttaggggtatttttgtcaattctaaaatctcgactattctcgacatttccaatgtctaactatattgtccggctatactaaaaatactaagatgtgattttaatagccaaacgccgcgttccaatattgtcaagcacaaaacatgtaaaaatatgaaattccattatgacatataaaatgtattttgaattcaaataaatctccgtaaaatgataattcataaataacatgcaagtttcataattaaatcctaattatctgctaattttcaaattaaagttaagcggtctttacaaccaactagcgatgagaaattgttggtgtactgtgatgcttcgaagcaaggtttagactgtgttttaatgcagtgtggaaaggtcatcgcctatgcatctaggcaactaaaggattatgaacggtgttatcctactcatgacctagagttggcagtagtagtatttgccttaaagatttggcatcactatttgtatggtgagaagtgtgagatatatagagagcacaagagcttgaaatatttctttacatagaggtggttagaattgtttaaggattaagactgtgaaatcctataccaccctgagaaggcgaatatggtgacagatgcaatgagtcgaagaggtcctagtcaagtgtatgaattgaaacaaatctctctgaagttagctgaagagatgattagatcgagaattgagtttatggtcaaaaagtcagccaatgttacattacaattagatttgttaaaaaggattaagattgcttagcaaaatgatctagaatagattgattgtagggagaagttcgcggttggtacaacgaaagatttttcagtgtcacttagtggactactaaggtataaagatagggtttatgttccaacagatgagcagattagacaagagatacttgatgagtttcatactattccgtattcactatacctgggagcaacgaagatgtaccacgatgttaaggtactgtactagtggtcaggaatgaaaagtgatgtggttgagtatgtatcaaagtgtctaacctcccagcaaataaaagcaggacattagaggccaacgagattacttcagcctttgaaggttcccaaatggaaataggaggacataaccatgaattttgtggtgggtttgctgaagactatagaaatgtacgactctatttaggtagtagtggataggtttactaagtcagcacactttttgctagtacggacaacatataatatagatcaatatgttgatttttacatgaaagaaatagtttgaattcacggtgctccaaaatcaatcttttcagatcgtgatccaaagttcacttctaaattccaggaaagtttttagagagccatgggaaaaaaattgaaatttagtacgacattttatcctcatatagatggacagtctgagaggactattcagatatggaagacatgctgcgagcatgtgtggtagattttgaaagttcctagaacaagtttttacccctaatcgagctctcatataataacaactattagagtaccatcgatatggcacccaacgagatgttgtatggaagaaagtgtcggtcacctattcactgagatgaagcctgtgaaagaagatatctaagctcgtatgctcgtctcacagagtagatacaaaaactacgctgacccgaagtgtagggataatgaattgtaggttggggaatttgtgtttcttcgagtatcacctttgaaaggagtttagagatttggaaagaaagggaatttaagccctaagtttatcagtccctttgaaatcctggaaagagtaggtcatgtagactatcgactaaatttacctcctgccttgtctagagttcataacgtatttcatattttcatgttaaggaagtatgtatcaaactcgacacatattctaacttatgatgacattgagcttcagacagatttatcctatgaagaacaacctatctatatattggatagaaaagagaaagtgttgcaaaacaaaacaattttgctagttaaagtgttgtgaaagaacaacaaggttgaagaggcaaatcgaattagagtcacagatgcgggagtaacatcccgagttattcaggtaaattttgaggacaaaatttgtataaggaggggatagttgtaatatcccaaaaatctaatgttaataattaaggcatattttaaaaaatataaaataataagtgtgttatgagtataatggataagattatgatcttactaatctaactacgtgataattaggggttttaatataaataaatgagtaagtgtaatttatcaattacggagattcaattaaaatgtgtgggtatgatgtaagttatttgagaaataaaaatatttttcaggtccgacaactgtggagacctgattggtggccaaaaaaatcataacgatattagtttgtggtaatgttggttttattgggttagtttggtttttgttttatcgaggtatttcagggtaactagttatgaccaaattgcccctaagttagagattacttgagatttaagttaagggtgattatgtcttttttggattttgttttattagcaggattctttaggttatcattaaggttaatttatttcataagttgaataatactaggttgatattatcttaagtaacaaaaattataaagcaaaacatcacacttttctctctttcttgcttcagctcaagaaaaaacccaaagggaagctaggttttcttcttagttttcagaccaaattaagtgggtaaatcaagtgtttgttgaagagaattctaaggtaaactctagctactcattctctctgtattttgaggttttaagcttagttttatagtgtgatcttgtgttaaagctgttgttagggttatttttttttatgttggttttggaattttaattttaagtgtttaatgttattttaactgatttttgttggttgaaacctaagttgagttaggtttgaacttttaagtcaaacttaactcaagaatggtgtattttgttttatatgcttgttgttgaaattactggctggattatgattattgggcttaaaatataggcattttagagagatataaagttcgaggtagttttgagttaaaattaaggttttgtgttttctgcagcagaaaatgacagaccgttttctagaaacagtctcccatttttcctggtagtgtcccaaaaaatggcctaccgtgtttacagaaacgaactactattttttggggaatttttaccgaaatcccatttttggtatttagggtattcccatgctatttatcgatagggaaacttccaattttgagtttaagtcctggaactggttagatcaagttgttaaacgatttattgttattgtgacatagggcctaggattatcgtctattctccactcaggttggccgatacacccgaatagggatttgaggtaagaaagtatattcgtaccactagcatgtcaagacaagttacgattattatcgtttctgatttattattgtcgaatataaagatacgacaattaccatttgtgagaaagagtcattactctaaattgagaccgttgttaggtttcttacttatcgattacctcattaggtaacaatagtgacattagatgctcggtcaggcttatcagggttgcctcattaggtaacacagaaagggttactttatgaagtaataattatagttagtcttattaaacaaatatttgtgtagttttggaatgttatacatatgtggttatctgcttatttgtgattgtttggaattatatgtatggttgacacgtgattattgcttttacttttcttgttgggtctttgtgactcaagggtaccttgtggtgcaggtaaggataagggtaaactagggcagccatgagtcaacagtcttcttcgacaaatgtacgtatcaatcttttcggcttgcatagccgagttgttagggggtgttttggcattgtatagtattttggatacaaacttagtactaaaccttttgtaataagggatccccgaaactaaatatttattgatgtaaccttttcagtttaagtttattttattaaagaattttaattgaagcgttagtttattaattaatttataaaagcacctataaatacccttctctcatatgtgagaggtagttgaaaaattaattttacaatcacataatttgaaatgatacaaaataattttttctctctactccgaataccaatttagagtttaaattttcattttatcatcatcttaaccctaaattttaaactcagattttgattttctgagtttcgaacgtcattaataaattgataataaataagtcttaaatcatatttaaattaatttagtgattcatttttctctaaaataacttaattaagttaataattaataaaaaaaatttaaattaattttattaattgttgataaattttagtatacatattaatttttaataaattagagtattttttttttgagaaaaataaattagagtatctaaaatcatattttaccatatattttcatacatttatttattttaaattaaaataagaagattatttatgctatatttttgttggagaggagattaagttttaccctaaactgttaatgttttaaaattcagttcccattatttttctctttcattctcgccaaattcatcatcgggcagtgcttctccggcgaaactacggtttcattaacaaattcaccctaaaacccaattatctctgccgaagctccagctgggcactccggccaactctcttggccggttcttaacatttcatcgcgaccaggtaccttctattagttaattttatattttcataattaggattttagggatacatttgatttaactatatagaaaaccaaaaaacagaactgaaatatctgaatgagtttttcttttttaattgaactttatgtaaatttagtttcttttcgtactgggttggttgaaaattaactgagagattcatatgaaaattatcttttaaataatcttgggcactttgaaccttattatgttattggattccagtttctgtcattcatagcttaaattgtgtttgtttttagttaaacgacttatttgaagtctggttttagcagcagcacaagattctgcataatacagaattgttgctgatcattttgtgatggatcattcacgatcagtctccgggattggtgaagataatgttgggattccagatgatttgcgttgcaagagatcagatgggaaacagtggagatgcactgccatgtccatgccagataagacagtatgtgaaaagcactatattcaggcaaagaagagggctgctaattctgcaatgcgagctaatttaaagaaagccaagcgaaagtccttgggtgaaagtgatatttacttagagagtaagagtgatgattttgatgtgccacttgtgactccgaaagttgaggagtattctgctcctgtccataggaaaaagtactttgagaaggtatccaagaatcagtttcgctactctcctgaaactccaccagtgagaagtttttctgtacggaattctccgaagctagatgatgattcacatttagacttagcgcagtatgaagagaatttcagatcgtataaaacaacgcctaattctgccgtggactcatccagaaacagatcacagagaagctttgatgctaatgcgacgacagtttcggtatgttgacttgaatgcaagcttacttcttgatgtagtttttgagctctgctgctatactcaggataattactgtgatgctgttgtaatatacagaagatttttgtctcaaagttggatcccaagtaatgacagttcataagaatttcttttattaatttttcgtaattaaaatagagagcattgttccgaaaaaaaaggcatccccctttttgaccccttgggaaacaactcattatttggtcactgcatacctctttgatagtctttgtgtgcttatccttaagagtgaattgtatctctaagcctaagggaactaaaagcgaataatattgattatcagattgtgtttttcttttacttttctcgttgaagatgattggttgcgggtaccctttattatgattattttatattctatatttactgcatcattctaatttaaagtgaacacactttattcttcaggagtactctgatcaaagcacagaatcatctgaagagactggtggccaaacatgccatcagtgtcgaaggaatgaccgagaaagagttatttggtgcctcaaatgtgatcgaagaggatactgcgatagttgtatatctaaatggtgaggtttgattctctaggagaacatacatatttttgaatgccgatgtgcatgcttaataaagaggcttacttttaggtacccggacacctcagtggaagatattcaaagaatatgccccgcgtgtcatggtaattgtaactgtaaagtttgcttacgtggagataatttattaaaggtgcgctagagataatttcatcattttgtttcagaagttaattatagacaagaattttatatttgaaagttggcataaccttttaatcacttcgtattatgctcaaatgcttcttttattctaggtaagaataaaggagatccctgccctggataaattacaatatctccactgtctgctatcttcggtgcttcctgttgtcaagcaaatccatcatgagcagtgctctgaggtagaattggagaaaaggcttcgtggtaagatacttttgattcttctatggtattttaattttgctttcatttagtgatcacctagaaatctgttaactattttgtcactctgtattttttcaggaactgacattgatctttcaaggacacgattgaatgtagatgagcaaatgtgctggtatggtgatacccttaaaataagtaatctagattttctttacttcagtctccatgtattgactttcttaaaatgtccacataaggagttaggactaggccttctatggttgttagatttctcaattttatgtatggttgtatgtaatattctgattatcttgttaatttctatcacatttatgattttagtctttagcgtacaatagtgtcatccttttggaggcttgaaatttgatgtggtttattgcagcaatttctgtcgaattcccatcattgattatcatcggcattgtgcaaactgctcttatgacctttgtcttagttgctctagagatttaagggaagcatctgtggcttgtattaatggagttgcagatagtaagattggcagagaaagtgaagataaggagtctgtggtggagctactgcctagggtcaaactgaacttttcagacaaatttcctgagtggaaagccaacagtgatagtagcattccatgccccccaaaggagtacggtggctgcggatattcatcattgaatctaagtcgcatttttaagatgaattgggttgcaaaattggtgaaaaatgttgaggaaatggtaagtgggtgtagggtttatagggatgccaacatggagaaaatcatgtttaatgatcctaggcactgccaatatgctcatcgggaggatggtgatgctaatttcttgtactgccctacgtcagaagatattaaatctagtggggttggtgactttagaaagcattgggctagaggtgagcccatcattgttaatcaggtttttgatagttcatactcttcaagttgggacccaatggtgatatggagagggatacaggagactaaagatgagaaattgaaagatgagaacagaatggtaaaggcgatagattgtcttgattggtctgaggtgagctctctattgtttttatcttcttccatagcatcttaagtatcatgtttcatttgcattgaactcattcttgtttcattgaataactagttgttgattgattaacgtcttatcaaattctttgaaataaacctttttggctttgatatgatggcagattgatattgaacttggtcagtttctagaaggatattctgagggacggctccgtgaaaatggtaagcaagagctattgaagttgaatgattggccttgcccaagtgcagctgaggagttcttattgtaccagagacctgaatttattggtaaattgcctttacttgagtatatccactccaagtggggtcttctcaatgttgcagcaaaactcccacactactctttgcagaatgatgtggggcctaagatttttacttcctatgggacatacgatgaacttagtgagggcaattctgtcaccaatcttcatttcaacataagagacatggttagttgtattcttcttgttgacccaaagttgttgattttaaagatttatttatctagtgaagatgttttgtacttcttctttagccagttgtcataattgccttttaatatagcttcataactctcacctgatctatgcaaatagtgatactttgttaatgtctgatattttaagcactgtttcatatacatatatatttgaatttttggtcctggcagtttgactgggggacctcccagtggcttcaatatttttgagtctttggggatttgaaccttggaacaaatgcctaccagcactccttaccactagaccatcccttgggttttaacactgtttcatattctatgcaaataatgatactttgtgcatgtatcaggtgtatcttttggtgaatacatgtgaggtgaaattaaaaggtcagccaacaacaaagattgagaagatgcctcaagcttttgaggaatctgaggagaaagatacagaaggagatggaaaagtaggtggggacgagggtaggtcacctgatatatcacttggggaacacagtttggaaattgaaaatcatgcaaatttggatgaaaatagagatgttgagatgatggatcaagggattgataatacttgtagtgttaggagatgctgccattggggaacactcaaaccagaatggtggagatgtttctgaaaagactcgtccaggagttttttgggatgtttttcgccgtgaagatgttccaaaagtatctgagtacctgagaatgcaccaggaggagtttgggttgctcgactgtgaatcatatgattttgtaagttttagctagtattttctaaaacaacttttcaactgttagctaaggcttggattttgtaattgttgttgattgtacattttaaattataggttacaaggccactttatgatgagagatttttcttgaatgtgtatcacaaacaaaaactgaaggaagaatttggtacgtatacaagcttatgttttagttagtttgatactcttaattgaactgcatttggtacaattatttttccttctgcgattatcatttctgcaattagtaagtaaaattctttactgatactactgatatttttcggtaataaactggagatatagaagagataaatttaatctaatccttggctgcgattatgagccagaaagattgacagttaaaatttattttgttgaaattgcacaatttatgtgttaggaaagcattgcaagtaattaactgtgtttgttaagatacagatgattgttgaaacggaatctaattggttcttcttttgtttttcatctttaccttgttaacaaatatggctctgtttattatctctgtttgtttggttttgataatgtagaatattgatgtttctgaattaaattttttaatggtagagaatgtttggcttgtgtttcaggagttgagccatggtcctttgaacagcatctggggcaagctgtatttgtcccagctgggtgtccttttcaagtaagaaatcttcaggtgagtgggtgtgatatggtggtttttataatgttaaaataaaattctatgtagcattttactgggattgtgaaagtttataccagaaatttagtttcactttcgactgcctgagcctcctacagtagaatatactaaattttagttcttcaaaacttgttcatgttataggaattcacatcttacgaggttattttaactttccagtccatgttactttgtctgagatcttttgactattttaactctccgcagtccatggttttgctttggtctgagtatctttttgatt

SEQ ID NO: 254990 - DNA, 750 bp, Cannabis indica
caataataatagacaaacacacttcattggaaaaaaaaaatgaagaaaaagcaataaatatataataaaaccctaaaaaatggggtccaaaaactcctcagcagaactggtttatatggggtacttaaattatgtctcattaccactttattgaatatcatcatcagcaaaatttacaatacaaaatgattaattaattaattaattatattatgaaataactttcaatactagtagtgtttataatattattggtagggacactaactaattaatttggttggtgtatattatatataaagatttttaaaaactatacatttttataattatataacatgttcttcacatttttgaaagatcgatgtacatatatagacatatatatgcaattatattactggggtccaaatattaaagacacaaaagcaactggtcgatcgaattatatattacatataatataatataatggattttttttaaggtggagaatttaaaaaatacaccatatttaatagtttgttctaattagataattacattgtaatattatggttttgaatgaaacatatttaaattaggattgattaaatttttttatcttatttaaaaaaatattcaatgaatagtgcttataatctatttttacttaatatttttggtcataatattatcactttattacactaatgccattaactaaatcacttcactaatttataaataactttatatttatttttaaat

SEQ ID NO: 254991 - DNA, 889 bp, Cannabis indica
gtcggatcgagacaaaagttttttttgagttagtttttggaaggattatctgcttgcaaggcacttccccaaagatagcaccgcgtatcaccctcaaacctatggggcaaacagaggtggtcaatcgatgcttggaaacctatctgtggggcttcataagcttcaaacccaaccaattggtcgaatggttaccatgggctgagttttggtataacacttctcaccacacctccatcgatatgaaccccttccggggttttataccaccgtgatcctcctcctttatccgttttgggcctcaagtactcgagtttctattgtggaccaagtcctctcggactgcaaagacttactcgcattgctgagacaaagtcttcttagggtgcaaagacttactcgcattgctgagacaaagtcttcttagggcacagcaaagaatgaagactcgggctgaccgtaaacgtcgcgatgtcaattttgaggttggtgaccaagtatatgtgaagctacgtccgtaccgccaacgaaccatggccaaacgaccaagtgagaagctgtctccccgttttttcggcccctctccggtcctagctcgtgtcggaccaacaacctattgacttcaattacccctcgagtctatgattcatctcgttttccatgtgtcattacttcgagctgctttgggtccccagcaacaagcctttcctctcccttcagtctcacttatgatctggaatggctgctcaaaccagaaactttgttggccatttgccttggcactcacaaacaagtcctcgagctttgattaaatggaagaacctcctagaatttgaagctacttgggaagatttctcagtcatcctcaatttcctcatttccaccttgagga

SEQ ID NO: 254992 - DNA, 1481 bp, Cannabis indica
gagtttcttgatcaatgatgtaagtgtctcgtttaggctagagtcaaataaatcattagttgaatatagttgtcagctcatctaaaatggacattattttagcaatttttattcgatcaaaatagaatttgacgttgtcccgtttaggcgagagtcaaggtcattctcattttatgagtttcgaccattgtttcatactttgtaaatcctattttgagcaatcaatattgggcgatcgttacttaaaataaaagattttacttatctttcgatattttacggtattaaattggtaatagatgaagctctattagggatgaatctcattaaaacaagaaccatgtataatggagattgaatacccttgacctaaagcttattattttaaagaattgtattttcatttgatatctattttaatctatttattttaatattcatatatttatttaattaaaattactaatttttgataaatctaaaaataaataataatttaatatttataaacttataccttaggtagatctgaaaataaataaaatttatttttcatatttagtattaatttttaataaatattatgaaaattacttaatttaagttggctcaaaattaattaaaattaattttcaactcaaatctaattttctataaatatatataatcacaattcgaaatccaaagtatttaaaatatattttctaactttattaatataaaataaaataaatgtttaataaattattctaattcatgttggtctaaaattaattaataaattaattttcaacatgaatataattttctcatttaattaaaattcttgaaaatatctaatattttaagtatcttgaattaaaccaacttaaatattaatttttatttaattaaatacatctaaaaaatacaaaatagtctacttagaaaataaccatatagatatttcataaactaaatgttgattttctaatataatatattttagactatttattttaattaatcattaataaaaattacttgatttaagttgatcataaaattaattaatatataattagttttcatctttaatctaattttcaaaaatagattttcaaaattttatatttaaaaaataaatgtatttcaaaaaattacataaaaataattattaaaataaaatataatattgctcaaaaaaaaatataatatattttaaaaactattctaatttaagttgatctgaaaaaaaaaatccaacttaaatataatgttgtatttaattaaatgtattaaaatagaaacaaataattaagtatcttgaataaaacaacttaattattaattctagtttaatatctaaaaaaaaattctgatttaagttggtctaaaaattaattaaaattaatagtttaacttaaatatatatttttacttaattaaatattagaaaatttaaattagttactagaaattactatctagaatttatttca

SEQ ID NO: 254993 - DNA, 737 bp, Cannabis indica
atataattaatgttatttatattcctcgctatggggcttgttgttagtcttgctatatatactctcaactcgagcaaacgtgcgaggtcgtgccttatatatataaattgtgcgtattatattaatggaaaatttaatttataatacacctttaaaaaaattcacccatacttttatttgttttttaaataatattttagtcaatattttgtaatgatgacgtgtattataattatcagatattgtaaaagatcataacttacacaaaaataaaaaggttagacgaaacttttgatagatcctaaaataagtaaagagtgcattaataaatttctttgaagtcaatgcattataatctatattataatatgttttatagtcaaacctatattataatatgttttatagtcatatatgctgtcatttcatgttaccgtattttattgaatacgcaagtaacgtgggtattatgattatcaaaaaatttcttcattaaatttattttattcatattacaagaaatatatatatattttttttagtgatataaatcacactatgcagtcgttacaaagaaaaattttcaattaataaactgttatactcgaaattcggctggagaatacgtgttaaagtaaagggaatgtgaatcggtgcaatatttttttgtggaataactcattaattgtgcaagtattagagtatatttgtaatcggctgactgaaaggtcttaggc

SEQ ID NO: 254994 - DNA, 2130 bp, Cannabis indica
aaatttgtaccaaaaaatcttaattttcttcatcgcatatttataataattaattaaaagtgaaaagcgatacatactcttccatctcgaacagatacaacgcaacttgatcactcgagcctaagttcagaagaaccacattgctttccaattagtatacaaagctttgtttggttggcgtgaaacaggaggatagcaggaaaagaaaactgatgagatctgcggaaatttgagaacaagaaatgaaaatggtgattgtgattgtgttttagctgagaatcccgggaaccaaacagaaaaaagaaaagaattgggagtcaaatgtgaagccacaagagtcaaaagacagataaggaattgaaatgaagattgagattggatccaatccaaaccaaatactcttctttctttcttttagttatttatgaatttttacaccacttaatcaaatttctaatttttttaggtggggaatttatgttttttttttcaaaactactatatttttttaagttttatactgtactgtgttaaatttttacagttgttccatagttattttttagttgtttctttaattgtttaattttgttgttttacagttgtgacagtaaaattgtaaacttttatttaaaataattttttataagggatattaacgtcaaaactacctaaactctaggcttagtgacacttaaccacataatcgatttttttgtggtaaaatctttcaaacttcacttctgttagctatttacccttgtccttcaaaagaatttattaggtgtcatagtagacatgtcacagtgtacacaagtgtacacgtagcaaatttttagtggggatattaattgcaaaactacttgaactctatgattagtatcacttaaccacataagctgcgtttttggtactagaaccctccaaacttcaattatgttagctatttacacattccgttcaaaaaaaatctgttaagtgctctaggactggaaccatcagatttcttcttctcatgttcattcttcttcttttgcaatgaatccaccaggccatgacaaacctagggacgaatcagcaaacccctccagttgtggtaatatccgcaaagatttgtgggagagggagaattagatccggtgaggtcgaggcgagaaagagaaactccaaagaagggttgggtctcgaggcttaaagagggttgggtttgtgaggtcatgacgtcagttttgtggttcgtttatgttgaaggtggtcgaagatgacttgtcagagctgtgcgagaaggtgaacgagaaagatcgagggagtgcgagtggaaattaggattacagggagaaaaatgtaaaagaaagagaaaaataggaaaagagaatttttttttaaaaattatttttatagtttttaaatcattttttaaaatatttaatcaattaaaattatgtggactactaaaaatttaccatgtgtacacttgtgtacgctgtgacatgtccatcattgcacttaatagagttttttagacagaagagataaataactaacagaagtgaggtttggagagttttaccaccaaaaaaatcgatttatgtgattaagtgccactaatcatagagttcaggtaattttttctccaatatcctttactaaattttttccacgtggcatgtctaccgtagcacttaacaaaaccttttgaacgaaatggataaataactaacagaagtgaacttaatttatgtagttaagtgtcactaatcataaataatagagagagttgccgccaaaaatccttttattataattattaaattaaattatatttatttagttttttgagaataaattatatttgagttaataataataataataataataataataataataatgagagttttttattttgcacttcaaagtagttttttttttgtgcatttttacggaattctacatggaaactccaattgcaactagcgctgcaacctaaatcacaacaaaaaatcgtatataaacttatattgcaattaaagctgcaaccactttagaaactaaatcgtaaatttaaaaaagaaaaaaaataaaaaaaacagtaaatgggtaatcccctaataataataataataa

SEQ ID NO: 254995 - DNA, 812 bp, Cannabis indica
gttgacaaaatgacaacctgagcgctgggcctagtgcaagtgtcaacctgggtgcttggtccagtttctagccaccaaataactctgtttgattcccaagaacacttgtagcttaatcttttatcaaaataatattccttgaagacttcttacaaaaacttcttggaaaaggcccaagctgacaaagtgtgaacttgggcgctagttcctagttttgacccccaaacgaccttgtttgtttctcaaaagaactcaaatcttaattattgatgagaatggagaatatgctcggaagacttctcctaaactgcttatgaaagtgggccaggttgacaatgtttcaacttgggcgtgaggcctagggccaaggtcaacctgtgtgttaggtccctattttggcctccaagtcaattctttttcccacaaaagttcttgtttctatgttttggatgaagatgaagaaaattcttaggatggttcttcattattgtggttggaaacaccctaggttgacaatatgttaacctatgcgctaggtgcttgaggcacctggtgcttcgactcctcataactgaaagtgctgcgattctaattttatttcctcaaatatgtttgtcacaggtctaattcatgtcccatacaaagtttgacccatttgcattaagataacctaagaaccaaaacttagtagggttgtcaaccttggtgctaggcacccgggttggaaacaatttagcaagatccaaacatgtaagaacttattttaccaggatctgaattttctaacatgtatgttgattatataactataa

SEQ ID NO: 254996 - DNA, 649 bp, Cannabis indica
attataaatttctcttttatatacacgttagatatgagttttttttaaaaaagtatttagttatattaagttttaacttttgaaattataaataatttatagagaaatttacattatgtactataaattttaaactgttgacaaatatactattagacaatatattaataatgtgtaacatttacttttatattgtatttctttcttaaaattttattttctactattgagtgacatttgtctcgtcagtgttagcatcagctttttagaaaaaaaaataatttaggctgagaacatattatatctctttcacacacagagcttagttgttcctgttctcttctccataatcattgcagtttcttcttgttcttcttaacattttattttttctcttgtttttataatttgatccacatttattgtgttgtttgtgattgccaacggttgctaagttggttatcacctttttggatcaattttttcttttctttttttcaaaaatcatattctctctcattttttcctcctctgttggtgatttttacctataaatattattcctttggatcaatggttgttacacgtgttgggttttgtgccctaaataaaattcatttcaatataatcatatttactaattaataaa

SEQ ID NO: 254997 - DNA, 627 bp, Cannabis indica
atatttttatagacatcctaaccatgatattttcaaattcaaatttagttattttgtagaatattttattctttataaattataagttagaaaaatgatattttataacattttgctcatcagacatttataaataatatttaaaatatttaaataacttagatatttttgtaaaaaatttgaaaaatacttaatttaagacattttgacatataatttagaaaattatgatttgtttattattttattcttaaaaaatataatattaatcctaaaataataattacctaaccacatctattttaaaaattgtttattttattattttaattttattaatttataagattaaaaaataatattgaaaatatctaattggttattttcagaccatttatcttattaaatatttaatttaatttgatacaataatttaaataaacctaaatattttaaaaaataggttaactttgaaattttgaaaagatattttaggttgtttcaacaaccctaaattttcaaaatctagttggttagttaaagaagaatttaattatataagtaataaatatcttatatttgctacatggtattgtttgttttatataaatttttttttttaatttt

SEQ ID NO: 254998 - DNA, 1883 bp, Cannabis indica
catcctcacttgaaagaaaaccacgaagcatattggtgagcatggccattgaagtctctcttcacctagcagtagcacagcttagtatctacaagagcatccaacatatccagaagattatcaaaaccagaagttttattaacttataagtgaaattgtagatagcatgtctttcaaaatttctactaggtggcttaactgatcaacttgaatgtttactttttctaagagacatactttctcaatgattttgaaacattgttagcttatatttcaagtttgttgttcaaatttctaaatgcaacactaatttaaattagcggcatatactttttaaatggatgaataatttgtgtggttggatgattctttattgtatttgggatatttagttattttatttaatttagattataaaaaaacttataaatgaaagttttgataaactaagtgctcaagtaagttctaaacaaccctattttacaaatgaaatttataaatccttttagatctaaaatttagcctcatttatttgtaaaaaaaaaaaaatcatttagtaacacataaaagtaattatatatgtaacttaatcattaaaatagataaatttagaaaggatcataaattagtagtactacactttttcttacaaggagaaagtcctaaatttcattttctcttttgatatgtaaaaataagacatagacattttttaaaattaataacatatcagaataataatattctcaaatgtacataattttagggaaaataatataattattgttaatcatttatccaaagtgattaatacaattttgatgaaaaattgtaacagaatagaacacatcttgatcattcatctagctaaaatgtgggatcatatcatatataaattacttacccttaagtataaaaatcaatatctattttagaagagaatagtgcaatttttttttaatgataaccttattatttaatttttaatacattgtacaacaagggaaacacatgatatgggttttgtgtgtcttttatgtcttttggtgcccctgcaagaatatgacattacaaataatcgtcgttgcaaatctaaaaaacagccaatattttgtgtcttttgattgtggctgcgttttcagctctacaacaccataactttttcatacattcatttcacctaccactaatctatctatttggcctttttcttgatgttaaaaaataaaagagttcggatatgtgggtcataaacattttcttcaaccaccttctcttcttcaattatttgtactcttttcttttatttcttcagaaaagccctcactttagctgatatggtgaaatggtataaggtataataattctactctatgagagtgacttgtaattgtactagtactactactacttcttaggtggcacttgaggattcagtgtttaatttcatgctccctactctcctgcatgtatcataattggtacccatacccaaatatgaccatatcattttcaaactgaattgggttttcggtcctaaatattttacacacagtaaaattagaatactagctgttatttaatttaaccaaaaaaaaaaaaaaacagagagcaaacaaagagaagaaaacaaaatagtagagtagcatgaaatagaacgccataagattcaagaggagctatctacggcacccctaaagagggttaaaaaccaataagaagattcccaataaaattaaaccaatcatttttatcacataaaaaaactatataaattacttattaatatatatttgttttccaaccttaacttactcttttttttaaaaaaaaaaacgatgctaagggtgcacattttactcaatatatttgtaatatgtaat

SEQ ID NO: 254999 - DNA, 473 bp, Cannabis indica
tccagagtcggggctggggtctaggtctagatcctgggtcaggttctgggccgagtctaggttcgggtcgggtttagagtttggggccggattcgggtccgagtccaggtatgggtctgaggtccgagtttggggtctaggccgaggtcggggtcctagtccggggtcatggtcccagtctggagtctaggtttgggtcttgggctagattctgggctcgtggtctaggtccaggtcgggtcagagtctggggccgagttcggggtctgggttcagggtcgcggtctgagtcttgggccagggtcaaggtctggctgcgaatccaggttctaaggtccaagttgaggtcaaagtcaaaaatattgattaagaaagaataaaaaacgtatttgaaaattttttaaaagtgatttcttttctttattttcaaaatgttgattttcaataaacaaattaaaaagtaaaaaacagtt

SEQ ID NO: 255000 - DNA, 903 bp, Cannabis indica
ttagtatatgtgtctcgcacgtaacttttcgctagttatataaatatatacttttaaaaaataattttagttaggtactttactatcaatataatattaattaatataaagtatcaaattttatttctctctcttaattgatggctatgctccattttcgttctctctttctctctcttccattgtcaccgaatctctctctttctctctttatggcaacatttactttataccctattataagaaactaagtaatatagtcgatattcgcgcggttattttaacccattttaaaattataataaaaaaatttagtaacttaaacaaaatatataatattaataaaatgttaatattaataaaatgttaatattttttttatagtaaataaataaaattattaatagtgtgctatgtgcttggttctaatcccccattgcacattcttgaaggctttgctaacagaatctggaatggtaaaattgatagagttaagctcttatcacatggtatctttatcattcgatttcatagtcttactgttagagatgagatattaaatggagggtacatattcttcaacaaaaggctggtgattatgaaaccttgggaccccaataccaatttcagaaaggaggacataagaactgttcctatttgggtgcacttggaggagttggaactcaaatattggggacaaagaagcttgttcaagatcattgggcaaataggcaaacccgttatgattgatgccgtgaccaaagaaagagaacgattgaattaccctcgaatactcattgaagttagtatgaaccaagaactccctgcaacggtggaatttgaagatgaaaatggctgcaatgttttagttggggtccattatgaatggaaaccagtcacttg

SEQ ID NO: 255001 - DNA, 786 bp, Cannabis indica
gtcttctgccactggtggtggtgagtgtggggattttccatcgatttctttgagctaattttttgagagaaaaccgtgaagatggctaaaagtgagaaagaagaatggaaggagaaaaataattaattattttatttttttatttaatttttatgtatgtaaaagtactacctaaaactcacacacaaaattatttcccttgttaatacttcatttaatcaataaactccacggagtctttttaagatgtcttataataaaaaactcttataacatattatatatttttgtaagttaaatgatatatatttcttttaataatcaatgaccacgattttttatttcaattcactccaactatatatactgataatatctatataattaatttaccaaaagaaaatatatatataattaagaaggttgaggagagaaaactgtaaacataaacgaatgaaaagaattctctgtattgattatgagaagctagaacaaatgatttatatacaagagaagagaaagcagaggaaaagaaaacagaaccacacaactaacagaaagttgttacagtgaatttgaatacagagaaaataacagaaagttagttgagaggattaactaactcttctactcttaacagcccccctaaaatgaagtgtcctctgggcaagagacactgaatttgcttctcaatacttgaaaccgattacttgagatgggctttgtgaggcagtctgcaatctggtgctcagtaggaacatgctgcacttgaatttccttgttaag

SEQ ID NO: 255002 - DNA, 2209 bp, Cannabis indica
cctttatctccttatttgttactcttctgtgagaaatcattttctttgttgatctctcttgtagaagcaagacctgaacagatggggtttaggtattcttgatcaggccacttgtaactcacttgtttttttgcaaatgatagtcttgtgttttgtagggttaatcgaggtgatactgaaactattaagcatatccttctaatttatgaggctacctctagtcagaagattaactttgagaagtttgttatcgcctttagtctgactgtgaactaggaagatcgagatagggtcttacaagtattggtgttgatatcagtagctacccatagtaagtatttgggcttgcctcggtgattggtagaaataaaaagtggatgttcgaggggatctgtcagaaggtcaggaagcgtgttcaagggtggaagcgaagtttcatttctactattgagagagaggtacttatcaaatcaatttttcaagctattccaacttttgatgagtgtttttaagcttcttattgcaacttatgaaaaattgaagtctattgtatgacaattctggtggggctcgtatagcgatcaaaggaaaattctgtgggtaagaacggaaaacggtgtgtcagcctaaggcgatgggcggacttgggttttagaattttgaactttataaagctcttttggctaaacaagtatggagattacttccatacccaaaatcattgcctactcaaattttgaaacataaatattttccaaattcctctatcgtagaagccacttgaagggatggttcatctcatcttaggtttagtttgatttgggaattggatttgcttaaatgtggtcttcagagatccattggagatggaacgtatgtttgggcattcaaagacccatggctccaacatttgaggtcttttcagccaatcatgaggaggataatgataattgtcgggggagtgaatttattcttccatctggtacataggatgtggggaagcttccacaagtttttttgtccatggatgtggacataattctgtctattcaattagtgaggccagaggtagaggatggttggtgctgacactatgatcgggatggagtttataatgttaagagtggctacacgctggcgtggtcgctttagattgatgagagagtagtatacttatcctagttgattcattggttgaatggagtatagaatcttgctatgacaccaaaggtgaaaggttttatttggtttatgttctagttgaagttaccagtagatacacaacttatctcccagaaaattaaggtaactctttgtagttcacggtgtggagaagaatctaaaactctagaacatgctttattttcctgctctagtctgattccaatgtggcatcaattgggggtatggtcggtgctctgtcgatgtgtacatggaccaatgccaaaaattatcctctttctccttgaaaaattatctcgtgaggcttttgaattgatgatgattaccttatggttgctttggtatgattaaaactcaatattgtttggtaatatgcagtcaagattagatgttgttccaaattttttccataatcacttgtcaaaatttaaagagcatgtttggcagggtcttcatttaggattgtgcctttcaaaccaagctgaaaaacgaccttcttggtggatgtcaccgcctcctaattcctttgctcttgcgactgatgcttcagtggttcctgggaggggctttgtcagattgggttgaatgatacgggatgttgcggtgtggtttggttggcttggtcatctggtgttttaagttatttttttgttaatgtgacggagcttcttataattagacggggcctgacttttgcaaattaatttggtttcagtatttctattattactagtgattctactgtgacaattagttggattaataatctttactcaaattttatttttcaatctactatattagatattaattcttattagcttctattgatggtagtttttgcagtgccgttttgcgatttacgaatggtgttgcccacaccattgcaacctctattacaagtttagtagagtgtgtatgaacggatgtttgtccacaaattttgaattcttctgtagcaaatgttagactttttatttggccttacattaaattttattgattttattaaaacttgggttgattg

SEQ ID NO: 255003 - DNA, 1196 bp, Cannabis indica
ttaggttgttaatccaacatacatgatagtaaatagatcctggtaaaataatttccaacaattaccacctgtatgattaccacaaataccaccgtgtttttctcgaagaatgtagtcgtattcatccccatcgatgtatttaagcaacggttggctaaaaccttctgcgatagaatttgtcgtcataaattacatatcgagcagctcgatatcgtaatcttttagcttcaagcttatctttagggagtgcgccaatttttaaataggcaacaattagggtcatccaagcgacatgttcaataacatcgatctgcatagtttcttcgcgattaattgttggatgagccaacacatcaataggaattacatcgagtaattctgcttctcttattgaggccaaacgggccaaagtatctgcatgagaattataagcacgaggtattctactaagaataacttttttgcatttagacaacaactcacaagtataagagaggtacttcaccaagcgtcctcctctggccaaatattcaccattgacctgacaaaccatgatttgggaatcgctgaatgcttcgaggtactcgactttcatttcaagagcaagttttaaacctgcgattagagtttcgtattcggcttcgttgttcgaggtaaggaattcaaacattaaagcagcatgtactttaaatttgttaggacttatcaatatcaattcccccacctgaaccttcactattcgattccccatctacatacaaggtccgtccttctcctgatgggtacctcaagatcgactcgttcctctatgatgatagatacgtacctgtgtgagtaattacttgcaatagatacgtacacttgcgtagactataatttttagcaacattgggcacccttgggtgtgggtcccggtaccaagtagttggttaatgttttcatagacttccttgatgtatcatgagaccctcaaatattatatctcaatctcatttggttctctcgagtcttggtcaaatttttaggtttgacttttttaatttctcgtaaattgggtataacatttgcctactaaaaaattaggagggtttgcattttggttctccaaggggagaacgttgtaaatgagaaaaaaaaagggcaaaaaagaaagaaaaaatttgtattttttaaatgatatattttttattttaaat

SEQ ID NO: 255004 - DNA, 570 bp, Cannabis indica
tatttttttgtcttttgtattttatttttcataaatgatctttgtactatttttttaaaaataattttttgtactattattgctatgtgccaccttaaactgctcaatactataccgattaacatacacaataattaattagcaattttctaaatcttttttttttatatactatttgatacttgttattggcacttaaggtgttcaatgtcataccgatgtggtacctaataattagttattaattttttttatcttttgtgttttattttttatgaatgatctttgtactattttttttaaataatttttatactattattgctatgtgacaccctaaggtgcggaatactataccgattcacacacacaataattggttagtaattttctaaatcatattaaattaaaatttatacaaactaaaatgcactaataactagatgttaccttttgtagtacttgtttacaattttttttacaacaacttctctgatttttttatttataattttttggtacaattttttgttggtgaattattttaattatttttaatagaatattatt

SEQ ID NO: 255005 - DNA, 559 bp, Cannabis indica
acattccactaacccctactaacagacaaagaaatcgcatgaagaactgcataagtcttgacctacatattactagaaaccatgtactgaacaatcaaagctttaacaacttcaccctactggttgatgaccatccatgacaaccataactcctctaacaactgcatccacgaagatattaaaactctcccaagggtttgcaaatattatttaccctaacaaaattgaaagaattgtcaaaaatgtgtttgactaagagttgaagtctttgttaactgttaaccacttgaggctagctcaagtgaccataggtgggtgggtgtgttggaggtcttgagttcgagtttcaagtaaaacatgattgtaatatataaacgcttaaataaaaaaaaagagttgaagtctttgtttattttcattcatgtctcttgtgataagggaaagtttgtaatcgactaagttgaataatctcagtaagttttttttttttttaatggtactaatcttgacaaatatacacgggctcactaagatcggattgagaaaattgtacaatttt

SEQ ID NO: 255006 - DNA, 849 bp, Cannabis indica
attcagtcccaagattccaaaatctggatccaaaattctagaaaatctacccgatgtgcacccctaccaacaacttctctactctatctttaaaatacattactaaaattttactttattaattttacagcacattttatattacaccatacatcagcactacaacatattaccctattagcggcggaccattctaccgctaataacctcccattcggccgcaataggctatcagcggcgaaagtcccccgctaaaggtctgccgctaatactattattagcggcagaattgggctccgccactaataataatacgaaattgcagagagcattagcggcagggtcctaccgctaatggtccgccgcaaatatcatttaaaaataaaaaataataataattttataaataatattatataaatatataaataaataattaatgattatataaataattaattataaatatataaataataatttaaatataattaatcaaattaccaataatataatttaaatccaataaaagtattttaaaaaaatttaacccgcccaattagcggcggacattgggatccgccgctaataccaccattattagcggcggattttatccatcgctaatttgtccgccgctaattaggaaatttgttgtagtgcaacttctctaaaataataatcaaaacctcactttttttaaattttaatatattttattcatttcaaatgtatactattattaatatatacacatatatatcttcataaaaaaataattattaaaactcaaaataataaataaaataatattattagcaatgagtagtattctataaatatagagca

SEQ ID NO: 255007 - DNA, 568 bp, Cannabis indica
aaccttatttcgattgcagttctactgttcaaacatggtaaaatcattttatctttgattcaattttaagatacaaggaacaacctagtggtttctattagtttaacatttagaaacaacctagtggtttctagtatttcctttacatgctggaatatgaatattttgctgctgtggtcttataaacgagtttcaagtctctgtttccaagtaactttcgataatattttcttctgtctcttgtacctgcaggaagctcctgccattgtcaagtcttattatgacaagagaatagttggttgcccaggaggtgaagggggtgagtggcacacttggttgttttaatgtgtttgtgtgtacttccacgtaacttattcaatttaagagaaatgatatcaggtgatttctctaaattcgtagttgtgatttctgtcatttattattatacagaggatgagcatgatatagtctggttttggctggagaagggcaagtcacatgaatgtccagtttgcacacagtatttcgaggtaacaatttaaagcctttcttctactctctctctctc

SEQ ID NO: 255008 - DNA, 765 bp, Cannabis indica
attaagtatcggatctcatataacttaagaaaataacttttagagaatatcgctaaccaataatagagtgccaccaatagaaggtgttgggcaccactggtacctaatagcaatgccctaaattaaattatgtaaaatccaacacttaattacttcaataaataattccaaataccacggatgtcttttaacattttttttttatgaatcaacttttgcttcattacttcaataatccattttacaatcaaagagtatcccaacaaagggacctcacatattaatcacctgctttgtacattttatatctattgtgaaaaattatttttacaactataagtttctgaaccaagccaagtcctttgccccaacctgtctcggccaaacgctgtagattctgtgtctcaccatttctttgactgtacaacttactctatctatatcctcatcttttccattccatactttgtcattcctagcctttcatatgtgatagactaagcttgccattacagccgagagagtgtgttttttgaatttgctacattttcttcttttaacattttttttattaggaatgtaacttcttacaaaaatcatagttttagccctaatgtaagccttgctaagctatgagctttgacatttgctatccttactgtgttgataattgatataatgggagaatgagaaaataagattttaatacaataaattacacccgtaagagtagacaaattaacataggaagaatttactctttct

SEQ ID NO: 255009 - DNA, 1062 bp, Cannabis indica
ccgtgagctgtggtgtttatagaccgagggatgtaatggacgaaagcacctagaaaagatgacaaagaggagactatcattgcaacaagacccgagagggctaaacgatctggagagaacttctgaatacgatgcaccaaattctggcagtcggaggcaataacagcaataggaaaacggactgcttgccaccaaagtaatgctcggttgagagcttcagcttcagcataaaatggagggaggcctgaatgtgaaggagccataaaggtggcaatgacattaccacgagaattagttacagcagcaccgtacccatgcttattggaagagtgagaaagggctgcatccacagaaagctgaaaacattgttcttgggacttgtattcttgtagaagactgatggaaggtgggaggcgatatggatatgcggttctgagcatccctgtattcctgcaaatacaactgacagaattctccaaactgaaatcagtggtactgttagaatggaatatggctctgtttctattattccaaatggcccaaattaaacccaaaaaagaagaaaattgatctttgtcaagacattcaaaacctctgagcaagaattccttaatatcacaatttctattattaaaataaaactgatgaaaagatgagtttttccaacatttacctgccctggaacattgaataagggagtgagtgttggagtcatgatgagagtggcaaatggagcaataaggggaggatatagacttacgatgaaagagattaagattggagggaagaatgtggttgaacgctttccaaacaaagtgtttaattttaggagagatattagaggaccaaaccgaggtccaccaacgtttataggtagcaggattgaaaggaccgggagatgagaaggttgaatttgccaaatgataagcagagttaacagtgaaataacccgaatggtgatgactccagatgagagtatcatgattacacatctgctcgtcaaaataaaaacggagtttagaaaggtcccaatgtcggtcttcagtaaggaaaaaagagaca

SEQ ID NO: 255010 - DNA, 813 bp, Cannabis indica
cttaaccacgttactcaattctctagtaaaatatactacctcgtgagcaaattgtggatccgataacttcagaatttggctatgtctacgaggtacatttagatctgtcttgaaattatctttccaatgcaagttatataggtcatttggataaaaattgagagttatgccgaatttattgaagacagtttatgctatcttgtaccaattgcgaccactggcatgccaaatggtagtgttcggctatgcatgttctcggactgctgagggtatattttgacttggtttttgatagtcatattttgggggtcttgggccttgaaacctcatttcgacgtctgaaaccctaacgggaggccactgccacccgttggagttggaaagtggtattggtcgcataaggggcttatgaagccttgagtgatttttctcacttttatttggtacatagatgttagaaatacaacttggccaataaaattcctttccttatgtagtggccgatcattgccattcctttgttgtagtgctcttcaaagttgaagagcattgccatttccatatggtagtggtcggctagggttggtcctaggtgggaaatagtttctttcacttgttttgcacttcttaatgttggcggaacacatttggacaattttcctttcatggtttgtacgaagtgaccagtgccattcctttgtggcagtgctcttcaaaattgaagggcattgccatttccctatggcagtgctctttaaaattgaagagcactgccatttacaaattgcagtgggcgcatatgccttgttcctt

SEQ ID NO: 255011 - DNA, 987 bp, Cannabis indica
atttttttttttaaatattagagtgtaattatcattttgtggagtacaaatataatttttttttaaaccatcgataaagtaatctttagtaaatataattagttaaaagaatatagcacgtaaatgaacaatgtcgtgtaaaaataataaatactattttgaatctgtgttttgtaaaagttatcgattagactacttgttttttttaattgacaaaatggacgctgtattttttaaaatagtaaaaataggatcctgaacttaatgcttgataattttttttaatataaccaacttaaaaacaatttctaatacgaacgaatacagaaaatataaatagtttagtcatagcacttttagatcggattataattaaattttattttgataaaaaaaaaatcaatttaagatcttatttatactattttaaaaaatatagaatttattttataatttaataaaacagaaaatctaatcgaaaatgatattttcctttaaaaaaaaaaacattatgagaaaaaaagtgtgatttttttgtgaatgtgatcacaaagtgtctttttcctaaaagttattcgagaaaactctaccccataaacacgacaactatttataccaagacctctttatctagttatccacacgtggcagcctttacaatgacatgcatgcattaatttactattttaaccttagacccaattttacaaccacttgttataattacccaaagtactatacattaatacaaattggtcctcttaattcctaatcgatcgattttgacatttaagagatttttctatgtttaatttttttttaagggattttttacaaaaaaaaaaaaaaaaactaaaatatcagtgcaatgtttgacttcaataactaaaaaattaattttagttaaactttaaaaaactaaaaaatttatttttagttagtaatttaaaaaaactaaaaaaattagtttttaaagtaaaaactaaa

SEQ ID NO: 255012 - DNA, 576 bp, Cannabis indica
ctagatgcaatgcaaataatctgttttgtgatatccgattaagttctttgcactccattccattcatagagaaggagtttgttctgagttacatttgattagcttcacgctttcccaagttttcaaaatattttattgctccaaattaagttggaatttttttggatacaaccaatgaatataatgtatgtacaattccatgaataggaaattagttgccactatttctcaaatctccattttacaccggtgttttccttttggggggccacaccccttcttttcctctaatacatacaagggagtgttccttctcttgcatttactctgaaacacaagatgctttgaagtttgaagtactttttaatctgacatctttttgtctttaaaactacacttgggactggattaatacgatgttatgccttaattcttggatggaggtgctttatgattttccttctatttgtcatattgtacattactcatatgattaaataataagttatcctaattttaactatctagtttgattgctaaacccgctacactggtcctattgttttcacagtgatg

SEQ ID NO: 255013 - DNA, 890 bp, Cannabis indica
agataattttttttaagataattcctaatatgaacacatatagaaaatttaatgagctttgttatacatctcggattatttttaagttttatttttgagaaatctattttaccattttaaaaaatacatggtgtattttattatttaacaaaataaaaaatttaatctgtaacttttacaaaatataacatccaaaataatatttactcttctataaattattaacactatctttttaattgtgactattttctatttaaaaagtaactatttttaattcaattttacaatattttatggatcatatacttactagagtttttttttctcctataatttgtgataatgtgaaagtacctttttgaaattgagggtgattatataataagaatatgagagattttctccaaaaaccaatagaatttataaagatgcatgattcagattttacacatctcctgtataacatatagctattattgtgtttaaggaacttattaccatgaaagtaattccagtgtaagacagaaccctctttcccccattcgccttcatgtagatcacaactctgaattaaatccttagaagcacccggaaagtggtgaggtctatgtttcaacaattcataaaactttggaggagacgtcttggactctacatcaatctctagtttgccgcatagatcagccgacatcttttctgttcaagatttatattataatatatttggtaatatatatgaagaaaatctgtatatgttgagatgagagtatgagttcgggaaattaatacccttttatagaagagaaccggcaggtagccaagcgtgtttgattacataaattaataatgtggcatgtatcgttatcatcaatatgtatattaatttt

SEQ ID NO: 255014 - DNA, 880 bp, Cannabis indica
attagcggcggggtcccgccgctattaatagtattagcggcggaaccctgttttggtccgctaatactattaatagcggccaagcattagcggcggaccaatagcggccgaagtccgccgctaataccctttagcggccaggagatagggtattagcggcggagtggtccgccgctaatgctgttgaatgttgtagtgtcgtgcggtgaaggaagttcttattaaatcaattgttcaatctcttccaacctatacaatgaatgtgtttcttattcttgtagcgatttgtcaggacattgagagaaccattaccaagttttggtggaggtcgaacaagaataaaggcatacactggctaaactgggacaagctcacgaaacaaaagagtaagggtggcatgggatttcgagatttaagggacttcaatttagctctactagctaagcaaggatggaggcttttgacttgtggtgatagcttgatggggcaaatttttagagctagatacttttcttcatggtcttttcttacatcgacgttggggagtaacccaagttatatttggagaagtgtgtttgaggctaaggagttggttcggactggggttcagagatttgtgggtgatggttctagcatcaatattctgtctgagccttggcttcctgatgagatgaacccgttcattgaatctgtccatcctggactggtggggaaggttgttgactcttcgatgaaagttggtctggttgaatgggatggggaagttttagctgatgtgctcaatgctagagatcaagctttggtgtggaaaattgtaacgccccaatattttgccttattttacaaaatactaattttgatgcattaattaaaaagattc

SEQ ID NO: 255015 - DNA, 595 bp, Cannabis indica
tttttttgctgctgatgcttctcgaaagcatgttgatatgtcaaattctcatccctgtgttcaagcagcttatgcccctaattctcaccatcaaaatgatcatgaaacaccagaaactaatacaccagcaccagattttcacacatcaaaacctgatcccagtttttcctctccttccacatctgatcctattcatggttctgatgtgattgacattccaaaaccggctgttcacaccagacctataagaaacattaaaagaccttatttacaagattatcattgttttttatcaactaacaatgttcaatctcaggtctcaaaagtttctacagatcaccctatttctgcaatggttgattacagcaggctttctcctaagtttcgtgccctggtgcttgctatttccagccactttgagcctcagttttatcatcaagctaaagggattttagtttgggataaagctatgaatactgagataacagctcttaaatccaatgaaacttggatcattgttagtcttccagctggacatcatgttattgggtgcaaatgtgtaacaccctaactagcataggcgtattacgtgatt

SEQ ID NO: 255016 - DNA, 3945 bp, Cannabis indica
actctaagtccactaaaggacaaaaatacaaatcgggaaaaatgatcattttgcccctccacactacaataacataaaagggtactaaggggtattttgggaaaactctaaatttccgacattcccaatgtctaaataaattgccccaatataccaaaatactaaattgtgattcaactgagccatacaccgtattccatgttgccgggcaccgaaaattcaaaattatgaaatttcgctatatgacataaaaatgcattcagaattcaaatataacaacataaataatataattttcataattaaatcttatttaattgctaatttccaaattaaactaagcggtcgttacactaaatttagtagctggttgttgagtggtaacctagtaggcccttcttgtcaatatggtggcctccctagaacgattgtcaatggctgcctactatgccctcataatttccatctcccagtccctccactccatgaattgacatctttactcctcaaatgcaaggtttatggctactcggagctccttctgatcatgacgcaaagtgttattttggccttgcatgagcccaagtgcttctcgcagattttggagttcagtgtcatctccagctggcctttgagtattagtagtggatgggacctcagtgctgggagtggtttgattggcggccatactggcgttccagtctcctatacacctggtgtgaacccaaccagaggggaagtcactctatggcctaccgtagcaggttgtgtattaacttgttcagggtttgtccctagtggtcctcttgtgtttctaggagtttgcgatttggatctatcatcattgggtcgctctgatcagtaaggcctccccttcgagtctgtacaaccatcctgttaacttgtcaagactaagacaaaagcttgtgtttttgctctcagtgaaagtaccaaaatgttgacctcgcttctagccaacgacaatgagtcaaaagaaagcgattaaagaagataaatagaagaaatcaaaaacagtaaaataaaaagaacacaagattttaaagaggttcagccccgtgagaatgataatagcctacttcccttgtatttgtattgacttgagagaacgaataaagtatttttcctctcgaaagctcttacaatggatctctgagttattttctctcttagatcactattctctcttgaatgtgtttctggatcaattcttcgtccccttccatagtgaggtcatgccactatttataagggcttaatacgtgaagaatggttttccttaatctataatgaataaaataggaaactacattaattccataactacaatataaagcataggaaactaaagtatgttgcatctattctctgactcaatcctaagattataatgattgtcttcgtgtcctggaagcgacgaggctgatctctggaattcccaacttacatgctttgttcggcataaatatgtctacatctttgtcggacatcttcttaactatcttgttcagatatctgagtgttacagatgttaagattaaccattagtgggctgctaggaatacttccctccgcctaggtagcaaaaatgtaggatacgtttcatccattctcattgccacattaaggtgcaaaaaacaagataacataaatatttttatatattttaaaaattttgaaatttaatttgaaaaataattaaagtgacaaaataattttaattaactttagatcaatttaaattggattttttttatcaatgattaaaataagatattttttaaagaaaatacatattattttaaataatgagctttaataagagatattcgatgtccattgttggttttacatggttgttagttaataagaatctcaaggcgtttgtgattcccctaatggataatctccattaaaaaatgtaacaaagtaaatctcgaaagataagtattttataaatttctttctagtagactcatccctaaagatgacttcttagaaataatttataaacgcacaacctagtcacaatggtggaagctcataaaatatgaatgatcttgactctcacctaaacctgacaatgtcagtttcatattttgatcgaataaaaagttgttaaaatgtgttcattttagaagaactggccactctatttaacttatgatgtctttgactctcgcctaaataggacactatatatctattagttgaaaaccttgaaatataattgagatatgcatgtgtttaccgagatttttagaaactagttaattaggaattaagaaagtttaaaaatgataataatagacaagtgatttttatgtgttttaggcattaatgatccttagtccacgagtccgttgtaatagccttgccaacgagtgtttaaatattacaagtgtttacaatataagtattaactctgtattcctttcgtttctctcttaaagaagaaagatcataggaattttcgcagaggttctgtaagtaaaaatattcaccctttacacatgaaaaaataggggtatttataggcacatgtgtgggtgagggcatacccttcacccaggtagggttttgtattcaaaatgttacaatggctcataatacaacatggcaatccattcgttggttggtagggatcctcgacatcgctcggtgtatggctactgcaatccaatttatgggactaaggacacgtgccacccaaaggtttcaacttgcaaagttggtgtctagacaagccgtaggaaagaaagaagctgaagaagcacgtacacacactaccaaggtctaacttaggggacaagatctaatttggtgtgagaaggtgtgcaaccattgcctaaagctctgggtaacacacacttgtataggttctaggaacatttgaccgaggctctcccagacaagacactcctgctaacttatagcattctattaatgagaagtctatagtcctttctgtcttcgctaacaggaagagcctctgggcaacttttggtatataacaccttgtgtgacaccgaggggcagaagatatatactaaccaggaataaacttatgtggcatccttccatgatttccatgtacacagcatccgggaatacatgtaacatttacccctaagctctcatgactcatgagtgttgggagcttgcatctttcttctggatgcttgtcttaatcttctgacttgttgaccaagtgttggaatgtggaagaagtctttctcattgcctcgggcatttgaacggttagcacgttcggcggtattgctgtcaatttgctatagcatggtgcttatttactgtagccgtggggctcacactctgagtttaagcacatttctcgtgggaagcgggtgatgactggaattgaaaagtcgccaggcttctggtgcattggagatgtagccatgaaatgataagtaataaatactttattctctttctttagatacgttaaatgtaaaccttttgaatccctaattattggatggggtagcttcagattaatttaatcttgatcgtatattttgaaaatagtcaaagcactaccacccatataattaaagccttggcaattgaaatcacttttccttcccaccttaagcaacaatccagcacccagaaaactctctcagacaaactccttgaccagaaatctttgcacctactcacccctctgagccaaaacttagccctctctttttaacttctctatcgtgcttcctgctgttcatcacgtacccaaacaactagcttactgttggagcaaggcacgacctgatcaccaagcagtctgtagagtttcaaacaacgatgaacaaccatcttctcctccttttaattcgtctataagtaagtatttcttccactcaaactattatttttggatttgattgtgaaatatagtttcga

SEQ ID NO: 255017 - DNA, 634 bp, Cannabis indica
ataatacgactgcaacaaaatccataaattaaagtacttttgcttaatttttttaggaccatatatgtaataattgtaaatattaaaggaattttgccacaaatatccctaattaatatgatgagaagatttattaatttatgtttaacttgatgatcagatggaattgaatattgctttcttggcaaaagttacaggagatgattgcatctctgaacagtttacaaaggcttctctaatgagaaaaaaggcaatggaaattgttttttggaatgatgaaatgggacaatggtttgattattggctcaacaaaaactcttctcatcaggtttaattagtgtgtttattctatttattatgatgatttattagcttttaaacataactaatataattaagagcgaaattctcttaacatttataattgttacacatatgaccctaataaaaaaaatgacagtaaaaattataattttgttacagtcgtactcttttttggccattaagtgtcaagtctaaaatacgtggaaatatattattggactatatattaaataaactaaataaatatgtcgtcacatgtttttgaattaacacttaataatcaaaaaagagtatgcctgcaataatttta

SEQ ID NO: 255018 - DNA, 508 bp, Cannabis indica
gataatattgacttttataactataaaaaattggtcaaatataactatatggtatattttaggccaaatttaactcaaaattatacaccatctattggagatggtcttaagttttttgacaaaattttgttaccaaagttattcaaatacaaatataaatcaaattcagaataatataaggggtaaatagcggcataagtatccaaagttttgagtttgtaagtgacatagacccaaggattttttttagtggcataagtacccaatgtttataaaattgtaaatttttctctattttcgtcagtacagactccattttaaatttattaaaagaagatttggaactaactgatactacatatttccgtctagactaaataatctgggtcttatatgtgccctgtttaaaataataacaaagtctatacttgatgaaattagagaaaaattacagttttataaacactggggtacttatgccgctaaaaaaaatcattgggttaatgcc

SEQ ID NO: 255019 - DNA, 586 bp, Cannabis indica
cacccaggttgacattactatggtgtttttcaaaaaagattaagattcaactatttatggggatcaaacagaacttttgaaggaccagaactgggacctagcacccaggttgacacctggttctgggcccagcgcctaggttgacacttggcactgggcccagcgcctaggttgacacctggcagtagacccatcgcttaggttgacatattgtcaacatgggcattttccaatcaagttcttaaaaaattattccgggcattttttccgtcattacaaatcatgaagatttaagcaaactcggggagaaaatcacaaacgtgaaggcttggaagcagagccaaacgcccaggttgacctaggttgacaatcaacctggtgtgctggttttgatcattcaaatgccaaattagattcgaccattgaatctggaatggtcaaaaataaggtaggagacttcgtcttaagtttaagaaccttgaaagtatcaaaacgacaacccgagagctcagaaattaggtacccagcccccaggttgacaaatggcatggtgtgctgggttttacttgtccaattttgattccat

SEQ ID NO: 255020 - DNA, 977 bp, Cannabis indica
aaaattttaaaaaatttgaaaaagtttaacacaccaaaaactacgttcaaacaacgtgttgcacgcgtaactattttattctatacgcgtgtaaaatagactgtttgaatattattttctatattgtaaattattccgaatttctcaaaattttttaaaatatcttaaatagatataacgtacatgaatatgaaaaagaaatcagattaaaaaattcttctggatgccgaaacaaattaagagtgtatcagtacattctttttaagagggtgcattgtaggaatcaccctataacatatattattgactatttaatttatcttttgttttgtattataatgtagattataatataaatatacgttagttttcaatttttgtaaattacaaaaaaaaaatacatgtctctacggaaatgtacaaaaataatgtctactataattgcaccctatacgtaaatagggagaaaaagagtgcgctaggattcactcattaataagaaaaggttaagttttattgaaagattaaataatggaaaagtttatagtaggacactatttttgtctatataaattataactctttttatgatagtattcaaactaaatgttgatgcggctttggattcttcgaggagcaagattggaattggtgttattgttaggaattcagctggtcaggttattgcagcactgtctacaccagcaataggtaatttcaagtcgcaggaaatagaggctaaagcaatgtctgttggtctctcgtgggcacagaaatatcaacttcctatcgactttgtggaaactgattgcctaatacttgtcaatgctttgaatggctgtatttcacaacactcggggttttatgatctggtttttgatgttaaatttcatttgtccaatttctttaatgcttgttgttgagaatcatggggttccatctcaaaaccaattggcaatgagtggagtagtccatgt

SEQ ID NO: 255021 - DNA, 840 bp, Cannabis indica
gccaaaaaaagactttacaaaaaagacaaagaaagggaatattattatgagctataccctacagtcgttgacatggctaaagaacatgctgaaactaagaataagttggctgctcaggaggaattctcccattgaatggaagaaactttaattagaggtcagaattgagttaggagaagtggaacctgatgaaaatattcctaatgatcctggtccttaggaaaacaatgctacaaagaaaataaacccaaaagaccctgaaacatttgatcctgcaaaggataaaggaaaatgtgtcatgggagaaccaacaaaaaaaattactcccactactccacagagtgacacgattactgccaactgacctttacggaaaaagaaggcgatcaatgctccagagtaaagccacctgattaatctacaaggcatagttacgataagctaagtactaaggaacaaaggcctaccgctcagggaaggaaaaactgccctagtaatcttattaaccccagtgatggactagagtaatcctattaaccatagtgatagagtagatgagattcacccaattttagaaggtagtttttcaacaaatgacctccaggcacgtttagacacaaagaaagaacaagccagatgtgagaaggtgagacctaatggaaacgacctaaggaatcattttaatgatcgagtctgtgggtgtgaactccaagacgacaccaagtctagaagacctaatggctgaattgacaaagccgcagaatgtatttcccggaggcaaagtggagtcgtatctgattcaaaagaagaagatcaggaaccacgtgtaagaagaataat

SEQ ID NO: 255022 - DNA, 778 bp, Cannabis indica
tattatcattaatacacaatcagaatcaaaccattacgcattgtaagatgaaatccaagtcactactggcatctgccatgaataagcattaatatactgatctctggtaatacaaaatgataacattcaacagtaggtaatataaccaatcatagaaatagatatgttcatatatttacattgccaaatcaagcaagcgagtgtcataatgcaatatcatatataatgtcctaacgataacatttgatagtagatattataacttgccatatgcatagaaatagatatgcttataattttacattgcataatcaagcaagcccgtgtcataatgtaatatcatataaaatagcattgcaccacttaatcagtgagcccgtgccacaaactaacactaatatatcgcatcgtctaatcagacgagtccgtacctacgcctggtacttatcatatgtcactgatgcccgtacctatgcctgatatgttgcaaggaatatcgcatcacctaatcaggtgagcccgtacctactctcggtgctcatcatatgtcactgatgcatgtacctacgcccgatacgtcacttggaatatcgcatcacctaattaggtaagcccgtacctatgctcggtactcatcatatgtcactgacgctcgtacctacgctcgatacgccatcaggaatatcgcatcacctaattaggtgagcctgtacttatgctcggtactcatcatatgtcactgcccgtacctacgcccgatactgttgggttttatgcc

SEQ ID NO: 255023 - DNA, 505 bp, Cannabis indica
gtaaaattaattccaacagtacgttcatttgattttgccattttcagatgttctagagcaaatgttgatgtctcgtttttttaccttattaatgtaccttttctgggcactatgttgtttcctgcgaggtgcgaccctccaaaaataaccaaaatatcctcgccctctactgggggaggttgtatccttagattattcaggttattggactgattatgtttgtttcattgtgtccttacatactgtcttgaatatcctcacgagattaggctctcgatttcatctttcaacggacaacaatcttcagttgtatacccaatgtctctatggatacggtaatacttatttgtatctcgcttattcctcgcatgtctcattgggtctggtctgcgaaatgcaacccgattttcattggcgaggtagatatttttgcgagtcacatttaattcagtattcactgaataaataggaacatactttttatgtttcttttgctttttcttat

SEQ ID NO: 255024 - DNA, 737 bp, Cannabis indica
tgtcagtaaacgcctcttagatgctgagacctgctaccctcaaatggaaaaattagcgttcgctctagtaatgtcatcaagaaagttgcgaacttaattccaggccaacagcatcgaagttttaacaaactaccctttgaggcaagtcttggcgaaaccagagacattgggaagattgttgaaatggtcggtagagttaagccagttcgacatcaagtacaaaccgagaactgcgatcaagcggcaagccttggcagatttcattctcgagttcccaagtactgaagtggcactcataaacgaagaaatcaacaccgctatagcaaaaggagaaggatggacattgtacgtcgatggagcttctaatagcgaaggttccggcagcggaatcctactaatcagtcccaacaattttaaggtacacgctgctttatgttttgagttttccgcatctaacaatgaagccaagtatgaggctttaatttctggattgaggctcgctctcgagatgagaatcgagtacttgcaggctttcatcgattcccaaatcgtcgtgtgccaggtgaatggagaatatctggccagaggcgggcgattggttaagtatcacgccttagtatgcgagctgatgcagaaattcaagagagtagtcgtgtcccgagtaccacgtgctcataactcacacacagacgcatttgcccgattggcctcgctagagaagttgaattactcgatgt

SEQ ID NO: 255025 - DNA, 584 bp, Cannabis indica
acaagaagtgatacattattaggtgtgtaattgaatcctttatatatttaatttaaattcattatataaattcgaattttaaatgattgaatgtaataatttttatgtaatattgttaactatttataaagaaaattgttattgagtattagaagtgtttagtacttttaataggtgtcattacacgattgattagtaatattctctttaaaattattttatatggaacctgatacttaattatactaatagaaatatgataccgaagaagattttagacactaatagtgtctttttagcaattctcattcgtaaaatgcctaggcacactgatagtgtgaaatctaatagcaactgagaactgctaaaaggtatcaatgtttcagtgatttttaacaccctcttcgttgttatattactttggtgttattaatattgtcatattactattagtataattaagtatcgtatctaaaaatttaaagtaataacctttaaagaatatcactaaccaataataaaaagctacctctagctggtgacatgtgcaagtgacatggtgaatagcaatcatctttataaac

SEQ ID NO: 255026 - DNA, 755 bp, Cannabis indica
  modified_base (721)..(721): a, c, t, g, unknown or other
agcagtgagaccggcaatggcgaagcaaaaatacaggagaccagcgcataaaggggaagggaagaaagtgaaagagatagagagagatcaagctaaatatgaataaattgaagaaaagataaaaaaattatctaccacacctggcattaaagagttgacccgtggagcaaaactaaagcattttttctagaaattatcacacttgttgacagctgttaccttagttatagctcaatgagggctatatttgtaaattgactatcaaaagcccaaaaaattattctcttttttataaaggtttatagatattattattctaaaattcatcttctaaaaaaaaaataaataaataaataaaactatttcaataaaattataaaattgagctactttaatatttttaaaattaaaaatttattagtttttcaaatattaattataaattataatgcataattggccatacacaagaaaatataacaatcacccacagagagtgcacacatcaaagagttttacgggtttcgagttttttagattcgagtttcgtgtgcgtgaaatatgtatactgagcctgctcgtatgggagaacgagttttcaactttcaggctcggtgggtctggtgcgagttgggacggagccagtttcgagttgggctgggccatttttttaaaatttttgaacaatatcctttttttatagaagaaattatgtaaaatnttggacttttttcttaacgtttgataatatggag

SEQ ID NO: 255027 - DNA, 2174 bp, Cannabis indica
atatatatatatataaaaataaataagaaatatatttcatattttaaaattattacaattaaccaaaatgtatagagataatatcaaaaaaacaaggtgcatgaactatatagtatatcattacatacgttacctttaatggaagaaaaaaaaggtgcaatattttcacatctattttttaattatttaaatatatatataatgacagcaaattaacacctgctaatattatatatatatatttatttaaaaaaaatcaaagtaacggttgttaattttttttcacctcttctatgaaacgatacatacgtagacacatacatggtaatattacattaacaccaaataccatttatacacatacaagtggcctatatatatgtatatatttatatatatataacactcttgtactcactcatttcactcatttgttttttctctttctctctagatctttgtttttgtctcttttcatcttcttcttttttcttagccctagctagtaatggagatagttgagattatttacatatatattgataagatttttccaccaaaacccaaaccaaaagagctaacaaataatttgtttggacagatttttgtgcctgatgatgatgatgatgatgaagagaagaagaaaaatgggttttgtattaatcgaaacaagtttttatcggtcacttatttaagacaaataagtgttggggtaatttttatttatttatttatttttttcattgttttaattgataatatattgtgtcacacactcacacatagatctatatatacatctcatgagttggtttgattttgtttttggatgaaattttttatggttgatgattattattatatatgttagataatcgatttaatttgtatagatctatatgtttttatgtgtataatatcgaaattattagtacaagatggaaaatcgtatatgagttaaggagtgtgtttgcttgtacatgagctagggcttactttatggacattaagaaaaattatattatattagagaaaaattatgatgaaattataataatatggatcgatataatcaattgatgttgagtttgctagtgtgttatttgtgtgtgtggttaattacttcgagttattggattttacttgatacatatttagagagaaagagagagtaattaagattaatcttgagtttttattttgtaaaatataactcaaaaaatgatcatggtaatgtaaaagtgaaaacaaagtaccttataatcgatattttttaaaatctctcataagtctttctcgacacatgtacatttgggggtgtttattattattacaacaattatcagattattttttatacatatattatcacaattatccaagtataagtcaattataacttttagatagaaaagggttcgtatagaagagagtagtgattttctctaagtgagagagagagagtagtgactaataatatgtgacattttttcaccattgcaaaaattatatataataccacaaaaaaatcttttaattataagttttttttttgactaaaagtgaaaaaattgtgaaaaaattaaaaaaaaaataattaatttgttgtgattaaaaagtctgtagctaaaagtattagtcacaaaaatcataatgtgtttttagtcacaattgtgactaatactaaattatgacaacttgtatcttaatactgtattttagtcatattgtggctaaaaagtcacatttagtcacaaaaaatttatgactaaaaagtaattattaaatataatttttttttgatagtgtatatcggaaataattagagcaaacagaattttaaagatgaaaaaaaatgatgtataacaaatgttgaaattaagctacacatagagtgactagattaataaagcacccaaatatattaattaagatattaaggagagtgatgaataataacatttcaaaactagacttaaaaaaatacacataaacaaattaaatttaataaattaagcataaattaatcacacaaacatatctaacatatagtgaaagagaaaatcactagatataagacatctaagaaaataattaaaggatatatacaacaaaaataaaattaattaaaaaggtatgtaaaatgacacttttttgaactcataaataacatg

SEQ ID NO: 255028 - DNA, 533 bp, Cannabis indica
ttatttagtgttatttgtttttatttatcataacattattatagaactagttctattttaattataactggtttgattattttgtactgttatttatttttattcattatgttacagaaccagttatatttcaattataaccggtttaagttattttgtgttatttgtttttatttattatgttatagaactggtactctttttgtttatatttgagacgtctacttctggtgacttttccagtgacttttttttggcgacggtgacttttttggtaccgacaacttttccagcgccggttacttttctggcaaaacttattattatttcacaactatagaatttctatcttttttttataaaagtatggcataaaaaatctcatattaatgtaagaaaaataaaatactataactaagggcggagccaggattaaatatcaagtgggccaataacgagcgacacatacaaaaataaaacttcatatttatgaattttagtgacgaatatttttagggaattttgattttata

SEQ ID NO: 255029 - DNA, 786 bp, Cannabis indica
gcaatcaaaattaaaatgaaaaagttgataaattcataccgacaataaaattaaaattagaaaggaacaacaagtgtatctaaatcacaatgtatttaaatcataaaagctaacaaaaaaaaagaaagaatagatgagaaaataaatatatgtaatgtaataaaaatttaaaataaaactttcataccttaaacaaaactaattaaagattacatattccaccatcaagggctatctttacgcgtgaaataatgccaaaatttcggattggtcgagatatctgattcttcattgcggattgacggacttcgacaccgtggagaaggggtggtggttagaacggaggcaccatccgcagccgcaaaccatttctaaaagttcctcaaaagaaaattaaaaacggttgcaaaaacactcaacaaaatagatacagaagagaaacttaacaatatcaaagaattgcaaaaagaaattgaaaacaagaacctggatcttggtgaaacccgtggaggagttgaatgataggcataggttatcaacgcatagttgtattatggccacctgattctagacgtcgcatacatccggattgaagcatccaacctcggaaacttgagattacgatctactcatcgcagatctagtaaatggtgataatctattgatgtcgcggtgattttaaaactgtggattttaaacattcatctttttctatattattattttgtttaagattggattagaaaatttaaaattcaagagcaaattggatgttgattgatatgt

SEQ ID NO: 255030 - DNA, 694 bp, Cannabis indica
aaaggagaagtgtttaaacaactagagttccaggctttttgttcggttcttctgggccaattggagctggaggatctgttgtttgaacaggaggtgcattagcagtctgaccggaggttgaagaagccccctcaatttcgccataggccactagggacgcacagaagtcaaggtacatgtcattagcatcacccaagtagtcaaacttggcgtgaggattagccttccaaaagtcaaagaagagcccaagaccggttgtctccaaggcattaaccttctctttcagctttgtcacctcaaccataagctcctcctccttagcttcattctcctccttcacccgatgaagaattgctcgaagagaagtcctctcatcctgaagactgttcacttcagcagataaggtatcgatggtctcctgaagacggtcagaaaccttgagatccttagtcagctcagttatcttcttctggatggcaaacaacttctttttggcttcacccaactcctaccgaacagctccgagtttcgtcctggcgtcttctaattcaacaagaaaatatctgagctgactaagctttaaaaagttccaaactcgattcctaactcaaaaatcacttctaattcaacaagaaaatatcgaaactagtcccatgactacccgagaacaattctataaggtcagaaccttcat

SEQ ID NO: 255031 - DNA, 615 bp, Cannabis indica
tacacaaatagaatgaaaaagtaatgaactcacagattttttatagaggttcgaccccttttaatagagggtaatgacctactctccttttagttgtattaataccgagggttaatactattgagatcactataggtcggatctgatatagcacccttaaggatacaaagtaagaatcaagatcggtaaatctctagtgatgagagtgcttgtacaggcgtgtgagagggagtgaagaagagagttatcagacttaggctaagagcttggaggctagtattaggcttagttctcactttcagacttaggtttctagattagagttaagacatttatataggaagcctaaaaccctaatttacaacttgaaaccctagatatttttgtatatttaattaattaattacaaaataccaaaatacccttgaacatagatattatttagctattctattgggcttttagggcccaattcacagctcaaatgatgtaatccacgtgaagaattgcacagagaatcctgcagaccttctcttggccggccagacacctacaaggagcaggctggccgactatggtgttgttcagaggctggccaaccagcttctgtgagga

SEQ ID NO: 255032 - DNA, 723 bp, Cannabis indica
tatttttaaagctaattcatgtagtatctaggatctttctcgaaatgtggtgattgggatagctaagagacatgaaaaattatacctcatatctcaagacaatccgcttgctgcaacttctagtcaatcttgtttcgatttatatacatcaaatgtaaaccaatggcacaatcgccttggtcatccctcattgtatatttcgaattttttcaataaaaatattgacacttcttttattcccaattctaataatcattgtcatgtatgtcatttagcaaaacaaaagagactcccttttgtttctaacaacacctttgcaatggccacttttgatttaatccacatagataaatggggaccatttcaaatcataagcatagaaggttatggatattttttgacttgatgaccattctcgatttacacggacttacatgttaaaagtaaaatcaaatgttaaaaataccataccagatttttttaatatggtatgcactcaattttcaaaatccataaaggctgtcagatctgacaatgccaaggattaaatcttactcttttatgcctcaaaaggcatagttcattatcactcttgtgttgaaaaatcacataaaatctgtggttgaaagaaacatcaacacataattgaacatagctcgtgctttgagttttcaatcccatttaccattggtctactggtcttatctagttttccactgctac

SEQ ID NO: 255033 - DNA, 1242 bp, Cannabis indica
tttagatgaagatgatgacaggatgaatctgactatgctcagtagttagtggttactattttcgctcgcgggtatgagcgtagaaaaaaaaaagaaaaaaatcagtagttaattagtagttactattttcccgggtaagaaagaacaaaataataagaataaaatcattcaaattttttaacgaatttggagactttttacgttaagtacaaaaactaagtcaaaaataacatttaatttttttcgttttggattttaccgtccctacgcctgcatcagaagaatgagtcctataaaattaactagctatccggacattggaggagacattatgctttcaaaattacttcaaaacttttgttttaagggcatttattcattccattttaatgtatatatatatatatataaagcatttattcatttaatgaaattggattcagcaatactttttaccaattcaattacacactaattactaatggtatttagaagtaattgtgtagttattaagtattataaatattaaggtagtataattacattatattttgaaatagtatatttggatatgaggtggaaccttacaattatctcaatagttatagttgcaattacatgtggtcaaataaacatgcttaatgtaattacccttaattacataggggtctttttttaactacaaaatgatagtgtatcaatttaatacaatatggaaggcttatatagaataggagcccctaaacaaaaaaaaacgcatcataggatgattttgttctaggaatcaatataataataacatatatttcaaaaaatatattaaagcggcataagtactaatatattattaatttattgaaatatataattttataaatttacgatttttacaaattatattttttatatatgtgttcatccaatccaacggattacatttttttggatccaatccaatccgcacaatagctcaaatccaatccaatccaagtcatttgtatcgtactctggtagctgttgtagaagaattctatttaaaggcaagaacttactccatgaaccctcaaagtctatgacacaggctcacaataagtcttttaatatctgaatggttctttctgattgcccatcagtctaagggtgaaaagttatagtgaacttcagtcttatacccatagctctctaaaaaacttatccagaattcagatgtaaaatttttggatctctatctgaaacaatgga

SEQ ID NO: 255034 - DNA, 984 bp, Cannabis indica
ttaaaaaaattatatttttttatggagcttgtgaaagtaacataaaatcaacttacaaacaactaatattaatatttttgtgaaaacaaaataaaaataattgtatgccttttatggaaaaaaaaaataataatccgtatgagtattataaaacatgtgcatccgtattatttttgtaatatttttatctttttagataatcataaaaaattcattttttttggggcagataataatattttctttgtttctatttaaacatatacatatctctattgaaatcttgtttgaattattataatcttcggcacactttctctatcttacctcaatattctatattcttagtttcttctcctattgcattttctctatctctcaatgtttttgtttatacatctttcgttcatgcatatagttaattaatgattataatatacatatttatataataagctattacaggcattcacgggatctggagaaaagctctaataattaatgcatatgttaatttattatgcttcaataattaaggcaatgattagggttaactttatatattaatgggttgatcgaaggcatgaacttctatttactcttttaaaatttaaggtagaaaagctcaatatcgggatttctttagttaataataagatatatttttacaaaaaaaaaaaaaaaagttattagatatatatttatattatttatgtgtatgtacattttctctctcttttgctgatcagtctatttaatttgatcattctgttatcttttttccttttgtacccttttttctttttggctgcaaattacgtcaaagctggcttagacaaagacatatatatgtgtggactgtggacgtgtataattgattattttttccttttctttaaacaaaaacttttctctccgaattcctacaatgcttaatagctaatacactatgtatgtatatatatatatatatatatatatact

SEQ ID NO: 255035 - DNA, 1782 bp, Cannabis indica
taacactaacgtaataataagttacatataatatatctatatacctttacgtgttaaattaacacatcctatacagatttggagatagtatacacatccaagatctttttaataggttttttttcttgaaaaataaagaaatagagagttaattaatatgtaatgtttaggaaaaagcaacatctaaattgagttgatcttgtgtgtgaatcatcattatatatatatatatataaaattatatacaatgtgaatgtgaatgtgatgtgaaagaattattggattaaagtttcacatccttttcaatcccacaaatcgattagccaaaacaatattagagatgttaaattaattaaagcatataaattattacatgaatgaacccttaattaccttaactcatacacatttgtgtttaataaaactttagggaaaattcaagagtttgcaatgaatgtataaaatatatttacctgaaatgaaatgagagattcagatcgatccttaggctgatcgtttgagaaaactgaaataagaataataataagaagaagagaaatattaatggagaacaaagcgtttcatcgaattaaatgaaacagagtaaaaaggtaaaagttaaaggactcatttgtaaataaatgaaaacagctcactttctaaaaataaatatagtattatataaatgaaaacaagtcaaattagttaacaaataataagtctccgccgtccgatttggtcggattaatatactcttttaactaattattttttttatttcttttctttaattctcttttcaatattattatttttactttgttgttgtgttggtatttgatttttttgaagagagggagggttggcaattgacatttaattaattgataaatattggtgtataaatattattatatatataaactagctcagtgatattaagtctattgttccaatcactcaaaaaaaaaaaaaaaagtctattgttccaaaaaaaagaaaaaagtgatattaggtctataataaatattcttaccaaaaaaagaaatccagaattaatatattgctttttttgaaaaataataaatatggttataagaaaataaaaaagaaattcataataactataaaagtagataaataataaacatgaagctgatttgctaggccagatcgtattatattaaataataaataatattatgtttagataaaataatgtattgtaataattattacgaccaaaaaatttaatacaatgtaagttgtattattcactacataacaaatagctcgtattaacttatattataatatttacaaaggatacgaggtcaagcctaatctctgacccaaacccatacctaaactcagaattcgactcggaccttggactcggactccaacctggacccttgacctggtcctgacccgaactccagacctcaaaccccgtccccgatcacgacccagacccgtacctaggacccaaattcggacccagaccccagacctaaactggacctggacctaggaccccgaacctcggactcggacccggatctcaaaccaagacctgggcttcgatccagacccggaccccagacccgtacatgtacctaggacccaaaccctggtcctagaccgtaccagacccaagacccgaatccgaactcaagaccaaacccgaaaataggattaggacatgtacccatgacccaaacccaaaccgaacttggacccggaccaagccccaacttgaagtcggtgttggggtcgagt

SEQ ID NO: 255036 - DNA, 513 bp, Cannabis indica
aaactaatcaggaaggaagaacaatcaaccaagaaatcaagaaacacaaacaagaatttcaagaacttaaccttgacctaaaaaaatctttaacaaaggatttttgggaacatttctcaaattaaactttataaaaattgcttattatttatctttatctgattttattaaacatgagcaatttaaaggtagacattgacaaatttgatggttttagtgattataggatttggaggagagataaaatcactcctggctcaacaaaaacttttgagggtacttaatgaccctatagaatagccacaagggacaaccaagattcaacaagaagaatacttggaaacaacaattggcatcatgatattcaatttatcagatgccattatcaggttgattgacaaagaagaaacccctgccaagatctggaagaaactggaagaacagtttcaacaaaattccttaaccaacaagatatcttgaaggaaaggattttggttttaagatgagttcatc

SEQ ID NO: 255037 - DNA, 763 bp, Cannabis indica
caagcaggcttagcagttctgggggaaagaagcttgaagatgaggcagaaggcatttgggtcagacgaggaagagatagagatgtggtcgaaatcatggatgaggctttcttcttcagaaagaggggtgagaacattgggagaagaggaggaagaggccattgaatcaagggagagagtctgggaagtatatgaactgaggttggtaggaggtgacaaacagttgaggcaaatcaggaataaatagagaaaaaggagagaaaaggagcgagggagatacctggagatggatgggcgcgtcaggcgatgagatgagttgggagacatcgcttcggttcctggaatagcgatctgcagaggcggaggggaaatgattacccggaagtaaatgcttgagaagatggaaaggatggtttgggtggattctagtgggagtattgagagatagagaagagggaaggtctgatcgagcattaaatgcccaaaaaagggtgccgtcagaattaaatgcaactgggagagagagattgcattaaatagatgctgagcgcgggggatacgggggctatttgcaatcattagggttgacatggggaagatcagggaagaagatgctggaaatgtcgggaaaaggagtgaaaagggctgagggagaaccgagatagagaactctcttacagttactgtaccagaggccgtcctggaggaaaacttcaagaagaagaaaaaaatctctaattctagggtttataatatgttcattt

SEQ ID NO: 255038 - DNA, 1650 bp, Cannabis indica
aacaaatcatatccctatatatatattcaaatccttaacaaaataaaaaacaaaaacaaaaaacaaaaaggagaaataaatcaaatttttttaacctttcatataattacaacatactatattactattacaatcttttagttaacccaatcaaaaataaaatggaaaaatatttttttcttattttttaatggtgatattctttatagttataatatcctccctataaatttttgaaaatttttgaatagtttacagtactgaaaataaagttcatgaaatttcaatttacctcacgcatgttcaaaaaacttcaaactaattttcagcgcattataaactattcaaaaagtttcaaaaatttacaaggataatgttgtaattgtaaagaccgcttagctttgttttagaaaatagtagataattagagtttaatcatgaaatttgaacaataattatgatttaacatttatcgagatttatttgaattcagggtgtattatatatgttatgtatgaaattttatgtttttgcatgttttgtgctcggcaacattggaacgcggcgtttggccattagaatcatattttagtattttagtagttacggagcaatatagttggacattgggaatgtcgggattagtcgagattttagaattgaccaaattaccgttaggagtattgtgactttgtggttaagtaggggaaaaattgtctttttgccctaagattcttttgtcttctagcggattaatatgtgtgttacaatctgatatcatttacttattttgttgaatattatcaagggaataaactatttatgcttaattagaaaaaaaataaaaaaaaaattgccttctctttcctcactccctctctctcttgaaccccttggaaaaccagcaaggttagggttgttatctgcaattcagagcctttcttgtttccttgttgaagtttcaatctaggtaaaacttcctaaccttttcttttacgttttcttaagctcaaagttaaggtttttgcttgattttgtgtattacggttctgtagttgttctttttttagatgattttttgaagttaaaattatgttagttgagctgaattaaggttagtttgtgtcttattgcggttgttagacaaagtttgagttttaaaacttaaacttcggtctttaatagtaatttttgattccggttatgtaatggtgttttattgcatggaatatatctattgtggtatattaagcaggtctggaaggtttggtaatgtttggggtcaatttgagggtgtggtgaatttttgaaggtttcctgcactgaaacggtcgaccggttcagggggacctgtaggaaccggtcgaccggttggtccccaagaaaccttgcagaatcaaaattctggttgggacatttttgagaaccctagtttttcctatttttacgatatttagggtattgccatgttatccatcaatagagaaacttttggtttcaagtttaagtccccaaaaagagattttgtgtgtcactcaccaattttaagaataatgtgatttaggggcctttaaatcgtcgagcagctgttctactcaagttggccggcacacctgaatttggaaaagaggtaagatttgtataatgata

SEQ ID NO: 255039 - DNA, 901 bp, Cannabis indica
tctactaatttagccccttcatagaacacataaccaagactaactatggcctttactgccaagagtatttttatactcatggtcttccgtcgagacacattacttactaaaaagctatccctttcaaaagacatactcatatttatgctgagttttatacctttaatgatctgaacactgaaagcaacttcaaaaattttgaacagaatctcagcagccttaataaacaaataggaagaaagagggtcatcttgtctgatgctacactttagattgtaccccacatatatatatagtaatacggttactcctataagtattttaagcatgggttcgaaactgtacaataattttaagatcattaatatgaattatattttacataattcaattgtaaaatatatagtcgataaaaaaaatgaaatacctattcgtaaagaaatagttttataaattattacaattacctttgagaaaggtaatattggcttcttaaaacaaagcgggcttaaataattcctttcaagtatattaatttaaataatatttttaaattaatatataaatttaaaaatattactattatggtttattattaaaataatattataatttatatttagcatgtgggatagatttttttttaaaaaaacaaagaactgagttatttttattttattgacagcaatatatatatatgtattatacataaattttatgtagattagctaatgtacataaataatatagcaaacaaaagataaataatatagtaataaatatatattaatgttcattttagttaaattaaaaatgcgatgaaattttaactttactaatcaataaatatattctttttttttccaaatagttagtttatttttatgtaaaactaacatta

SEQ ID NO: 255040 - DNA, 1330 bp, Cannabis indica
  modified_base (1258)..(1258): a, c, t, g, unknown or other
ttaattatttaatatttatgaaaaaaaatatttttttttcacataactagttacaaaataaaacaaagtatgattattttatgtcttcaacaacattaaaacaaataaaatagtaaataacaaaaggaaggaaaaattgtatgtataaagaaatatttaattttattttaaattgtatataagtggatgatatataagcatagaatatacatttgatttattaagttttgaaatataattgtattatatttttaaattactattttttttatattaaaatgtcatttatatatataatttaattttttataaatatgtgtggattggattgaatcggttacttttacatgtcaatcaacatctaatccgtacatgtgcggattttgaattttctaatccaatccaattcgcacaagtacagatatccgcactttggattgaattgaattaaatcgtgcagattggattggatcgacaattttatgaatatccctatatgtatatatgataagaattatccaatatgtaggtagggtcttcactccacacaaatttctttgatcttctcctatagtgtagttataaaaaggacaagtccttttcttaattaaaatggcgtcctggtgcagtgcatgctgcataaatttatatattgctttttgaaccctactctgttgtcgttgttcaaaaaaaagaaaaaccctacttaattttagaaatttttacactaaaaatctaaaatgataaatttattacattaatacctatacacggctaaaccaactttttacacatcttttatattttattactatttaccacatgcacatacaattcaaccttttttgacacgtgattgattgattgatgcattacatcaatcactctatacatcatttctctcttttttctcttctttttccttttattttctatttctttttcagttttttttttttaaaaaaaaataataaccttcatagctaacacttccctcttcacaatcacaactccattttcactcttcttttgttcttcaaattttttttcaacttcccatcaaccattttctctcttttatttttctcttaatatataaatatggttgtaacttattcttcattcaactccttcccttgttcaaaaaaaaaactttctaaaaatgagttgaaatcttagctaaatgaaaacaggtaaacgacatgttgttgaggatgatgactcaatttttgctccattgtcgaaacgtggcgagctntccaaagaagaaaatcaaaagtggcagcccatgaaaaaatcctcaaagatgatgctaaaaaaatgaatcaag

SEQ ID NO: 255041 - DNA, 902 bp, Cannabis indica
ttgcgttatcgggcaacgatagtgacatatatagctcgttgataacgagtggtaagggtgctttatgaagcactgagtttaagtgtttataatattatgtaagtagagtgtttaatgaagcactgaaattacgtgaatataatggtgtatgagtagaatgctttacaaaacactgaaattatatggctatagattgaatgaatgtgtatttagtgaaaaggtgaaattattaattatgagttgctatgattattcttatgatgtattatgaatgtgttcgcatagaagtattgatatgtatacacatgttgaatatgtaatgatccattgatatgtataatatgatgtaaataatagtattttctatactttttgtttagtagttttcttgctgagtcattgtgactcacgggtgcttcttggtgcaggtaagaagaataacagttctgttcggccatgagtcagaggtctcccagcagtgtacatatcaaccgtgttgtcttggattttgagaagcaggatcactacttttctatgattggatgtataaatctatttttgtaataacggttttataattagtggtaaaaggattttattagcaggggatccccatattacgacagtatttgaaggaaaagttttattttaaattaaattaaagatttttaattaaaccacactttttcctaaactcataggtttgtaataataagtttgtaataacacacacgtggtgttccttagagtcagggcgttacacaaagtatcaaagtgtacaacaattccaagtttgtggtgaaccaaatattttgggaatataaaccaagggtgaaaagatggctacctatgtcacacgtccaaagaactattgcatggatttttttttgatgaatcagcga

SEQ ID NO: 255042 - DNA, 639 bp, Cannabis indica
taataaaataaaattaataataatctcgatgatttaatctattaagaaaaaaattgcatttctagaatgttattgtaacatttcatatttactttagacaaaactatatattttgaaaatgttataatttatattgctacattttttacatttcataataatcttgataattttaatctatttacaaaatggtattatatctattgtcacttctaacatttacaaaatttgatgaatataaaaattaatttgattaataattatgaatcccaactatgatggtcgagctctactaattacggctgagtcatataattacaatttttattaatcttaaccacatatagtcgagctcaactactctcagttgagccattttttaaaattttgattaataattataaatctcagccatatatagtcgagctccacgtatttcagtcaagcactatacttttaatctatactaatatcaaccacttatagtcgagctcaactaacgtcagttgagccatttcctaattataaatctcaaccatacattgtcgagctcaactattgtcagtagagccctgtgttcaaagcctaataaatatataaaaatttcaacaacatatggtcaagttaactaaaaccaat

SEQ ID NO: 255043 - DNA, 501 bp, Cannabis indica
tcaggacctggacccgagacctgaactcagacttggacttgaccccagaaccggacctaggactcggcctcgggacgaacacggacccggactcagactgggacccgaacttgaatttgggacccagggcttgggcccgaaccagactcgggacccaaacctggacctatgacccgggactccgaactcagactcggataaaattaaaattcttaagaagaagaagaagaagaagataagtcagtatccaatccgaataagacgggttgggtctaattcgatctgggtatctgatttagcggagcgagacagagcgaattatacatgatttggatcgagttggatcatagccagatcacattcgacttgatccatttacactcctactatccgttccacatatagcaaataaaaaaaaattcttcataaaataatattttggtaacctttaaataaaaaaaaaattatttaatttaatattaccaaataatgtgttattta

SEQ ID NO: 255044 - DNA, 605 bp, Cannabis indica
atatgatgtgcacaattcgaaaaaagttctgtgataatttgtatcatattctatatattcgttttatacgtataaagtttataattttaattatatccaattctgtgattttatgatatatgcatatagtttatgataatgcaataaagaagaattgaataatttataattttaattatatatatcgaacgtatttgattacaaaatttttgaatgattatgatgcgcatgagattatatattatgggaaaagagtgattttattaacaacataagaccagagctccaaacctatttatctatctaatttttaatatgtttatctatttttttaatatgtttgtctattttcactttttttttttaattctttttcaacactatttatctatttgctcacttagataatttttttaatataaaattaaaattttaatttttgattatgtaactgatgttttaatattttttattataaaaaaaaataacaattaataattgataaattgtatatttttagattttaaaatatctattctttctatataaagtgtgcctatataactaaattcttggtttatgagaaattcgtgggagacttttta

SEQ ID NO: 255045 - DNA, 2415 bp, Cannabis indica
ctactttctataaaagtatgaaaatgccttttcatttgttcattactcataccattagttggattttcctcttcactgatttgcatcattctaatgtcatttatttacatctggcaggatacatactggaacatgcttttatggcgttgcatagacaacaactcgtatcaaggctgtcctccacctgaaaggcaggaggaggagttttttgatgaggaacccgtgcaagaatatggatcgctcgacgttgttcagggtgaagagccctcacaatcagagcttcctaaacctggtactgatgaagctgaatggtctgatggatggaagtgattactcacaatattgatgttaacaatgtctctttttggtgtgtaatgatttgttagctgtagaacttttatacacataatatttctatgttagcaagtgatgagcaatctactctatagagtctgaaatttgaaagcataactgcaaggaaagctttcttgatttatagaaaagtataatgacattttaccatgttcatgtttttgtactatgcaacaagggaaagatcatgtaagagatctacattaactctcagcgaaattgtttttgctgaacttcaactgacaagagttaaagaatcagaaaattatttcatttctctattcaaaagaaataacaggctattcaaatttgctaaaaggtaaatgtcagtgatggaaaacaatgctaaaaaaatggttgtatgctgatacatgctgagcataacactataggcaaatgaggatgagaagaagaaccagcggcagcaagtccttttgagacgtagaattgaagctgccggacaactgatcaacaaccactgaactgggcgcctctgacggtgtttgttgtccctggttgagttccgctggtgggttcgcctttgtactcgagttctcagtgtctgatggaaaacttgatggtgttctcgtgttattagaatttgatggcaagctcttaaagggggttgactgattattaggacctgcatattaaattcatatcagattatataaactaagaatgatgatccttttaactacgaaaaccttcaatacaaaattaggtctaaagatttctttaatgaaaggtgttataggtcaaaacagtttaccagagtgagaagtgtttgaaacccctgatactgttccattcttgaatggtggccgtgcttgagaagaacctgtaccatgaaaatacataaatacgtacatacatacatatcaaaccaatcaattataggtgaaacaaagaaagtgaaatgattttattttctttttcttttttcaagtttattcatttcaagaagtgaaagaaattcaagtaccggagcaaatcgcctgcaaattgcctctcctagaagacttgtcgggaaaacataccgaagacagagaaagaactctgctcccattgaccggaaaccccagcaatcgaggctggcggagaagataacagaggcaggggccgtcaccggagttgatcgcagcaatgaacgcatcacagcacttggatggggccgcttggagcggtgttaggcggagacgagacaaagataggcatggagagaacaggaccagctcaccaacgcagcccggagccggtggtgatggaagagaaggcgacgaagcctttgccggcggcggctgagctgctgtgaagtggatgagcgctgatgtagtgagtagcgtgatcaatgccgagtacgccggaggagccatgacggtggtggtgggcagaccaccgtggatgagtgctttgtgagtatatagagagagagaaagagaagaagagagagagagagagagaagaggtaaggttctttcttgtctttccgttcggtatccggtgacggttgggacgtgcctgatctgttattataacggtaaatggcgggaaactgaaactggattcccgaaattgccctttaattaaatagagaaaaataagttacgacaacatttagtttaccgtttaggaaatagctttttttcttctccttaaactaagaaatcggaaatagctgttgactctgcatggaagttaatataaaacaaaaatgtacattataacaagcctcggattttttattttttattaaatcttaatgttaaaataaagtataggaaatttgaaattttatgctttgaaatttttccattaaaccctaaatatcctgtattagtaagatgggacaacattttgttaattcccacattaccccctcattcaaacccctttctctttcccctctttctctatttctctctctctgtctcgtgaacccccactcgtccacgcatgcacgcacaccggactttgacggagactgcccacactatccacgcaggccgcccacccccacgccgcccccatcgtccacgcagg

SEQ ID NO: 255046 - DNA, 666 bp, Cannabis indica
tttttagatccatgaaatgtagagatgtcaaaaagttgaattgaaattcccaaacaattcaactcaatataatccaaaaaaaaaaaaattatatcaatactataattaaatgtttctctcgatgcattttcgttattttctagaattctaatggtgaatttgttcatatattaaatcacgaatatatatgtagatagagttagatacgtggaaacactgttctgatttttaatgtttcataatagttgcataaacattttgctaactctctaaaaattgaaatatcaattattataaattgataagaatgaattttatcatatttgcaagtattacatattaatgtcatgcaatataaagctcttcaaagaaacttttataacatatttagttttattaatttactaaattagttgatataaagttggtttacagaggtctaatagttgtttctccacatattactattaaggtacaagtaattatcagttactgacaacaaaaaattgaacaatagttcttatagatacacattcacatataatatttctcattgcaattaagttatacgttagttgaataataatttgctactacaatatcatagtattataaaaacaaggcttggaattgtctaaatacgtgatctgaacagataaaacacga

SEQ ID NO: 255047 - DNA, 838 bp, Cannabis indica
aacaatacattaaaaaaataaaatagtaaataacaaaaggaagaaaaaaaaaattgtatgtataaagaaatgttaattttattttaaattgtatatagaaaaaaaaaatatatatatatatataagaatagaatatatatttaatttattacgttttgaaatataattgtattatatgtattaaacttttaaattacttattttttcttacattataatgttatttgtatatataattttttaattttttataaatgtttgtggattggattggatcggttacttttatatgtcaatcaacatctaatccgcacaagtgcggattttgaatttttcaatccaatccaatccgcacaagtgcggatatatccgcactttgcgaattggattagattggatcggctattttatgaacactcctatcagttacaataaataaataatgtataactagttattttatattgtttttcttatatatttatttatttatttgtatttttgtaaaaatttatttaacaactcacatcaaaattattggaacaactttttttaaattatctttataaaataatttttttttagaaacatttgtaaatttatactttaaaaattataaaaataaatgtaaaatcagtattacgtgtccaaaatataacctttcacaataattgtgaaagttaaagttgaaagctttatcaaccaattatgtggtggttgactgaatcacaattaatcaatttgaaatctagctttgataaaatcttctgagtttgacattatcaaatctgtctatcactggtttggtcattcaaaatcatttccatgagcttaattt

SEQ ID NO: 255048 - DNA, 966 bp, Cannabis indica
aagaggtatagcgttgcctaggattttccaatttattatgttattattggaatagcgttaattaattgtaaaatgtcatttttaaatggtgctagacacaattagtaccttacaaatcttaaagtgaaaagcattattattggataccagtagtgtctaacacctctcaacatatcatcttacaattggttaacaatactctctaaaaattattatattaaactatatggaacctgatacttagttagactaatagcgatattaacacatcagagaatactaaacaccacaggtacactttaggctatgtttgttaggaatgatggagaatatggaggatggagagttggtggaggatatagaataagaggaagggagaggagagtagcaatcttattaagttgtttggtggagaggatgaaatgatagaaggatagagagtatttatttatgaaattattatattgtccttaaatgttattttttaataatatattttgagggtatatttgtaattttacataactaaagaggaagagtgtgaatcctttcatttatggaaggatttaaaattgaggatttagaagaatttactctccacccaactattccttccctcctccaatccctctttggatttgttgtctcctcccatctctctccctcctctcctctccattcacccacctctccctcctaccaaacataatgttagcatttttctaaagagaaatgttaaaattaaggtaggtgtctagcattttctaattaaaatatcatatcactattaatgcaattaaatatcaaatcctatataatttaatataataacttttaaacctaacttttaaataatatattttaaagcaacaaactttcatgtaggggtgttcatccgatccaatccgcactttttttgtcaaacaacatccaatccgcactaagtgcggatttcatattttggat

SEQ ID NO: 255049 - DNA, 635 bp, Cannabis indica
cttgaagttagatatgttccctcaagtgatcaaacaactgactgcttaacaaaaagcttaacacaacaaagatttcatttcttggtggacaaacttggagttgttgaaagttgaaacaccctcaagtttgagatgggctgtgaagaaatgaaaatatctcactggttttagaagctgtgagctgtcataaccgaatagagtggtcccattgtgtaacaaagtcttgttagaatattccctgctataatgattaatttgtaattgtgtagaaaggcctaggtcattattttgtacagtggacaagtcattataaatacaagcaatcaaccaatgattttgttgagctgagttttcattcttttcctcttcttcttttgctctcaattttcctttggttctaaaactcctatgttacccgggttttcctccaccacaaatgaacttcctaataaatttgagtaggagtcagactaagactagtgacctcttgtcttttttcaatttttttttttttttttttaacttgtgccacaaaatatttacatttcatatgcatactgaagataacatttcagaaaccacatactgaaaaacagcctgcattatgtgtacaagaaacagatcaatctctctta

SEQ ID NO: 255050 - DNA, 852 bp, Cannabis indica
ataagtgccattttagaaccgtcgcaaaaaacacttgttgcgtcggttaaagattgacgcatagcttgttgtgtcacttcaaaactgacgcaaaatgctttaattagtttttttatgttttgcgtcggttgtaaaatgacgaaaatagttttttgtgtcattttataaacgacgcaaataaattacattttccgtctacggcttatacatcggttttttaaaccgacacaaaatctttattagtcacttgaaaaccggcgaaaatacccatttttgtagtagtgggaagcccactaaagtactcaacctattaactagtccatgcaagtgaacaagatatgactactcatctcctgaatagacacggattcaaacaacatgtctgagaatgatctggatctaccaagctcccgaaagtatagttcaactctaattaaattccaaggataaagtaatgttgggaacccaagatggatacccccaagggtcatccaggagtagtagctgaaagagttatccacaatggtctaaccttctggatattgcctacgtggcatacctctaacataatccttgaggaatttaatgacttgtacctttgttagattccagaaaggctcgtggctcaagtatggttgccttttgtgcattacacccacaatctgacattctctttccccataacaatgacacaccagttgtcattatcaataataccatgcactgtacaacatattaattgggccccacctacccaactcaatagcttaagaaagcacaaattcaatgtattttatcctattagcgggctttattaaaaaaaaaccttatttgatgagtctatatttgtct

SEQ ID NO: 255051 - DNA, 984 bp, Cannabis indica
ttactaattaaccttttttttatatgttaaagagagaaaatatatatcgaagttaccttatcataaaatattaatagctaaataatgatagattgagagtaattagttagtgttatagtatataatttgtttatgtatatgtcaaattggcataagagttaaagtgaaaaatattagaataaaatacaagtttatttgtgggatttctcatagctatcaaatcttatagtttataaaagagaaatttacacacaatgtgagattttaaaagttgtttacttaaatatgtcacttttaagtttgactaatttatatgatatttgtttatttttaagtatttttatggtatttgaaatgacatatatatgtaacttagatttttaaagcccaatatttaataattttatttgtttctaggtagttttacaaggtaatttttagtaatttttcgagcacttctgttttactgtaatggggttgcttcattttttaatggaatttggtcttttttttttttattacaagttttttattataaattttacttttatataatcaaagctatttttctgatgaagaaactagtttcttaaataaaaaaaaatcagtttcttgatgaaaaaatcaatttccagatgaatgatctttggtgattgattttgatcgcatgagaaactaagcaatttgaatcgtaagagagaaaaaaaatcttgtgtggctggagagagtagtttgatttttgtgttttttttagcacctctgttttactgtaatagggttacttcatttttttattgtgttttgtcttttttttattataacttgtcatattatcattttatagggtcaaaactagatttataggtttttttattataatttactttatataataaaatcagtttctaatgagaactgttcttaatgaaaaaccagttcttgagtgaagaactaattattgatgaaaaaatcagtttctgtatg

SEQ ID NO: 255052 - DNA, 1397 bp, Cannabis indica
ttaccctgcagagtcacataatcgcgggccttgacaaccgggtcaatcatgaccttcttccccttgtcctgcgaaggcttcacctgcttcttggaagagtcagcggcaggagtaaccacgacgtcacacttcctcttctgagggacgacaagataagtcgtcactgttccagccttcggcttgtgattgagcacaggagcttgcttcaggaaagtcatctctgcgaagacaagaaaagataagttaaaaataaacaataactcgtatatatacaacttatatgcatgatgtgttaacttgatgttggtcgggaggtctgtttagaaagacgcttgtctattttctctttctgcttctcagatggctccttgtacactggctcccgatgaaggctagcgttctctgaaattagtttgtgttcccgcaacttcaaggtcgtgcacagtagtcgccagtcgcgatcttgaacagggagactactgagaacttcagcaacttctcttcgagctaggtccaatacaggtcgagccggtttatctgcaatcaataagaaagaacacgtttgtcgatatcataaggtaacacgaacatcaactaagtgctaaaatatgcgacgtactaggttgacgattaaaatcggttctaatccctggtattttaaacacatagaaccatttagatttccaatctcccatattggaaaccattcattctaccccattaatttcagaagtggcccatttgctgaagcagtagaaaccattgtggaggcccacattctttatgtcataaaaatagctgaaatcctccattgaaggctccctatgcgcgtattccatgtacatcgcataaaacccaagggctatgcaataactatttggggttagttggaagggggatacgtcataccgcttgagaatagcagtaatgaatggatggaaaggaatcgatactccacattgaagtatgggtattgagacaaccacatcctctgtagggatgatcgcaggattagtaaaagaaagatgcggtctctggttaggacgaggacgcagggaggcaagtcgcagcaaattcaatctcgtaaaggtggtgaggtcagatttggtgactcgcgagaccaagtcctcgcatgagaaaggctcgttcagttgcgtgttgtccactgaatcagtcccacttccttcagcatcctcttcctcttctgactcgcgatcaggagcctcctagtcctcgcctatctcttcaacttcagcatcagaagcatgcctagaatgaacaagatgttcatgagcagacaccgtggactcgctatcgcggatcttgatttccccggttcagcgagctcctgaaccattctttctatatctgcgaaggacagcgaacctaactccgca

SEQ ID NO: 255053 - DNA, 948 bp, Cannabis indica
aagcacacgacgcctgtctccatcacattggaaagaagcaagatagagcccagactgatactcagaaatttgacagggaaaacgtagggtccaagcttcagtcatggctttttcaatccaggaaggtttagctggtttgggagataagagcttgaaaatcaagcagaaagcatcagtatccgtggaggagtggatagaaatgtggtcgaaatcatgaacaagactatcttcatcgtcaagagcagaaatggggttggggttggttgaagaggaagccatagcaaagtggtaggtaagaaaggatggattttcagcaaagtttaatacagatgtgcaaagaaatatggaaacggcaaatatataagtgagaatggggagaaagaaaagagagcaatacctggagaagaagggtcgcctcgaggagtggagaagtgtctgaaccatcatttcacagctgggagagacggtctggaatcgacgctgaagagtaatgatgatctttggtttagagagggagagcagcaagatgacggttgatttagaaatagaaaaacgattcgaaaatcgaagagaggaaatattggccagaggtattaaatgttgattagaaggagccgccaaacttaaatgcaaatgagagagagaaatggtattgaacagtgaagacgcgcgagaaattagggaaacaagcataatgattagggtgacgtattaagaaagtaaatccaagcaattaataaggatgaacagaccaaatcaaaatcggagaaagggaggacaggagacaaccagatggaaacaataataaatgcaaaaccagaagaaattaggccaaatcaggactagcaacagagaagcagaagagagaaataataaactaaaacagagagaaaatggaaacaagatgataagaaaacctgcaagaaagaaacgaaccttgagaagaag

SEQ ID NO: 255054 - DNA, 541 bp, Cannabis indica
agctccaaagcattgtaaatcaccattgtttatagtggatatcaagctagatctctgagatgagcttgacagagacgtagccgtaatttagggtgaactctaaaatatttcttggtgtttctctccctttatctcttgtttttcatttgcttaaactaatctgtgtgtgtgggtaggattctgggttcgtgcttagaatcgagcaagttcttgagaagaacttgctttgctagggtttccagtttcgtgttgagtgtgtgttgtgtttgattgtttaaggcttctagacttttcttgaaaagtctttagccgtgtgttaaaacgacactagtattgttatcgtgtggaatcaaaaccctgccgttttggtctaattacacttagactaaggaaaggtcaaaactgaccttgaatactgataattgacattttgttggtgtaggttaaattggtaaaaaatcctacactacttaaaagaagtattacagtaatcacgttcttatggaatcgatcgcctaaactatactataatcactgctag

SEQ ID NO: 255055 - DNA, 662 bp, Cannabis indica
ttgcttatctatatttgttgtttctatatgatttgaacttttctctaccacaatgcctgatatgccacgtaacctcggacattaacatgttgtcaaagtttaggattaaaacacatagaaatccatctaaaaaaaagagaaaatcattcaaaataaggaatcattaatgttgattttaattgctaaatagactctatttaaaaaaatttatatatagagtctggtttgtagtagtagaggtgtgtttgtgttatatatttattccagggttactatcctagctattagggttagatcaaaatagtggaatttgaaatatgcagcgaaataaccttttataattaacgaactacaatgaattatacttctttgataaaaaaaaaatctacactacgtatttttttcagtattattaataactggttgtaaatatacttgttggtgtgtttgtattaaaagtgactcgactggagacattgaagctttcaaaactactagaagcgtgaattgaaagctaagagctcggtgtgttttgggagctaaaagctcttaggaagaaattttttcatatgtatttttgaaatttaattaatttgatgtaatgtccttaagactatatacatatgtattactagtaaaaagttacgtgcgaggcacgtata

SEQ ID NO: 255056 - DNA, 822 bp, Cannabis indica
gtatccgatgaagccatagtcagtatccacagcaaaaggctgttactcaaagcagggtggtgacggtcttgggcttcgaaggctaggtaagaagggtttggtttcaggggaaaacgcagaggataaggaagtctatgagcagcactcacagggatacaggatttgtttttcctaaccaggtaaaaagggatgcaataccctacgacaccacgtacggtgtcagtggacagcaggccactactcgaggccaacggcccaccgtacatggccagcaatcacacggaatcacagcaaattcaaaagtcgtacggagagaattttaatcgtacatggcctgtgatacttttgttgttgcttttgatttgatatggggttctcgggtcctaagttcatttggtgtaacaagaggtgcgatgatacttttgtccaagaaaggttagaccgatttgtgtgtaattctgcctggtttgatctttttcctaatgcttgtgtttctcatttgagttttatcgggtctcgtcataggcctcttgtgctatctactattgctaaacaggattcgaatactaaactggtattccgttctcgttttcactttgaaaatgcttgggcttgtgaatctgattgtgtcgatattatcaagtaagaatggctcccgaagcatattgacccttttaccaatgttgcccataatattggtgtcgtggccagtaagctcaattcgtagaataaaaatgtgcattgtcgtcacaagaaagccattaacaataagaataaggagcttgcttttcttaattccaaccttaatcttaccaatcatag

SEQ ID NO: 255057 - DNA, 3498 bp, Cannabis indica
actcaaaacaaagaacatgtaaacatgatgagtcagtcatggttaggcccttggaaggtggccttgagatcaaatcccaaataacatttggaacagaacagtgaaatagcaatctgagtatgattaatttataatcattctaactaaacctcctgaaattcgtaggatggctctaattaatactgtgagacttcaccctaaaaaaataaagagcattaatattggacactagtggtgcctagcaccacttagagatggcgccctacgattggttagcgatattctcccaaaattattaccttaagttatatgagactcgatacttaattgcattaaaagcgatatgacatcttttactgaattgcatcaataaaattcttaaaatccttgtcctcttttagttctgatctattttatgtttattgtctttgtatagcattccatttccattataaaatcttccattcaataattgacaatggcaaacaaataagaaatctcaccaacatatagcacagtgagaaaattgcaccagcttcctagcatagcagcagcccataagcctaatataacctgagaggattatcaaaaatacataaatcatcaagagacaatatgatacagagtttgctggtgttaaaagatgtaacaaatggtcttcccaataacataccgcaaccatttgtttcaaattccctccacatgagacatcctgaaggaactgcaatgctcgattgacctcattaccaaccgagacagcaacattcacaaataactctttgggcagaactacgcgaggtactttagaagaggaccttaccaaggacaataatagccgaaaacaaagaagaactcagctctaccattacataatccaagaaaagaagcatagacataaaagtttatgtgtacctgctgagtaagcctgatgcatttgaccaaatgaattgagcaagcataccaagaaccagaaacaagcatacaatagttaggaagttatagttaagccattcgaagatcacccagataatggttgcaccacttaaaacactagctgatatctttttgttcctccacaacaacacatcagcagctatatgaattaaaggaaaatatatttaagtttaggaagaataagattaattgtcagcatagaagttaatgaataatattcttacattttccaccacccaaaatgtgatgaacaggcttctggcgaccaaacaaccgattaaattgagcagagactgtatctgaagtttcttccttaaaaaatgatacagatttatgttttggagcattttctgcaagtgtctccacaaagttattcaacaaattctcagctttctcagacattgttcccactattcaattcaagaaatacaattaactatggtcaataagttattataacttggaacttgcattcaatgaaaaataacataggaaaataaaccgtgttctttgtgctacattgggtaattatacatggtgacaccaaaagagaatcaactgatggaaatgcaaagagtctgatgaaattggaaaagggaatttgactttctgataactgaaaaatgatatccacgcacaaaaaaaaagaagaagaagaagaagaactagatttaactaataagatcagtaagaagtggggaaaaactacttaagctaattcaatataagcaaaggcagcaaagatgtaagaaatggcaaacaaagcatttagaaataaagtcaccacctaacggtgagatcataaactctgtcaaacaacactaagaccagccaaaaacaacatgattcccagaacaaaaatcataaaattagttgccagaaacaccccccctccccaacactagcagagtttatgcatgtgaaaacctttgactttgtgaacctgatcacaaaaataagcacacaaacaagttttctcagttaacaagctttttattaactcgaactgaaaccacttaagtataattttaaaacaccaaaaaaaaaaatggaaaatttaaaagaggcctctgagatttcatcaccactataaatttatacccagatttgtttttcgagggtgtgcaaaaaaaatgtaggggaaagatcaaatacgaaaactgaaatcaaggaagccattaaagtacgataaagatggtaaatttttcaaaagaacaaaatcccaaaccaaaaagattccttcaagactgaataaaaaagaaacccagaaaccaaatttcacataagaatttaaacaagcagtagcagaaccacttacactaacaacaaaagagaatattaagagttatcaacaaaatcaacccagaaagataagtgaataaacaagaaacgtattcatatataatcgatgatgaaaaaacgaaccagaggcaaaagggttggtgggtaaggatgtagttgaatgaaagagcgaaactgagaagaagaacaagatgatgattacgtacaaatatgggagtggatagctctgctatgtgttacttttcttcctttgagcaaaaatgaaagagcatggaaagacaagtcaacctgaattaaaataatgacataattaattaaattaattaacactaatattaattatctattctttatttattctctcagaaaagttaaaaaaaaaatttgttctttattatttacctaatcttaatcaaaagttcttttataaagcaaaccttttcacaagtgtagctttcttaaaatatgttcggttgtggaattggaaatttgtcaaactaagaacatgaaaatcttaaaaatattatgagtgttttaaaatccacttactgatgcgatccttaatcaattcttcagtttaaatttttttatagttgtgttaaaaactttaaaataacttacaatatagaaatcaatattcaaactatttattttacacgcgtataaaataataataaaaaaaaaacagattctataaattttattttcgacgtgttaaattttttttaatttttttttaaaaaaattcagatatcttaaataattataatatatacaaccactaaaaaaatttggactaaatatttttttaaatattgaaacagataatggtacatcatacatcaatatatctatttttaaagggtgtattttagaattttccaaatatatataaaaactataattattatttacagtcgcgtagtgtaatttttagttgatcctgctattataaatggaacatgattattttgctaataaaattttaaaaaattctacaacgcaccatcttaaaaggatgtaccgatacatttttatttattttggtaccgaaataattttttggtcaaatctattctcatagttatgtatattatagttatttaagatatcttataaaattttaagaaattggaataaattacaatataaaaagtaatatttaaattgtctattttacacgcgtataaaataaaagattcacgagtgcaactgactctgtttgaaccctattttcagcat

SEQ ID NO: 255058 - DNA, 512 bp, Cannabis indica
accctaacctaaacaccatttaacaaccaaacataaatgttctacatacattacatagaaaaaaaaatcttaaatcttaaagggagctaaaaagaatcaaatttggaaacctccaaaacacagaataatcataatgagaaacttaaatataacttgccaaccacaaatacattatcataaataacataataaacacataaaacactcaaaaaaaactgaaaaccttaaactaacaacaccttttacaaccaaaatacaaaattaaacctccattagagagtacacgaaacaaaaaaaaaaaaaatcaaataaatcataaaagtatcaaaatcgaaacaaatcagcaaacaacaaacaaatgataatcaaaaataagaaactaaaaaataattgatcatatgaaaccctaacttttttactaagctcagtaacacgttcaacactacctcgtcataaatgagaaactctttagtaacctcaaacaaactttaaaagatgagagagagagagag

SEQ ID NO: 255059 - DNA, 583 bp, Cannabis indica
aaatataattgccggcggatccaataattgggtccgccggtattaatcaatataatgatttttttttattatttaaaaatattaataccggcggaccccaccgctattaatccgccggtattaatattattaccggcggaatcccatttcgtcgctaataaccatttatagcgaccaattaatgccggcggatgcttccgccggtaatatacaaatctgttgtagtgaaaattaaggaaaaccttaaatattttcctttcaaagaccatagaaaaatgtcttttttacactactcattgtttacacacttttttcatataaaaaattcaatatttatttttcatattatttttaagaattagaagtaaattatttaatattatattgtatatttattttagctttattaaaatctttttattttagagttgtgtcgatttttttaaatttttaagggtagttagtatataaattttgttgtaaagtatatttttattttgctgtatgatatgttattattcttagaaaaaaaaaattttttttgctatgtgttgaccgagattttcggcaactattaaaatat

SEQ ID NO: 255060 - DNA, 504 bp, Cannabis indica
tttaattacaaaggtaaaatgatgggtactttataattttatgaataaataggatttgtcctcttgaattatgatcattatagagttttgtcttgtgatttttttttgtggcaaaacttttctctaaactataaaaactactgcaataacttcctgtaattacattctatttattttgataaataatttgttgatgtaatactaatatgatttagatttgcctagttcaagagtctagacaaaaaataaatacataaataacaacttaataataaattataaaaatatgtatgtgcattcttatagctaatgtttgcatgtttaatgtcattaaattaaattttagatatctcaaaattattaaatagaccattgtactacaactatacatgtaattcatggtcacataagtaaattattttaaaaaatgagcataatgtaattgaaggagaatatttacaacgatttgtatagttcaagaaattttgtaaagaccgcttagtt

SEQ ID NO: 255061 - DNA, 2129 bp, Cannabis indica
aaatttttttgatagtcaacatgtttgtaggaattttttcttatcatttgtttgtcgcagtttgtcattttctatgtttgtcagtttgtccatttgttgtcagaatatcattttctctgtttatcattttgttggtttgtccatttgttgtcagtttgtcctttttaatgtttaattgtttgtaggaaatttctaggaaattttgtatcctaccccatgtaaatggttatataccatcattttcattgtaaggggcatcagaaaagtattctactaaataaaattctagtgtttttctctcaaaatgttcttctaaattttctttaagaaatttctgaagtagtgatagtgtgcattatgggtcataccgaagatattattgttatgagttaggtatcactcaagtgtaaaggtaactaagcaatctatccttcataatcgtaagtcatacaaattcttgtgagaacattacttaagttatctttatatgatgcttagcttatagcaggaaccctcatattttaaagagttactcttttgggtgaaagttttttttttatttgttttctttgtttgttttagtagtttagtgcttagtactttcttcaccatatcttaatgttgttttgttttatggtattttgaacttttcaagtggtatatatgtgtgtcaagttgaagcatttgctctactggttggattaaattaggttcattcacgtggaatcccgttagaagcagttaattctgactctttctttagtgttggctatcaataacataaaggtgtttgcaaatgatgggctgggtgagttgttcaatgatattatatatagctttattgtctatgttttttagagtagttttgtcccatgtgtgccacaaaaataattttgcggcccatgatttgactaaacatgccattaggttaaataatgagctatgctggtttgaagaggtccctacgccgattgctaatatcttctcgagaatgtcttaatatgattcaagtcacatatattttaaattaataaaaaaaaattatgtataattataaacaagtatcccttacacaatgtattatgtttaacattcctaatcttagataatttatgcatgtttaacattgattaaattttgtttggcttagctatataagctcttttttaacttttaaaattaaaaaagtttattaaagggtatctatttagataactattattcaaatatacaaaaaataaattaaaatttttacttaccttatacttttagctaaatacaaaagtagaaaacttacccaaacaatctgataaatatattgtaagaccatctcctccaataagagttgtaaaaattgtgttatatttagcgcaaaaaataattttgtgatatatttacgttaatttttggtattatgctccaatgtacaagtgctaaatttgatgcaaactataatgtaattaatatttcattaattataaggtaaatagcggcataagtatttaaagttttaagattcactacaaaagattttacttttagtcataacaaaaattccgacaaaaaataaaaaagttgtgactgattataacgttgtgactaaaagtattagttacaaaaatcacaatttttgctgtgactaaatgtgtttttaatcacaacaagtattgtgattaaaactaaattagtgataacttgtatttaaatactatgttaacgtttagttacaagtaactttttattgtgactaaaagtcatatttagtcacaaaaaaattataatgtgactaaaaatttgttactaaaggtggccttttttctgtagtgtttgtaagcagcataaactcaatgtttatttttagcgccataggtacctaatgttcgtaaaaatataattttcctctagcttcatcagtacaaacttcgttttgaatttattaaaaaaatatttgaaacaaactgatagtacaaacccaaatgatctagaatctcagctttatatgtgtcctatttaagacaataataaagtctgtatgacgaaattagagaaaaattacagttttacaaatattgacactacaaaaaataattttttagtcacaacataaattttttgtgactaaaacatag

SEQ ID NO: 255062 - DNA, 923 bp, Cannabis indica
ataaaatcccaacagttatataattatatttatgcttttcttacagagtctttcgactcataaatatatgtttcatgtgtaggtaaagatgtgagtattagagctcagtaaagattgtacatatctggatgattagacctggattgtttgaatcttcaagataatataggctcaaatttgttagtcgtgggcaacacttttattatgttcattttttgaaaatagattttggaatcccttgttttgtatacagtttacatttatgatgtttatttatgaaactatattattattataaagttttaattatacataaatttatattaaatcctttgattagcaaatgtcagcacagtaattaagaaaagcattatagcgcgcctaaactagtagggcgttacagagacagagagggaggggagagaggggaagagagaaagagacagagagaaatgaaaaggagacgttagcattttggagttctagatttaatggttggggttccgttataggttgttgccgatggtggtggtttgtcgccatctcgaagaaggtgggacgagtcctttatcgcacagagagagaagatcaactcccttgtcacatggagaaagtagatcgaggggtagaaaggaagaaccatggggttttggcgaccagagttcttaagtttcttcggccagcaggcggggtcatagactcacaattaaagccagcgagaggctccatttcttctacgactgagatgaacgggacaaggacaaacatgagtaaggttttagaggttgcaaaattcatggcgatatccacctgggcaaatggtagccgaaggtggtagacctgggcttggctagagctcataaaaaaaagagggaggtctcgtgcatctgaggggaaacgaagaagaaaataaaaaaaaaata

SEQ ID NO: 255063 - DNA, 1191 bp, Cannabis indica
ggacctcaccaacttacccccaccacacacacttacaattaacgctcttggttccaccattagactcaagggttaaagagttcggctcgaactcaaatttgaggaaattacactatatatttctcattgatacctttgatttttactttcttttttaaaatttattatgtttacatttttttttcaattattctaccaattttacccttatcacttcacgatagttttattttctctaattaaaattttaccccaactttctcacaaactcacacatccatctataaaagaatacaaatatgatatatttgaaattatgtcttaattacatgtgtgaggacaatttgggtacaatactcataaaaaaaggtatatttgaattaaattttatttaaaagttaaaattggttaatgtataaaaaaaaaatgtattcttcgacttctccccttaatattctttgcttcgtttgtgcaaagaaacctcttttgtagacttcctattgttttggcatccaagaaagtattttagttttttatttttttatttttttttattttttatcatcacatacgttatagctatttaagattacttataaattttcaaaaaattttaaataatttacagtgccaaacacaaaatttgaacaactacttatatgacacatataaaaaaataattttttttttggcattgtatttacttgaacttttcttaaaatttgcaagtggtcctaaatagctatactttaagagttttttaaaaaaatacttgattttaggcaaaaatttataattttactgccacacgaatttttttacaaaaatactgtttttctttataaaacaaccgtaaaacaaaaaaacagaataattaaaaataatagtagaacaactaaaaaataaacataaaacaacaatgaaaacttaacacagtacacaatataaaaaaatacatagtacttttgaaaaaaattctgccccatagtaaaaaaggaaaaaagtggaaaattttagtatgtagtgtaaaaactcctataatgtatgcgatcattaaaagaaattagatgaaaaaaaatttacattgagaggtaaatttctcaacacacaaccctactatgtaggccatattgccctttacataagaaacaatgggcattttggcccattaaaaaaaaaaaggaaaacttt

SEQ ID NO: 255064 - DNA, 936 bp, Cannabis indica
tattttctgtaaataaaataaaaaaaatcgttgaaatatttaaaattccgtgaaaccatacttctgtaatttttttttgtaatttttgtgtatgtgtaaaataatcccatttttatttcataaatgggtataaatattattttggtttcaacatatacataaaatgtatttttaataggttaattaagatttttaaccactgaaatttgatatgtattaaattatacttttgaatttttttgcggttaaaaattctttatgaactattgagattgttagatttaaggactattgtccaatttccttcaattttactaattcattgattatttatgtacaaaatcatgctctccaaatattagtaactaccaaattatgtcctttaaattttgacatttaccaatttatatcactaactttaatccatgatagattttctttactaaaattagacagaagtccttaaatttaataatctcaatagctaattttttttttaacaaccttaaaaattttaaaaacataatttagtaaatatcaaataacaaaaatccctcctatccattgggatgtttataacattactaaacaatttgatttgacctcaaaatcaaatgaccttttattcctaaattttgtccatatattttttttttatgtgatgcacagagaagtatgtatcaattttcagaataaatattgatatgacggttaaggaccactgatatttcaatttgtttatggccatacagatcgtatcatgtaatccattatttatattcataaataattatatatttcaatggcaattttaccgtggaaacatttattgtgttattttcagttagggtgcgtttggaaagtcacaatgtaattagatttgtgtgtaattggaggtaattacataatttgtcatgtttgtctgaccatgtaatt

SEQ ID NO: 255065 - DNA, 1223 bp, Cannabis indica
aactaattgagcaagattaaatttatcaatcaccaacttaaaaataaaaataacttaaacaaatacaaaataaaagaatagtgatctatataatgtaaagtatattatccacaataatttctaaactggactttttaaaatgactctcatattactaaaaaaataataaaaaacaaaataaaaaataatgaacaaaaaaaatagagaaaacaaagaaaatgggaggaaactcacataagattatcatctcattttctttttcttttctttattagataaaaaataaaaattaattggataagatattaatcaatcacccattaaaagtaatattttttagacaaaaaagaaatgtaataagaatattatttataacctacatagataaaacataaattgtttttaaataatgtgggacttttaatttgtatgtgtgctttgatttttaaacaaaataaggaaatatgctagaaaatagaaaaaataggaagaaaaaattataaaatgttattaaactattactaacttatttgttaaacgtaaaagtaagaagtcatatgtaattgtactccacatcaaatacataaatgttattttaaaaaagagtataatttaagtgagatacagcgaatgacaatgagtttaaatgtagtggcaattataaatcagatatggtactaatgataatagctttaaatatagtgatgactacaagtgagatgaagtggtgataacaactttaaatatactgacgacaacgagtaaaatacggactttaatcttttaacctttttttttcaaatttaaagtttaggtttctaaagtagtttctccagtagtttttacgtgtgttgctatacgatttattgttgcgattgcatcggctagttgcaatagagatttctatatagaattccgtaaaagtgtaaaaataaaaaaaatcccaacagcactttcaattttatatttatagccgcaaattaaaaaaaaaaccatatataaagctatatatatagtaaggaaagagagagattacgggtcgggtatccaagcaggaggggcgggtccaaagtttttatagcaaccatagtagagcatctggtgcagggagaaggggaggtcaggcgagagaatatggttggcgatattgatccatgtttggggagtggcagcgccgtaattacacacgatctcggccaatctaccatggagtgtctcagcaa

SEQ ID NO: 255066 - DNA, 548 bp, Cannabis indica
aactgcataccaacagagagtaagaattgagctttcctacttcctcatatcatttacacttctttctaaaatgtatttgcttctctgatgataaagaaagtgttctttatggtttcttcaggattctaatggttgcttcagaatagaaacctgttcttatagtccttgcccgagtagagaaaacagctggaatatgtgaggagatgccccttttccatagctcagctgggcaaaagacttgacaatcaacagggcgtaaaaaaataaactttcctaactcctcatatgctttacacttttccctaatatgaaattttcaaatgatttcttcagattagattcctcttataatcgtttcttataaaccagagtacagaaaacagctggaaactttgaagagatgtccgtttccataatgggagaaggcttaatgaaaaatttagtaattcaactgcataccaatagagcctaaaaatgaactttcctaattcctcatatcttttttactcttctttctaatatatttttgcttctcatttgtaggcacg

SEQ ID NO: 255067 - DNA, 486 bp, Cannabis indica
tctcgaatgccatagaagtaacaatataagcctcaggtgactctctgaagagtaaactaacgcccaggttaacatataggctggtgcgctaagttgtgcttatccgacttcaatttcgctcgagcatctgattgtttttccgtggtaaacgagagtctatgatttgagacaagtcaaattcacacttcgattattttaccttttcagcaaagtagaatattaacaaattagtcgcgaatcgggaagtttcgagtctactctattttgttgaaaagtgacatcttcgagaaccaccctttgcacctccaattttccctcccaaactttcttttccactacttttatttttgatctctccatgagcttcaaagaaatgcttaatcgagcaatccatgttaagccaatctccataaagctgaaccatcttccctgtattgcttttttccaatatttttgcctccatgcattccttctgatcatgcccca

SEQ ID NO: 255068 - DNA, 1184 bp, Cannabis indica
aaaaggttgaaccaacagcattcggaccattgggagtggaatggacaacaacactcctgcagtacagaaatatggagccatttcaagcaatataaaacttaaccagatcaaactggaagtttaaaaacacgatcaaagaaaatacaaacacaatactgggtttcactaccaggaggttggttcacatttaaaaaaaataaaagcatatctctctttcttctttccaacgtttctaagaacccaaacagaaaagagaaaaagaaatcggagaagggagagattggattaccgaattcgggagtatgaggggaggatttcggagtgagtgaggaggtcggaatgagcggtgaggtagagaggaggaatgtcggagtgggcgattcgggatcggcggagggcggagaaggagggggcgatgaaggcggtgtttgctaaagccatgagttgaaaatgaagaagaagaagaaagtggattagtgagtagtaatagtagcaagtctttcttttttctctatagctgggaaaatgggtattattattattgtgttgggttggctggtgagaattttgaggtggtcttacgtcattctgtgtaggaaatgggacccactcaaacggaacatgatggagccacgtcagatgccacgccagaaggtggaatctttataatattttatcatttgtgggatgtgattggttttgttttattttattatgttcaactaagctctcaaattattgtccgattattggttttgttttattttaacatcttaacagaatcttcaaatttatgttgtagcaaaatttgtggacaaatttgaaaacaaattttaaagttttaattactttggttagagacttcaaagtttggttatgattaaaagatgtttagtaactaattaaaaataattataaataatttataagaaaattacagttaaaatttaaaattagtacaactcaatgtttaagaaaaaaaaaatttataaaaaaaaatagttctttgaattaaacaactataataaattattttatactaaaaatatatttaattaattattatgtgttacaaaaataaaaaaaaataaaggaaaaagacattttaaatagggaaaaaaacagaaaaatacaaaaaaggaaaaaaattaacaaaatactatgggccggcccattaaacattt

SEQ ID NO: 255069 - DNA, 1709 bp, Cannabis indica
caatttgttttacttcattttaagctaaaagatcagattagatcaaatagctctgatgtaagttatacagtatcaaacacatttttgatcaataaatgaataaagatgtttattttgaaattcaaattgagtcgaaattactaaaatattactaatttaccatccagtgcgtacaaaaggtttggtcgaacccaaaaccccgaacaaataaaaaagtatacttgcaaaaaacaagtgaccaagagtcataagtctgctcggtcacttagggggcacatatacttgtacaaagaatttggtaaagataaaacaaacacaattgcacgatgattataaataaagaatgaaattcattaaagatagcaaaagcttgtaataccgggattaaaagctgcccggtcagcctgttgtttgtaaaatgaaaaataattccaagtttaaagacctcttggccggtcaagatgtcttaaaaaatgccttatggccgaataatatatatatatatataaaataaagataaaaggagaagtatttaaacagctaaagtcccatgctcttggttcgggtcttctgggccggtaggagttggaggatctgttgtctaaacggaaggcacatcaacgttctggccagaagtagaagtagtcgcctcgagttcaccataagccatctgggaagcacagtactcgagatacatgtctttggcctcgcccaggtaatcaaaattcgcctgagggttagcctttcaaaagtcataaaaaatcttgagaccggctgtctctaaggcatgaactttctcttttagcctcgtcacctctcatttgtacttcttgacctcagttgtaagctcctcctccttagtcttcgtctcttcttccagccgacggaagacagtccgaagaactcccctttcctcctgaaggttattcacttttgccgacaaggtgccgatggtagcttcaagttagtcggaagcctcgaggcccttatctcagcagtaaaaagcttcttgttgacttcacccagctccgagttccaccctggtgtcctcagcatccttcctggcacagtccacctctgccctcatggtgttggacatggcagcgttcttggaggcagcaaattttagctcgggaataggtgtaagccaacttcagaccaggatacacagaaaaaaaaaaaaagctttagagtctgagccaagtaaagaaagattaaaagaaactgtcaagaaagactcaccctagtaaactccctcaagactcctcccatcagcagctccagggaagatttggtatcagcgtcggccagctgatgactcacctcaggaaccaaccgactcatgtagtgagtgagcatctccttgcctctcttggcctctcgatgcattggcgaaggtgagtaggagcctgcatctgctcagatccgctcttggccagctcggatccgcccttcgactgttcaggcctgtccgagcttcctcctgagaatcgttggactttgcaatttttggagcagaaggtctgccacagttagctcctcagaaagatcaataacctccccggctggtgccttttcctttgatggggtcgcctcaccgcccctagatttcttggccggaggagatgaacttgagcttcctccaactctcttcttcagagcatcgagcatcttctgagacaggtatgcacggaataaaagcaacatgg

SEQ ID NO: 255070 - DNA, 1017 bp, Cannabis indica
cattttcgcatttctgagagtgacctaccgaaatcttcttggaccgtcgggcaatagaacccatgtcattgtactctctgggttgtcactcgtcccccggaatggcttccgcactctccttcgtggacctctgttaagaccaactttcccttctgccttgttatgcatttcaagtacagcctgtggtaggatcttttgtatagctggttttggagtatcgcataccttgaggccctcattacgatttttctcgcctgtttggggtccgacaccaatttgtcttcctttaagtattcaaggattggctgcctccagtcttaggatgtttctgtcaggatttcagcgcacctaacctcttcttctatcgaaatgctgggttctaggatgaagttgaatggtattgttcttgtgacgtggaggggggaagaagatcctaggcctgcagggcgttggcgtgcatgttttcttctcagggaatctgactaatctgtaaatagtcgagagttgaaattaaccttttacctcggccaggtagctgaccatctttagctctttggcctccaaatcccctttaacctgctggactattagctgagagtctgactggaccaacaccctttcggcccccatctctttaaccagttttatcccatgaatcaaggcctcatattcagcatcgttgttggtggctcggaaacctaattttatggattgttccatcatttctccatcgggcgatagtagtactattcctaccccgctccccctgacattcgaggacccgtctacctttagtagccagtccctcccgatagattccttctcgcactggataggttatggagttatttcgactaggaaatctgccagcgcttgtcccttaatagcagtccgtgggaggtattgtatgtcaaactcgctcaactccaccgcccatttcatcaatctcccagatattttgggtttatgcaagacccgtttcagtgggaacgatgtcattgttggaaatttatttta

SEQ ID NO: 255071 - DNA, 779 bp, Cannabis indica
acgattgaactcttcatccctcgaccaggggttctgaacattcccacgcagagctctcctcaagcgtgttgttcgcgtactaggaccaatgtcaggtcgagttctctgagaacgtgtggtccgcgcactaaggccaccctcaggttgagcccgcttggaacgggtggtccttcaggactacgggttggtagatcttgtggagtccatgggctcttttccaaaacgatgattagttttctcatgcgagttgttaacattttctggattttcaaccatgaaggaggtggtttttcttcaataagaagggagggttttttttgagcctttcacagaggctctcaatgaaagcaccaaactattaacgcagatttttgttaactaaatttgagcctcacatattgatttcacacagaaaaaataaaatcaataaaaatgaaagtatgatcacaggggtctttacgtggttctgcagttaaaattctgcatagtccatgagtcaatgttattcagatttttgattaggaacactctcgtatgagttttttcgtctcttttttgatcttgtttgtcactatttataattacaatcatgtattatacacgtctttaattattgtatctagagatgtctcgacagaaactttgttacagtgatcccaatagccagctggggctattcttctttccaaagtcgacaatgtatgtcaggtgttgatcgcgggtcttatttacaaagagtcattctgactagcgagggttaccgttagctggatgaagct

SEQ ID NO: 255072 - DNA, 1039 bp, Cannabis indica
gaaaatatgaccctaagctcaatttttaacaattttattttttattataactaactttaagataatttatgacacaaataaatacataaaatgtaaacagttttgtcatacatctatagatcagattattattaaattttattaggacaatcatttaatatatcatttttattatttttttttttaaattaaccgtttgagttactctaatgattgtccgatgtatacattgtttttttatatataatatcagtaatatatacattaaaaaacatatttcatattttttttttttaaaaaaacaattaatttgaatattaatatttttttaacttaattattaatattacattcaattaatttgaaatctaaaattttaagactatttataaataattaatttcttttataagaaattttatatataaaacaaattcaagtaatatatatcataatgtttatttataattatatttattttattgtgatcatttttataattattgatttattttttgtgaaagatttttataaatggattaaagttcatgaaaaaagtgacaatgtgatgattattaataaaatatgtgaagaatactataagattaatataaaaaataaattttttaataataagaatttaaaattaatttatctgaaaaaataaaatttcaataaattgatcaaattaataattttgataaaagaaggtctaatttaatttttacttaagtccaaccttcgcttaaggccttgtacaagcttgagacgaccctaagtagtactgattatactaaaactcatatttttctagtatcgtaatatgtcatttataatatcgtgccttccaaactcgtgctaaattcatattatgtcaaagaaaattagcttatatttgcaacactataatatatctcaacattgttatttgacacttaatattatactaatatggcatctaataattaattaataattttttatattatttattaaattaaaatatatagaactcaatatagaactcaatattaaaatg

SEQ ID NO: 255073 - DNA, 740 bp, Cannabis indica
aaattttacttatttatatatacacatcggttctttcaacaagattcatctacacatttcaaattaaaaaaaatagccaccttatattgtggtcatttcaagagattttcatagataaggtatgagtacaatattttttcatcttatattttgaatagaattagaaaagtaaataaagaaaaattaaagctcaccttcctgcgatttcttggtatgtactgataaaacacattttataaagcttgttgaaaggacatcatgttcttttatgaatacctcacattacattgcaattattctgtgacaatttacatccatattaaaactagtcataagtatatatcaaattaaaatagcatagcaaattaagttttgaatagcaatactttcaaattaaaacacacgaattctatgagtacctttacaaaagttataaaatggcaatcactcttatgcataaagtagagtccataatatgttataagtaaatgaacaaaattattttatctttgagataataattttaggctacttcaaacaataatacaaataaaacacaaacttaataatcttgttagtttgactatctcttgaaacaaaattacaataaattagagcaataagtatagcagtattctacttgtcactagtaagcattagaatttcattccttcttttctcaagtttctattgtttctagttcacaaaatttgaaacaacattattcaagcttacttgtt

SEQ ID NO: 255074 - DNA, 990 bp, Cannabis indica
ctagatcatattttatggacacaaatcattaaacttaaattaatttgaccttagtggcatatggcacatgggtttggatcgtaaattattaactagggttatgtgttattactagtttgcagtatagtacttgtgaatatgatgatactgatgaaagttaatggataaacaattgaaaaggacatacgtggcactcgagtacttatcatcatagcaaggcgccaagtgtatttggtatatgtgccgttagacttagagcatctaatggtagcatttctaagactgttaaaaataaatataatattttatttttattgacatttttatttttaaaaatattttaatgtataatattatttaaaaatattataattataatttcacattattatttaatataaatttacatttttagctacaataatcttttagtttcaattaataattaaaaaaaataaagcataatatcgtaaatttttagaatagcttcattttctcttcaataatataacattttaatattttgtcacataatatatctatctcaacaaacatcttctaaattttacatgctctaataattaagtaacacttataattattaaaatattctaatattaataatttaattttttttattattattcacataaaatttgcaatcttctttaaaaaaaaaaaaactctaaatattaacaactttaaaagttgcagtctcatcataatttttagataaaaaaatatatttaaataacactttacataaaattaatcttaaaagttgaactggtaaaactatttcaatagacaattgccggaataggaatgtcaaactcgtataacaagatagttattctgatataaatatatagggtgcttctacaatacactctcttaaaagagatatactggtgcatctttaacttgtttcggcatctggaaaaaatttttagtctaatttttttttcatattcatgtacgttataacta

SEQ ID NO: 255075 - DNA, 662 bp, Cannabis indica
gccaccttcctcaagccacactcaaggtgaccattggacttagggtcgaaggttttgccaggggtagcccatggatcctcccaaatattggtatccctcccatcatagaccactttataagctccttctcttaaaaagtcactagctttgaccatatttttctaaaatcaagaatctaagttcttgtacttacaattaagaaactcttttcctttgaggtacttggctctcagaatatcacagcaaagagattgactttcgcataaaaaattctgcccctatttagctaggaaggctagattcatctccttagttttacaaaaaccaagaccacctctggacttaggaagacaaatcttatcccaagctctcaatcggatttctcggttccctttctcaaatcccaccagaaatcacgcaccaagccatcaatcgttgcgataagtctattagagagcttagtaatttgcatcacatacattggcatggacagtcccacaaacttgatcaaagtagcacgccccgctttagagagggttttagccttccaaccctgcaattttgaggtaagattctctacaacaaagttgaaattagcatccttctgtctagagcgaaataggggagccctagatatttaacgcttccttccgaccctccaa

SEQ ID NO: 255076 - DNA, 653 bp, Cannabis indica
atgcttaattttggattgttgttactgctgtgattatgtgtttttctaaagtttaagcatgcttgattgaatagatgtgagcagattatgttgttagttgttggtctatgcatgtgtgaaacttttaaactcaaaatcttgtattttcaatggtgaaatgttggttaactgctgtaattgttgattatgtttgggttcgttttctagagtaattttatggtgaaacatgatgaattgagcaggttgtgttgcttgtaagtgagtttttgccaagcttgagttttgaactcaaagcttggagctcacatggtgatttgtgtatttttgcatgaagctcggttttgatgctttgaaaatgtttagtggggtatttagaataggcctggagagttttgcatggtttgggatccaattgaatgagttatcaatttttgagtgtttcctgcactgaaccggaattccagttcagtgaagcctgtagcatccggtctaccgaatggggcttccaggaatttatagaactggaattccggttgtagaaccggtctaccggttggggaaaatttgggaaccctagttcttcccatttttatgttgtttagggtattgccatgctttttatcaataggaaaacttttagtttctagtttaag

SEQ ID NO: 255077 - DNA, 900 bp, Cannabis indica
aactccagacaaaacactacgaattccaaacgcagttggacataatttttcactacaaaaaatactgattcttacagagccaaatactcttgattaattgtgcatatacttgctataaagctgtgttcatcaattaattatttaacatttttcttttcactaagataatttgtttctaataccagctgtttagtgaagttataactccatcaatcctttccctttaaaatatatttgatggtggaagctttatatatgatattacaagatgcaatcgacctataatcacttacgttggctagacacttgcttttaggaatgagtgcgaagacaataaaattaatttccttcaacaattctcatatatgcaaaaaaaatacataacaactttacaaattcatccctcaatatctctcaattatcttggaagaaaaaactctcaaatccatctggaaccggtgctttattacttggaatatctaaaagagctctcttaacactatctctcaagaaactagccattaaaagctctttttgactgccagaaatcatcgacttcaaatcaactatactagtttgagaaaattccttatctaatctacttgttgttatgaattctattcattaataataataaatagagatttaatgtatacatgatggcatatattcgagtaatatgcctgatgatcaattgagtaaactgctgcagatatcaggttttacaaacatgtccctgccttttacttaccttagtgttccaattggagctaagaagatctcaggtaaagaatgtgaagtattggctgagaagatgacagctcgaatcaaaacatggagtacaaggaatctatcttttgctggaagggtagtcctcattaactctgtgttaatggctat

SEQ ID NO: 255078 - DNA, 532 bp, Cannabis indica
ctgggaatccatggcgaattccaaatatccacacgcgaccgtttgcaacaataataggattctcctctaataaaaatcccttgtcgccataatccctttggccccaaaggaggcgttcttagtaatcgaagatgaccagaaagattgatcttctccaccccagtacttagctttaaaaatttggcaccacaatgagtctttgccactagctagtttccactcaatttgagtcactaatgcaagattcacatcttcaaacttcttaaaatttagtccaccatgtttaaaaggtaaacaaagaaattccaatctatgagggccaagaacctctccttttcagaactacccaaccaccaaaatttttttaccacttgatcaagtaccatgcaacaagtcttagggaggaggaacgtcgacatagtatggataggggaacttaaagccactgatcggattagcatagctccccgacttgcgcttgaagtttgcatcgccacccttcagtcctggaacaaatcttgtcctttaggaa

SEQ ID NO: 255079 - DNA, 552 bp, Cannabis indica
ctgagttacatggtggtcccaaaaaagcaaactgcaggtgcaggaggtggtcttgtgcctcgtacccttgtctggtgtcaggtagtcccaagtcgcataggtggtgcatgcatcgtacccttggttgggtcctcagatcttacaagtgtggtgcatctactactcgtacctccttactttcagaaggcgtggttgtatgtttttcccttgcacaccttatcctttgattcctcctccaacgacattctcttcaacgcgtattcaaatttcacctttgctccaccttacacacacaacacacacaactcaacacactcgacacaacaaaacacacacacacacacacacacatgcatatgcgagccctcatgcaccatgggctcacatgcgagcccttacacacacacgacgcacaacatacacatccacggctcgcatgcgagcccccacttgcgcgcacacacacacaacgcacacacccatgactcccatgcgagccccctatacatgggctcgacgcgagcccccacactcgcacacacacacacacac

SEQ ID NO: 255080 - DNA, 587 bp, Cannabis indica
gtaaagttcctggatctgaatatattataagctaatccgtttatggctgaaggaatgtagcgttttcttcaagtttttaggacttggtttgcctttttctctttttttccattactgtaaaagctcattgatttttattttgttttctttcaacataggcaaacattcagagatatggaagcttgcaacttcaatggaagaccataagtcagaaattgacaattgggacttgggagctggaatatacattgcattctattttctaagaaattcacttcttgaagataatgataccatgagtgaactggtaagataatttatcactttcagcttctttattatcatgtatagcagaaagacttggattaatagtttcatttgcttctttattaccatattgttgaacttagtgattagcctctcgaagagacagacagtgccccgagcttctttgaattttggatttttcattcagattatacaaattcgctgcattgtattccaaactttcatttaaactaccacattaggttagatcattcttgttttcctttcccaactggtattgattgagaaactaaattatg

SEQ ID NO: 255081 - DNA, 705 bp, Cannabis indica
tttgtttatatttgcttacgaaaatgtataatagtataggggaattttattaggctatttgtaaaatatatatgtatatagaaataaataagttagtttatatatatgggcataaaatttgtgctacaaagttaaaaagatgtctcaaaaaatactataaataaacttaataagatttctaacaaaaaacaactatcattgaaaaagtcattataacagttaaggttcagggtctgggctgaggtaagggttcgggtctagggctggagtcagagtccttattcggatctggagtctagtccaaggtctgggtctggagccaagcctagggtcaagtctagggtttgagttcgggtcaggattcgggtctggggtcgaggtcaaggttcggctccagggttggggtttgggttaggtcagggttcgagtccaaaatattatacattttggggtccgagttcgagtgtcaaggtctaagttggggtctgagtccaaaatattaaataagaaaaaaaaaactatttaaattttttttgactcactttatacagtgaactttacctcaataattggggtgctctaaattcctttattttaaaatttctttaaaatctactatttatgttgtacatttataaaatattattcattgctctaaatatattttattaactattttgagtttgtataatttttttttattat

SEQ ID NO: 255082 - DNA, 657 bp, Cannabis indica
tactttttgtgactaaacctaaagtgacacttgtatctaaatactatattttagtcacaaatagctttttgttgtgactaaaaatcacatttagtcacaaaaaatttatgttgtgactaaaagttaacaccaaacgtagtagtatgtttatgtcccagtgtaccttgtttgctaaggagtctcactggggtattggaaactatgtctcaatttgtattagttactctcatttattttctagttgtattttctcttatattagcagggattgtaattataccgctcataatgtagctaagtgggcatttacccacaagaggtttggagttatcccattaacttccatttcgacaaacattttatgtaatgaccgtgaagtctaatcagtttatttatcagagtacgcttttcttcaaaaaacaaaaaaggtaacatatatggtaatttaccatatatggtagtttattttgtgtatatcctaagaatgacttgaggtcacgacacacgatccgttccacgaataataaaaataagtttttcttcataaaataatatttaggaatatttttctacatttaaataaagattatcattttaatttaatattactattaagtagtgtgttaattaatggtacatttggtaacacttttttta

SEQ ID NO: 255083 - DNA, 1176 bp, Cannabis indica
atgatcactagtaatggccacaacgaacatggagtcgcaaccaactttgacatcgcaggtgatcttgacctaatcatttggaggcggcgtctaaacaagagacccaacaaccttcaaagaggtaagtaaccaagatccataatctgcataacaagtagagatagattcaatataatgtataatgctacccataacattcttgtgtaccttgtcattgtgcgctctccaaatcgtatccaccacaattgaaacataaatgaataatttttcaatgtccacccctttatactttagactccataagaaattaacccaatcccatatacgggcttcataattcaaaataagcataaccccccaagggaaagaacaccaaagatgaaaatcaaaattacaatagagaaagagatgctccattgtctccttttcctcaccgcaaatgggacaagagaccttctcaatatgcattctcttcgcgagagaggcacagataggcagagcatttgccatattactccaccaaaggaatgatgctcctaaattttagagttccaaagtttattccagagcgtcggggcaacactgcacaatggagctcgctcaagagcttggataaggtaggcagacttggtagaaaataacctattcgattctttagtccagacccatctatcattctcttgaccactaggcttgtcacctttgattatgttattaattgtttcatggtaaaaaaagtttgagagctttgaggtgtcccagtccccattcggtaagagtaaatccacaactaacctcaagtccttcagcggacgggtaataggcttagggaagaaatcccaactatgaataacccacgggtcctcccagatattcgtctctttcccattcgaaataagcttgcacccccctttcttgagaatttctttagtacacactatgttcttccaaaaccacgaatcaaagctcttgaaagtacacgccaataactttttacctctaagatatttgacccttaaaactttacaacactacatctggtcctcatttagaagagcccaacactacaagaattatactctttagcggcggccgacattagcggctcggaagctcctccgccgctaataatggccgtattagcggcggaggccatgtgtggccgctattgggggg

SEQ ID NO: 255084 - DNA, 1115 bp, Cannabis indica
actgggatcgaaatgctggacctagatctggaccgagatcctaacccagacccaaacttcgcccccactcgggaccctaactttgacgaggacccgatcctagacccagatcggggtccagtccttaacacaaacccagacacagactcgaaccctaaccaggatcagaacaatggacttagaccaagaactaaatccagactcattctagaccaagacccaggaatccagacccaacctagaccaagacccaggacgcgaacccacacccttagcctaatctagacctagactgaaataaggacccgaacccaaactcagacgaggactcgaactctaacccgaactcaaacccaaactcgaactcaaaatcgctaatggaacttgaaccgaactaggactaggaccaggaccaggacctaaacctaaacccgaacccatatcaaaacccttaaagagaccttaacccaaacccagactaggactcgaagccgaaccttgattgggacccaaacccacacaataaccgggacctagagccacaatcaagataggtacctggaaaatagaactaggatcgggacctagtacccgacctagacccaaacatgaacctaggacccagcttctgacccggcactagaaatggaaccagactgggaccgagattgggatccgaatctggacccagggcttggacaaaacccgtagtctgtgtttggatttggtacccatccctggactaaaacccacacccggacctgaatccagtcccaaacgcaaaagtggacgcgaacccgtaccctgtgacccaaaattggaaacaaaaccggaagttgaccgggactggaactaggacttgggcttggaatcataactgaaattgaacctagatccagaactataaccggactaggacctggatttcaattcagacctataccggaattgggagccgaacttggatcccaacataaacctgcactaaggacccgaacctgaacccgaactcagacccaaacatggaaccagactagggacacaaaactagggttgggacctagaaccgcaccccaatctcgatgtcgaacccaaactctgaaatgggacatggg

SEQ ID NO: 255085 - DNA, 764 bp, Cannabis indica
attataattatataatctttcttataaaaaaaataaagtatatctgtaaagcagtttttgcagttttttttttgttatttttgtgtttttgtgaaattattccttaaaatataaagcggttcttttttattttacattttaaagcaactgttttatatttttacgaaaattcacgtagtaattcatataataatttacggagcaacttatatcgcaatgaaaatccacatatcaacccacataaaaactactgaagcaacccaaactaaaaattaaaaaaaaatagtatatggagtagtttcttaaatatatatatatatatatatacagtagaacctctatatagaatatttaagaataacctttaatttattataaaaaaattaagtctcgatacgggtaagtaataaataaaaataacctctaaattataattaattagggataattgcaccaaaagtcttcaaaattgatacagattagtccccaaccttaaaaatcgacagtgtaaacctgtaaaaatataaaaaaaaatcattaaatataaaaatataattttttttataagaaaaatagtaccttatgtaattatctttttaaaaattatataaaattaacttttttgatgaataaattatacaatacaatttttttaggctaatcaattatatcatacaaggtgatttataaaaaaagatttttataccacatactgaaatttttcaatttttttacttttttttatagggcggaatttttttcaa

SEQ ID NO: 255086 - DNA, 8676 bp, Cannabis indica
ctggacgttccgaaaataggtactatcaggtcgagtgaattcagtaatagacgtctgttggtattccaacttcccttctcctttcagggcctatccgaaagagattcttggtcgtgaatatctgaataggatggtcaaatttttttttttggtcaattaaatttgtgtcaaagctgaaattaacagattcatgtaatattttgccaactaataattttgtagtatttttaccaaataagattgtagtattccactttgttatatttggataagtttgttggttgtataatattttctttaattatttacaacccataattcctataaaataactaggattattaacaaatgattaataatagttaagaaatataataaatatcttttaccaatacaacttttttaataatattatttgtctttataaagacaatttcataacaaaaataatattttgctcaaaaataacaacaatagtatttatcatttttttggggtcaatcttataatattgtaaatgaaaaattatattaatactttgttacaaaatactttttaaaattacaacaaaactttgttgttatttaaaattatcacaaaatgttttgactttttatatataaatatatatatatatatttaaatcattactctctctctatatatatatataaacccatgcatcaattcttttttgtccactaacacttaagatcataattgtttattaatgacaatatctaactaatttaactttttttttttataaataaaaagggatcactttggtatagattttttccccaccccttcagttattctgacaatctcagagacaatatgttgattatatgggtttcatacctcagtttaccttaattaagttatcgtagtcactttaagggttttatcacataaatgacaccacctccggtaaagatcaaacctttctttaatccctttcaagaagatcagttggagtgggtttcaaacccttgactcaaataaggaaagatgccagtaaaagtaattcctatcactacaccacacaatacgtggttaactaatttaaatttaacacaagaaaattaacctcactcaagtggcatatacacaaaaattaataattttaagaaatttacatgcaatgcaaaatcatgaattcatgcaataataatgcaataggaccttaaggcataaataattattgggaattagttatcacattgttattctagttttcaacatcaaaaaccaaaatttgatatatggtataatgataataatatatatatatatattttttttattttttgcaaatggcatataagaagctggcaaatgataatgatgtgttcatgatatatgactaatattaatttaattaataatttaaatactataataattataaaaacctgattaagacaaaagagtttaaatactaatattgattaattatttggaaaacaaaggtctcattgactataaacagatttaaacaatgtgggcttcattatgtgtacatatgaatataaattaatttaacttaattaatcatcaattgaatatataatctacatggtctcttatatataatgttattgagaaattcaacatcaaaaaagtctttattatgtggggtgattttctatttatgacacttaagaaaacttataacaataattatttttagtgtattttgtattcataatatacacattttaattttgcaacagagagaccaccggagactggaggaggagaagagaaactttactgttgcgactgggagatcgactgagcttacttttaaaaccggaggcaggaggagacgagaaatgccattgctagcgactgagagatcgaccttttcgttgtaaatttgaggtgttagttaaatactaacgggatgattactgtgtacacctgtgcatacataaaagtaaaacttcaaaactaatacaataataatcaagttgatatttaacagtgatatttagtaggcattcaccaaccagtggaatggtagtttacctatttcttccattcctgttaaactcttttgtaataacgatgagatctaatttttgtctataaatataagttaagtttcaatcaaagctctataattgtgtaatatgtatattattagaatttttgtattgaataaataagatttgttaaatgtccatggtaaagcataattttttctttccattttgtaattatgctttactagtttgtttatagagttagtatggtcctataattttatttagaagtattttatgagtcagtaataataacgtgtaccatacaactattactccttagcacttttcttaatttagtgagtaaaaaactttggtgttttttcttaatggtaatgagattgtctaaaacattcttgactggtacacaagtactattcctgtctcttaatgactaaatttaagtaatttgaaatgttgaaatctttctttgcttcttctagtgtcctcttccttctttgcagtcttgaccattataaaatagaaaattcttacaatttgcaaaaagatgccttgagtgacccttttaacataaaagctgtggttggatcatcataaaccccacaccccttcttctcctttggtacctaaaccttttgttatcatcaaatgatgactttccccaaaccaaaagaaaatagcccatgtgcaacctcttccccacttatctttggaaaaaccattaaaaaagaaaagaatagaaaagaaagttcaagaaacattattgaaactctctagtatctcaagcattgatacctatatgataagctagacattatatattgtcacatagtaaataaataataaacatgaaagcttctctactctttaacacaatccttacttcacattaaaacaacataatgttgtagattttaacaagtacatgatcatccaagaacactagaagcaaattgggcatttaaccaatccattttcattacactctggacatctaatgtagtacaactcttcatgatcagtttgatcaccatttggcaagaccttccggctcccattgcagttaaagcacacagaaaatcggacgttggcacaaccagggcacggggaattggcttggacaagtgggataccttccaagagtttccttagcttgccttgctcatgaagtactccaactacttcttcagctcctccaatataccttccctttatgaaaagccttggagggacaactctacttcctagtacactccatagctcttcccgaaattcctggtggaacgacacatccctttcgcaaaaagacacctttaaactctccaacaagaattttatagcactacaatcctcaaacgtcttccttactcctcttaagcttgttgtgtatagaataaccttgtcattcccatctggtggacatttctcttcaaaatctagcaatgatgattttattccatcatcatgatcatcataatcaaccttattaacaatattattgttacctactaattgatcatctgacaagtttttctcctccattgtgtcgtttaacttcatggtggatgaaagagtctcctcctgattgtcaccaacatcgaactcatgagcttccaaactttcatggctaagatctttgaaaagtttaggggataacccaatacttagtagctctgagagactttccttgtggatatcttcttctccttgagttagtgtggtttgagcagtacacttccaagtagtacaaaacttttctgttgtgggattcaactgatgaaagactaggccttgtctaatagtacctattgcttgtatggtttttagtttcttaaggaactttcccttcattcctttcatgttctattgtaaatggtttctagtgttctcaattctcaagaatgtatggaagaaatggatgagagaaattaaaagacatgacattggtgaggggtctctatttggggttctgaagtggctggaaagtggaagcaagaaagaagtgttaagactcctttataaagttagtgaatgcatgatgatcactgcatacagtgtggggtttggcaattgacacccttttttctttctccatattctaattcattgactcatcaccaaccatttggggtctctctcaatcatggttgatcattaggagtggtttttatcttgatgtggaaaagccatccagtggctgagattcaccctcaatcactaatcatgctctaatactcaatgacatggcacaatctcattggttagttggcttaacatagtaggaccatagttagtttagaggagacaagagggtgatgattcaattgcaatttgtgcaaaagttacttcttcttttttcttcatcagttggaacttctcgggataacaaagtaaagggaaaaactttttgtaatgggttaagattgattaatatatatatgtttgtgggtctttcaaccgcaatcacatccagttttcacgctcataatattacaaaagaacaagttcatatataaaaaggattatactactaactactagtgggattgatatatatagttttggagtgtcttgttcatatctatataataaataagaaaggttgaagattctatgaataatatgcttcacaatgtaccaaaccctgtcgtgttattatggaaaaggatgtacgaggtgatgcatctaatcaatagaatggattgatgagagagtggataaggtctataattaatcagatgttaacatctttcaattcaagcatacacagtactaacattaccaccacacacacgtgtaaatctgtggtatttgtgcttgaatgagtatgcaattaaaaataaagaaaatttttcattgagttctcctgatcttagaagtctgaatttgttggttactacacttcaatttgttgttttggtcatgactttgtagaattgtcatagttgacatataacaaactctaagtctaaagcatgaataatccatactagttgtgtcattcgacccttagccaattttcttttagttcttatttaattttctctttctggtgttatcgacaaaaaaatggagcaagtgtttgttatttattgattttttgcgtatatggtattataggaacaaaaaatgcatgataatgtcctatcagctgaattaattgtcaagatttttcttttttggagtccttaccaaaaaactaatacagcaaaccaaacaaggtggctcatcaatgtgttaatggtgcggattcagatgagattattcactgggttaggccactgatgggatagtcaaagctaatgtgaatgcggttttggctttggagtatagggacgccgaccgtgctgtatggagtgcgtcgaaatggcaccagcttctctgaaattatagctcgactcttctttggggctttgtggttaaagatactattgatgttaatttcctgttttgttctaggaaagtgaatgttattgctgatctctacgagtcctttcctggtggaattggctttagaggtgtgtttttgaggctatctttttctcaaaaaaagaagaaaaacagcactattctaccttattaaaaagaatttgatttatgatcaacacacacacacacacgagattagatatgttatgaaaaagaaaaaaaaaaaagaaataaaagggtacttaaaacaagaaaagaacagacaatatagtaagtagggaatacccgggaatcaaggctgattacctgggtgtgacaagaggaatattttggttgctccttgaaagagctgtggtaacatattatcgttcaaaagggaaagtagtagttggtacaatagtaaattacacataataaaagtttaagcatggtttatggagcaacagtgctgaagttttctttttacacgtttttggaaagagggcaatgatgcacatagattaaactatacaattaatctatgctgcacctctagctatctgccacagatgatccaagcccaatgctaaacttgaaggaaatgcatgtcagttcatgaccactttcatcgtgcattctcattctaagtgtgtatgtaccctgtacgaggaaaatttatcagaaataccattgaatagagcaattatgataaggacatttgtttaatataaagttcgaatagactcctccatgaaaaagagaagaagatttaaggttttattgctaatatcatcttagtacattgaagattcttcagcctcaataggcggaaaaagagaagaagataacactattaggaggttgactcaactatgtatcagattttattataattatcaaacttatctaatttaaatggtcaacataaaaaatttgattcactaagagtagcccaagaacttgtaaactatattaatctttcctgtgtgtacacagaccgacaaacatgacactttgttggctcaggacaacatttgaatatcctaagtagaaaattccttctataaataaaaatagaaaattcctttcatatacatggacatgaccccagtgcattatgttataagatacgaaactaagagccacaaatgatcttggaatgactatctaaatgaatcaatgatattagaggagatactatcagtaaattagatgaaacatgaatgatttagatggaatttagcatctaacaaaaatgatttagcaggaatttggcgatgacatggctcagaactaagtacttatatatatatctaaagcaaattaaattattcaatggacagatgacttactggaggagtaaatgcaggtaaagcttgagagtgagaaaccacgaaatcaccggatgagacagggcaagatgtctcagtgcaaaggtcaagaaattctcggtggatttggattccaaacaccgaaacatcgatctctatcttccctccagagattggtgtatctgttggcacataaaaggtcccgagttcagaatagaaaaggaaagatcaaggcaaatggacaggcttctcgcaccgtttactaattattaacatcaaacctttcgtagtgagtttacatatacgttttgctaaagcttattttcagaacttttagattgaattgtcatatatgatcgtgaaattataaaatgtcatacacccttgaagaaaaagaaaggtaacctgatgaagaaaaaaatgaacatatttttacacttagattttgtacgagcaaactacttttctgggccatttgaaaaacccattttggtttctttttacaccaatatcaaacaaacctagaataacatcgatagagagatactaactctagtaaaaagcatattttgatttcaattcttacagaaaaataaatcaaatttcatattgttttcaaccataaaatatcaaacagcagagcaaaacctttacatgtcgaaaatcataagtttaacttcagaagagtacctgtagttgcagcaatggcgaaagttgctggctcgcctctgactattggataaggatttatatctactttactaaccttgacttcataaagcttcttagctacattatatgtcacaccacaaaagatatcaggttattgtttcattaaataccaacaacacaagataagaataagaataaattgatatatcagtctgattaattacacatatacagacatgataagcttaaatgaaattgttgaaagaacataaaaataattgggtatatgatctattgttgggcaccctatctttacaaatccattttcgttgttcaaattaacacatataacattatacatcaatcaagtggcataatagatagcatcaaaacaaaataaaattccccaaaaaaataaaataataatcttggtaagccaatcaaacagagcatataatacttgggaaaaagaaataattttcgttttgttttcagtggtaaggaaaatcatggcatttatactaaagctaaaacaaaatcccaaatctgaaaatctatatgaaatcaagcctatagccagaaacccaaattaaaatcagagaaaaaaaacaaactgttattgttataaaaaaaaaaacagagaaaaataaaaattggcgataataacgatgacacacgaaaaaaaaagtagaagcagagagagagagagagatactgcagtagttgatgtcggtggcttgagcgaggggtgcaataaggactaggaggagtaaaaaagagcttcatttctgccatgtaaacccagcaaagttgatcaattgagtgagagagaaatagcaagttttgagaaaattgagaaatgttagttctagggtttatgatcggagtcagagaccacaccagataatatcaaaaaatgggttggaagagagatgtggaagtcgatgacttgaatggagacgaatattaggtggaagctttgaatgtttgctattattcatttatttatcattttccttaaatataaaattaattcgctggatttttataaatatattaccctcttaggtagttataatactgtttggtatgcaggattggactggattggattgaaaaggattggattgtactggacaagattggattatgctgaaagtaatcctgtgtttggtttaagaatggactggactattttatttatttgctttttaaaaaaaaaaacttaaattcaataaaaatatataata

SEQ ID NO: 255087 - DNA, 990 bp, Cannabis indica
tcttacagctctctaaactcttatttattttattggttgccgaaaatctcggtcaacaagatttatccaagtaagtatatagtttataaatattaaattaaaatttatatttacagttatttaaattagtaattttaattaaataaatagattaaaatatatatcaaataaaaatacaattctttaaaataatgagctttaatataaggatattcaatttccattgttggttctacataattcttgttttaataaaattcatctctaataaatgttcattcattagcaatttaacacagtaaaatctcaaaagataagtattattataagtcttttattcttagtaatgatcacctcaatagtgactaagacactactagaaaattgggttttagtgacacacattgagtaactctaaaagtgtatagtgacacttcaacgcgcgtcactaatgacgctgactggaaaggcagtttttagtgacacttcacacgtgtcattgaaaccttttgcattcattttatggtcgtcactataggcttatagtgtcaggttttgtcatactgaaaaggtaacagccacacacatgaagtgtcactatatcctatttttctttttttttcttttttattaatatttttagagatatagtgacacaccaaaagtgccactatattaaatatttttctaaaaaaatataataattaattttttaattcaaattttatatattataaataataatttatattaattatatacaaatataattaaatataatactaattttaattaaccaaatgtaaaatttataaattaaaccattataattattttttacaattataccaataaatctataactagaaaattatacaatacctattaataaaaaaaaataaataatgtaataacataccaattatctttattattatataatatgtgttcaaaactttttaaagtcaaatctgtaaatacaaactattt

SEQ ID NO: 255088 - DNA, 586 bp, Cannabis indica
ttattgtggccttgttttattcctaatgcagctcgtaaattctgtagttcggcgtcatcaccgattggcctttgagaatttttagtggatgggattccagtaccgggagtagtctgctcggttgcaatactagtatttcttgtctcttgcacgcctggagtgaacccagctagaggggttgtcactccttgacctacagtttgtgtacatgttggtggctgaaaattaattacgacagggcccatcctggttggatctcttgggtttacaagtgtctacacgcttggatttgtcaccattagatcagttgtattagtttgatttctccttcgtgtttgcacaaccatcatgtgtcctgaaaaagacttaagacaaaaatttgtgtgtcattgctctcaatgaaagcattgaaatgttgaccttccttcagcaaacgatagtgagtcaaattaaagcgattgagaatagttaaataaaagaatataaataatataaagtaaaaagaataccaaatttatagaggtttgaccccttatagttagtaatagtctactttcgtttttgttgtattgacttgtgagatgat

SEQ ID NO: 255089 - DNA, 735 bp, Cannabis indica
tttgaacaagatagaaatagttagttgtaaattgtttattaatttgtcttaagatgaactgtataaaccccaagtgtgagagttgtattagagttagttgaacaaatagttctatataggacaggtttcttgactttttcttccaatttgtaaaggatttaatttatagtgctactgctatcacatgtgatgccaatctatttgcaagtttagatatttttaatcatttttatttgcaagtgtaaatccacggttgcttgtactgtctacatatattggtcattgggaaatggaaatcggtaccttggttaattttagaagaaacatgaaatcccttttgtggagttttgagacgtgatttttggtaatttttaggcacaagttattgggtcctcattgatggccatttaaaaacctactttcttgggcacataatttcttttcacatctccattatgtgatgattttgaacttttcttgttggcagctcctcttttccaccaagcttcacatggaagtacagaaccatcatctttgtcatctttcaaaggccttggtgaaagagtcaagtccccagcatctaagttttgttctgatgtttcaacatattcacgaatagctatctcctcaccgaatggtgctaaaccaactaatttgtttcagtttgaaaagaactatacttggcagcactatacacattttgctcttcaattagatttaatcctgaatatttgt

SEQ ID NO: 255090 - DNA, 1052 bp, Cannabis indica
attgcattcattgtcaatccattgtgacattgatttacagtaattaaactaaaaacgtaaacatcaataaatgaataacagtttctattcactaaatacagcaacgtatgcgtcttctaatatgcgagttgactgttcatattctagtgtaagctcgcgggctcaagatagacctaacatttaattaagtctaggatgcctgcgttcttgtatagtcgcatttatggacatcgtataacgagctgatagaacctagacatgcgagtctatattggtttatcgaggctgtcgggtcgttgagaccagctcgcatcatagagactcgatctctaagttttcgcaggaggatcgagaggatactcgcacatatcctggtacatgcgagttaaatctgttccttggtcctacataatgcgagtcacacgaatgcgattagacttggtcatattcgcatcatctcgctgattctagctcaggcgaggtttaaactcgaggagtctctcattgacatctcagcttttcttgaaaaattgagtacacgtgtcctccaaacaggagtctggtctcgagtttctaggtgagagaaatctcactataacaactcctaagattaattatttaaataatatgttttgagagttaatttccagtgcactgttcttgcatggttggctcacttggattgggcacatcgggattccttattgcattaactatataaacagattattattgatattattaaaaaaaataatgtaagcagttcaaattataactataaaaacaattacataaatgatattataaaataatatagaataacataaaatagataagaaaaaagaagaaaatgatgaagagagaaagagaaactgaatgagaatttctcagttgtttattctaatgggatgaacctcatttatacaaaatatgactaaaagaatgataaactaaatcaataaaaaaaatacaatcaagtattaatggtgataattaatttggtgatttagacatccataaataatattttataacactcccccttggatgtc

SEQ ID NO: 255091 - DNA, 673 bp, Cannabis indica
tattgtaactaacggagcaacctaaatcgcaactaaaaatcgcatagcaaaccacatagaaatcaccgagaaaccactttagaaacccaaaccataaatttgaaggaaaaaaaaagttaaaaaaatagtgtatatggtaatttttcttttttaatcaagtttatttatattaatttttaaataaaaaataaaaatttaataatgtcacactactactggtatttatgctagaaatgactgcatttaaaatcatttccaaaagtatcaaactaaaaacatatggactatgatgttcatctttaatgttattttattaattattttaaattttaatattaatttgtttttaaatagaattgtgtatatattaatattgtatatataaaatgaatattaatatataagttttttaaaaaattataaagttttaataatgtatttaaaaaaattataaaatttgaggtaaaaaaaattaataaaaaggtaataggtgatttgatgaggttaaaaatagatactctctttagcctctcaccatagggaactgtaaaaatattttcaatagtcatatatcttgcattgtgggacataactgttaaatttttaatgtctaatataatgaaggactttaaaaaatattcactttaaattattgaagaaaaatgttaaattt

SEQ ID NO: 255092 - DNA, 1680 bp, Cannabis indica
aaataatccaccacaaccctatcaaaataatggagataaagtttaggttcccttaatggtgattagcagtttcagttatcagctgctctaataatatctgtgtaaaagcagctaagaaatgcagcaatgaacatgggtaatgagaaagttaccagaatcaacaggtgcaacacgaccaatggctgattcaccgaaatccggatctaaaacttcctcaaatttttcatcacttccatcaagaggcatagttcgaactttaaagcttgcgggcatcagcccttgcccagggctatggcagtccacagttttttcccaactctaagaaatgataaaaacataagcatttgcacctcttaagcaacaacagcaacaaaactaaaataattgagcataaggtaacgaaataagaaaacaaatgagaaagagccatccacatacttgtaattgcaaagtgtgaagcagaaaattcttcacaatctcagattctcccttgagcaaaaaagcaagggctgatgggacgaaatcgcgaataaaaacttgatcataattcagaggttggttgtcggccggatcatttgcagctacagttcccacaggattcccacaataagtgacaactgaatcccaaagcaacttccacccctccttctcactctcagacacctctttctcaaccttagtttcatttaaattagaactatctacatccacattcaagtctccaacactggaagactcttcctctttcttgatcacatcattagaacccagctcaatcttttcaatcaccaaaggcttcacattcaaaccaccttgaatgtaaatactttcaaagcttttttcattaacactagcttccaccgaagaagaagaagaagatgtcgaatggtttcgaaaatccgaggctacatttcttacaactaaaaccctcctcctccttctaaaactactactgctaccactaaacttattccctgtaatccctagaaaatttcttctaaaaaccctagactgaccccaatttgaaccagattcattaaaagccctccggttctgatcagtaacacatacatagcctacaatttgagaattagagccaccgaatcggcctctggtgaccgatctcgatgaattttcagggatggaatcgttcaatttgggtgaagaaaacccaaaaaaggaacgatttttacaaccaactagaattctacaacaaggtttcattgaatgaatcccaatacagctgctgctactcatattctcaaactaaattcttaacaattacacccttaaaactataacccaattcctttttttcaacaatttcaaattttcttcaataaaactcaacaatttatatacagattcctctgttaatcttagaacacttaaaaagaaaagaaactagatatataaattgttcttaaaaagtagaaaaatttatatatttgtatgaatataggaacttaaaaatgaaatctttatacttacagtataagaataccgatctgatcagagaaaatattttgattgagaaacaagagaaattctttttttgtgttttaaggtttcttctcactagatttttttcttatatacaaacagagaggaaaaagggaaagttcatacgtaggatacaaattagttagtgtgagattacatttctgtccctgcacgtgg

SEQ ID NO: 255093 - DNA, 1079 bp, Cannabis indica
aattggcaatgggaggagtagcccattcatcttatatattacaatttatttccacacattagcaatatgggactaactcttaatacaccctcctcacgtttaggcctggaaagtgtgggtataacaaacgacctttaagagaccacaggaccgaacgtgacatttgaaagaatctcacaaggccaaatatcgagaaatttgttggtgtacacgttgggaaatttggccgaaaggtcccaaatagaggttaaaggggagatggaagtatctgtttggaccggcagcactttggctcacaacgaatcacaaatggctttttttgaaccagtagcaatttgggctcacaacggatcacaagtggctctgatactatgttaaaatgtgggaataagatgaatgaggttccatctcaaaaccaattggcaatgggaggagtagcccattcatcttatatattacaatttattttcacgcattagcaatgtgggactaactcttaatactatacatctcatgatcatcaaataaatactataattgacatgattatcaaaataatactatacatccaaaaaaatatggatactcatatctagccaagtaagttgtttatccatccgaagagcatggacaattaatctatgaacaacacagattaaggacactcttggaaatctggatagcaaacttgtaaaaactctaacaatgatctttaaatcattagagtaggaaattctgatagtaaaacaatcataaatttaagatcttggtaacagactgcaatccaatgtcatcaaattcaatatatatgttcttataaaaaaaatatatatacgtgtaataaatatttagacacaaattgtaattaatatagaattttatttagattaggattatggaaattctaaatgtggacttttcctttgtgagaactgaaaagtatgactgaatataacttcagttaatacaatttttttgtgacaagtttaaaattatattaaaatgataatttaatttttattgcaatatacattgtaaaattttttaataatatttatttatttattatgattattatt

SEQ ID NO: 255094 - DNA, 412 bp, Cannabis indica
agcatatgctaacaaccaatattggagttgttgttatggatgaattcaatcaggttaaagcagggttctccaaactctttgttggatgtgttcctcctactgtggcaaaagctaaggctatccttcaagccatctaatgggttcaactgccccacctccctgtggatgttctcataactgattgtaagactattgtcgataagctcgtttcttgtaattggaatagtagtctcccggatgacattttaatttgtgttaaaaacttgtagtcgttcagtcctaacctaactatagtctaggttcatagagatctaatacgttagctcataaagttgctaagttagatctaaagttggataatgaattggtttggaatggtctccaccttccttataatcttgtttggtttgta

SEQ ID NO: 255095 - DNA, 826 bp, Cannabis indica
aaatgtgaaaataaaattaaaattactataaatattagaagaaaatattgtaaatttttattttaggaaaaatattaaaagaaatttttagagaaatgtaaaatgacacttaagagcatcttgaaccatgtggctaagtgggcattttcccatcagaggtttggcgccgtccctatttcctctttgcccaactctttattttgtaatgaccgcgaggtctaactccttttgatcaatatatgcacgctttttcttcaaaaaaaaaaaaaaaaaaccactaggttgtccgtctgttaaaaagaaataaagaatagaggtgtccgataagtagattttgtccataggtacgattttggtcctacattctaaactaatttaaaaattaattgtcctaaaatgaacaatgactatgtgacatttattaattaaagttaacttttttcaaagtgctatgtgcgatttggagttgtccactagagtaaattttgtagaaaaatgtgttaaattttatatatatgagagaaaataaaaaaatatatatattttaagataatgtttgtattttgataactataggtgttgctctgagatattcttataatggtgttgtaagttaaaataacgttattaaagtaatttaatattaagtcttatttattttattttaataaaaattatataaaaaaaaaatactaactaatactacataataatagtaggcaacttgatgaaattactattgttttttttattatttgtagagtacttaaagtttcaagaggtctaataaaattccccaaatgataaataaagttttttttttttt

SEQ ID NO: 255096 - DNA, 1162 bp, Cannabis indica
  modified_base (1079)..(1079): a, c, t, g, unknown or other
agttctagaatagtattaattaaatttaacctatttatgcaacttcccacctaataattaaccagcaataaaattgtttgagctgtttttagggtatgctgtgtgtggaagctacccaaggtttctacagatctataatgactcaactcatcactactctgctaaaatgtatggacggacagagactattcaatattggtcatgtagtgtaggctcactttcccaataacaaattgaagttttcttcttcttctctttttaggcaacccatcataagagaattgtgtatttttatcattattattattattataacagttttaagagaattgttagaaaaaaagtgtgtaattatatttgttatttgtgtaattttaataatttttttattgacatttaaaattattattgataaacctctaattatttattcaaatttaagtcgctaattatttttaaaaaataacttcataacagtgtacaattgaatatagggtgcaaaatataaattcaaaaattaaaaaaatatatttaacttttgttgaaagtacatatcaaagactattttattcaaatatatataaattattaaataaataaataaaagggtaaaaatcataaattaaattaaattagtaacaaaatagggaataagaaaagtaatattcttgttgtgcaaaaattgaactcttgttaatggtatatatagtttatgctggacaattttgaaaacatggcatgtatataatagtaataaaaaaattatatattattgacccaacttcagtaataattttattagaagagagacccaactccattttgaacaatatatgtactaataaaaaaaatatatattgaaataacttttatgtatattaaaataagtttctttttaaaaaatatatatttccaagatagtttgtcgtatttgatttgatatatataatattattattttattgaaatatagatatattataggttgatcagatcagaacaaacttataaaccctagctctagtggatgaaaccttccatatacataacttagaacagttcattgggtggtaatgccnctgtttgactggggtgcgttgctaacttgtcatatatatttattgtatgcccaattttctaattaaatgactgaccgaaaatc

SEQ ID NO: 255097 - DNA, 620 bp, Cannabis indica
aaaaaaaataaaattttagttaatcataaaataaataagtaaataaaataaaaattagatttgaagttaaatttgaaatttttgtaactataacataataaatagggtttaaaattaattataaataaaaaaatattaattagattgtaattttcaaaatttaatttaaaccatttaggcttgattggtttggaatttgaaaaacttaaaatgtgggggtccacataaaaaatacttgattggtttggtgttttcaaaaactaaatttgaatataattttgagttttaagccaaaaagtgaaaacatcaattttatgttttctatgttttcaaatcattgaatttaaatactcttcaaatactctcttactttttttattttggaattcccaaccaatcacaaatctaattttttaaaactcaaaaactcaaaaacacaaaattacactacaaccaatcacatttttaaaaataatttttcacttacaaaattcaaatttttgtttccaaaacactcttttagaaaacacaattttcaaatctcaaaccaatcaaacccttaattagatcaatggctaaaaattattatacctattgaataagtaaaatacccaattcct

SEQ ID NO: 255098 - DNA, 567 bp, Cannabis indica
tttggtcttcatctcaccaagcctacacaccttgaagttaaggcatattgtgatgctgattaggcctctgatatggatgacagaagatccacttctggttttgccatcttttttggccaaaatctcattgcttggagtgttaagggaattctgttaaatctgttattttctgctaagttgtttctcaactgttttagttttcggttgttaggattagcttttcagttgtaacagattcttgtttgatgatcactcatttttgatgagtatatattgtactgaatattcccagtaatgaatcaatctttcactctcctttctcaatctatctcttcatcttttctctctgttctttctttattgcttatgttcttcatctaagctctaatggctaggagattcaactctcctaacatagactattatttgttctacctattaataaaaaaatttattctctctaaaaaaacatgtaaacgaaccaaaaaattatggacaaataattaaaagattctaacaagaccttaggaaaagggagggatggaaaaaggagaggtcatgagttcg

SEQ ID NO: 255099 - DNA, 657 bp, Cannabis indica
cccaattcagtagaaaacaagtttccatgagcataatatttttccttatagatcctactaaccaaagaatcatcattaaccaacatctgccaatattatttctctagaagagccaaattaaagtctctcaagcttcggaaacccagtcctcctgcatgtttatgacgacacaactgctcctagctcattcaattaatacctttaccactgctcgaatctgaatgccaccaaaacttagccataagccgctctaactccttgcaagtgtctaaaggcaagagaaatacactcatagcataattcggcaatgactgagcaatagatttcagcaataccttctttcccacacgagacaaaatacgcccttcccaaccttgaattctctttcaaagcttagccttaagaaagccaaggatagcattcttattcctcccaaccgaacaaggaaggcccagataataacaattttatctgcctcataaatttccagcatagcacagatagaatcccgcacctcactgcaagtattattgctataaaacacagaagactcagtgaaattaattctttgtcccgagccacctcttaagtacgaaacagctgttaggttttatgccccaaataaaactctatttcaatgtaatctattttattcaa

SEQ ID NO: 255100 - DNA, 762 bp, Cannabis indica
ggtgcggatggaaggaggggcagtaggtgcatattgtttttcttcttcttcttttggttttttttttagcataaattgtctttttatattaattaacattcattccaaccacaaaaaaatctagctagctagctcaggcacgagttgggtaatatataatatgaattcacccattgttcaaatataaataattatttttatttatattgcttgcatgtatctaatgcaataatctagctaaccatccacatccaacgctaggcagctttcggctcatccgcttccgctacaaatattggctttgctatataaacatagggagctttaatttaaggtgttttattactgaaattatttaagatatttgaaaattttaaagtaatttacaatatacaaaagaaatattcaaacaatcgtataaaatataaaacacatccatataacaatcgttttaaattttaattttggtaaaaatttacaggccataaataactataacatgtgaaaggaaattaatctttatttttaatgacgaaacaagacgttgcatccgatgcaccacagaatttccaataaatataagcaattaagaagaaattgtattgtatcaattatctatatatggttgtgtattcaaacgacgacggcgcttgtatacgtgtatctaacttatttttcaatataatgacgtgaaaatgtggtcactggtgtggagatacaattagctgcaatgcaaccaggatcactgttacgatcatatat

SEQ ID NO: 255101 - DNA, 832 bp, Cannabis indica
ttttttttttctcagcccaaccctttttattctctctccctttcatcttcttctttctactagtgaacttccaaagccagtaagaagctctgactatcattttcgtctctatcactcactgtcctatctttgcttgaaccccaatctaactagccctacaccatcacatcaccccaaaatctaggtcttcgtcaccctcaggttttcccttttccttcaacctaatgccatcgccatcacctccctcaagccctgcttctctcagatatgttcaagctagactaccttaagatcacaccatcatcccctgtttgtttaatgccctgtcgtccccatatttccctttcacacttttttcttttcgctgcctatatctaaaatattttgagcaaaataggtctttagcgagaggtttgaaaatgccttgttattaaagcattaccccgcaatggcttgatcttagcattttcgaagttcgacgagccaacctccagttttggattttggatcgatgatggtggaaggcgagaaggagagaagatgatgaactagagcttgcaaaaaaataaaaaggtggtcggttgagtaaatctagggccgaccctaagcataggcaggctaggcccgcgtctagggcccactcattttaggggcccaaataaaaaaatatatttttaaaaaaatatcatttatctttatagtaagggtccaatttttttttttgcctatgacctatttcaactcaggaccgaccctgagtagattggtatgggcagtgagcttgttcttgggcctctccatcaatgaggattttatggccataaatgagcct

SEQ ID NO: 255102 - DNA, 1740 bp, Cannabis indica
tcaggaaaattacacttaaattttctatttttccttcagagaaaaacctgagccttctctctccctatctttagctgaccactctctctcttcttcccttgaaatttcgaaatccttagtgattagagtagtgcccacacacatcaagtgatacctcaatcatagtgaggaagatcgtgaagaaagatcatcagcaaaggagtttcagcatcaaagattcagagaaagagatccaggttcagatattgataatgctctgctacagaaaggaatcaagggctagatatctgaacggaaggagtcattatattccgctgcacccaatgtaaggtttcttaaactttatatgtgtttaatttatcgttttagaaagttcatatttaggatgttaataaacatacttgtgagtagatctaagatcctggtaaaataaattccaacatattttgatggccattagaccacccattccttttttcttgttaataacatgaaccagttcctgagagaggatagaagattcagctatccatctccccggaatgaaagtcgattgaagcggtgagacgatacgatccatagttaaaaggagcctttgagaaataatccttgtgataatcttgtagataaaattacacagagcaataggacagaatttctctaccgaatctgcattatcacatttaggaattagcaaaggaaagtatggttcagggaagggcttagacaacctattcgaaagaaattctgaatacactctgtgacatcatgtccaagatctccccaaaaatttctgtagaagcatcccgagaacctatctggtcctgaagatttcagggggtgcatctgaaacacatgcgtagttatttcatcataggaagggatctctgtaagcatagtattctccacttcagaaatcgtaggactaatcaagtcctgaagttctaaggacggactcatattagaaatttcaaataactgacgaaagtatttgttgagaatgacgcccttctcccgctccttgaaaacatgagttccatgatcatccaacaaagaccatatatgatttctctttctcctgatctgagtggaggcttggaagaaattagtatttctatccccctgtaacagccatcccttgatctttgacgccatatcaattcctgacgattccaaagttcagcgatttctttctctactttctcttcttcttgaggattcgacactatcgcttctctgctctgcaggtcaagaagttttgcctctagtgattttattttctcattacagtccctaaaattcttcctgctccagatttggagactttgttgtacctttcgaagtcttctcccaatgtcacccgtatctccattgtcctaagattgggtccaagccatctgaataactttagagcaactttcttctctcatccaagccttgtagaacctgaagggtcttctccccctctgttttagtaaattcgaataaaaaataataggaccatgatccgaagctagaataggaagattacgcactcccccactttggaaacatattcaaccagcttgtatcaactaccaccctatccagtctttcccttattaaacttacattccccctccttgtttttcctaagtgaatttccctccaaaagcccccacgatcaattcctcctgtgtcaaacaagaattgattgagaaaatacccatccttgcgagtgaaaactcgacccccgacttc

SEQ ID NO: 255103 - DNA, 551 bp, Cannabis indica
ttgaaaacatgccttacagttgcactgtcctggatcatgcttcttacaacaagagcactctaaataagtattgtgacttccaaggccaccttgacctggtttcctacaaaacttctttttctgacttgagcccaatgatgtcaaaggagccttctattggtttttatggtactcaattaggtacgcaacagatgagtttcgtattatctaattatcattgtaccatagcccaaaggatctccagctgtgtgtacattaaattaaaacaataaaaataatgagttttgagtatacctcttcaagcctatccgggtatcctcaaaacttctcgtttgttgtatatgttaattcagttgatgaggaaattgcaatttgactcacacactcacatcagtatcttccaaatcaatctatcacacaaaaggaatagtgtgggcttttaggataaattctataacctttgttcttattcagttctcaacacatgagtaagaacaattgagagaaaaaaaaatttctttttctctgtatattacaaaaatttagtttag

SEQ ID NO: 255104 - DNA, 512 bp, Cannabis indica
acttttgcaaaacacaggatccaaaatagtatttaccctataatgtttaaacaaactaacacttctaataatattagattaaacaaaactaaaagttaaataaaagtacaaatatattacaaaaattagatttttttttaaagagcaatgtactgtggattacactgcatgtgatatcccaaatgctttggaaattttttaaactgcaaccgtataacagaagttctaaaaaacatattttaatgcgatgtaatatggtatgaacggtttgatggagtaccctaagcaacagtgtctcacaccatagaaagaaaaaaaaaaactaattcaatatagatagcattggagttggagaagatggagactgggttagatggtgccttaataagtgaaaaatgtatagatgaatagaaaaataataaaaatttaaaagttgttaaggaaaagggatctttattatgtactgaccctaaggagaagggctataactatagtgtttgtgacatgtttag

SEQ ID NO: 255105 - DNA, 604 bp, Cannabis indica
ggtttgaccacaggactaaaagtttctgtgaagtcaaacccagcttgttggtgaaatccctttgctaccaacctagccttatgttttagaacactaccatcaggattctcctttttcttatatacccatttacatcctatggcttgtctcccttcaggaagcctaacaagaacccatgttttatttctagccaatgctagaatttcatctcccatagcacggttccaatgttcttgctgaagagcctctttgagagaagtaggttctcttgaagcaagataggctttaggtttgaaaatccccaatttggaccttgttgtcattctgtgagtgttggttctaccaggtgcagcaagacaacctgctaacaggggcagagcagcaggggaagaacaagcaggaggaggccttggatcaagagatacagattctctttgtgaaggagaaggtgtatcaagttgagtatcctgctgggcaatgttagagagagtgccagtagcctcattagcaggtgtgattcgatccaatggttgctgtataccagaaacagcagtaggctcagcagcttcaggaaaaggagttgcagcagtagtgccatctgcaa

SEQ ID NO: 255106 - DNA, 929 bp, Cannabis indica
atgttagttataatagtaatatgttagaagttaatttagtataataataattatgttagagttaattaaattaacaatatatatattttcaatattataataataaatattgtgttagatgtttaaattaatacaaaatatatttatagaataattaatatatatgtataaaagaaagagtatttatatgagtatgatgagataaagtgatcgtgttgataacgtgttataaatttagacagatatgagtaacaaattttgtatttttttttctgctcttcactttgcttcatattctttatcaaagttacacacatatatataggtgaatacagggtaaggctgttgtcacgcatgcattttttgcgtgactagtgccgcacacgtttatagccattagattgtctcaattttgatctaaaggctgatattaggtaccccatatattatttttatataatattttattttataaatggaggggtatttgacttgagaattggaagtgtaaccggttgcaaactttttgatttatgtccccatttagtaaagtgaaggtttttaagatcaaacttcactttcagctcaaaagaacttcactttcaactaaaaaaactcactttcaacttaaaaaatttacaaacttcagttctctttcattatttgaagatcatcattaaggaatttgagttctaatattttcatttttgtgttcttattagttcttttagggttctaaacctccttttaagaaacaaggtgccttttgaagtaaggaggaggaggggcgtgggggaagagagaaaggggccgtagagtggagagttgctaagagcacgtggaacactgactttgataaaataaacccttaatccgatcaaaaagaaacaaggtatcctcaatcgatcttgttttgtctatgtactttg

SEQ ID NO: 255107 - DNA, 763 bp, Cannabis indica
actctaattcgtatgctcatttcttaatgggcactttaatctttttagtaagatcaatgttattcccaatgtatgcatgttagttggagaaccagtttccatctgctaaacattaaaaataacaaaaaaaaaaaaaatcaatgaaaaatacaataaaaaaaactcatcaaaataaataagtataacaactcaatcataaacacactactaataaaaaaacaatacccaaaactaaggacggacccacttgaattattgtgggggctatagccccactaataaaaagattgtcttttaaaaaattaatttttttttttttaatttgataattatagattaaaatagtaaaaaagctcccacaaaattaaataaatttaataagagtaattataatatatgtataaatattttttaataataaataaacacccacaaagtaaaatttctaagtccgtgactgcccaaaacaataataacacggtacataactaaattcgtataaattaataaaaaattaaacatcagaaaaagtaaaaaaaataaaataaaatattatctttcagatataattatttcaaaaccaaaaattttataagtataatcaatcacatactatatctcaacttaaagtcttacatatatactcttgcaatatgttctagtatatatataaaaaaaaactaaaatacatttttaatctttcctcctctttagaataaattgaaaaagttcttaaatcaattgaaactttaatctgttaaaa

SEQ ID NO: 255108 - DNA, 1287 bp, Cannabis indica
acctcactatctatttctgtcatctatttaatactaacaaatgagataagatgaaagaagacctagaacacataatacaaaaattatatgtgccaattgcatttcagatataaaactaaactgatgtaccctgaatttttctataaaactgtaaaagagtctccataaaaacacaaagtacagaataccaatatcacattctaatcatgaaattaaaaatatactaacaataccaatatatgactggaagaacctgtctcattttcttcttatatcaataataacatttgcattcctatatagaatattaacagaaataaataaaacagcacatacatttcaccagttcataagaattgcttcaaagtttcgaatgtggagatgattgcccaaattaatatcccatactagaccactgaccactaatcacccccacaacaatattagttttaatttctcctttagataggcagaaaaaatcaataaacaattaattttaatcttatctgatcctcattgttgatggcaagcacaacaacaagtggagattattgtggaactgactttgatttgtacgaaaataacatctaatcaattcttctacacctctaaaatggtaaattagcttgacaattgaaaataaattatggtgttaacagtaggaattatcagtctagcttgatctagaccaaattatgcaaagcctaaaatatataaacttcctactaactcactagaaaaaaagttagttcaagatcaaatgcacaaataattagtattacatagtaatatgaatttaaattattaaggactatcttgaatccgaacttttatatgtctattagcatctgaaggaacataagaatttcccttcaaaaagtcaggaactgccacaaagaatccagcagttgcaactttctctgccaattttcttttacaaaaggcaaaaactggtattagtttccaaaagggtacacatgcacaacatcattaacacaaagaattaaggctatatgtaaattaaatcacatctccatgtagtcaaaaattgatatgtaattgcataagagtgagcctggattgttctttatcaaagttttccctttaatcgagcattgcaattaatcaacaaagcattctcatcccactattaaaaccccattaagatttttttttttgatttctacaaacacatacacaacataatagaataaacaaatataaacatcaaaagaaaattacattaaacatgtgaaatcaatcctacctgtttcggttttccaaaca

SEQ ID NO: 255109 - DNA, 1650 bp, Cannabis indica
taaaatctccgaaattgagaaattataactctaatatttatttctaaatattggggtccaccttaaaatttaattcacaaataataataaaataataaaaattagtgctaattgccttttctaatcatattactagagcggtcattacatctttagcgttatcacaacggactgctttaatggcagtgttgtattgagtggcaacatgagaaaaaaaatctggtatgatgttggtaacatctgatttatttttaaggaagtaaatccatgtgtgtcgtgttgagtcatcaacaatggtgaggaaataacggtaaccttcagtgctaataatgtgaaaaggaccccaaatatcaagatggattagatcaaaacaatgagtagataaattgtttgatgagtgaaaagatagacgtttttgtttggccaacggacagattggacaaaaagaagaatgatgtttattattagaaaaaaaacttctttattcatatttgttgtaatttgcattgcaggatgtccaaggcgattatgccaaagattattacaatgattgaaagaaaaaatagaagcctcttgttgggtatggggcagcaagtataagttgcgaagccttttagcaatcccaatcttggaagtcttgtgagattcctggataaaacaatagttagatgtgaaagagatgttcatattggtttgttgaagaaaagcactaacagaaaaaatgttgagttgaaaatcaggtatgaacaagacattatgtagagtaatatggtcattaattttaatggtaccaatacctgtgacacggacttggtgtccattgggtaaggtaacattgttagtaagaattttgctagaaagggattgaaaaagattaggattgtgacagacatggtgagtagcaccactgacaataatccaaaaaggggtatgaatggtacctgtgaagttggataccaagggagtcatctcgactgattgtttgagtgattggctcagcaatgtaatgagttcttggacctgatcatgagtcttgggaggagtcgtgccagtcaagggtgaagtgatctggtttatggcagccttggatgattcttcagaccgttttttgtctccatatccaggggaaatccatggataaatagcatttatcaacccaatgacccaatttcttgcagtgagaacaaattggtcttggtttctttgctttaggagcagggggtcgacaagatgaagtgactggaatgatggggttagtgccaagactgcgctggcgctcttcttggactatcatagagaagacagtggacagaggaggaatgggataatggagaaggatttgagctcagacctgggcataagattcattgaggcccatgagaaattgaatggtttgatccctgttatagaaatcttgcaattttttcatagcaccacaggtgcagccacaaacacagggggaaaaggattgaaactcgcggagttcattccaaatggatttgagacgagtgaaataggatgtgacattggaatctccctgtttaagattggaaatagaggtttggagctcaaagattctggtgcgcaagtaatccaatagctaagattaggatcagaaagagagggacgaggtaacgtaccatcaatgaa

SEQ ID NO: 255110 - DNA, 839 bp, Cannabis indica
ttattattattattagtattgttgttgttgtcgttgtctatttttatatatataaagtttatatatatatatatacttattggtaagcattaaaaaaaaagcaaactctcacttctccttctccttctctcgagcaagaaaaaaccagccaagagaccaagtgccattagcattttctatccaatttcatcccttttcatcataagttgcagctaggagaagactctagttggaagggaacatcaaggtaatgaccttagcttatttctcctttgtttttccatggaaactataggttttggagggtgagtttttgtgttgtagttgttgtgggtttagcagggttttgttatgattctaggatagaatagatgtgttcttgatgttcaaaccagtaggtttgcagcagtagtgaaggtgagagtcaagcttgagtttgttgaactcaaagcttgaactctaatggtatttttcatgttatgatttgattttgagttctatcaactagaaaatgttattatgatacactagaactattctgtgaagtttcattgcaattggttaggtttggagttagtttggagagtttaaagttgaggaaaatcgtgttcctggcagttcagaaccgaaattccggatgtaccaaccggaattccgtttggttagttttcagagaagttgaattttatatttaggccataactttttactcgggtgttcgttttggatgttctatataccttttcgaagcttgtgacgagctctatgatatgatcaagatctcgatatatctttgttgtaacataatctcaatcgagattaacgatatgtattggttg

SEQ ID NO: 255111 - DNA, 1164 bp, Cannabis indica
taaggaaagttttattctcagctgacttaatttgtttagaaaatttctcttacaagagaaggaattctcttatgaaaagttgcctaattttgggaaacttgacttttctttttctaattgttgaattcagtttttccatgattatagcaaatcaaataaactttatttggtaggtattaaagaccaattcgtgatcttggtctattttggaaagtttcctttctgctcttgatttgctgcaacagaatctgaatttaatgctgcaaaatagggacttttttatgatagtcttgtaaaactttgaaatgtgtttatggctatttgcagggtttttatgttctaaaaatgaacttagagagcagccaaacgtttttcatctcttccaacttcatttttcatattttcatctttatgaagagagagtttcttttgggaaaaccttgagtgttctagtaggttttggtctttgtttattattctcatactgttcttagaataggttggagaactccattgaacaagagaaaggtcttcaggagaagacttatcaagtcttactttgggaggaagtaaacactcaacacaacaaaataagaagggatttcactatttcgtggtgttcataaatcaaattggcaaagtaaattacaaaggattgcagcaaaactttagaggaaatctaaaattgtttaagtcaattgtatttgtaattatatgagactttactaattgatttcattctctaggcatggtcccctggactaggagtgtttgaaagaatattgatactgggtataattctcttatgtcaagtttttatattctgcattgtttatttctgttctgctactgcaaacctgtgttatgtagcatgaactttccattttgttactgcagatcgtaatagttgtgtttttaattactggaatttaatagttatattagaatttgaaaagcaaaatcatttggtatcaaagggggacactaaagtcttagtgtgatccttaacgttttcttgtattttctgtacagtatgtcattttttgcagaagggagttccatttctcgtccactgcttttcaatgattataattatccttattggaaggttagtgtaacgccgtaaaaccttgacgcggtgcagtgattttctaattgatgtgc

SEQ ID NO: 255112 - DNA, 643 bp, Cannabis indica
atgcgtagtcattttgagcgagggaaattgatgtaccttggaaggttcatatgtggttcggagaattttatggtggttagaatgcagaccatagatgtacgtgcttcttgttaaagagaaattgtagcagaagaagaaagctatggtttgaagaagaagaagaaagagaaagaaaatcgggtgggtgggtttgggaattatatgttttagttttattttttggataaaattttttatttttaattttaataaaagaaaagagaaaataaaaaattattaaagttttttgattttttaattatttaaattgtttgtttttaattaatttattttagtgtttttttattttaattaaaatataatttttatttagtaaacggatctattagaaaagaagactaatatatcacgttttatttagttcccaaggtcacattagaaattattactgtcaatttttgaaaactaaagtgtatcaactttatatttttagagacttttaacgcaattattcctatttattttaatttgttgttagaaaataaaagcaataataatttatttattttatagttaatatgtgaaaataataatatttttttaataaatattaaataatttaatattaaaaaataattaatct

SEQ ID NO: 255113 - DNA, 1045 bp, Cannabis indica
aaaaaggggaaactttattcaaaaagactagcaatacacacaaaggctaaaagccaaacagaaaacctgaagctgccgaaccagaaaagaggcagcagccacccaaactaccaacttttaattacatttaaaaatacatattcttcctacaatcctcaaacggacccttacccaataacctcaactgaacagttttacgaacatctaaactaactcttctaggggcggcacaacaaagataaaaaacacagcagtttctattcttccaaattgagtacattgtcgctgctatgacagtattcagcaaccgcaactgaggctgctggttcagatttttgcaccagttcagcagctccaagtttgatctaggccaagagaagcagcccaaccactccatgacagcacctataacctgtttagtgaatatacagttgaaaaaaaggtgttcgtgcgtctcaacttcagcttcacaaacaggacagaggtcattttgaattgaaatgaatcggccaagataatcccgagtcagcaattgggagttcaaaatctgccaaaaaacaaatctatgtttcggcactatgagtttatcccagctagctttagcatattcagccttagccacttcaatagacaaattatagaaccttttggcactgaacttacctcctttgactgcttgacaaagtctagcttcatccatgttatctcttatgttcaaaatcttcttgaagtaccaacaatcatcatacttcatggtgtagctccatatgtcctgagtcctcagataaattgaattaatccatttaacccaaagacaatcttgtttacttgcgagagcccacaaatttttagccaaaagggctttattccactttttcccctctcgaaatccaattccaccaaggtttttgggaagacacaccttttcccaagaagctcgatgaagtttacttctattccccaaggatccccacaaaaagtctcgacaactcttgtcaatagctgctgttatcttaaagggtatgataaaaattcccatccagta

SEQ ID NO: 255114 - DNA, 800 bp, Cannabis indica
agccattcagatatggtcgagataaactcgaatgtgatttgccatcacctcaatattgatcctaatcatcctgtaaaatgtcaaaacagcgaccactggactcgagagacaaaatgcgctcaaataagaggttgataagttattaactgataacttcatacaagaagccttttatcccttgtggatatctaatccaatactcgtaccaaaaccaaatggtacatggaggagatgcatagatttctcagatttaaataaagcatgtcctaaagactgctttccactactaaggattgaccaattggtagatgcaacaacagggtatgagttaatgactttcatggatgcatattctagatacaaccagattaagatgcatatcccaaatcaagaacatacaagctttagtaaaaaatatggggctttattgctacaaagttatgccatttgggtcaaagaatgttggaacgacataccaacgtctcgtgaatggattgttcgaaaaccaaatcaggcagaacatggaggtttacgttgatgacatgttggtgaaatctgtcaaaagtgaagaccgtacaaaggatctcacggaatgttttaccatacttaaaaagtatgatatgaagttgaatcctgaaaaattttctttggggtatcctcagggtaaattttgggtttcattgtgaatgcaaggggaatgaagctaatccaaacaaaataaaagggctaactcaagatgctttcgccgacaaagccaaaagagactcaagcttaatgggaagaatggcagcactcaatag

SEQ ID NO: 255115 - DNA, 504 bp, Cannabis indica
aagtaaaatttatttgaaaaagtgagattatttaatgccactttgcttgaattgcttcatatctcattctttttattgaatggaaaagaaaaagaaattgtatttatatatttcttaaagtggaaagatataatataatataatatggtgagaatctatagaatatttattaacaaactataagatatagtattcttctagctatttcaatctttctctcttgtgaattaagaaagcccaagtttaaaatagctagcccagcaaagtagtacaatgcccaaaagcttcaatattcttttctccctttacttgtttttacttttccctaaaaaatttgtactaagaaaagttggagaattaaaagagaataaaacatatatgtatataagtgtagtaggatatggagtgacgcctattcgaatgtgtagaaaaaaaaaaaagaaatttacatggtatactaacttttaccatttttttacaaaaatactgccagacagtattttt

SEQ ID NO: 255116 - DNA, 703 bp, Cannabis indica
atcacatgtttaataaaatatacacaattaattgtcataataattttttaggatattacaactattccctccttatagaaatttcatccttaagatttatctaaataattcgagatatcgttcccacaactgtgactttaatttccaagtcggctttaatcttactgttcatctacaacgctttagctaatgatatagtctttgtttcccagtacttcatctttgcttgcacatacacctgaatcgactattcctcatatgacaagtttattcaaagttccatatttttgttactcggtatatgaatcgcatttgcctcatacttctgaacattgaattacaagctatgaactctaggtaaggtagggagtatggctagctcataagctacttaacctccccttcctagaaactcaaacggaccgatactcctggaacttaactttcctttctttcctaaatttctaaattcccttcattgaaagcacttgaagaaagataaaatttccaactcgaaatttaacatttctacactttgaatcaacatagctcttccatccactttataaagtgaaaatatgaactcgaatcttttctatggcctcacttgttccttagaccgcatcaggtcaaggttcctccgttcactgacatcattccaatgaatgggttaacgcatttccttccataaagcataatatac

SEQ ID NO: 255117 - DNA, 523 bp, Cannabis indica
tgataagctgacttaacagtaaaaaatctagaactttcccttttccaaatcaaaacatcatgaccataacatcctgaaacaggaacctcaagaatatcattaatcattgcattatcaaaacaaaagagcaatttcctaacatcccaagttcctgaatcaatgacaaagtaggacaataaagtagaagaagaaggagagtcattattgataaaaattttgtgtctatgattaggaagccaatgatcatccaaagttcgaatactactcccattacccaccttccaaatgagccccgaaaccattaagtctcttccccataaaatgcttctccaagtataagagggattgtgaccagggacaacctcaataatggaagattgtagaaaataacgagctttaagaatcgaactgagcaaagagttagggtttttcaagatacaccaagcatgcttagcaagcatggcttgattaaaatgcacaagggatctgaaacccaaaccacccctaaatttggactgacata

SEQ ID NO: 255118 - DNA, 629 bp, Cannabis indica
gggtgttaataaaataattctttctaaattttgtttacaaaaaagtaaaccttatatcgcatcatgctcttctatatttttgtaatttattttaatttccatatttttgaaaatcgttttcaatatgttatccatatttaaaattccaattaaaaaaaattaatacttttcttatctcatctcatatctctttttttctattgcaatctcaatatttaacatattaatattataaatttaaataataagtttaagatataaattagttaaataatatatacacacatcaatcattaaaattagagttcaaaagaaaattctacaaacacctcatattacaatgtcatataacctttgtttttttttttttaaaaaaaaaaaaagaaagaaaaaagtcctataagctatcaaatatgcataggctccttttcaaactacaaaacaaagccatgacaagcccaagtgaatcatttaggaccacatctcaaaaatagacctctttggttgatattaagaggagccatatcgttcactattttttccactatttatgatgtgtgcatgaaaattaaattatgtctcgaaacattattatatattattgtgtttaatatttcagtgcatactgt

SEQ ID NO: 255119 - DNA, 1196 bp, Cannabis indica
ctctttcttataatccacaacgatccattacttcgattgattgtgtacttttctaaaaaagaaaaatgaacgatctgttcttttttctgatataaagcagatacgttaaagtcagctagaaacggatccgatcatcacacacattatacgaatatcaacagaacaagattcagaaagccagaactaagaaaaactcgcaaacttaacaattgaacgatcaaaaggagtagagagtatgaatcaacgtacgatccaaaaaatacgatcaagatcaaaaccaaaatcaccaaatctcaaaatgacaaaatataaaactgcaataacaaatgtaaagtaaattaaagaccttcaaaagctttgcggagttgctcagcgtcctcaacaggagaaggaaccacagatggtacagtaagagtcgccattgtcacctcttcctttttttctctctctactgtaatttagagtctttctttctctcccttatatttgaagtaatggaatgaaaaaattgtgtgaagatttggcctttaatagccaaactaatacagttttattaccaaaataagatcttaaaatacggtaattgtttaattacaatttcatatattatatatttttttacttatttccttcttctttgttttcttgctaaagtaatgattgtgtatttggatctcaaacagattacattctatgcttgacacgaacaacgacaattcgtatgccacgtggcagagtatgacagctcatgctttcatgtacaatttgccgcgttcatcataagatcgagaacaccctgaaattattttattttttatatttctgaatattctagaatttacttagtgaaaagcatacaggctagctttatcttactttcgaaggatgaattattttttattaaatcgatgaaggaacaatatataaatattaagtaaaagtaaaaatattttaattttctttttgatcaaagtaaaaatattacaaattattgtaagataacataacttaaaaatacctacaaaacaaattaaaaataacgttacttttatatatagtcccaataacatataaataaataagatttatggtgtcaccactccattcacctcattgaagatcatttactatatttagatggtagatagggagaataataatagaccaatcattaaatttagtgtattcagatctat

SEQ ID NO: 255120 - DNA, 1130 bp, Cannabis indica
ttttttaatttaaaaaaaaatagttttaaaatataccaaataaaaaatagacatgtggatatagcttaacatgccaaaaattaaacttaagtatctatgccactaaatttactttttttttaatgataggatctttgagattcatgaatggtacataaaaatactattggaataaagttgaggatgaagatggtgacctaacatcataaaacactctacactaatttctcccttttttttaattatttttttttcaaatatgtatgtatatctaaatataaagctaaaatatgagtacactacttaattaaatttaattttttttatcatgaaagatagaatatacttcttaattgattttttttttccgcactagattggattttatggataacaatacacaagcttttattttaatttttaataggtagattttgagggtgtaaatttcaaaagaaaagcttgaatacaattttagtcggattcttcatttaaagtttagcaacaaagttcaaaaagaagaaaaaaataaattaaaggtctttattttatattgcctactaaatataaaatattaaatagtgtggatttagtgaagttgttgagattcaaattttgaaatgtactttagcaaaaaaaaaaaattaaaatgcatgttgttaagatatttttcaaaaattataaatgttgtgaagttgttaggataatttgagtaaaaaagataaagaataattatatatttgaatttaaatttgattggatttttaattatggtaattagttaatttaataattattataataataaatattttttagattatttatgcttttaatttttagtcgtaactatcttataacaaaattaaaagaatttatttttaaaaatgggtttggtaaaattttatagtatatattcttatatgattaaattttaattctgtaatatatattaaaatatatatgatacctatatattgttaataaaattatttatataataaaaaatacattaaactaaaatattaatttacttatgtataatttaaaatctttatacaaactctatcttttttctccattcttattttttaagtctattatgaatactaaattgttataagattttt

SEQ ID NO: 255121 - DNA, 4025 bp, Cannabis indica
aatttaaaattatcacacttaattatttagttttttttatttaaatatttaaaaaataaaaaatgaaataggttcaatgtatttttaaaaaaaaaaaaggctaaactcttccatttttttttattataagtcatttacttaaaaaactaaatcagagtcaaaaaaacaaagtcaagcctcccaaaaatgaagcaacttcaaattcgaatagaaaaactcatatttagttcttctaataaaaaaaaactaatttaatatcatttaaaaataattaattgtttaaaaatttattatagaagaaaagaattctaatttgtgtagaaagaagtctattttttgtgaaaaagataaagttttattgtaaatattataattaaataacttaattgttaaaataattataccagaaatatatataaaaaaattatttataattattaattgttataaaaggtgttgttaaatattcaattaattttaagtaacctgtaacctttaaatacgtatataattaaagtaaaaaaagtatttagaaaacaaataactcctaacaaatatacccttacccattcacttttgaaaattgtagtcggcggatctcaatagggaaagaaaagtaaagagcattagggtttgggcccacggcccaagtggtgagatacgtaagaaagaggctcaactagtcaaaaaccccagcagatgtgaaatcttgaccgtccattccaactccaaatctgcggtggagtttaatttaattcaaatagaacattctagagagtcgaccaaaacttgtataaactagctaaagatcccgctcatactcacacttgaaaccctaacattgcaggccgcctctctctcttttgctttctcttcaaatttcagtttctaccctttttccttatacgctctctagatttcttatctcagagagatggcaggcaaaggtgaaggacctgctataggaatcgatttgggtacaacttactcatgcgtcggagtttggcagcacgatcgtgttgagatcatcgccaatgatcagggtaacagaacaacgccctcatatgttgcattcactgacaccgaacgtttgatcggagatgctgctaagaaccaggtcgccatgaaccctatcaacaccgtctttggtatgtaacttgttttatatttttgttttttttgattattttttatttgaatccggcttttatgttgttatctgttagatcaagcttattagatccagatccgatatgtttcaggattttaattcatttattttaatatattcgtgtagatgcaaagaggttgatcggtaggaggttcagtgacgcgtctgtgcagagtgatattaagatgtggcctttcaaggttatctgtggtcctgcagagaaacctttgattggtgtgaactacaagggtgaagacaagcagttcgctgctgaggagatctcatctatggttcttatcaagatgcgtgagattgctgaggcttaccttggttcaaccatcaagaacgccgttgtcactgtccctgcatacttcaacgattctcagcgtcaggctacaaaggatgccggagttattgctggtttgaacgtgatgcgtattatcaacgagcccactgctgccgccatcgcttatggtcttgacaagaaggccaccagcgttggtgagaagaatgttttgatctttgatttgggaggtggtacttttgatgtgtccctccttaccattgaagagggtatctttgaggtgaaagccaccgctggtgacacccatctcggtggagaagatttcgacaacagaatggtcaaccatttcgttcaggagttcaagaggaagaacaagaaggacatcagcggcaacccaagagcccttaggaggttgagaacatcttgtgagagagcgaagaggaccctctcttccactgcccagaccaccatcgagatcgactctctatacgagggtattgatttctactccaccattacccgtgccagatttgaggagcttaacatggatctcttcaggaagtgtatggagccagttgagaagtgtttgagggacgctaagatggacaagagcaccgttcatgatgtagtgcttgtcggtggttctactagaattcccaaggtgcaacagttgttgcaagatttcttcaatggaaaggagctctgcaagagtattaacccagacgaggctgttgcttatggtgctgctgtccaggctgctatcttaagcggtgaaggaaatgagaaggttcaggaccttttgcttttggatgttactcctttgtctctcggtttggagactgctggaggtgttatgacagttttgatccccagaaacacaaccattcccaccaagaaggagcaagtgttctccacttactccgacaaccagcccggtgtgttgatccaggtttatgagggtgagcgagctaggacccgtgacaacaacttgttaggaaaattcgaactttctggcattccaccagcccccagaggtgttcctcagattactgtttgctttgacattgatgctaacggtatcctgaatgtctctgccgaagacaagaccactggccagaagaacaagatcactatcaccaatgacaagggaaggttgtctaaggatgaaattgagaagatggttcaggaggctgagaagtacaaggcggaggatgaagagcacaagaagaaggttgactccaagaatgctttggagaactacgcttacaacatgaggaacacaatcaaggacgagaagattgcatccaagctcactgaagcagacaagaagaaaattgaggatgccatcgatggagctattcagtggcttgatggcaaccaacttgcagagtctgatgagtttgatgacaagatgaaggagcttgaaagcatctgcaacccaatcatcgccaagatgtaccagggagctggaggtgacatgggagctggcatggaggaagatgctccaccatccagcggcggtgctggtcctaagattgaagaggtcgactaatttcgctattttcagttttgaacgtactggtgctatcgtattttgcattgtttgcaatggcactggttcgattcaaatttcagcttttctcttttttacaattatttttattttgattcggatttgcaatgtttttatatttcaacgttttgtggactattttacgtagtattctatagatgttcagacattatggttattttggtgctcacaatattttgcttttactgcattgtttagcctcatttcctattattgtttttgaatgttgtgcttgatcacttatttagaattttttaacatgttcactaatagggctagcttaaattcaatataagaataagaacagtaatttttgtgaattggtctgtttcttttcttaatcaatgtttatcagatgtaatcatagtttttctaatagaattaaggttttttcccccacaaaaatggcttcaacttgagtgaaattaatagtttggtaattgataatttaacttgctttaggaattaatcagtgattaaaccgagtacaaagaagaatttgtgtgtgctattctctatccatacatctctgctcaatgctaacttctcttgtttgtgttggtatctgactatctgtaaagtatttgtgccatttttttgattgggtaaaacacgatcgctgtagaagtagaaggttcctgttaggttgtcgtttcccaaaactttttttttcaatctgtttcatttctattatttttttgttctttgtaaagctagttgcgttacgtatctcatcaatgagagagtttattcttagcttattttttctcagcacgaggaaatgactttattcttctttagtgagaaagaagggaaggaaatgggccgtggcctgttctaatgtttcggatctgatttgtttaatacagtagaacttctatttaagaatactataacctctaatttgttataaaaaaatcaagttccaatttgaaagtgatacaataaaaaattaa

SEQ ID NO: 255122 - DNA, 836 bp, Cannabis indica
gttaaacatcataaatggtggcatatcgttattggtatcaagcactacaaaatgtatcatataaaaaaaagcactacaagatgtagcaaaaaaaaaaccccaattaaaaataacaagtaaaaattaatatagtacacaatatatttaaaaaaaattccgcctagtaataatagtaaaaaaatagaaaatttggtgtaaataatctaaaaaaattgccaaaagacaaaaataagtcttctcttttgtttttttagatccatttttctttatatgatgatgatgatgtatgtatgtatattttggtagagaaatccgctgaactagttcaatagatcgtgcgatatctagtaacaagagtccgtgtagaaaatcatatttatctaaaaatttaatcggaaagattattttatagattttcacacacatatatatatgaaattacaataatcattgaatttatttataaaagataaaggtcaactttaatgatttggttgtctttaaattattgctacgagctaccagtagtgtttagtaccttctcgacatatcgcattgtaattggttagcgatactttctaaaaactattatattaaattatataggactcgatacttaattggaccaatagcaatattaacatgtaagaaggtactaaacaccactaattttttagcctttctctttattttttccattcttaaaaacctatgcaaataaaagcccaatcggcagaccaagcaaaacaaagacgtgcaaatgacaggctgcaatacgacataaactaattactcatttccattgaaaaatgtatatttgaataattaagggtctc

SEQ ID NO: 255123 - DNA, 2556 bp, Cannabis indica
cctttaaagtggttcaaataatggaaaactacctcatcataccaaagtaccatgtctatcaacaaaagaggcaatttcgattggctttcttttttttttttttaattgctagcatgaaagaaagttgtgttttcatccccaaaattcaaccagttaacctgctttttcgcctcaaataactttcaaccatcttagtacacgaactcaaggtcgcttttatttctttctcttccttaagtaaaatcgcataatgagtgtcatattgtatctgttgctggttccattcaaaacaagccttagttgaagtgtaagctaattgaacattccccaccacgttcctattaaaatcctaaagcagtttcctcactctgttaagcttaatcatagtcttgaaaagacctatacaataaggagcttgattccaattctccaatactttttgtttaaagtcacgatgctctgtccacatattgaaaaatttaaaaggttgaaatcccaaaattttaatttagagacttctaataatataaagacaatgatcagacaatggatcccattggtaaaaagcctctgcataagtgaagatcaagccaagcttcattcttaaacattgaattaattctataataaattctaccattgtcatgcttgttgttccaagtaaacaatggacccaaactctttaactcatcaataaagccaatagacaaccaattacacaaatcatcaagtttaagggaagcaataggacaaccacccactctatcctctacatcaaaaacaacattaaagtcccccataataagccaaggtttaattgggaaaggaagcaaatcaagaccttaccacaactcctttcgcttcatgatagagtttaacccataaaccacaatgagacaaaaatcatcttggaatctagaatgtcaaaccaaatagtgtagaaactgtttattctcaaccaaaatagtaatatttacaaaagtatgcaaccaaaagagaagaattctaccttctacaacaaaactagaatgaaaatgccaaccattgaagttagtcttcatcatatcatccactttgtcacctcgaaccttagtttccagtaaagctcctatccccactttattcaacttacagagagtataaacttcctcttgttgattccttttattaagatccctaaaattccaacatagtagattgcagcactccatttaaaatttagaaatgcccctccctccttattttccttaagaacacctccaaactaggctggtagttgccctcgatttttcctctttagcatctcctagttaccaccaatatcatcaatcttctcaattggctgaataagtttaccctccaattgaatcaatggttgggtattagtattgttcttctccatagcctcaatcatggtagtattctaaacattagtagaagaaagatccactaccaatgtctcttctaatttagcatcattttgatccataggagccaatgcaattatctcctatgtatttgtatttttagctattagtttattatcattcttttgaatatttttagtagccatacccacaatatgagcttttagtttccacaccttttcactttttttttttttacagatagttgtattatgtccatattccccgcaagcattacacttggcagggatccattcaaattcaattggcacctcagtaatctgacccattcattttcaaaggaaataaagttggaaattttcttcttgatctccatcttaactaaaatgcggcaaacttaacttaactagagtctgttctttggtaacatcatcgattagtatgggtttacctatagtgctaacaagggcactaaggcaattaacaccccaataatgaagacccaaaccttacaatcaaacccatactagaaccgattgcattaaccgtagagagtctaaattagttgtccaagaccgtacaatgacaagctttcgaacaaattgaataaccccaacttccaagaccacatctctggtaactatgtcttggaatttaacaattgtgaacctagaattcagtcacacagttcgatcaataccatgctttccctaaacacatttaattaatcccttaaaaataatggtgggttggcaccaaggaccatacatacaacaacagaactccataattcatattctaattttacttcacaaagatccaattttgcaaaatactaaccttctttgatgatgggttatgtgtagtgaagatgagtacccacgttgctagcttgaggcttcagtttagaaacatcatttgcgattggaattgtaatcagttcacccggtcctccataatgtctgcccctaaacaccgtaaatgctcagtatcaatcgctggtttctcacctgcggagagaatcgagttttcacccaataatggaaactctccatccatcacatctgtacatcaacagattcagaggtgagatcaaattcatgttctggtaggtcgacaaggatttttctagtttgaaggcaactctttactgtagaagcaggcttcg

SEQ ID NO: 255124 - DNA, 1140 bp, Cannabis indica
gatagggttattaagaccagatccatggatgcagtggcttggggtaaaggaagttagagatagcagaggaggatttacaggatgaacaacttgagcaaccaatggaacagtgttctgaggcaatggaatagtgctctgctgggaggatttactcgcctgaggagtacggaagccctatttcagaggcgaaagtgaaaatcagacatgatttctcagattggttacaggtagctaatagaacaactcaggatgtcaactctgggaagaagatttctcccccgattctacggtcaggtattgttcgaaatctcaacaccagttttgctaactctgttcagcaacctgaggtaagacctgcaacttcaaaagttaaaatacactttgctgatatagaggatgaggtgaattactggcagccgtctctggtttgttatgtaattggggctaatcccccaattactattcttgagggctttgctaagcggctgtggaaggatatggtagtgaaggtgggaatgcttgctaaaggaattttcataatacggtttcagaacatggaacaacgggataaggtgctgcaacaaggttatgtgttttttgatcgaaaacctatggttatgaaaccatggaattctattgatgatttcacaaaggaagaggtgactgcagttccaacctgggtgcaattgaaaggtttagatatcaaatattggggagagacatctcttttcaaaatagtggcacaagttggggagcctttgcaggtggatggcataacaaagaatagagatagattgcaatatccgagggtactaattcaggttagcttggcacaaaattttcctagtaccatatctttcattgatgaacatgatcatgaggtggaattagaagttaaatatgaatggattcctctagtttgttataattgctctgggattggacatagtaccgatgcttgtaggaatgtggagagcaagaaggatcaagggaaaccagtttgggttccaaagaaacaacaagctactgaactggccgagaaggatgcagatggatttcaaaaggttttgaaaggcaaaaaagtgagtatgaagaacacaaatgaccatgaaccagagacaactgaagtttgcaacaggt

SEQ ID NO: 255125 - DNA, 1364 bp, Cannabis indica
aacataaaatgcagtttttgatctttattattagtaaatctgattatatcgaaatgggttttatttagggcacaaaacccaatagtttggcttccgtccacttagtaaaatagtcaacaacaactacaacatactgcacacgaacttttccttttagaagttgtctgatcaggtcaattccccatattgcaaatggtcatgtactttgcatatcaattaactcattgggtagagcaagaagaatctttgagaacctttggcacttgtcacacttctttacataggcctttgaatcttcaatcatagttggccagaagttgtaagtaagtatatgggtgcctaaatacaagtcggtaatatgttatacgttatatattttttttactaagtctgtcgactcaaagatagtgagatgattgcacatatcaggatggttaaacctaaagagttcggtctcgagacgacttgggcctacattttataatcgcaatgcgacatgtccataagtgtattttgaatatgaatataaatttcaaagatgggatcccaactttttgtatgaatatatatttataaaagtttaatttaaaagtttaaatttgacataatttttgagaaactctttgattaacaagggactgcactgtaagtagaaaatcaatgtagcattcctaagcaatagggcattgcacagttactccagcctgtgtctttctaagctcaatgtagaacatgaaggagttgtcactcagtagtttcattggtgttgttctcggtgaaatctggtatgatatgtccatgtcatttttgttgcattttattttgatttttatcagcttaaccaagtttgttactgaagaattggttggaattagtattccagtcattatgtagtcatcataacttgtattgtctgtcgattggtctccatatttgatcacacgcattatttgtcccatttttgcattttaaaaggaaaagaaatattagaatgtgagtataagttgataattacaattgatttgtaaagaccgcttagtttaaatttagaaattagtaaataattagggttaattatgaaaattatttatttatgtttaattaattatttatgatgatttatttgaattcagaatgcattctatatgtcatatagtgaaatttcatattttacattttcggtgcccagcaacattggagcgcggtgtatggctcggtagaatcacattctagtatttttagtatagcggggaggtattgatagacattgggaatgtcgggattggtcgggaatttggagttttctcaaaataccctaagtgatttgtgactctttagtatgggcaagggcattatggtctttt

SEQ ID NO: 255126 - DNA, 1137 bp, Cannabis indica
tttttagagtaagtcctacaaaaataacaaaagtataatttatgtataagatgtgtttgataagattggcaaagtaaagtgaattggcaaagaacaaatatatataaatataaagtgctaattataatatttatatctagctgtgtagtgtaccccacttaatttccttgatttaataacatactttaacagttaccctttttactaaaaataaaataaaagagaagagattaatatacatatatatatatatatgcatatttgtagtcttggcatgccttcgttgtaattattacaacatatatgaacgaaaatattttctaaataaagcttatttacagtttttttagagttatttatcgtaatatgaatgaatggatataagaatgattatgtgtaaatttatatggaagtgatcactcaagtgttaaatataataatgttgaaaattagtaaaaggaatatataataaataacaagaaactttatagtgattcgatcatttatgatatctatgtctagttagttacttattataatgtatggatttaatctttcattaattacaaatacactttgtgacattgtagcattagtgcaaaacttctagtaatcggtgaaattaggggttcgtttgaattttgggcctaattactatcgggtttagcccaaaaataatgtacaaagtaaaagggaaatttacaaaaatattgtaatttgggttaacttttacaaaaatacttacacaaattttttttcaaaaatactgtagttttataaaacaacagtggaacacaaaacagaacaattaaaaaacaaacagtagaacaactaaaaaataactatagaataatagtgaaaacttaacacagtattcaatatttttgaaaaaaaaaattcgccccacagtataaaagtaaaaaaattagaaaatttcagtatatgtataattatcccaagtaataataagtgatattatcggattgcgtctcctttctttaatttttgttaagggttaatactttgttatcataaattaaagtgtaaagagcggtataagtacttgaaattttaagtttagaaatgacataaatttaatatttatttttagtcggcataagtatctaatatttgtaa

SEQ ID NO: 255127 - DNA, 607 bp, Cannabis indica
aaataaacaaataaatgataacacgaaccaaatgacacaataagtgatgaaaatacttctgtttctttattgatatttaaataataaagattacattgaaatggtgttttatttagggcataaaatccaacatggtggtgattggagaagatttgagtagattttggaggcttaaatttgagatttttcgtgttaattctgcccagacaaccggaattccagttggttcacagctattccaactggaattccggttggactgtatcggggaaggccgaattttgttttggccataacttttgactcgggactccgttttggacgttctttatatcgttgaaaagcttgttttgagctctatattttaatctgtaaatggaattataattatgtgattaatggaagtgatttttgggattaacactatttgtgaaatctcgagaatgtgtgactaggactaccgacgcttgctcaagagcacctaggaatttgataccaggtaaaacaatagttaacacgtagagttaagcgcagcggtgctcatgtttaatattataattatgattaattgagaaccgggattaaggttattaccctaaagtgagcg

SEQ ID NO: 255128 - DNA, 566 bp, Cannabis indica
aagctttcgacaatccatcaccactcccccaagcggcaaaaccatgttattaatgttgctgcaaaaaggcgtaactgtaatttttcttgtattgctagaaactgtaactacacggcccataatgtggccaaatgagcgtttaccaataatgttacaggtatggtagagatatctacaatacctgttaatatattttgcaatgaccatgatgtctaactttaattttatttataaacgtatttttcaaaaaaaaaaaaaaatgttgttgcaaatagcaacattacttccactcattgtgataaaaaaaatcaatctgaaataataagtgtgagtgtgagatatttatagtagggtttatgagtttctaagacttaatcctataaattttttgtaattggataaaagatatgtttttaaaacaaatttacaaatggtactatataatataactacaatatacacactaatgaaaaaaaaaaaatagaactaaaatgattccttgacaaaataaatataaaaatactaccaaaataaaagtaaactaggaaagctatctgaactaaaat

SEQ ID NO: 255129 - DNA, 562 bp, Cannabis indica
aaaatataacttaggtatttatcagctattcgggataaaacttaggtatttttgccgcaaattactcttatatgaataggttgagaagttatttttttttgataagacgttaactaaatataattgtgaaataattttaattaataaatactctcttttataattaaagtactaaatataaccttacataatttatcaaaatttatcattaacgcacataatgagatataacctataaactagatataaattaaataataataaagaaaaataaaaattaaaataagaaatgaaaagtaggtatacataaatttacgatgtaaatatttgtaatcaacgcaagactttttttgaaccaggatagttcaccgtctaaccgaaaaaacatgctttgtcaaatcatggactgctaaatagttaatgtgaaccacatggaagaaaactactctcgaaaatttagataatatagctataacgtcttcaaataacatacccatcacactgaaatacccttccctttattaatagttgccgccaaagctagcaaaaatctaaaaaaaaa

SEQ ID NO: 255130 - DNA, 1404 bp, Cannabis indica
ttattttatttagtaaacacaattttacaatttatttacgcaatctacataaatgctaatattagtgatagtaatatatacgatgagatgtatatttatgatttagtaagtggaccgatatgactactgccaaactactcatcattattcgttataacttatttattattgtaaatttggtagcaatggacattaaaagttttgtagcaagtattattattattggataaaaaaaattgtacgtttaaaagtattttattttcatttaaaaaaaaatatttattttttcttttgttttttagccaacaaataatgataattagtagacaataacagcttcttccaacaaatgaatcgaaattgtttcttgttgggaacgccaaatccaatcaacttgttgaaaataatatctcttgccttttcttttatgctgaaaaatatctcttgccctttaaacaccaattttctttttctttcttttcattaggttttaaatttgattgcaactttaaactaattaagtatggttactaaaattgtaataaaatatttgatgtgtgtgtcttagagagagagaataaataagaacttaattagtggtcgaacgagtaaagaaaagagctgtttcatctcaattggacacaattttccattaattacattatatgcctttaaaaataacaataaataatacaaaacctgtttttagccaaacttgtttttcaagaatgttatttatttatttatgcatttttgtggtcaaaccaaaaagtatagagaatgatcaaaaaaaattgaacaggacaaacatcaaaaatgatataattgctataattattattattattattatcattatttgttcagattagctttaagatccaacaacaactaatataggattttcaatagaaatttattagaacttaacagttcataacaattaaccatgaactagaagaactcagacccagaaggtagaaggctaaataagaaggctaaatatatatatatatataattaattaattatatactatataaatattaattaatagaacaaattaaagaaaatgagaaaaaaaaaaaataccgaaatgatcaacgccagccatagatgacttgagtgtaagtacttttgatccacttgaagctttttcgaaaagagcctttcatctttccctcaacaacgtaagctttatacccagccactcttttcttcctctgcaactcaggatcattcaagctccaactcttcgatgtcgaaccaacacagcttttcactttcttgatcttcgcttcgttcgccggtgccgaagcttatgacccggcgtaattggcgctgtagcatctcagatcgcgtatactcgtcggagctgctttgttcccgtagtaaacatccatc

SEQ ID NO: 255131 - DNA, 543 bp, Cannabis indica
tatattttaatttattttcataatcattttcccgcataatttcgaattgaatttatctattttaaatgtagatattttaaaatatttcaattttgaaaattaggctaagttggaaattaattttaattaattttagatcaacttaaatcaagtaattttcattaatgatttaattaaaataaatagactaaaatatactgtttttaattttgtaattagtttatgaattatctagatagatattttttcgatagagtttttggtatttctctagacatacttaattaaataagaaaattaatatttaagttgatttgttcaagacacttaaatatttgatatttttcttaagagatttaattaaataggaaaattatatttatgataaaaattaatttatttaatttcagatcaacataaattagaataatttttccagttttattttattttattttaatgacttttcgaaaatgtattatccttaatacattagatttctaattctgtcatatatatttatagaaaattaaatttgagttg

SEQ ID NO: 255132 - DNA, 803 bp, Cannabis indica
attgatattttttatattttgattttttttaagtgtaactctatttagttataacctctcaattagaatattattttcttggtcccaagtgtatttttggatagaggttctactgtatgtcttacatcgatcgcgggtatacagaaatcttttgacttgccagggttatgagcctcgctcctgttagttggatgaaactataggaagtttcctcgtagcgagatggtcatctcgcattcttgttctttgagtcgatccgacttttacacttagtttgcttatgcaagctaaggtatgtgttacttttctctggtgcctcgctattttgcttcaacaacatatggtttctcgttaatatactaagtgctagtttgtacattgattcctcgcctaagatcttacagtcagcgagttacaaatatactctgatacttacgcaattaatgagttattctataaaaagatattgcaccgattcacattccctttaccttgacacgtgtcctccagccgaatttcaggtataacaatttcttactgttatgcaactttttccttctccttattataaaacttataaaaacttatatctggcttttaaaaactatttctattgaaattcattatgtaataaattcttaataagtgtcaaaattgttttgaaactattatgcaactactagcaaactatttaaactttgccaattaataacaatctatcaattatagcatttcaccctgtcaaaattctcatagagacttaaacaattcaactaattatgatgtatctattttattgcttg

SEQ ID NO: 255133 - DNA, 533 bp, Cannabis indica
tgtcacgcccttcccattttcttaggtaatcgaagttggtttcttttgtagtctctttcttgtactactctgttgtattttctttgcttaatctctcctatggtgcttggtcttctattactcatttcaatcaaatcgacttgattatgaggttagctagttttccacactaactttgtctactttggtattacattgatatagtggtgaagtttaaatctgaaacactaacatatatgttcaatgattgcttcctttattatactaaccctctacgtatcacagcacttcataattaaaatacaacatattttttttcaaccatatttatgtcttgcatatggtagacctctttaattcacaaaacaaatcctaacttcttaattgcactgtgaagacctccaaaatctaaaaccaacttacattccagtacagaccatctacttttagttaagtaagatcataccatacatgttctaaaatatcgtaagtgcactagtaaccctttaaaacgaattcaaccctaacatggg

SEQ ID NO: 255134 - DNA, 744 bp, Cannabis indica
agtgatacgctaaattacttttggggacttaaaattgaaactaaaagtttccctatcgatggataacatgacaataccctaaatatcacacaaaaagggaaaaactaaggttcccgaaattgccccaactggcagatcggttccccaaccgaaagaccgattctgtggggtttcctggagaccaaccggaactccgattcctaaggccctactgaaccagtcgaccagttcagtgcaggaaacacccaaaaccacctacacacctcaattcaaacccaaacctcaaaataacttccacaatacctatttacatcgtaatgaacataattcatgcaataaaaccaaccatcacaaccagaataaaaattcaccattaaagaacaaagcttgagtttataaattcaaacattgctcaaacatcaaaacatatcataaatccagctcaattcaacataaacaactataatataacttcaaaatacaaaaacaagcaccttctaacaccacagtacccaatttctcaaaaatcatgcacaaattatctttaaacttaagaaactataaaggggagggagctaaggtgctaaccttgaattggaacactagaatcttgctagaaaatcccagaattaagttgaagaaaactcaaacactagctgtgtaacaacctaactagcataggcgtattacgtcatttttaaacgtactatgcagctcgttgctaattaaatatttaaatttaaa

SEQ ID NO: 255135 - DNA, 623 bp, Cannabis indica
aacttccaacaattatcgtcagacattacttgaagatcgtaaggttgaacatttgtcttcatcatcaatgcaatatccttgctccgcgtggtcacaataattttacttccttgctcgccaaattgaaaacaacttttcaaagagtcccacaacaaataattctcattccatacatcatcaagaacaaaaagaaactttttcccaaacaatgcacttttcaattcattttgaagttgatgtacctcttctgcatcacatcttcgtttagtgattgcctccaaaataagtttgcttatttttaaaacatcaaaatcgacggagatagttacccatgctttcaagtcaaagtgttgtttgacactggtatctgcatacacgctttggacaagcgtagttttgcctataccacccatccctactatagaaataacagagatcttatggtcaccaacatcatgagacaagactagcttaacaatagcctttctatcactctcctttccatagaccttagaatcctctagcaaaggggcatgtggtctatgttgtaaagttgttttcatatctacttttttcaaatctaggtattttgtctgagccaaaagatcatctaatgtatcaag

SEQ ID NO: 255136 - DNA, 1020 bp, Cannabis indica
taaataagaaaaaaatataacaaaaattgtttgatgtagtggtaaaaggtcttactttaaagtaagaggtcatgggattgaactttcacctcttaagagttttttaaaattttactattacactaactaagcactagaactatcatttttataatagttaaactatatatatatagtggcctcaaaatttgatttcgtcttaggcctcatataccttaggaccggccctgggtttaactttcattctcttcatagtaatattttgggataagttgaggaatatttattttttttatctattaattaaaaacactctcatattctattttattaaaatgtatctacttttataagtgaattgtctaatatactcttacactctatttatgtctattacataatttatattaaaaaatactatatgatatgccatagtcacatattttactttgcatcaactcataatgaatatttccatgtggatgtgtatatagaaagcaattcctacacaatagtaaattcaaaaacgataaagatgcctatgataattattactcttttgtttttgggttttgcattttaaagtgcagataatttttttaagtttgaataatgtctttttaatttttattaaggctaattatgttactccctatttgactagaattttgtggttaaatactgattgtatctatttgaattatacgatcataatctgagtagtttaaatagtgttcttttaaatgattttataagttaataaaattacattttttattaaaaaaaaattatgagggtcccatttattttactttaataaaaattattaattaattataagacaccatctcataatataagtaatgttaggcaccttgatccccaataacattactctagtgaattagactataaataataattgtgacacatttaatttatacacacaatcatatgaaattaatctcaacatattaaaaataatataattctcctatatgattatctataataagaact

SEQ ID NO: 255137 - DNA, 847 bp, Cannabis indica
gtgatttgatatgaacaaattcaccattcgaaatctgaaaaataacaaaattgcaatgggataaagttttagctatagtattgatgcattccttttcttttttggattatgcctgatttggattgatttggagctccagatctaattgctagatatctacattttatgaatctgaaaattgatattaagtgtattagatttctacaaattaaaccagaattcagggatgaatttttgtttcaaacaagtttttctgtactttttttcatcaatttgaaacatgtgtttggattgattttggtcttcttctcaggtgaattcatcagaattaatggtagttctccatctggcttggtttcttttcggtgggcgtgctggtttggctgtcagaaggtgtcgttgtggaaaaaagttgtttgtgcaactgaatgttagagcaagatgtatttttgtaaatttttattgctgagctgtataaatgtttatagggtctgctcaatttatttatgtaatatttttgctattataatataaatgtttataaaaatttaatgatttaatatttataatttaatttgtttagtaacatcaataataagtaatacattactatcttatatatatatgataataatgtgttctcatatattatcaatgtgaaactctggttgaattttatattttaattacatgatattaaacaaatgaaataaaacaaaatgattagttatatatggttactacttgctaaaagttgctagaaagatgaacccacattaaggctcacaaacatgaattgttccccagtgtgaagatattattattacagaccttcaaaagtgtcata

SEQ ID NO: 255138 - DNA, 915 bp, Cannabis indica
ttgcataacaactattttttacagttacaactcgatacttaattacacaaatagcggtatgaaaccgaaaaaagtactagctaggcactaatagtatcttttagcaattctcttcttttatttagggttatattttgaaagccatagtaaattaaatttgtgtataattaaaagtagttacacaatttaacttatttatctaactatataattaattagaggtaattgagagttctaattacactcttcaatttattactaatatttttatacttaaaatattaaatacttaaaaatattacttttcggtataattgctatttatttaaccaaacatatataatattatgaattcatatctaattactattaattacacaattatttccaagcacagcctaaaaaacttttttgttaaatctacaacgtttgataagttttaaatttatctagaagttttttttttattaatttgtaagatagaatttattacttgtatatcaattaattcaaggtcctaaatctataaatcgaggtgttaataatgtttgttattttctttttcttaactgatacacaattctaaataaattaaatctaaattatataaaaaccaaaccccaaaacataataaaaaataaatagaaatataaataaaatatatatatagaagaaaaaagaaaagaaaaacttacccaaataacagctttgacattgtcacttgttaaggaaaatccaagatcatcatcatccttgttatgaaacttcaaaagaacatccacaaaatcttcatgtattccactttcaccacctttgatatttttgtctctatgttcttggatgattattttcaataatcctctcagccctttgcttcacactttccaatcttgactttgaatgactaatcaaagc

SEQ ID NO: 255139 - DNA, 794 bp, Cannabis indica
gtacaagtaaaatagggagttttggtgcaactaaggatgtcggagagaacaggctacctgaagtactaggttacctagtgtgaagttcaaaattgtagagaactcactataaattgttcctttaaggtcattgtaaggggacttcttttgaaaaaagatcaatgaaacaataatttttctgagaaaagtttaagagtctaaagtttttctttgaatgttcttctattatgatcatagaatatcacttttagttcttaatattttgttgacgagttcttaccgtcaacaatttggtgtcatttgtgggaacgacaagttctagctacgttagttcttaaatcattcactataatcttcaagatgtcaagaaattcccatcgtcttcgaaaaaatagggttcactcaagtgtaaaccagccgaccaccatagtaagagaacattaacctccagttgccgaagagagccaaaggaagagtaaccaaagtgtggaccaccactcaaatactcaaaagggccaaaaacaatacatgactctgtaatgacattggtggctacatcatcgcttgaaatattcaacttgttgggattttatgccctaaataaaacccatttcaatctaatctgatttattatcaataaaatattagaagttatttatgtttacatatagtttttcatgtttatggtttcaaatatacaaaatttattaagtccagaacatatagttgttcacaattacagtgatgtcaacacagtggaatgtgattgtgattattgttggaaatttatttta

SEQ ID NO: 255140 - DNA, 445 bp, Cannabis indica
atccttagtcttacactcattagtgttctcttagtatcccactctacacatctcaaaaatcatgaaattttactaggaggaaaccaagactgccatgtccatcacttttctattggtcaaattgagagaaaatgtagtttttaatcactaacaatcgttttaatcgagatagtaaaaatcttaattttatgatatttggtacccctttgtgtgaattgtggcccgaacccattgagagaaaatgcagtttcaagcactaacaatctttttaatatgaaaatcttacttttctgatagtggtaacccttttaaaattcattgtgactagtgagaaaaaaatattttgagatgggtccagaacacatttcacacaaagtggtaccagtacagaaaaaagtgagattttcactattttgattataaaaatgattgttagtacttcaaa

SEQ ID NO: 255141 - DNA, 846 bp, Cannabis indica
tctacttttaaaaacagaaaactgattaaaaaagtgttaccaaacgccacctaaattttgtctagctgaccactaattaagtggcttagtggtaatgcttgctttcttgtagcatgagattatatgggttcgaacatccttccggcaaagtatttaataaattcaaaaaattttaaggtggcatttgattgggaggaataaaaatataagaataggaatgaaaatgagaataagaatagaataaaatttaaaatgtataaaaaaattgataaaaaaattattaaatttttttctcttgtcaccgtctttctttcctttttaaaatgggacagaatagaataaaaattatttcatttttattcaatttcatttcattacctccaactaaacgtcacttaatctttgttgctaagtgattctccaaacactctacttcaggaaaggcattcactattagttggtaacgcaccccattgtaagtgggagagaccacactaatcgggtctaggcgaacaatcgggcaggaatggagctctcttgataatgcccaaagccacattggtagctccctcctccccaattattctatcaaaaaataaagaaaaaattgattaggttgtatatggtatcaggctatgggctaggccccattgctgtaagcccagttaaatgtagttttattgtgtggcccagtttaatgttgatattttgtgtggggataagttgagaaatatattttttttttatccattaatcaaaaatactctcatattattttttttattaaaatatacccacttttttgagtggattgactaatataccctcactttctacttaagtcta

SEQ ID NO: 255142 - DNA, 1499 bp, Cannabis indica
cataataatcaagaagattaaaaacaagatggagtacccaacactttggcaggggcatctgcccgaacaactactgaaggtgcatcatcatccgacgagtcttcttactcctccaggacggttttcccctttcttactacagtagtggatggccgagcaggtaaactgggctccctgatctgaattgtatgctcaataggcctgtgcccggccaaaagtttcttcttccttttgagtggagtctcctgctcttcctcaacctcatcttcctgctcaaaatgctcctgagcatactgcttggctcgtgcacctcccttcaacttagcttcacacttcagttgaatgggttcattctcctgatgagctccctcagcccgaccagcactggacttccttttcttctccttcataggctgaggaacaaaatctgatggataaagcccgtactccacaaagttggcctctgaggtcaacaaagtgatattccaggcatcatccagcaactaagcgatcttttgagctctgtccctaagagatagagtgaagggtggacggtaatatatagagatctgctggaaccgagtataggtgaggcccatgccttccaccatgtaatacatatcaaaaaaattcccaattttgctcacgactttatccccggtccccgtcaaccacttgaagtctggctaagagaagtagaagtaccctgacctggcttgcttgggagtagacttcaggtcaaaaaaccagctgacctcgtgcggagaaggcataccccatttctaagaggcgtagaggaagaacagagcagacaaatacttgatgctcttaggagtaaactgggtcggacagagacggaagaagtctgccaccttcctaaagtatgggtgcaaaggcagcatcgccccctgtttggaatgagcacccgaccaggcacacatccccttcttcgggtttgtggctcggtggtttgaggcaggaacataacattccagttctcccagatagccaggttggtccaagtcacttaagcgtgccgtagtgaatttggaaggagggctcacccacctgcacctaaggtaccttgcctcctgtgaggaactgcagcagtaagctcctcgataacgtagtccactccctcaactaggacatcactgtttgcatctactggctccccagcctctttgtatcctaaaaaatttggaggtgcggcctcctcctcttcctccgcctcgaaagggctgccaggacgaacgtcgtcaagtttttctatctcctagacttcagcatcccctacatgatccccctcctcttgtacgggaggatccagttcggcactgggtaatgtggcgggatgggccacgtaagggtcgcacgcgttgaccttacgcattgtttgttttgttcgagcctcatcctatggttggacggaaaacttaaagtggagagctcatcacttgatgagaacggagtggcacgaagatgaggatgatcctcgt

SEQ ID NO: 255143 - DNA, 1135 bp, Cannabis indica
ctcaaggacgttgagtctcaggagtgaagggtgatccgcgtgctcggtccagctcgagattggtgagttttgtccggccaggccttaaaacatatttttagttcatctaaatgtgcttgcacggatggatgaactggttcagcttcttaaatgacctatgtcacgtcaagatctctcagagttgggtcctggatgtggatagctggctgaatggccggttgaacgtattaatcgtctagacttcttcttttatttaaataattaaggagatcacgacctgtacccaatctattgaattttgaagcatcaggtggcctcagtgattggctggtttggccggtaggttggctagaactgtcagtttggatggagttattaggtataactccacctcaagaacggtcaaatagggtctagccatctaccgcttagcccataggtgggacctgtgatcgaggattagacgactgaccattatcaggctgggcagtatgcccagcaagaatttcttctgtaccactcagtgggataatgaacgtagcagtcgattgctgatagcaactttataggcttttcgtatcagtacggtagcctaccttgtttggtcatcgatggctgcttgctgagcctttaatgtttccatctccctatccctccactcaattaactggcatcgctgctcttcaaacataaggtttattacagcacagagatcctcttgatcatgatgcaaggtgttaagtgtgaccttgcatgattccaagggcgttacagaggttttgaatctcagtgtcatccccgaccatcgtctgagcattggttgtggacgggattccagtgatgtgagtgctttgattggttgcagaactagtattcccagtctcttgcacacttggtgtgatcccagccaaaagggaagtcacaccttggcccacagtaggtggctgtgtgttaggctgctcagaattggttcctggtgggacccttttattcccagtggtttgcatggaaggatctgtgagcaatgggtcactctgatcaaccaagcctctacgagtttacaccaccattatgtgtatctattgaaacttaagacaaagaacaaacttggattttcgctctcaatgaaagcacc

SEQ ID NO: 255144 - DNA, 656 bp, Cannabis indica
tattttctttctctaaattataatattacataatactaatattttataactagttataaatatttgtttgtattaatatataaggtatattattaattttataataaatttattttgtgaatacatatacatacaaaggattaaggtaattaatcaattcatcatagtagtgataattgttggaagttgccaacaaaaataagccttatttaataataaaatttaacagagacaaagcttaatttcactcaccatggaaacatcaattgtaaatagtgaaataatcaattcgaaaagtaaaaacagcaacagtaatggtaggcactaatttgaattaaagtattaatttcttaaaagaaaaaatattgagcatactttagaaattcactcggtgatgggttgcctcatcatatcacaccatctatctaataacccaacattcctccaaaccaaaccattcattaaaaaataaattcaaaaaaaaaaagtgaatcagacttataaagactcttcacaagagatgagaaacgagaggaatgtgtttagatattacctagattataaactgcagcaactgcccatttaagagatttttactattctttaatatacatgaaaaaaaaaatggagaaaagggaacatttttgttatatata

SEQ ID NO: 255145 - DNA, 610 bp, Cannabis indica
aacaaaattatcaagagcttctcgtcagtatccaggcctcaggaaaatggacaagtggaagctgttaacaaaaccttaaaggatactatcaagaagaagttagacgctgcgaaaggcaggtgggtcaatgaactacctcaagtactctggactaacagaactaccgtgaagacgacaacgggacacactcctttctcgctagcatttggctcggaagcaatgcttattgagtgaacatatcgactcacagaagagagttttataatcaagaagaaaaccatgaactcctaaaattgtccttggatctacttgatgaaacaggagctgagtcgcaaatcaccaacgcagcatatcaacaccgagttacaagatatttcaacgaaagagtcaagaaaagactattcaatgttggagacttggtgctaaggcgagtatttgcaaatacgagagatgcatatgtaggagtgttgaaatcgaactgggagggtccatatgtcatcgaagcagtagttggaattggagtttacaaatttgctcgactcaatggctcgctaataaagaactactggaacgcagaacatttgcggtcctactaccaataaataaatga

SEQ ID NO: 255146 - DNA, 1152 bp, Cannabis indica
ataatatttttataaaaaaattccttgtcacagtaaaattataaacttttacctacaatctaatatttttgtaaaaatcccaataaagaatgtattaaattatttagcatgttgaaattagactttaaataatttattgcatgtatttttattattatttctatataaaacagagctataatttatcaaaaaaagaatcatgagtacatccttttactgaaaattttccctattttgtaaactaacataaaaaagaggttcattttgactaattatccatttcaaatcaggctagaaggtaaggtagccctgataacagggggtgcaagtgggcttggaaaggcaacagcccatgaatacatccgaaacggggcccgcgttatattagcagatatcaataccgaagtcggcccaaaagtggccgaggagctcggcccatcagcccattttgttccgtgcgatgtagccgacgaggcccaaatcgtgaaagccgtagaggcagccatgggccttcatggaaagctagacataatgtacaacaacgctggaataacaggcccagcattcccaccaagcataacagagcttgatctcaacacatttgaccaagtcatgaatatcaacgtacgaggcactcttgccggaataaagcatgcagcacgtgtcatgatcccattgggctcaggttccattctatgcacagcaagcatgagtgggcttatgggtggtattgggcctcattcttacacaatttccaaattcactattcctgggatagttaagtctgcagcctctgagctttgcaaaactggggtcagaatcaattgcatctcaccaggcccagtggtcacaccactatctgtggcccaattagccttgtattataaaggtgctaccatggagcaattgggtgagattgttaatgggcttggagagctcaagggtgccaagtgtgaggaaattgatgtagcccatgcagctgtttatttgggctcagatgagtctaagtatataactggtcacaacttggttgtggatggtggatttactagcttcaaggatgttaaattaccttcccctgatcagttcttattgtaagaattataattagaaatttggttttttgaattatgagctttttggggagaccct

SEQ ID NO: 255147 - DNA, 1084 bp, Cannabis indica
gcaccgatttgacaatgaacaggggagattggaggaggaattgaatacctgtaagggatttattgatatccgtacgaatcgacgatctgggaaggaggccggagtaaatgctgattcgacgggggtggttgggtcgagttcggctggtgtagctggagtgactcggatgagtcgagctgctctgggattcatttgaggaggaatcggagccacctagatcagcagatctggggctttgcatcggtttcactctgtggaaactaatgagagggaggtgtgaacgcactagatatgaggaagaaaccatgttcatactttgcatggagagagagagcagagcaaaagaagagtctcgaagggtttttagtttttggtcgatttgttgctaatctcttcctatatcttcatatgaatcatcaattttacttgttagtccctcctatattattctctatatttattttagaacattattattgggtattaatagtatctaacactaagaccatctttaatggaagatgtaaaaattacgctatatttagaataaaaattagttttgtagtaaatttataccaattttagctttgtgctctaatgcacaattgaaaaattttgatgtaaaatttaatatctaattaatgttttattaaaaaaaaaatttaataactttatgatcaattttattattaattaatatgtaagataataaaaaaataatataaatgtttcataatttaataatatagttaaatatactaataaaataatagaaatgacataaatataaataaaaaaagtagtgcatttattgtggtgtaaatttgacataatagcacatgttgtgccaaatttggcacgaaatttgttatgtgccaaatttacatcactttttggcacactattggagcacacattttgttaaatgagttatattttattttttcaccacttatttacacctctattggagatgctctaaatgatctatattttagcttttcaccacttatttacacctccattggagatgctttaaatgtgactccttacaattagtaagcaatattttttaaaaattata

SEQ ID NO: 255148 - DNA, 878 bp, Cannabis indica
aaattgtatattttagtaattttgtacaaagataaaaatttaattaagatttttatttaaattggggtgtatttataatttattggggtgcaaatataatttcccaataataataattacaccccaataatatatttacatatttaacctttagtaaaataaccaaaataattatttttactccactactaaaaaaattgatttgattgttacaatttttttttaagaaaaaaaattattagttaaaaactttaaaactataaaatcgttcatcaatagataattttgaaatttcatagtaattatcaaatataaaaataatatttttgaaaaattgttctatcgatttttattatttatgtttatgttcacattatgcttaaatttgcagaaatttaatgattcataatatataatatgttggatattgttactagatctttatccatttgtcatttttttttcttttaatttttttttgataacacaatatatataatgcatcatttttcataaaataactaaatgcggagaattaaattggaaattcttcttattctttgggagcttttttttcttaaaaaaaaacttttaagtagattttgaggtgtactaaataatacccttttgtaaataaagtggggtgtggttataaaagttaatatttaatggggtaaatttagtaatggagtgtagttataattttagaaggtgtaaatataatctcgctatataatattaaggagagttctatttgcaccccataaaattataaatatatcccgttattacaaatataaacttagataattttagaaattacttttaatatttttttaaaaaaaaatttccctcacactattttatgttaatttcaa

SEQ ID NO: 255149 - DNA, 934 bp, Cannabis indica
aggtctaggtcttggttttggtccagttctagatctcagtctgggtctgggttcaggtcaggtccaagttcgggtcctgggtgcgggtctaggtcttggtttcggtcagagtctcggtccgaatcaagggctcgagtttcaatctcggtctagggcttgttttggtttgagtacaggttcgtgtccagatccctatctaggtccgagtttgggtttgggatcgggtcccaggtttaggtcctggtctgggttctggtccaggtctcggtcccgatctgggtacacgaatgtgtttgggcccgagtttcggtctcagtttgggtctggggctaggtctgagtttggttctaggtttgggtccgggtcgtggtcttgcagttctttttcagtttctagtttagggtcccgaattttggtcagggtctgggtctgggtcctgcttctggtttcggtgcagtttcaattcacatggtacgagttcgggttgagtttgggtctgagtttgggttcgagtctttattttggttcggggggaggctaaggtccgtatttcggtctcggttagggtctgaggttgggtacgattttcggttctgatctgcgtcgaagccccggttcctttcaaagatccccgtccggttccagttcaagtttcagttttggttcccgagtgtgggtctgggtttcgctatgtgtccggttcttggtttgagttcgagtttgggttaggattctattctaattcccagatccaaacactgactacgggtcaggtccaagcatcgagtcccggatcccaagtcccgaggtgggtcctaggtcatgatttgggcctcggcgggtccttgatcctgatccaagttctgaggcccaagtcttggtcccagtttggggtcccaattttggggtttgggtcccccatctatgtccaggt

SEQ ID NO: 255150 - DNA, 564 bp, Cannabis indica
atttgtgaaataatccctataattaattatacttttttacttacatttattctcatttagtattaatgacttacttcaatatatttttttaaataaaaatattgccataattttttaaaaatatatttaatatattgattatcattaataataattacttttttttgttaatctgtatcttaatttgctataatgtattggaacacgattgtaaaatatataaattaaatatagcatttactaatttttttgcaccaaatttaacctatttttttactccacgcattggaaatggtcatagaaaatattaaaggacacagatatctagctaacattatgtaatcgaatattggatctcacatattttaatttaataataatatagaaaattattaatcatctataagacgtcatttcataacaatattgaacactagctactagaaagtagggatgcacacggggagtggaactggcaaggagtgctctccatcgccgtcaaagattttaatccctatccttgcttatttttcatcaggagtggagcgggaaatctcctaatgg

SEQ ID NO: 255151 - DNA, 515 bp, Cannabis indica
ctgttctatgtctctaataacaacttaaaataaacaaacaacaaataataaattccaagaaagaagaaaaatattgtatataaaaaggaaaatttagtttattttagattatactttctattgaactcaaaaagtgatcaactgacaactgggtgatataaatgtgatgcttgtcacgtgttacacaaacagaatgaaaaagcaataaacatagagatttgttacaaaggtttggcccccttgtgatagcgggtaatgacctacttcccttttggttacatttatactaaggaaatactatctagatcactataggttggatctgctatagcacccttaggattacaaagtatgaattagtaggtagatctcaggtgttggacaacctagggtgctggccagccttgggtgttagccatcctagggtgttggccagcctagtgtaggcgtgcgagagaggtgaagacaagaaaggaagagccctaatgggcatgtacaagagagagagagagaga

SEQ ID NO: 255152 - DNA, 891 bp, Cannabis indica
ccagcagtggtaggtcccattgagcaagaaacgtaattgctttcagggatttcagacagatcaccgtacgagaaccctgtaaacataacctgttgaatcaaaatatggataagaaatataggctgcacatcaaatcatgtcttaaatcatttaaacaatccaggaaaaaatataatgtaaagaaatattattgcttttaaaaagggagttgaactcagattacaataatgagtattatgcattgtcgtatggaaattgagtaaagggaaggtaccattaaagataatatgacaaagcaataattatatatagaaatccttctagcaccatgtaataaattgcaataaggcaaaagaaaaatatataatggagtttaagataaaaggaaagaaaatttggagcacacttcatcagtctagcagctaaaactcatcaagggtatctaacccaatccagcaagaataaaccaaatggaaggcaataaataaaataaagaaatacttaagaaatcatacaatacaattacaaggaagtacacaagtacctggtcatcaagaaaatctttacatttgtagcaaacacgcatgccatttgatagaattaattctgtggctccaatgtttggatagtcacattgctgcactatatctctgaaaaataaaagtatatgaacaggctaagaatttaaagaagtatggcacaatgtagcctgaatcctcataattaatagacacattggatgacaatgattttcacacaacagcattacaacaattaacttaatactgagaaaagtaatactagtcagataaagggaacaatgaaatgaagagttttctagagtgaaatgagaccggggtgtgtaaccaactgtgctataataattcaatt

SEQ ID NO: 255153 - DNA, 1178 bp, Cannabis indica
tacaaatacagaaaactcaaaacctctttatcatcaattctgtgatcagtgtcttgagtttaatgcaataaaagatgaatcttttaaacacaaactatgggcacggtttaagatgtttcattatgaagccactattgatacaattgcatagttcatctctagagtgattaaggaagcaaacaaagaacaaataccataatcaataaacccagcaacaattcacagaacatttaaaaatcctcagttgtcttcaactaaatacaaatacaaaaaaagtcaaaactcaaaacatctttgtcatcaattctctgatgagtatcttgaggataattgatctaaagatgaatcttttggacacaagttatggacaaggtattgatacaattgcttatttcatgcctagagtataaaaatcctcagttgtcattcccagattatcaaatttgaacacaataatatacacattttatttaatttaaacaaagtattcacacaatctcagaccaaattaaaattacaaactaatcaattgaaagaaaaaaaacataattaagagataaattatatcacaccttccatttccaattgtctctttaccagaatatataatctttacatttccataattgaacaaattaattaaaaaataaaatgaaacagtgaagaagaatttcaaaatcgaaacaatagtcagtgaagaagaagaagagcaagctccaattcttcgatgaaatgttaatttgtatatcttcaattcttagtttctaatttcatgaacccaccatgaccaccagcattggaccaaaaccccaagccccacatccccccagcatcacaattgtgaccccagagcatcagaacagagagatatatatatataccttgtaagagagcgagccgatgccggtgagagactccgccgtggagaccgacgccgccgattggagatgagattgaagagatatataggttttgaggatatgagaagatgagtgttcagttcagttcagtagtaggattgttgtataacagttctgttaaagttaacgtttgttctggaaaaatctgttaacggccgtttaataagctttgtgttttagtgttaattttaatgtttaagaagattatcaacaatccgttgtagtctagttggtcaggatactcggctctcacccgag

SEQ ID NO: 255154 - DNA, 1879 bp, Cannabis indica
tgtatttttaattctttcaattccgctggtgccattcgatagggtgcctttgatactgggtccattcccagaaccaacttaataacaaattcaatctcccaagtaagtggaaatccttgtaaatcttctagaaagacgtcaaggaactcgcacaccaatcttgtaatctcaggtccagatgtcacaggttgactgatatccactgcagtgactatgaatcccagataacctctcttcatcaagtccttagctttcaacagtattattcttggtatgcgtgccccctgaactttacccacgaacaccgttgggttagcactatcgggctcaaataccaacatcttttgcttgtagtcgatcgttgccccatactaagacaggaaatccattcctaggattatatcaaagtcagacaattgtaattctattagattggcggacaattcacaaccgtcaatccagaagcacaaagattgaatccacctagtggatactataaggtctcccgagggtaacagggtaccaaaccccgaagcataaatatcacatggcttatgaaaattttcaataaccctactcgacacataagagtgagtagctcccgagtcaaacaacacaaaataagaacaaccaataatagaaaactaacctgtcaccactgacggactagcatcagtgtctgcttgagtcatggtaaaaagtcatcccaagttttgagtaatattcttcttaggttcctctttcttggtctgaggacaatctttgatgaagtggcccaccatgccacactggaaacatgccttggctcgacattcaccctgatggtgcttcttacatttaagacactcgggataagatcagaatgaagatgtgcgaccctgacggccacctctatttctccaaaactatctattaccccctaatgttccgaaagcttcagccttctgtttgtgatcggggttgccaatgtcggtccccttactgacattaccactagcaggagggtttgatgccgtgacgacatcctttgcagtttgctcttgtactacatgttgctcagcctcctcagctatcaaggctagctctaccactttcttgtacaaagtgtcatgtaaattggtaattttcaagtcccgtctgatcgtggcgttctgtcctctcaaatatttctgtttcctggtgaaatctatgggcaccaaattaccagcaaacttagacaaccgatcaaactctagagtgtactcggccacagatatcttcccctgagtaagcttcacaaattcttccatgtgtgaagttctcatagcaatattataaaatttttcctcaaataaacgcttgaattcttcccaagtcattgtactgacgtctcgggtctgtcccacagtattaaccaaatgtgggcacgatcttacaacatgaaggctgcacaatttactctcttaattcccatgaccctcatattatcaaggatacgggtaatagtactcatctactgctcgaccttaattatgtcaatacctccgagaaaagtttgaggttccagcttcacaaaccgctcaaatataaaatctttatgcggcattataaacccctggttacccaccactagcataggtgctagtggtaacacttgatcaacaggggcaatcggtgtcgattgccttaatcgacgcaacgcttccttttgacgaagtataatacctcgcatttcttgaaacgtctacagccagtctggaagaggattagcattgccgaccccacattatcccccaaattctgcagaggttgaggcggtgtcgatggattggtttggtcaaccccacggtctacttgctcgccatgtggtctagatgattgcagagggtccattactagt

SEQ ID NO: 255155 - DNA, 707 bp, Cannabis indica
tatacgtcggtttttaaaccgacgcagattctttaaatgacacttaaaaaccgacgagaatggtactttttgtagtagtgattacacatcacctctcacctgtctctttcttctctcccgttggcagcgtccaacagcccagacgcacgacaccaaataccagcacctcccccttcttctctatctattctctctgcgatcatgagatcgctagaccgggcgaagcttctccggtgttctaatgcccaaatgggcaccgccaacagtctaacgcccaaattttgtttttgttcctttcatttttaacggtagatctgaagtctttaacttctcttcttcatctatttccttgcaggggaatgaccggtgcttgggggtttgtgaagtcgtcctatttacttcactagagtttcgaatccctctcctccaacagcggctttgagtttctggttgatggaggtcggggttatgttgtctacggtggactactataatcgtgatcttgtatttttttttttaggttttcaattttttctacagatttgttcatgcccatttttgagttttattttcatctaagtgttaataccccctcccattgttttataaatatttcaataaaaaaaatttgtattgaacaatacttatgttatattgattcaaactaatatttttttatttcaatttactttatttttttatttttt

SEQ ID NO: 255156 - DNA, 645 bp, Cannabis indica
ccgatttttctctgatcgtagcattcataggaatgatattcctaatgagcttcatgctctcttgtatgatgaatgctaaatttcaataaagttgatatttcaatttaaaaaaaaaaaaaaaactacatcaaatgctctaatttcttatttattttaaaatttatttaaaatttactattcatattctatgtttataaatattattcactgctctaaacatattttattaattattttgaatttgaataattgttttatgtagaatatgtgtatatatcaatattataaatttaaaatgaataaaatatattaaaataaaaaaaaaagttttagtaatgtattttaaaaaaaaaaaattgtcgtattgatgtaatataaaaatgtaatttacaataaaaaaagtaaaattttgataatttattttaaggggaatttttatttttatagtttttaaagtataaatttgcaaaaatattaaatttttctcaaaaagtgttatttcatggaaatattttagaaaaaagttaaaaaaaatgtatagaaaaaatagcataaagtatatggttatctcattatggtaattggttactcctctagttaccataagagtacttagttacttttacttaatattttcatattttt

SEQ ID NO: 255157 - DNA, 512 bp, Cannabis indica
gtttcctttcaatctcgagagtcccaataggcctcctcataatcgctgtcaaacaacataaataaaataagtaaaagcctacatttattgaatataaaactcgaaacaaagttttacagttaaggcaatacttacgtattatacgaatcacagttgtgtttatggggacaacagcagttgtccaaaagaattcatcattgaatttatttttatttggcaacctgacaatgatctttggatcattagtgtgggtcttgagatagtagaaaccacctgctcctcgcttccttgcgggacaggccttcactgagtaaaaatagaaaattttgagtggagtttgacaatcccacttcaaaatatgatataaaactttcaaactggccagtattctataagaatttggtaccggctgaaaaggagcaatgccaatgtagttccaaaactccttgaaataatctttgatagggaatactactccagctcttatgtgttcgaggccccaagcgcctgtc

SEQ ID NO: 255158 - DNA, 708 bp, Cannabis indica
tttgtttcgaataggcatcaaagcattgtttgtgctttggatatcgtgttccctgatgcacaccacggtgcatgctaccactacattattatcaatgacaaccacaagttcaagactgatgtcttcatgaatcacatttacatgtgtgcctacacgttttcaaaatcagagtttcacagagaatttgagaacatttgggcaatgaatgttgcggttgcacaatatcttgaggaaatttgatttgaaaaataggtttggtcgtactttctaaggctgagagcttcaacaacacaactaaagacgcaagaggcttcccgatcactgctgttgcagcattcctgatgtccaaagtcgaacaatggtttgctacacgaaaagaaaaagctgacaagtggacgaagatcctaacacaagaaatggaggaggacttggcattgcgatttgaaaaatctcggtatttaagcattgacacatgtggaccttgcacgttctaggttcaccttggaggaacagttgagaccggtggtgtagtgtacttgcaggaacagacttgcacttgcggcttgttccagtgcatgaagtttccttgtcctcatgcatgtgctacagctcaacagcgaagtattagcatgtacacactatgctcgccatattacacaatacaatattggaggagcacatatgaaggtacaattatgccagttggtg

SEQ ID NO: 255159 - DNA, 1574 bp, Cannabis indica
aaaaagagcctttgcttccatcttgtctgattgaaaacaatcttagactggtttaaaaaatagcagcaagtataacctcattatggtcttgaataagtgctctagtgtccaaagttttagtggcctgattgaccgtcacatccacattaattttgataccattcagattaggtggcctccatgggactcccttcgttggcataggatattgtttagttgtagtaggggcagccatggcagtaggtgctttagcacaattgtgagaaaggatgcagtttccatagtaggtttctgcataggaagcaatataggaaccatcttgcctatttccaccatgaaaaactttattcatttcaaactaaataccctacattatacagatcagagtttcaaactctctttttgggtatagcgatgataaatggatcacatactctccatcatgcatatgatgagccttttggtaatcaattgtgaactgtgaagccttctaaactgtttttgcatacccacaagtaaacaaagcatgtcttatagattcccaaccatggttacacaatgaacaagtcatcgggttaataactttcatccttttcaatgcaacgacaataggcaaagcactttggataaccttccaagtaaaaaattttattttgggagggaaatttaaattctggaaactcttccaccaactgctgcagttgttagatgtggaagaaatgtcaacttcagctaaggagttggctaaatgaaacctcaacttgaccatgtaaacacctgcagtcatatgatgccatatgagcatgtcttgagtttagaagaaactcggtggtattgtaaggattcgatcaacataaattggagcaaagtggtcatttagctgagaaagtttctattccctattgtccttaatgaaatatgccacatttaatgtgggtggtccaatgtaggacagtggtttaaattcattatgacatggaatccagggatcgttaccacaaatgatgtcaaatccattaaactttgtagcgcagacctttaacaagcaactctcgaccccaatgaataccttgccatgttaaagaaggtgagtgcccaagacttgcttttaaaaaggagttattagaaaaatatatatgcttcaacaaacgactaaggagtttggaaactcaaggatacaccacgcctacttagctaggagagcttgattaaaatatataaaggatcagaagcccatacccccttcaaacttggatttgtaaagtaatttctaccttttccaatgaatcttttagccattttgattggaaccccacaaaaaatttgctatcatagacactaaaacggcacaaaaaacttttggaaaaacaaagcaactcataacataagtgggtatggattgaaccatagcttttcagaagcacctcctttccaccaatagagaagaatttgtcattccaagcatgaagaagcttacaaaccctttctttgatgctgctatatgattgtgtttctatctcatccctacataggccggtaaacccccaatatatgttttcatgacatacagatat

SEQ ID NO: 255160 - DNA, 1657 bp, Cannabis indica
attgcgggacttcctttttgaagaactcgcatactaagatgcattatccggtggctgaagccttgtgagttaaggcgatttccgtccatctaagcctacacctacacctacatgtccatctatgctgtgtataaataattctagtgtttggtggttgttttttttgaagagaactatggattttgtttttctttttttttgcgttgtgttgatcagaacatgaaccatatgatatgatatgttatttggttgtgtgacattttcattttgtcaaacaatgaacattgtggagttgatttctttctttcgattagatttccttttgagagttacattatataaagataaataaataaaatagaaaagaaatttttagtattattttttatttacaaaatatttatttattaaaataataaattattatttttttgttattttttttaaagggatttcattaacctcaattcacatggcactagctttgtgaaccaaagcatagttggctaatacatgagcaactttattggcctgacaaaatacaaaggagatactaatcacacaatcatgagacaacaaaactctaatttgatctaacaagcaatcaacatctcggcagctgtcttcctttttttggattaattgaacagcttccaaacagtccgattcaatgctaaaccgtggtattcgtctctgcattccagtttgtatcccccataaaatggccaaaagctcaagttgtaatggtgattgttccctgggcaaaacagtggccgaagcatagagtacttcgccattcgcacctctcatgacacagcccagaccgagcagccaacaccatttttcacaccagcatccacgttaattttaacctcaccatgcctcggcaccttccagcagccttgctcccttcttgcagcatcatttctgctgcaattttttttttttgttattttatagtattataactgtcatactattgctttatagtttatttataattaatttatgtaatcctaaagttgaattcttactattttttaattattttcttactttttttgcataaaaaaaatatatttttataatttaaaaactttaaaagtgtatttttgtatgtttatttttggaaactgattataataaagagattaaataaaataatagaaagtaaagatgaaattttttgcgtggtttaggtattaatgaatcctaatccacaaatatacaatacattcattatatatgaaattgaaagaaaagagagagtgagagactacttgattagaatggcttcgactggtggtgtgactggtgcgcagtgcgattagaggaaggagttcgtacaattggtgcagtggaagaatggtttcgtctgccagtggattcgtgtgcagtggctgccagcgactcgtggcgtggttggcaaggttcgatggtgcgggatggtggaaatggggtggttgacaacttgcttagggctggtcaagatttgttgctggtggtggatcactggatcttgagttttagagagagagagaagtgagggagcagagagagagtatcatttttttagggtttcattttaaaatattggtgagtgtaatgtgtttgggttaagtggaattattcattaaaatgttccttatgatggaaa

SEQ ID NO: 255161 - DNA, 536 bp, Cannabis indica
gttgcagcagaattaaatgactctttctgctcagatctctaacccgatctgagcccgattctccttcagttgattggattcttcacagtcttacacactatgattgagtaccaacttgctatgcgtgggcatgtactctatcactatagggttcaaaaattgaagagagaaagagagggggaaggattcaaaatagagagagatgagtgaaggctcaaattttgactaaaaggcttaagtgcatcaactgctattatctttcaatttgtgtcaatcactatctatttataggaatccttctagatttaggtttgaattatttagcattaaaaaaaattataaataaatggtaaaatatagcacatgtggccggccataggatgtgggccctgttcggattttatgccctaattaaagcccattacaatctaatctgatttgttatcaataaaatattagaagtcatttatgtttacttgttgttttcatgtttattgtttaatatatatatacaaaatctgttaagtccagaacat

SEQ ID NO: 255162 - DNA, 505 bp, Cannabis indica
taataataacacatttaaaaaataatttataaaatatgattcatcttctataaaaaaaactttttattattctaaaatgagaaaaaagactgaaatttttgtaaaaaaaaaaaatattaaactaaactaaattatttttctatatattttgtaaaattatacctcacaataataattgtaaaaataattgaattatctattaattaagtacacaaacatattaactttttctaattattgtaaaaactttataaaattatgtaaattaacttttttaaattaactttagtaattattctcaaactaattttatatcattatacttttaaatttttaaataatttattaatgtaataatgtacgtgtatgttagaaatatttctagattttttaaattatttttcatttttagaaaagtacattacatcattttgaaaaatatttaataagttaaaacaaagataaactaatttaattaattcgttctattaatggagggtgccta

SEQ ID NO: 255163 - DNA, 1307 bp, Cannabis indica
agttatgtctacgaagaataatactacatcaatttatgattcacatattataaatgaagtttcacattaggtaaaacatgggaaacataatgaagttttcaactgtttttttttaattctcatcatgacttttatcttatgcatttgatattctctcaattcttgtggctgctctcttaatgaacatttacattgttggtttgaatcaactgtatgacattgacatagacaaggtagctcttactatcttgcttgtaatattgtcttaatttcatcttatcaaattgttttcaaaagagggactgtatattttatctcagattaacaagccctatcttccgttggcctcaccagaatattcaattcaaactggtgtcacgattgttgcatcctttgctatcctgctatgggaagcatctttccaaaagaattttattattctattatgctttcatattaaatagaaatactactaaactacattgacccttgatctcaatttataaaattcattgatagaatgcaatgtgatatattatagaaactaacttgttccatgacaaagaacttgagcaacctaccaaattccaagttttctgaaatttcactttggatcctcattatattctgctcttccaattgcagttaagaaaaggtttaaatcataaaagtgagctggattgagttgaaatttggatatttagggataggtgaacttaaattttaacaattagtatgaaatgcacaagtaccatatacctcgtggataactataattggggatgtgtgcaaatggttgcgtagccaatccttggtagaacggacgaacccattaagattgatgtacgaacaaaaatattaccttttaaaaaattaaacgtaaattttttaatttaataattataggccaaaataatagaaaaacctccacaaaatttattaaatttagtaagagtaagtataatgtagctataaatatttttttatgataaataagccctcacaaagtaaaaatattgagtcgtcactgcttggtagaatacatgtttactgcaatgagtacattgtttcacatgttctagcattcttacagaatacttcatcaaaaatcatcaatatattataacaatgggtccaattatagacaaaggaggatgaaagtagatttctcacaaaacaaaaccaatcaaattagtagtagaatagaatccatgtagcatgttcattaagcaacttaaggttactattctttcattttatacatcacagaaaaaagtttttggaatcgtcaatattgggaaaaccag

SEQ ID NO: 255164 - DNA, 713 bp, Cannabis indica
gcacatcaaattggtatcagagctggtaatccgggaagaaaatgaccaataccagaagttcaaagaaagtaattgaagcagttcaatcggaggaggaagaatcgcaaactccaattcctggagaatggaactcgatgaaggagaaaattgtctctcatgaacgcgacatcgctgtaattagtgagaagcttgatttgcttctacgggggcaggcaagaatggcgacagagcttaccgatggtccacgaagtccaattggaaggactgctcatcctccgattgggtcaagcggttcgggaactcagaaccgtgaggaagctggtggctatggaggacgaagatcacagttccgtccaaggaatattgaacttcctctgttcgcgggatcggaccccgatgattggacatatcgggtggagagatatttcgggttgcaaaggctcacgtcggaggagtagttggaggccgcggtgttgtgtttggaagggtcagcacttcgctggttcaggtgggagaatcggaggcgagaaattcgcagttggaatgaactgaaagatctcctcctccggcgattccttcctgcgcacgaggggatggcgtacgaccgtttcctggctctgcaacaaacttcgacggtgcaggaataccggcacgcagttcgaggcattaacggcgttgctgggtacgtggcggagccgttgctggagtcggcg

SEQ ID NO: 255165 - DNA, 778 bp, Cannabis indica
ttaaaaaaaattataataattaaaaaggttatacgtagactgaaatgaaaaacgattagtatgatacatggtgtaaattaatcaatttaagactttatatttttcttgttcaaacttctgtagccatatatattaactcaatatatattaatataaattaaaattaaaattattatattatgactataggaaactcacttattagatagggacaagaaaataatagaattttgtctttattatatatcttttactatataataaaaatgtatatattgacaagttgtttttttgtctttttttttaatgatttttttgtattattattattatatgacaacttaaaggtctcgtttgatatactctgatatattgtattgtattagatttgattgtattttattagagcttgtttcaattttaagaaaaactaacactacaatatttaagagtagtactggtagaaatcttcgctaatactaatttcaaaaattgctggtattaagtattattggcggttatctgtcggtaataattggtcgctaatattaaaattagcgaccaaaatatatttccgctagtaatcatattattaataccagcggattaatagcaaaggttccgctggtattaatgtctatccttatatacgctgacacattaatatcggcgggctaactttaacattctaccgatattaatatttttatataaaaaaggtttttttaattttctaaatatttatataaaaaaataattataatattatatataataa

SEQ ID NO: 255166 - DNA, 898 bp, Cannabis indica
ataatggtaaatataaaatcataccatttattaaatggagatacaaataagtaatgcaaatataaaatatagctcactttattaaaagtctactctaatagtgtgccaaattgtgatgcaaatatctcacataacaaaatatgatctaaatataaaccacaatatatcatgatgtaaaatttatattaaatttttttatatattttatattaatcactcttctaatgttagtgtatttttagcttgaaataggtaaataaatattgatattgaaaatttttatatattttttagttagaagagtgattaattagttttcaaatgttcgtattgatattaagaaagtctaagtaactatattctattatgtaaataattttatttgtgcttgtttatacttaattgtagatctattaagtgactttggttttatttttaagaggctttaagaacatttcggtaagtaattactagttactatatttacttagtatgcatacactaattatatatgttttagttacttgtttattattttaacataatttttactttaaactttgttatattgcttttaatattggttgtggattgttgttgaaaaacaaaataaaatttaggtgatcattgattgctagctagaggtacgttattgactttattaatttttattaattataaaactattagagaaatttgaatatcttagatattcttccatattaaaataggttctgcgatatactgtactacgatgaatggagaattaatattcatgttagagaaatttaaatatcttaaatattcatctgcagtgaaatagattctgtaaaatatatgtactgcggttgaatagatggtaaattattattgttaattgctttttttatttttgttc

SEQ ID NO: 255167 - DNA, 1042 bp, Cannabis indica
ttttctagtttattggtttcttccatttgctgcttggttttttttgggattcgatcttgctattgttagttgattaacaatgtgaattaagggtgagtttttcaccacaaatggtatcagagcaaggttttaaaatccgcattcaagcctccaagattgattttcaaacatcaagaaactattgaaactacatgtctactgcaagattcaaggtggacaagtttaatggaacaaatgatttccgtttatggaggattaagatgaaagccttccttgtgcatcaaggaattcatgaagatattgatgaagaggctatgaaatttattgaagacaagaagaagaagctagaaatcgaactaaaggcactcaatgccactcttcttagtcttgggggatgagatacttagagaagtgtttgatgaagagaaggcacttgggctgtggaacaaactttcttcaatttacatgaagaaatcactagccaacaaactgttcctcaagaagagattatatactcttaatatggatgaaaacagagagttgaggaatcatcgtgatgatttcaacaacattatcatagatcttaataatcttggtgtcaaaatagatgatgaagatcaggccataatactccttaattcccttcccaaaatttatgaacatttttttgataccatcttttatggtaagtacactctcaccatgactaaagtgaagggtgcactcaaatcaaaagaaattcaaaagaaaggagataagggtgggaatagcaatggggagggactgctgattgcaaatggaaaattttccaagaactacaagggaaatcaaaatcatcacaaggctaatcagtctagaactggtgcaaagggtccaactgggggatcgtaattcaagaggcaacactagaaaacaatgcttctaccataaaaaggagggatattttagagaagaatgtctggctttgaaagcaaaactaaagagagacaatcaacaatcaagaaccagaatgatgagaagcttatcttgcagatggatgtga

SEQ ID NO: 255168 - DNA, 433 bp, Cannabis indica
tctggcagtcaagaactcccccggagcaggcagttcgcgaggtggtgaccggagcaatcacatcccagcaggccgagagaatcaagggagagccatgaatcaggtatcttcattaatgtcccacgattcacgttctatcaatgttaatgttgatttggaaaaatcccatgatttaaggaagaatgatgagaatgatggtgtggcgccaactgggatagatttgaatccaggattgacttttattgataataaaagaaggagaatgggcttggaaaaggagattgggcttgatgagactaatgaaaatgaattgggccatgtggggcttagtcatagtcaaggagtcaaaaatatggatatttctaatttggttgacaatgatactacaactcacgatacgatttcaaaaaacatgctcgaggcgggtgctggt

SEQ ID NO: 255169 - DNA, 523 bp, Cannabis indica
aacaatttattggctcaaacccaggtaacatatcacaaagttgtttggagttctttaactttttctaaacatcattttgtctttggcaagttgtgaataattaggtgctaactaggtacaaaatgataagatttcagattgttttggaaatgcttgactgctctcactataaaaaaaaattggtacttttagtgacaactttttaatcacaacataaatttttgtgactaaatatgatttttagtcacaacaaaaagttgcttgtgactaaaacatagtatttagttacaagttgtcgttaatttagctttagtcacaacaaatattgtaactaaaaatatatttagtcacaacaaattgtaatttttgtgactaatacttttagccacgaattttttagtcacaacacaataataataatttataattagccacaattattttacctttagttacaaattttgtgactaaaagtaagattttttgtaaagttattgaatgcatttatttttcttttgtgatt

SEQ ID NO: 255170 - DNA, 1351 bp, Cannabis indica
ttagatatgtgattgaattaatatcatattgttagcccgcagttacctctaaccataatctatacacctgccgccacatccatgtaatgacaatactaataagtatttctatatatcataattctttctacaaattctcaatactaacataattcaaataatcaggcaatcagataattagcaaattatctaataattaaagcttattgaaccatgagtcgactaagtcttcgcaaccaatgtacatatcaaaccagtcttcaggatttaaaaaccttggtgttttgataccatgttgtaacgtcctgtccaacagggacgccacgtgtgtgttcttttataaaatttccttacttttaaatttataagattataccaaaagtgtggttaattaaaatttgataatttaaaacaaacatataaagattctttttataaaagataaataatattaatctcagggttctcctgtttctaaaatatttacaatctagtttaaaagtaagtgtttttacaacataaactttatattcccaaaatacaaccaaaaaggaataccctaatcactgggtcgtggcactgcggttgatatgtacattactgctacgacctttaaactcatggttgctcaactttggccttccctttacctgcaccatatagcacccgtgaatcacagagacttagcaagaacagtgaataaacaatgatcaatataacatttatttattcaagctcacattaacaagcttaaacaattacataatatcgtaatcatacaatcctggtacttcataaagtacccttaccactcgttaaccacgaactgaatatgtcactatcgttgcccggtaaagcaagtgataagtaattaagaaacctatccgcggtttcaaaagtaattactcgtaacgataatgaccgtttccaacccttggtcataaccgaggctcaacaaacattttaaccatagtctcgataataatcaaggctataatcattcaaccgttaacatttaaccgcatacggtgcttaccacttttcttacctcaattcagaactcaattgtgcgggccgtcctgagtggaaaacaagctgggcgatcctggacctatgtcacgacaaccgaaacttaatgaataccttaaatcgaaattccgaaacaaaaccctaattcaaaaccgaaaaagaatctaatttccaacaactccaaaataggctagacaactcataaacaacctaaaatagacactacgtaactccccgtgccaaaaactgaacctgacactactacaaaaatatgctttttatcccggtttttaagggcattttatctcgattttcgctaaaa

SEQ ID NO: 255171 - DNA, 822 bp, Cannabis indica
aactctaaaatacatggcttaatacaatatcagcaagtgtccaagtaatttaaaatttaaaagataaaatcagtgttataactactcatttattcctaatttacagacgttcttatccttttcaaaattgttaaatattcattgttcaataaagtaagataaaaagttaataacaccattcaatcattcatgctagtcttaattattagatccagactttgggttgatacactatgagcatcctttcttggaatgcacgtggactgggtaacgaaggaaaaagaagacaacttaaaacttactacgacaacaccccgctgatgtgctttttatttcagaaagtcatcttaaaccagatcgaatggaatattttaagaaatcactggatttctgtgaaggttttgaggtgccaagggtcggaacaggggggtctcttacttctttggaaacaaccttttattgtaacaattttattgtctaatgtctgtcacattgatttctttgtaaggtctgaattaaaatcttggtatctaactaatttttatggggcaccacaagcgattaataaacaacattcatggaggatgttagaaattttgagtgctccaccacgacgtgcctggattgttatgggtgattttaataaaattttttagatgctaacaaagttgggggactgaatagacagggatcatcaattacagcttttcataattgtatgaacttttgtaatttacaacagatagactttactggtccaagactcacatggactaataaacaccaaattggagggctagttttagaaagattggactatgt

SEQ ID NO: 255172 - DNA, 553 bp, Cannabis indica
tattgatcacatgtcacacacgacagctgccacatatattaggaataaaccgggacaacaaatacaattaaccctaattatttacaactaatatatagcaaatattctaacacaagaatatggataagcagatttctcataggaagttgctgggaacaaaaactaatgtgagatggcgcacaagacgtcaacttggttgcccaacactgttgccggtcctaggtagagccctgggatgtccacgtgacatcctcagcttcatgtctcatcattttagggtcatggcgacctatttgttgaaagatagcagttagaactgacttcactagatcttaatgcttacatgggtgcccccaatgtgttatattatatagttataatgtaagatagattaaaatattaaaatgtgacacattatatattaatatgagattaatgtatataatgtgattgagagttacatacatctaagattcacataaattgtaacataagaggtggagttacttacattttataacctccataattatcaccaatattaagtgtgtaa

SEQ ID NO: 255173 - DNA, 1477 bp, Cannabis indica
gttcatccatgcttttctatagctatcatcttcacatagtataccaatagttgcactatacaaaggctccccccatccatgttgacgtctttcatgttcatccatgcttttctatagctatcgccttcacaaagtatgccaatagttgcactatacaaaggctcctcccatccaagtccatccaatttttccatgcaatcctcaacttcaggaccactattctttttaattaacaactccaatgcaacagacatcttatcatcaatatcatgttgagatgaaagctttcttttcttcttttgtcctcctaaaggagttgaatattgagatagaaaagttatcaacttcatcaatttggttactaggtgcactttcttcaacataagcatctgtctaaatattaggagatgtagatgagttaataggttgagaaattgtacaactaggactctaattataaaattcggttgcagtagtaccatcaaatagtgctttaccgagatctaaaaagggtaaaggggaacttttcaatggtttgcctttgggtgatcctatatccaataccaaaacacaatgtattttattatgtgtaaattaaatatctaaatcataaaatagttatatagagaaataaccttaatttactcatctcgttcgacattggacataagaatggtattagttgtagaatcataaatatttcctatattcatatagttattggcaaccaagtttgatatttatcctttagataatcaaaatgattcttcaattgcttttgtgtggttcaaagaaagaattagtagtctctaaaagttgtctaactttatttcacaaatctaactataaactacttcaaagccttccatgtaaagatactttttgaatacaagtctccaaaaatatttttaccacttcaatattctttcaacttactctttgatttacactaaattgttccatctaataacatacaaatgatatctattgaaaaatattcatatgcaaaaacaacgttcgtgaaaaaatatttagaatatatgagtggcatatggttacttcaatattttttttcttatactattaaataaaaaaaaagcacaatacttaaaaataaaataaaattaaacaatagatatatagtatagtgtagacaatattacaatataaattgccatctttctatctatatatatatatatatatatttacttttttaaaaaaaaataaaacaataaatcatatatatacactgtacacaaaagtttaatgtgattgtattttttttaatttttatttatcctatatgtttctaataaataaataacaataaatatattagatatgatgtgatagtgatggtgatggtgttcatatatatacatattataaatataatgatatgatcatatatatacataaatatctaaaatcgttaatataataataaaagaaaagaattgtgatattttttggt

SEQ ID NO: 255174 - DNA, 623 bp, Cannabis indica
tttttatatgtattgtacccaaaataccctgacataagagagtcacgtggagagtatcttgaagtgataaggacaaaattggtacaatatttttaaaaaagaggtaaaaatgatagactttaaaagagagagtaaaaataaaagaggacaacataaaaatgatatagagtgtaatttcctctataatatttgttgttatgtataatatagaatctaattattctacacatatattaattagttcgattcgaattgaatgttggatgtattgaattttcagacactccattcaacatctaatctaatctaattagatatttaaaataatatcctatccgatttaattataattggatatttaatatttgacggtcggttgttattagatttgattgatttataccttcccctaagtaccatatttatgggcttaatatagggcctttacaaagtacaataatttatggattttactaggtgtctctatgggcttctgctctgggccctttagtcagtcgataatcttagtgggcttctggcctgggccctttagactacaatctttatggatttctgatggcaatttaaaccatttaacagaaagaacattcataatatcacca

SEQ ID NO: 255175 - DNA, 1501 bp, Cannabis indica
cgctgggttgtcaacctggttgttatgtgttgaacatccttcaataaaacaaccataaatccttcaatattgatccaattgacgcgatacaactagcatttcgaagctatttcaaagatctatctatcaagtcatgtctcacacacatatcacatttataaagactttaagttcaaaatttgtgcccaagacagttgcaattttttccagagattggccaaaaacaatccaacagatgagatttaaactccaaaaattgatgactttcatcaagaaacaccattagataaccaccaatggccacaatcagctcaaagtgaatttttcatattttttttgtattattttatttatattttaacaaaacctccttccttataaaaggagagctcctctagctcatttttcacattcatctaagtccccataaggtgagagcatctctctctactttctctttctaaaaatttgtggtcttgccttagctagttttcttgtaaactcgtgagaaataaaaactcaaagtagacgtagcttcatattattgtcgtgacacagggagtgaactactataaatttcttgtgtctctctatttacttacttaaacatatatttctcctcttatcaatccagcgagcgagtgttggccagaatttttgcatcaacagagtttgttagaattttactatgggtcgaagcccatttagaagtttggaacctctttgggttcggttatttgaacataatcgaagccatagggtagcacatgtaaccctatggcttcagttatttctaaatactcttagccaaaggggttccacgattaaattttttcccttttagttttattttcctaatataacagaagttatatgtgagtgactaactaatagtagtgggttctagaaggctatggtttcacttctttttttttttaaaaaaaaaaaagtgattgataaatccgaagctaaaattaaaggtcattttgtagcagtggctctctcttgatctgatagaataatctcagtcctgtaaaaatgagatatatttttttttaattagatagtaaaattaattataaaaactctaatttttctaataatacttggataatatctattaaaagtgatatataaatataaataatattatatcactaagctatatattgattttttttttttttaaagaagctatatattgattactattagataagtctctcatgtataatcatttaaaaaaataatcacaataatatctttcatgaagtttgagaatgagctctttgaaaagagacttgcaagaaaagctagcgaatacaatatactctatgagagaacgagttgcattttttttcaaaaagaaaaaatacattactttcataattttaggaaaagaaaaggaaattgtaaaaagacaagaaagaaacggccatagattgaatcaccacaaccgcataacaccctgtattaaaacgaaatccatataatgaagacg

SEQ ID NO: 255176 - DNA, 821 bp, Cannabis indica
tatatatattttttaaaaaacttaatgaaagacgtttagtttaacataataaatattatttttgaatacaaattttttttttaaaaaaaaagtcacccaataatttctcataaaccaagaattttgttatatagctacattttatataatactaggtgaaagttacgtggcgagccacgtaaatatttgttttatttaagttctagtggtttttgtttaagaattcggtaactaattataaattattttataaacgacatattttatgaaagtaaacttgttaagaatgtcataattgtgtatataaacctataatatacacattgttattcaaatgttataatatgaatttcaactcatcccgctatacatctcttacacactcacacacccaaccacttaagttatccccaagtggctacacacttaattattgtactcaaaaatcatgtaattatagcctggacattataattaaagagagaacacaaaaggaaaaaaataccaaatacaaatagatatagcttattaatgctaatcaagattaataaaagaaaatcatgtaatcgtaacaagtgctcctattagtaaagcctcattctttccgctaaactaaaccggattttccacataatatcgcgaacaaagacaaatatgcaatgaagtaagtaaatgtcaactaaaattggctcactatcactgcacaaaataagtcacaaacccaaacattctcttctgtttgtatgaatttctttcggattatatatgatatatatatatatttacctcatggtcatggtttgtgtgtttgcaaggaaatg

SEQ ID NO: 255177 - DNA, 518 bp, Cannabis indica
gattttaagcacgagccccgggctgaacgactggcgtgtcatgctgctcgtccaaccctctctttctgtttagatcatccctgagatcatgaaccgttcccaatcgattaaatatagaaacacccggttttcttagggactggttagtttgactaattagctggccggaaccattaacttgggtggagttattaggtatgacttctcctaacgaattgctaaacaaggtttgcccgcctaccgcttggcccacaggtggaacctctgaccgtggattagacggctgaccatttacgtggcgtttggttacaaaataaaaatagaataggaatgagaatgagaatggtagtaggattaggaatagaatggaatggaatttctattcttttgtttggtaaagactatggaatcaataactgaagaagaattgtgatgattggtatagcatagaatgaaatatattttttattattttgaccaaaatgtcctttactcttctaaaataatttttgttttat

SEQ ID NO: 255178 - DNA, 534 bp, Cannabis indica
aaaattcgaacccaaaacttaacacacacaccagaataagaattaaaccataaatgagaatttatgttactattttttagaatttcggtatttattagcaacaaatttaatattttaagtatttacgtcacaaatattttaataataaaattaaaattttaatataatattattaagtaattcttattaattaaaatacacaattttttttatatataatttaaaatattttatatattcgccacgaaacgcggaatgtttactaatttataaaattgtaaatgaatggcttgataaactattaagaaaaaaaaaaaaaataatgtatagttagatttcaatgaccacccacactaatatgacttcaatgcttccactaaatccactcctgtatacaaatccttcttgttcttcaaccctaggaattatcataactaaatctaattcagaaataggttgaattaaaaaacagagtaatagaatttcaagtctttatatttatgaattgtttttatattataatatggattattt

SEQ ID NO: 255179 - DNA, 1232 bp, Cannabis indica
attggattggatccatccaataaatctcatggatgaatccaatccatttaatctctatttaggctgaatttattaaaaagaaaaaatatatgaaaaacataatttaaaacttaataatctaacatagataataaaataatatataaaatactaaataaaataattaaatatataaaattataattattaaatatgattggatggacattggatgatattggattggatagcttcggttatccattggatcggatgtctcatccaacatccgatccgatccaattggattttttaaatttgcatccgatccgatccaattatgattggatatccgattctattggatcggtcggttgggattggatcggatgattttctgcacacccctattggtcaggatatgcaagcttatggaaccacatcttggatgcaacatcttccacgccaaaacgaaaaaggtggaataatcttatccttgcccttcaagtaaaccttgtccttgtcatggctaaaagatagaaaaataaaaaaaaacgaaaaatataaatagtaatttaaaaaaaaagaaagaaaagaaataaacatgaaacaaaaaaaaagctaaataaaacacatactggtcttctttgattgccgaccttcaccaagccacaagtcaaaaccattctcgtctttatggtctaaatcttctgcaattttatcgtcaagaggacacaaactagcaacgtacttaacaactccataaccaaaactatcttttgaacttgaaattgaagagtcaaactccataaacggagacgtcaaagctattggtttcttagatttcctcttgtcaagaagaggagtttcttcaacgagaattggattatcttcaacaagttgaatattagaatcaacagtgacacctgctgtacccatctaagaataaatataaaaacaaagaggggaaaaacataaagttagtgttaatacaaaaagtgttgagcaacttaacaaaaacgctaaaacaaccatacattaacacatacaacatgaccatccgtaggctcaacattttgagaatttggaacctggttaccagaatcactacccattccccctgaaaacatctatttttatatcttaaaaaaaataattagaaaaaatctaaacaatcacaaccattaaacaacaaaaaacatcaaacaatcaatattaccatgatctcaactgctttcacaccagactgaaca

SEQ ID NO: 255180 - DNA, 1702 bp, Cannabis indica
atataatgatgaaatgagttggaaaaataggtgggcagggagcatttgcataaacattgctgcactgtatacatccaaatctgaataccatgtgcatcattttcatcagaagatgcttcacgtctttctcaccaaatgaatcttttttccctttttgtataaatacatacagagttgatagtagaatagagaaagaaatcatcacataaaacttttaggccaaaatccctttcttgagaaaaaaaaaatgtctgcctcaaaaaccaacttacatattcgctcaaacagcttgcctacgaaatcacatccagctattgaagagtgcaatgatcatttggtcagattaggggcttctcgtgtagcttcatcatcatcatcatcttccattgcccaccaactcagtggtcttgaggatttgcacctttgtgttgagaggttgctcgagttacccctcactcaacaagccttctcccaaggccgccaagagaaatgggttgatgaattagtggatggatctcttaggctcttggacatatgcagtgtagccaaggatgctgttttgcacacaaaggaatgtgcacgagatattcaatcaaccatgcggagaaaagttagtcttgagagtgagattaagaaatactctgcttcaaggaaagtggtgaaaaaggcaatccaaaaggctttaggggggttgaaaggtgctgaatcaaaatacacatcctctccttcaaataacgatagtgaaatctcagctttggttggtgtttttagagaggtggaggttattactcttgctacctttgaatcattgatgtcttttgtttctggaccaaagacacattctaagctaaatggatggtctgtagtttccaagcttatgcaaagcaaacgagttgggtgtgacgatgaagttgcaaatgaattcgcaaaggtggatgctgtcctattgagtcatgaaaaaataaacaaaggtgatcaagccatgcaggatttgaaaaatctcgagatgtgtattcaagactttgaacaaatgctagaatccttgttcaggcgtttaatcaaaacaagagtttcccttctcaacattctcaacaactagtttataagtattttgtatataattatccagccttggcatccattgttttgatagcctagatcaaattgtacttttgtacttgtaaatataatccatatagtaaagtaacagattcttttgcccaatttcttctgtttatattgtttattaaattctatttcttttttgtcatatgaccagtattgtcaaggtgaaagtagtactactataccattgaaagaaaatatgtataattaaaataataaataactagagttgatgccaacatgggatgcatgaaaattaataaatcgatcaattgtattaagattttttttttatctcaaggagatcattaaataaaaaatatcgcatgcaatcactaaactttactttcacacgctttagacagtgaaatctgtgctggctttgttactgttaagagaccaatggaatcaaaagcactctttcttagcatttttaaagtaattagatgaatataacaaaatttaaacatgctcatggagggatcttacttaatttaaacaagaatgccaatcatgagccacaatgacccactgttaactaaaagagccacttctgatcgatcgtataagattggtg

SEQ ID NO: 255181 - DNA, 620 bp, Cannabis indica
atatatatcccaagcagtgggaggagtttagggctctgactgcgtgcctgttgaagaatgagcctgcaactcataggcagtggcttggttaagagaacccaccggagccgtagcgaaagcaagtctttatagggcaattgccactgcttatagacccgaacttaggtaatctatccatgaccaggatgaagctaggatgaagcttgagtgaaactaagtatatattattatgccttagtttgatattaattgggtagaagaaggcatgatctaaaacgggtcttcggcttccatatattatatatggggaatacttaaaaagtaacagtagtacttagtattatttaaggagttatattattattagcgtaattaattaaatattaaattttatataatttaatataacaattattataaaatatcgataactatatacaacccatcacctaaaaatgatactacaaacatcactagtgctaaaaaattagcaatgctaccagaaactaataatacttaaaacaatattgttattggacactaaggatattttgtacattttataaatgttattttgtgataagttagaaatatctcttaaatattattacattaaatta

SEQ ID NO: 255182 - DNA, 870 bp, Cannabis indica
attttgctttgcaacatggtatatgtattttaggtcataatgtcatatgatatatgaattaatttatcaaaaaaatattctacctcactacttatcaaaaaaaatatattctacttgttatgagtgctgtaagttaggtttttaatttaccaaactataaatgtaggttctttatttattttttaatctccagttctttagtttaaagtcaaagtttaaattattaaaaaaaagtcaaaacttatattataatgactgacaataaatgagtattgttaaataattgctagaacgttatttatttagttagacaataaataagtaaattttaattgagaacgttagtattacatgtaatttttttaaaaaattcaaataatttatagtattaaaaataaaatttaagtattttcttacatacataattttttattttttatattttttttatgaatagtaaataattgtttaaatttcattttcaaagtagaaaccttattctatataaatccaacctccttgtagattcttcacaaataaatgctactatttaagatctttattttcactttcatacttttattgggccgatgcgtcaagttaccaggaaccgcaagacataggcgtgatagggataatgctttgtttgctttaatatatgactaaaaaataagctctaattattcaaaatttactaaaaattcatgtgattttaaatatttacaatgcacgtgaattttaaaaaaaattaaattaaaaaattttgtgaaatgcttaaacagataaaaatctaccgaaacaaacaatgttataaaaatttacttctagtatttccaatctttattaagaattctaattcatttactataa

SEQ ID NO: 255183 - DNA, 475 bp, Cannabis indica
aaaatggtatttaccctaaaaagaaaataattttttaaatcgcttaattaattttaaaaattttaattttcttaatcaatccaaatgattttttttaagatttaaattaatattttaagatttactggaaaaaaaatattaaatctttctcatttttattttaagggggttcgatttgtggttattaaaatttaggagctactttataaaaaaaattatcaatatataaatagaataattggacgaaacctaacagaataactaaatttctataaatgtaaaagtttacgaaaaactaagtcattttaaatcattatgtatatattgttgattatatataatatttttaagtaattatttttaaattttttatctgaaaatatactaatattttaatttcatatataatttctaaattgcatgcacatgcaacgcacgtatctcctaactagtatatatatatatatatatatat

SEQ ID NO: 255184 - DNA, 829 bp, Cannabis indica
ttttgtccttgaattttgacatcaatcaaattctgctctttgaacttttctaactgttaaaaattttccctgaactattgaggttgttggatttaaagacttttgtcaaatttttattcaattttactgattcggtgattgtccatgtactaaattatgcttcccagactttgatatctaccaaatcattccccttaaattttgatatgtaccaaatcatatgtcccttgaactttaattcatgttagactttctttactaaaattggacaaaagtttttaaatctaacaatcttaataatttaaggagaatttttagcggctttaaaagttcatgagacatgatttagtacatgtcaaagttcaggggcaaatgattgtaaaaaataattttaaattagaggaaaatgacttgttcactgctagttacattttaggccaaatacaataaattctatttttgattacaacttttattttgtacactattctataattattttccatcaagccattccaaaatttgttgtttcggttggccgaaatgtagaacatcaatgcagccaaagtagtcgagatgacatttttcttgaatttgcttatcttagccttcctaattatctatttgctgattctgggtaaggagatagaagtagtctcccattgtagccaaagctttacctactctaaacagtttatcgagaaaggacactcaaaaaacaagtgtacacttattaatgatactaaatttcttcaatctatttctggttttgattcttctaaaacataaaataaccaaaaaaaaaaaaaaaaaaaaactaaaaactagt

SEQ ID NO: 255185 - DNA, 1393 bp, Cannabis indica
aactataaaatgtgacccgaaacttaggctaaaaatagcctaacaggtagcatctcaggtagctactgaacacaatgtttctgaagtttccttagttgcctatggataacaataatatagggtgttggaatgtgagggtgtttaataaagtggagaagcagaacactgtttttgatttaaaataggattgggcgggttcactaattgataaagagatgattgatagaaaattcaataattgggagtattatactatttctgttattgagaaccatattctgattatatggaggaaatattttactcgggtgattgttgttagagaagaccctcaatttgttcattgttatgtgaaaatggctggccaatcggatgctatgagtatcacttttgtttatgggttcaacacagtagaggaaagaaaagggatgtgggatggattactcaatcttaatttatctgctaaaccttggttagttacaggagattttaactctctttttgaattggaagataggaagggtggcaaagaggttactttgaatgatattagggatgcaactaattggctagcccaaagccacacggaaagactccttaagataggttcgggctataactggactaacaatcaagatggagataagagaatctattcaaagattgatcacacctttgtgaatgaagactggacaaatagctttccgatgactaaagctcattacagctgggagactgtttctgatcactgtatgtgtgttatttcgatggctagcaataacaccttttaggtactacaatttctgagctgaacatccagaatttaaagatgtgctccttgaagactgatatagaccgatgaaaagagagggaatgatagctttataattaaagctcatgcgattgaagcacactattaagaggtttaatatatagagaattggggatgttgggaagaattatcaggaagctaaggatcattatttggaagccagaatgcaagcttaggtgcatacgcatgatttttcctattatcaagccaagagagaggctgcaatgaactttaatgcccaagaaaagatgtaccatagtttcttgagacaaaggagcaaggtaacttggatgtgtaaagggaatgagaacaatgcttatttccatacttttttgaaaaaaaaaaaaaaagaatgatggaaaacaacatagtttcttacataaatgatcaaggagagattatagatgattttagtgaagcggtaaggcattttatagtgcacttctagggctacatgggaattagttctagtcctactctaaacctaagaactgattgtatggagctggggagcagactaaatttggagcggcaattgagtatgataagactgttaacaac

SEQ ID NO: 255186 - DNA, 624 bp, Cannabis indica
aaagttaacaggtttaggtttgccttaaataagttcagtttgtattcaggttgattcgtttaacctatttaataagcagatcatgttcggattgatacgactaatacgaaattgacctgttaatgactcatttaaagttatttagtactttaacaagttataaatggctcacaaacgtattaaatatgtcattaatatattaatcggttaatatgcttaaacaaaatctatttataaatgggttacacaagttgtgtcgtgttaatccgtttataaatgagttgtgtttgtgtttcattttttaacatgattattaaataggtcatatttagattaagcatatactcaaggtcagccttagcataggcatgctatgccagtgcttagggcctactcattttaggggtctaaataaaaaaaaaatatcttttaaaaattatacatatttttttaataatttttaaaaataccatttacttttatagtaaggacccaattttttttcctcatatgacccatttcaactcaggaccaacattgcatatacttgtaatacacaagtctcgaaacgatacgtacacgcgacccgcaaatacggattgtgaccctaaactatgttatatg

SEQ ID NO: 255187 - DNA, 536 bp, Cannabis indica
tttgagaaaaagcgtttaatacattaaatcaaatagttagacctcgcggtcgttacacaagatattgtttggtaaatccgaaaccgggatagacccaaaaacctgatgagtaaacgcccatctagccacattatgagcggcgaaattacaagttctactgacataaataaaattacaactaataaaagaaggagaattcttagtacaaaatgagacatagttatcaagagcccaatgtagtccttggtttgagaggaggattattaggatatcaacctatatcccacattgaaaaaatagtcaagagttaccttaaatataagtgttttacctactctattagtatgagatacattattatgttagatcaaattttatagtacgcacatcttttatttttatcgaaagaaaatttatattacacaaaataattatctcaatttttatatatgttataatatgagggttttggccccaattttttttttcaattttttagttataagtttgtaattttattattatattttattaaa

SEQ ID NO: 255188 - DNA, 904 bp, Cannabis indica
aggcccctctaaaccggaattccggttcagtgcaggaaagaccaaaattttcatatcttcaccaattcaaccccaaacttaaagaaaccttccagacccgtgttaggctatttctagcctatattttggatcacttttatgttcgcttttcgatgttttaggacaaaattacgcttattttctatgtttttcaggtttctcggaattatggaggccacgggatacaaaagtgcaataaaagacaagtggagccaataaaaacaccaaatttaggctcggtgcacttttggccgcggcgagatcaccatggccgcggccataaagttgaaaacagaaaggttgtttttgggggctccagtcgccgcggcggaggatgctatggccgcggcgagagaccgtacgagcaggggtatttttgtcctttgaaccctaaaaatgagaaataaaaagaaaactgtgattgaaaattaggggaagcgatttggagacctaaaacgcagtgaagagcagctagaggagcaaagtgaagatccagagtaattccaccaaaaatttctttctctattccttttaaatttctttatgttgaattttgttttaggaatggtcatgaatttgaatatgaactaaatttcccatttagggaggatgatgaatggtgtttaaagtttttgcctagttaatgaataattggcattcctctattcttgattgtgaaattatctatatttgtgtttaattccatgtgtaagcttgatcaccttctacatgttttatgatcttaattcaaaatctgaaaagtgagaattgagagtgctaaaattggataatcgaggttctttgtgaaacgacggtattcacatgacttatgtgacaattagattattacttaatgttgatttca

SEQ ID NO: 255189 - DNA, 677 bp, Cannabis indica
tggcacctattgtggtgacaggactcaccacatcagtagtgttcatggggatttcaattgtgactagaacctgagtatctggatctacaatctgtgggtcttgaagaagacccaaagatgcctatggtgcgacaggaattattctcatgttaacaatggtgtttgattaaatacgaatccacgctctcaatgaaagcaccaaactgttgacctcaaaaagtgatcaaccgacagcggggtcgtatggatctaatgcttaccacatgttacacaaacaaagaatgaaaagcagtaagcacagagatttgttatagaggttcgacacccttgtgatagcgggtaatgacctattttttaccttttttgtatttatactgaggaaaatactatccagatcactataggtgggatctgctatagcacccttaggattaaaaagtatgaatcagtaggtagatgtcaaatgctggatagtctagggtgttggacatccctaggtgggtgtttgagagatgaagtgagaaaagagaaggagagccctattgggcgtgtactagagagagagagaagagagaatatggctgttaaacttaaactatttggaggctaagtaacttagaggcagagaatatggctttcaaacttaaactatttggaggctaagtaacttagaggca

SEQ ID NO: 255190 - DNA, 533 bp, Cannabis indica
cggatagttgttctatccatatactttagatgaactattccgccgtgggttccatgagttttattgactctttaatatgttgcaactggtaatagcaaatatttgtaattggttaagtttttaattattttttataatagataaaaagtacatgatgtgatagcatgtattacaaatagtatatagtaaaatagcaatgatgtaacaacttgtaatataaatatataataaaataatatatcaataatatatcatgtgacaactcgtgatacgaatgtggcaaaataagtctacttaataagacaatatagggtatagtaataaagtatgtagggttattattgtcaaaattattaggcaagaaaatattgtagatgttgtacatcaaactaaatattttgtatgtttgttcactaaagttgtatatgtattaagtgttgaatgttattttacaaggatctaaatttaccaacatgtatgtttaattatgttatctgcatttttgcaaagatgacacatggattttaatcaag

SEQ ID NO: 255191 - DNA, 637 bp, Cannabis indica
gtacatcaaactaaatattttgtgtgtttgttcactgaagttgtatatgtattaagtgttgaatgttattttaccaggatctagatttactaacatgtatgtttaattatgttatctgcatttttgcaaagatgacacatggattttaatcaaggaaggctgatgtgttgccagctgcctaacttcctcaaattgatgctacgggaagataaggacctcaacctcgcgggaagaggttccgtgataaggagttccctgattgccagcaacgcagaaggtatccacgaaccacggtctccattcgttccaagaacaaaagacatctagtactgcaacaccctactagtttaggagtgttaacatgattttaatttaattgtgcagctcgctgctaatcaacgagtttattgaaaaacgtgattaattaaaactttatttcattacttataaatactaaaataatatacatatataaattcgagatcccttttactaaaatatttataaaagtttacatagcgcatagtacaaaagttgtcgcccacgagactagacaatatacagcaagctatctcaaagaccgtgcgctctaagcctaactgtcccgacatgtacaatattcatctgctcgctctca

SEQ ID NO: 255192 - DNA, 1503 bp, Cannabis indica
attatttattttatttaattttcaaattaatcacaaccatttaatagtaatccaataacttaaaaaaaatgtaaccatggttacaataaaaatgtaaccattgaaacctcttccatatttaatttaatacttaattttatgttaaattatttaagaaaatcatagtaaaaaataaatcatgtttaatataaagctttacagtagaaaatataataataatttttttaaaaattaagtaatatttgaatacaaatattattttttctatttgcattttttataagaaggtggaggtttctaaataataaagattaaaatcattatgctcaacattccgcccatattagacatttaattacaattctatcagttttagaatggttgatgatggaagacttcgaagataattatgttagtacgcacataactttggacaatcttccaaatggaactcttttaagttgagggaagaatactccatgttcagtgaattacttttcctttcactcatgaatattttaaaaatgtaaaatttttaaagattaaaatggcttacacatgaaaaggccattagagtagaattcaaacttactacgatcaaactgtcatatccccgaattttaagctttttgaggtatagtagttgtctaagcaaggagcaacaacttcgacaaaaattcacacttttactacattcgaaagaaatatgatgtcctaccaattggagaatgttgtacttctctgtatcttagttggtgtgaggttagaaggcatctagtactttcatttctttttgcaaatcatatgtgccaatggccccaatatcctatctcaaaattagcccaataaaatacttcaaccaatgaagacagtcaaaaaatccaatggaatataatatctgcaacaattaaacaaatactataaaagcatgattagtttattacaaatagatacctctgtttatgtaataccaacaaaaatttattctagatccaaaaatatgtatgtaagacaattataattgtagagaaaatattctctgatacgaacaaagagaatgcttatcagtgaaagtttacaactaaaaatagttcctgtcatttggaaaaaaaatgtttctaacaaccaataatacttacactaatcatatatacaaatacatacccaaatattctaaaggtgtactcattccttaatggttttaaaaaattgcatagatctaatagttaaataatcatcaaggtcagtcaaaataaaaccaaaagattcatcttagctaccactataatatattttacagtgcaaaaccaattgagcaggaaacttacaacgtgattccaaacaaagtattttctaacattaaataatttcattttatatgaaatctttgataagattacgtatggcttcttacaatgcatgtaatttattttatcctcaacaaaagtaattcattcaagttttccaaccagtcactcaattaatttgatgcaagaaactcat

SEQ ID NO: 255193 - DNA, 1716 bp, Cannabis indica
acaccatgtaaggatccatttaatgtcaaggagatccatggagtacgaacacaaaaccatgataaacttgatcaatttgggtggaaactgaaaagcatagagcatctcttctataaaatcccattttatggtgccatatggtttatggagatccaatttgaacatagagtttgcgtttttagttttccttccatagtgtcgtatgaggtcttgacagatcatgatattatggcctatgaacctcccttggacaaatcctccatgattttcagcaactcaaccaggaagaactgatttaagcctcgaatagttcagcttttgtagtagactggtagagtacattaaagcaagcaattggtcgataatcactaaccaggttagacatttgttttttggaatgagagtcaaaactgtagagtagaactctttcaaaagaaggccagtttgaaggaaagaggcaatagcatcatagacatcattcctaatgagctccccattgtctttgaaaaagaaactactatattgatcagggcctagggctttacttctaggaatggcaaaaattgcttctttagtttctttaaaagagaactcagataggagtgcatcaacttgaaaacttgagaccacaggcccttgcttgataacagaggtcaagaccgatttttttatctttatattgtgcctaaaagagtgttgtaataatctataaaagttgttgaggttcatctaccgttgttgccaatgcattattgatggagagaactatattatgaggtcttctagctcttatactgttgtggaagaaagatgaattagagtctccctcttttatctaatttagtttggctttttgtcggagaaaaagagagataaacagcctgaattttttcatattctccgccagcttccctttcctattgctgaagttcacagttcaaaggatcaagatggagaggcttttgatgtgagttcaatttttccctaacttgtagtacaactacttgaagattaacaaaggcctgctaattaatttcttgaaaatcaacttgaggctcttcagtttagaaaggatttgatacatttttgattccaggctttagtaaccatttgggcttaattaggtcgcaaaaaccacatcctaaaatacctaaaaggctttcttccacctgttattccatcacaaacaattaaaatagctactgtgtggtcaaaaagaccctcattccaaaacacaactttggcagcacggtgcaatttgagccatttctggtttgcaagcaccctgtcaatcttggagtaaatcctatcatctcccatttgcttgttagtcatgtatagaaaatttccaatgaattttacatctccaagttgacatgtttccacacaatccttaaagtcttcccaattcttgaatttgaatcgctttcctatcctctcatctttgattagaatatcattaaaatctctacgcacaatccaagaatcaataatagcaaagtctctgaaatcactccataattttctccttccatcctcatccttgaatccacaaacaaaagtggcaaagaaacttgttttcttgtctctggttttaacaaaaagatggatgagttggcttgtacattttaaatattgacagcaaaggtaagaggatccaactcacaataatccctcccccatcataccatggactattagaggtgaggcaccatc

SEQ ID NO: 255194 - DNA, 1312 bp, Cannabis indica
ttgtattaatgtgttgtattgtaatatattagtattatttgggttctgttcaagatcttggttcggggtccgagtttggatcagggtcggagtctgggtccgggtccgagtttgggaccgggttggattccgagtctaaattcgggtttgggtcccaagtccgggtttgggtctgagtccgagtccgagttcgggtttgggtccaaggtccagggaccaggtccgggtccggggttcgggctcgggtctggttccgagtccaggtccgagtctaggtctgggtccggggtcggggtccaagtctgggtccgggttgaggccagagtccggatctgggtccatgtgtgggtcccagatccagattggagattagtgttgaccctgaattctttgtaaatattataatacaagctaatacggatcatttgttatgtattaaatattacaacatgcattgtattaaaaattttggttgtaataattaatacgatacattgttttattcaaacatagtgttatttattatttaatacaatacgacccttatacgacgtatcaaacgaaccctttaggacatatccaatcagaagagaggtaaaatttaaattatatttagaataaataaaaatggctttataatattttacattaattattactattataccgattagaaatataaattttaatacaaaatttaatatatcatttcatatttatttaataatttattaaaaaatataaaatatacaatcatatatatataaaggaaagcattgaggagttgaggtggcaatctatatgtgttttctatcctattctttgttttcttaatttttatcatttatttattttttcaataataattttagctaaatatctattattattatcaatagagtaactcacattcacatctattattattaattaataatagtgtaacttataactacatttaattactaatctatgatatattaatataaaaataatttattactttatgatatatatgaaagtaattattataaattggaaaacattatttacattatctaaaaaatgtacattatatatgcaaagtattatctaaattggaaagtattattataaattataaatcgggtatgtgctatactacatttttaaaattaaatactttttgatcatgttttgactaaatctacaaaatgtactcttatatatgcaaagtgaaaaaaagaacaagcaaaaaaaaaattaggtaatgtattatactttttttattctatttaactcccatttttttaaaaaaaactaataataatta

SEQ ID NO: 255195 - DNA, 783 bp, Cannabis indica
ttgttatttgtataatttaatatccttagtacttattacttgaataaagatagtaaaaaactgctaacaataagacgtcatatatatacatacataaatatatataattatatattgagaaatttcataattcgtacttaaaaacacccctaattatactatactattttatcataatgatctcactcttatctaaactactcttcccatttaattttttcaaaaatctcaaaaagtatgagcttgtttggctgtgtttttaattttcagtttttaaaagtgtgtttttaaaagtgagaataaaaaatagtttttttgtcattttaaaaatttaatagtacgtgtttggcacaattttttaaaaattgtttttagattttttcttacgaaaaaaaaatcaatattttagcatcatactatgacattaacccatccgggtctagattcaggtatggtttcgggtctaggatccgagtatgtgagaaaaatataaaatataatatgctagaaaaaaaaaattattttttgaaaattgaaaacaacatttttagaagctgttggctttacagtttaaaaactgtattctattttttaaaagagaaatttattttctatacttaaaattttaaaaaaatttccctaaatacatacttaataatattggtcatatatgaccacattcctaattaatatcccacaaatacccctcccatttgaaaaaatcaaaaattcaaatcatccatccatggctgcctcatcccgaacctctctctccctctcgct

SEQ ID NO: 255196 - DNA, 594 bp, Cannabis indica
aataaacccgttgattagtaatattagagtgcacagtaaattaaaatcacgataatatgtctaatcttgtagggccttacatgtaatgtgtgtgtgagaatatagtgtgtgaaaagaataatgagttgtgaaaagagatgtgagtgtgagtttgttgtattgtgtggcaagaattagagtgaggaagaagtaaatagtatattgagacttgggttgagatattgatataatgaatatatgtaatttaaaattataagtggaatatattttttttttttgagtttagtaatgttactaaatagaaccaagttatttgctgcatttttttattattattttattgcatttaaagtttatcattttttgctaacagccaacagcaacatccaatctaacatgtataggaaaaaatttaggggcattattttttcctttactgtaggcacattttttgtttatactatggagtatatattgcccttttgtcgtgtaattaatggattatatagagtattaagagaaattatattagccatcctctctggttttttttttttcaaattttttaaataattaatagatattagttgcatg

SEQ ID NO: 255197 - DNA, 837 bp, Cannabis indica
ttatcgagtatgcatgtaatatttcataacataaagattatacttatcttattgtttctttgtagaaatgactttccttaagcaagctccactcctgcagctgattcctctaagaagtaggtcagacccgcccaagacaaggggaagaaattcgtgatttaccccgttgtcagagcccgcgacgtcctagctctccaagacaagtttgtgggcgaagagttcatgtcaaaggttgaaggaactccttctaaggaactaatgccacgttccgcaaaattggcttcacagttcatcgccatgttctcgaaagcgtttgttgtaggctccaaggaagtcaagcttttgaggaaacagaacacccttctctaggacaacgtgaagaaattgaagttagaagtgacttctagggagaaagatgtcgagaacctccaaaaggcaaaagagcaggaggaacagaaggcaaagcaggcggaggataaggccaacctctcagagtcgcgagttaaggaattaactcgcgatcttgagacaggaagggagaacgggaagaaacaatacgaacaggctatttctgactatatttacacgacttttccaaactaccggacttcgatttctcagtttttggggcagaagctgttgaatagccgaggctttttgtgctatgttgcctactcaagcccaaggatacgggggaaaccttttccctgaggaggcggagaatgcggaaactgaggaagtcgctgatggggctgccagtaaagtcgtagatgactccattgctccagcttcttaatttatccaagttctttaatattattatcgttgaacttttaa

SEQ ID NO: 255198 - DNA, 1046 bp, Cannabis indica
gtatggcctgatattaggataacaaagacacccaaaaattcttagattactatactcttgttttatgtgaaacaacagctcaattaaagactgttgttgtaggacaggagttggtaatctattatgcagataaactgcagatttgaaagcctcatcccaaaattttagaggtaaggaggcttgagcaagaagacttaagccatgctcaacaatttgcgtatgttttctctcaacaaggccattctgttcatgagtggtaggacaaggatgtctatgcataatgcctgcctgttttaatggttcagtgaaagctctatattccccaccccagtcggtttgtaaaacctttattttctttcctagttacagctctatttcagctttgaaattttgaaaagttttgagagcctcagatttgtttttgaggagatatatccaggtgaacctggtataagcctccacaaagctcatataatatttatacccattgtaagaagtaacatgggaaggcccccaaagatcaaaaacaatgagctgcaatggctcagtataaagttttggactgttttggaaatggcatcttatgaattttcccaagacaacgagcttgacaaactgaattgcatttttattactaatagaaatattacatgaattcaatacagggtggacaactctttcagcagggtgtcctaatcgattatgccacaaatcgaaagtagacataggggaactatgacaagatttacaattgacagtataagcaaggtgctgatcttgaggattgggagttggagaaggtgtagggatttgagatagcacttggaattggtcttgatcaaaagtatataggccattgtggagtgtcccagtcaagattatagctttggtcctcagatccttaacatagcaaacagatgggtgaaattcaagaaaacattgttatcttgagcaaattttgaaacacttagtaaattcttggtatgtgcaacaaatttttaagaatcaaggttttatcagaactatgagatttaaagaaagcacta

SEQ ID NO: 255199 - DNA, 1029 bp, Cannabis indica
aaagatttctttttatgcactagctagcttcgttaattgtaaattttatgtgactatttttaattttacgtttttttttttttcttcttgtatataggtagtggtgtggtgaatgttgacaaggataagcaacaaaatactcacgggaaagtaattatctactttgttttgaaaaagaccttattatatgtatatatggttaccaagtacttacctaaactctgttctatcgcattccataattgtggatattattagagaaatgttaaaacgtagctagcattgatacctataactttttttgttgtcatatatatcacttctagtataattaaaaatcagttttttaatataatttaatataacctcttataaaatatcactaattaattgttggcactacatttaaaatgtatgagtatttattaaatcacattcaatagatctttggatccaactgattcaatctaattatttatttaatatttaattttgtcattcgatccaatctaatatcgaattgagtcatccgatccgatctaataaatgtattgaattagatcagttctattggatacattaactaattttttattgaatttgatcagacccatattcaaatctattttagctactatttaacttaattatattaaatatatatatatatataaagaaacataatttaaacctaataatctaacatatattagtttaacttaattctcatgatctcataataaaactgtacaaaaaaaaataaaacttattcaatacgcattgataattttattaacgtttagaaagatgagaattaatattttagattttaaagttttttttttctttaatctcatgtgttaaacatatattaaattaatcaatataattttaaataaaatatattaaatatataaaaattataaatgtattttaaaagtataaatataattgaatgatcattagaggataattgaatcagttcgattcggttatttactcgattagatgtcccatctaacaattgat

SEQ ID NO: 255200 - DNA, 678 bp, Cannabis indica
acatcttgtgtctatttgccaagagatgagcctatgtgtttgtgcaacaaatcagacaaccttcataactttttctggttaggcctaataaattaatttaagctagaactaatagttatcactaactctattttctgcttttttttgatgaattagagaattatattccgcaaaccaatttacatcctaagaacactacaataaaaagggagcctcaagattttaaatctatacaaatagtgtatttacatcattacaatccataaaaccaatccctatctttacaactcattttcttaggcaaaaacatgctaattcgggttttgattcaccattgcaagccctcaatcaatctaccataatcaggttgttcttcttgccactcaagcttattccgagtcccccaaatgctatacaccagtccagctatcactacagccattacattcttcctaaatctacttattttagctttcataatccacctcagtatctggtatagatcagtaacagaagaaccccaaaccagccagcatttgactgcttataacattgtccagcaaacgagcacttgaaaaataagtgttgtgtgttctccgattgagtgttgcataacctgcagcaattctcaatttgcattccaaatttaacaagtctttcctttgtctttaatctatt

SEQ ID NO: 255201 - DNA, 570 bp, Cannabis indica
tcactgtatctcacttgtagtcgtcactacattcaaatatactatcatcagtactgtatctcatttatagtcgccactatcaaactcattgtaattaccgtatctaacttgtagttgtcacatgttcaaagtcgttatcatcaccgtatttcgcttgtagtcatcactacatttaaagtcacaattctcagtactacatttcacttatagtcgctattatatttaatatcgatgtcatcagtaaagaatattataataaaatcgtttgaatttaattttttgattatatataaatattaaaataaataagatattttaccttcataatatatttaggacacttacatttatccattcaaacaaatatataatttagcaaaatacataaataaaaaattaattaaaaacaaacatcaaaattaaaagtaattaaaaatatacatatattaaaaaattaattcaaattatacaaattgttaagataaaaaatctaaatataaaaatccttagtaatacacactataggattttaaaatctctatgttacagattgaaaacatatattgcatt

SEQ ID NO: 255202 - DNA, 526 bp, Cannabis indica
attttattttagttttttttaatattataattttaaaattaataatattcaatgtagtgataaaatataatagtgatttaaataaaacaaaaattactattctactttgtaatagtaattaaaaaaaattattattcgtcctaaatttattattaattgcaacttgattaattatatttaagtttaactaactacatgatcgtgacaacatctaataatttgttatttttttattttaaaaataaaatcaccaataatctcctaaactaaaaattatattatatagccccattttatagagaatagatcctttgagctaaatataccttgcattgttagacgtatattcagtataacattaaatactgaaattttttatttgttattagatgattttattattattctaagtatattagatgaaattaaaaaattatatattatattttcaattcatttttttatacttgtgcactggagcacacattagcattcggccaaatttgtcactttgttccttttgcca

SEQ ID NO: 255203 - DNA, 612 bp, Cannabis indica
aataaataattaaataaatttttagtaaaaaataatctatctatatatataaataaaggaaagtacaaacacggtgatgtggcagtctctatgaacatcttcactatttctaagcattctaatttctcttttttttaataaaaatatattattttttatgtattatatttatcatcatttattgctaatttattattattatttttgaagaattgctaatttattatttaaaaatgaaactcctaacattttttaaccttttcatcttttcgccttttggtctttccctctcataagaagtaacaacatggtatttattcaatcataagaatgtcttcaataagactcccattttttattattttctacaactatctctctcaattaaactctcattcttcttctttatatggataaatatatcaataaggaaatatgcaaccaaaaaatgaagaacgatatggagaaatactattattctctcgcttggaaagttgaatttatagagaggaatttccattatcctctatggccctcaaaattgagtcaaccggtgtcattcatttttaaggtgatatctttttattttctctattttaagtcatttattcc

SEQ ID NO: 255204 - DNA, 1272 bp, Cannabis indica
gactgtgagtgcatgatgccggtgcttgccaagctagggtccgaatgggatttcgataattatggaaattttcgctttcggcgcactgacttggagcacgatttaaaatgtttgtatacgttcatgcaaaccgccctatgccccgcctcacatgattctacagttagcagagaccgcgcatggatgttatactgcattaagatgggttgggatgttgatgtcgggacagtcctagccaaagaaattgctgactgtgcacaccgggggaaagggaagttatttctcctagctactatcactgctctttgccgcgaagcaggtgtaccaatgtggaaggaagaaggcgcattgaatcctcgggggcctatcaatttttgtccgcctcgagccccaaaaacaacgcctgccccagcgaagaccttagccacggagcctcccgtagatcgctttgctcactttgagcaagtgcatcaacaaatgtgtggccgattacatgcaatgtgggactacgagcaaaagcgcgacgcagtcatggagcgtgcgttcaagaggatgacgccacgatttgatcctaagttcccggacttccctcagcacgttctagacccgtggggtggaccatcagcttcgaatacagaggagccccacgaggactccgagtagagggagttttctaatacctaagctattttatatttttctgttatgtgtcgttttttagtttgtattgtgctaattgtgtgttgtcttttgtgtttggaacttttattttatgtcgtttatgtgattgttagtttgacattgagagatttatgagtttttctgtggcctagtgttctgctcgatgatgatactttccgctcattccattattgttgctgcctaattttatttgttgccttttcatgctgaattgttggatattatggatgtttctctttagtctctcctcactagtttatacttttatttttccaccatgctttgcatttttcatacgattgcttcacatatatacttttagcatctagaattggttagtgcatctccttgaagcgaaatcctagctagacttgtcccttagaaatgatttaggccatctttggacgtttgagcctttctaaccttccctgtaaaatcaatttttccctagtcacccaagtttgagccgtttagcctctttttgttgtgcaacccaatcatacatctaacaccaatcctaatttgcatttccacacatgtcctaacttaattgctcacttgtcaagagcc

SEQ ID NO: 255205 - DNA, 1124 bp, Cannabis indica
tgtggtccggtgtactttcgatggatgtaccattttgaaaggtacatgaaagtattgaaaggttttgtatctaattatgcacgaccagaaggatgtattgcaaatcactatcttgctgttgaatgtgtatgcttttgtgagacatttttgaagcaaaatgatgatcaagatactatattaattaaagaaaatccactattagctggtgaatgctttgaacttaaccaagcaaacatttcaatagcacatcgatatgtgttgttcaattcagatagtgtagcacaccatttctcaatatccatatggatgagttgaatgaaatgcatccaggattgaagaacaatcaaactttgttgtggaatcgacattctgaaagtttccccttatggttttatgagaaggttagactatattgcaaaaacagaagagaatatttagacttcttatatagcttgatgaccataatattttattttcaaatttctaaatctaacaaggtagatgatatgctggcacaattggctaaaggcccaagtcgtagtgttacttcctacaaaggttacatgattaacaaaattcggttccataagaaaggagttgaaaaaacgactcaaaacaatggtgtatacttggaatctcatggcagtgggcgattgaatgataaagaagagtattttggtgttatcaatgatataattatgcttgattatcgtacatttaaggtgccactatttcagtgtgattgggcaaatattcgaaatggtgtaaagaagttagatttctatacacttgtaaattttaatataggtcaagctcaatcgattagggatccatatgtgttagcatcacaacttcacaagttaaaaaagccttttatgcaagggagaatgagtcatctaattgatatatagctttgaaagattcaaatagagggtgttttgggtagaatctagtgaatctgtagagcattataatgaagatcattgagttttatttttttttatccttatgtattttgattgagataaatttgtttgtatttttccctatttgtttggtatattatgattaaaataattgtagttttatttattcgctagctgatattatgttacttatttttt

SEQ ID NO: 255206 - DNA, 684 bp, Cannabis indica
gcactgcagctcaaccgtaacacctctatttctcgcttctattaaacaaatctggttacgggcttacggccctagttttttttttttttttttaaattttggggattaaaattagggattattcacaaaagcaattaaaaaaaaaaattataaaaatacgcttttacgaaattttaaatatttttataattttatttacagaaaatacggtatttttatgttgtaatcttgttaatttattgtttattttttgttatctgtatgttattttaatgttatttttatgtagttttctttttgattttatgttattttcgtgttattttttcgaaaatcgtaaaaatataaaaaaaaatattctttaaacataaaaatataaatattttacaaaaaatagtgtcttatgtaattatttcttaaaaatattttttatattaaattttttattttgaaaatatattaatggcaaaaactaacaaaacttagaaaaaattgcaacaattttctttctctttatttatgttagatcaatctctgacgagagaaataaaaattgtgttaaatttaaaccaaaaaaaaaaaaaaactttgtatataattttaacattatattccaccacacacaattgtaaaatttaatgtaaaatttataatctaattaatattttaattaatttatatata

SEQ ID NO: 255207 - DNA, 755 bp, Cannabis indica
gtcaagttgtgacaatcagagccttgtgatctgctaaggaaagaccaggagccgtacaatcccacatcgcttaagggaaggttgtataggatgattttaagattatgtaagcgtggtactacatagttgttgaggacttgaatgaattgcttgtgactacccatattagcaagaagtatcttgttttggtagccatcatgaaggaaccccacggctaagtgttcttgacctggagtgatttcatttggggagtttcccaatgaagcgtgcgagttagagcaaaacacattgaaaacacttggattggtctgttgggccagttgtcagcccaagaagcagctagagtgacacactcatgtataagagtcatcattccatgggtgtaagggcccaatggaagcttgaagcaggaacgttactagggtaatgtataaaacaacgtcagggagagtagtggtatcactaaggtaaagaagattacctatattacttatggtgacacggtaatgatggagagtgattttataattgactagatagtcaatatggtatataaggtgaccattgaaattttgggaagagtttaccttattaagcaatgacggaaagacatactcacccagaatgggaaaaagcttataaattgagatgtaatttaatggacatgtatttgagtgattagtgaatgttgaatcacaaagtaggttgtttattaaattatggactgcataattgagggtaaaatgagttttaga

SEQ ID NO: 255208 - DNA, 1750 bp, Cannabis indica
aacttctgttcaagcgcacgccaaacagaataggaggtatcataatttgcaacagatgcaagaacagtttctgacatggatgatcgtaatcaggagaggagtaactgatcctttcgtcgccagtggagatatgtaggattcgagttaccattgagcagtgtagaaggaggtggaacgcctgtgaacaagatctcatcgagatcatgtccaattacagttggaattacttgagatttccaggaaaggaaattcacacgatcaagtttgacagtgagggaggaagacagagaattggagaattggagaatggagtctgagactagtgaagtgtgttaacaattcattactaatttttttttttaacaatacatccatattaattatatatatatatattatatatattaatatgtgaatgtgaccgtgtggttttcatgatcacaaaacacacatattaataacattgatataggtttgaattttgatagaagtattttttttcctacaattataattagttgttataatagtcatcatcagcaagattattgaagtaataaaattgtcaaaattcaacatgtgatgcaagcatacttgtatataaacatatatatgtatatataacttgtcaaagtcaaaagtcggcccttattgtggctgaatctaagcatattattcatacaaaatgaaaataataatggggttttttggtacaaaaattgtggattgtcggaggattaaagaagccaaaacaagcaattaccaacttaccaatacatagtgaccatttcattattctgacacacacacaattcaggttctatataacagctccagatcgatgatctgccagcttagctggtattactattcccaaaataatttcagcagccattgatttattaaacaccacaaacaagacctaccattcaatatataccatataaagtggaatgagtaatgatatgttgacacaaacactacacagtacacactgtatttgcaattgtaaccaaccaattttactgaaaatacaaaattggtaccatctatttctaatattgcttgtatggtatcttttgtttctaataactgaagaattattaaccaaacatgcatgggtcaggtcaggtcaggggctaaactaataataatcttaacccatgtatgggaatgggatccacaccaatgaatggtaaagattcgatatatacacttacatatataatttaaatttcaagatgtttttcttatttatttttaaatgttgttgcatcataaaccacagacagctattaccaagcaaaggtcaaatcctcatgcagtggttatgggatgggatcccattgtgtagtcagtactctatgaaattgtaaccaaagttgtactcttattattgccttaccttgaaaataataagaggggattgattcatattctcaataatggtgagaaccctcttaaaaaaaaaaaaacaaaaaaaaaagtaaagaagaaagtgatttatgaagaaattgtaaaatatgaaaataaaatttatacttaaatttaaaattaatcaaaaaaaatatatataaatgaaatagtaaaataattaacgtaaacatagaaaaaaaaatgataaaaaaaactatacgttatcattttccttttttttttttttctatgtggtaacaagagttttgtgtgtaactaacaaaacaataattttaaactatttttttttttaacaaatcatgaaattttatat

SEQ ID NO: 255209 - DNA, 1938 bp, Cannabis indica
agggtgcaggttaggatttaaaaagagcggggtaagcaaagaaaaaaatattattagtgagatttgaatttttacttttaatatatttacaattgagcttaactattacactaaaattaatctattttttatcaaaaatatatgttgtaactaattaaaatttatatatattttttaaaaaactaaaatttgtctgtactaattctaattcacttcttttaactcaaaaaaaaaaataattttttgatagatttaattacactaagcacatctctttattttcaaaaaaaaaaaaaaagcacatctctttaattagtgattaagaattgcttttcatttttcttctttctttttaagatgtgaaccttaattaaacctacaaaacatgatctttttggccataagagatagttatgggcaaaaggggttatgctcatataataacatgggatgtaccccaagtcagtccaattgaaattttgtgtgatatcaaatcaagtaatctaatcctcaaattaaacatactttatatacaaatttccacaaacacatgtaaaattcaactcaacatagatagcaattgggaaattaaacaaattaaaacacaatgttttgtatgaaccaaaaatatataaactaaaaagactggaaggagtaaaattaggagtggaaataggaagaatagaaggaccttttagcagaaaaggaaaagacagtaaagagtttgagatgatataacaaccactcaacattgctacgtgtactacactctccatcttattggacacaatggcggccgttaaatacaatgtcaggctataatgttacacgcgccaccgtaggcgcgtgggtaagtagaatagttagcctataatttataataattttctggtctcaatggttagattgagatgatgacgatggatttggaagcagacacacaaaaacaaactccaaaacccaaacaaagcagagaataaacctaaccacaaaaagaaaaaactcattagagtgagaaaagctcttaaggataaaaaagaacagagaaagaaaagaaagcttctatcttgacctctcaaatcacagttgtttgtatgggagttttgatataagatagagagagagagagttgatataataagtcagaagttaataccaagtagagaagaaaggagagagagagagggagagagattcgtaaatcatactcatatccatctatgtctcatcaattttcaacccatacttactcttaagacttattatatttctgcaaattgtcaactgggtttcgttcatttttcatcattatcttcaacttcttcttcttctttgtcttacaagagagaaccccatttgagaaaaagagagaagccccattaaagattgagcctttatagttgttttgcttcatgttttatcatttgcgatcccccgagttgttgctgttgttggttgttgtatcttcttgttgttgttctaatggaaaccccaccagcagaggagcttttaaagaagatccaagaactcgaagcgggccatgcccatctcaaagaagagatgtctaagctcatgcaatctggttctgaagattccactaagcgggatcagcaccaccaccgaccccaccaaaggtctcactccatttcccctcaacgctcaaggtttggtggtccacgaagaagagctgccgctcttgatggctctccttccttccgccattcctctcctcttcagagggagagtcgtagtcgtgatctttcaaatgccaccactgcctccgccgccggaggaggggaaggagttggcccttcagctgttaactttactagtaagcagtatctgaatatattacagtcgatggggcagtctgttcatatttttgatcttagtggtcgaataatctactggtgggtaattcaatctctctctctctct

SEQ ID NO: 255210 - DNA, 1305 bp, Cannabis indica
ttgtgtaattaaagataattgagaagtttaaattacacttttcaatttttttttgcctctatgaaaattaagcaaaattacactgtgtaactactaaaacatatcaattttttttgtgtaattactaactattttaccacacaaaatattaataatttatatgtaattattactttttatccaaacacactttatattttgaaatataataatttttttttcaacataaataccaatattttttgaattataattttcgttaagtttcatcaatacagagtgttgttagtgtgttaaacaagacacttgtacaaaaacgacgttatttttgaacaactaagtctattaataaatttaaaactcccaaaaagttcatattaacaacaaaaaattacaattttactaatactcataccaaaaaaaaaaaaacattaagtcaatgtcatttttacaaactcaaaatttgatatttctctatctcttcaattccatcagtttagatattcctttttcttttttctaaagaaatggaaggagaaagatatcccctctgttattttttttcttttttataagaattctttcattttttagtaacaattgatatggtattattttacataaatagttgatataagtaaaagaaataggtatacatattttttattttaatatttcacagcagagatctgaatttgaaacattctattttgagaaaatatagttgctagttatataaaaaaaatccatattaattttatatattatattaatgtctactagtaaaataacaaaaatattttattattattattttgttagtcatatattaaattaattaatacaccgaaactatggatatataagagagctttcctccttgtctatatttcactttcattagctctcttctcttatctgaactaaaaacacaaaaaccctaatttgatcaacactcaaacattccaattccaattccaaaggtattatgtatagatccgtaatatttgctgctgttgttattgttgtttgtgaaattaatccttgggaataagagagataggcttttgcgattgtggtagtgctttgtcaaatatggctttccgctttccaccatttttttctagctagtactaattctgccattgttgtctgttcattaagatcaaaatatatatatatatgtctgcaacttgtgcgcttttctctcttttctttttttttcggtttggtatgaatgtggtcgtatgtagagaaaacatggcagtagtacaatagtactaatagtagtagtagtagtagtag

SEQ ID NO: 255211 - DNA, 624 bp, Cannabis indica
actttatatgtgtttatttataatcgttttagaagttcatatttaggatgttaaacaatatacttgtgagtagatctaagatcctggtaaaataattccaacaaaaattctagaagaagatgttagagcgtgagaaagacttaatactgagcaacaaaaagtatataatgcggtaatggacagtatttcatcaaaaaaaagcaacgcgttcttcgtggacgagcccggtgggataggtaaaacattcctatataaggcgttgcttgcaaatgtatgatctaaagctgtcgtggaactcacaactgcttcattaggcgtgataggatctattctgcccggaggtcgtacgacacacacattttaagcttccactcgatgccgatggaaaaagcacacgttgtttcagcaaacagagtgcacttgcaaaactactttgtccagtaaaattaattatatgggatgaggcctcaatgaccagaaagaagcacagagaagtgttagataaaatgctacaagacattaacgatacaaccttaccatttggcagaaaggtcattggttatggaggagatttttttacaggtgttacctatggtacaaaaaggaacgagacaagagcagata

SEQ ID NO: 255212 - DNA, 868 bp, Cannabis indica
cacggtaaatatacaaaaaatttcaaaaattttgttctaattataatgtataccgccataaaagtattattttaaaaaatatgtcaacatataatttttgagacaaaaattaaataagaaattataataagaggttgacggtgaacttctgtttatagtttatggtgttaattttgttcgacggttaatattgatagacaataaactaaaccgaacatgccttaagtttatggatcgggtttatttatactgtacacatggaaactcaactacgacgcctccatcatctaaatccatggacagaaccacagtggaaatatgaaaaaaacccaaaaaataaccattaattctatcgagatagaacaaaaataatgaaatcgatgacaagtaaacaaacaacaacatcatcaaaaccaaaaattaacaaataaaatatgttagacacttaaacccaccaaaattcttttaaatcaaaaattaaaaatgatgctcaatcatagatctcagattaaataaaaaaaacgatttgaagcttcttaaattgaatttatatacatgcatgataaaagtaaaagcagattaatatacattattcaaaaaaaaaataagttaataatttgcattgaatttaaaaatatccaacgttgttctaaagttgatctcggttaactacttgcatttcattagaaattagggatatgtataaaaacttagaactcaattgatagttagaccactaaaacaaaaagtacaaatgaacaaaatattccaagttatggaatttatacaaattctcttgaagagaaatgggcgatgggaagaaagaaaaaattatgtcaattataaagctagtggagaattcatacca

SEQ ID NO: 255213 - DNA, 1423 bp, Cannabis indica
atctatgttaaaaataaaattgtgtcaaaaatttactaacaaatgaatcaaatactttacaaaaatttatgttttatataattttgttcttttaaataatcttttcttaaaaaaaaataataaataaagacaataataataacctgattcaccactgctttaaagttttctaatactgcttctgcattattgattgacagatccatctgaggagccttaaaaaaacaaaatttattcatcaataatcttttaaatttagaattatttgcttcaagtagagcttataataacaaatgcaaaagaataaaatttcgactttaattatatatatatatatgtatatctactaaacaactttttaatttcgtgattgaatcgattatatgatttaatttcttagagaatctattgggattaaatgtaacaactataaataggtgtttctctattctaaaagggagttctgatctccaatctttaaagctcatacttgagattcagagtcaagtttagagagagagtccaagatcataatgagtgtgcgtaaaggaatgtaataggagtatcactctagaagtgattttctatttctttgtaattattcactgtgttgagttgtatttaataataataataaaaggtaaatttaatacaattcttatattttttttaaatatataaaatacagttttaaatttatttataaaaaattgtatctaactaattaattttattaaataataaattaagtaaataactaaaaaaaatttcatataaaatatgattaattatttgaattaacgtctaatttaaatttaaattaaaatttatatataaaaaaaataattatctaattttgttaatactttatctaaattatattttaataaataaattaaatttagtcttaatttttttaaaaaataaataattaattgattcatttaactgtgttaattttaatcgattaacgaaaaataaaaaaatacgttaaactaacaattttcgttaaatattcacatttaatataagacaaatataatataatagagataagttgaaataataataataataataataatatatttttagataaatgcagtgcgtttaaatttgaatcacaatattaaatatttttatatatgtacaataaatttaaatttgaatcacaatgcataaaaaaaagagcaattacataaacacatttaagagtttttttttagctaaaccctctcaactatcattccacttacacttaattccctaaattcaaatttactattgaactgtcaataaatttaaagtgtcatctatttttcacagttaactacaaacttgagattgaagggttaagtgtaagtaaaatgataattagaagggtttagccgctaaaaacttcacatttaatataatagagata

SEQ ID NO: 255214 - DNA, 643 bp, Cannabis indica
aaaatccattttacatatcaccgaaccaggttgttgatgagttcatcaaagttctatgaaatctagttattcgtcttggacttgtgttataacaagttcttgagaacatgttgcaactaaactagccgattctaaaacattaatttcatttgattgtttgttatggttttagattcgagctatggacaaacggaaaaaggccggaaagtatgctaagaaagtcaaagcaaagacaagaagaaagatgcacgagcaagaaaatccattggaggctgatgaattttccggtatgtggaaggagtgatatattttctcttgaatggaaacagaggttggaagccatgttgtatcttttctaaaatatctaaattggtcaactgttttgggatagtttcatatccctgctggattagcttactcatttatgagaacaattttgtcattggtgtttttctattccttagatgaatgttgaacttactaatatatttatagggaaattgacagcgtaaatacttaataaatttatttgtacttaagtgtttatgtgttgcacttaaatatctaatttttaattttgatgatataaatatttaatttttgaaacataaaattaggtcaatattggcatttaaaatattta

SEQ ID NO: 255215 - DNA, 750 bp, Cannabis indica
aatagattaaaaaaactcttcttaatactgaaacaaacagggtttgtaccgaaataattatatattttgaggtgcattataaatttaccgaggggtgtttatcaaacagctcacacaacacaaactatccgcactacataaaatatacagtttgaaatcttatacgatgttgttgtggtttgcattattaccaaacagcagcagtacgatttgtgattttaaatttaataattgcggttgaaatcacaccgtactatatattacaaaattgcaaatttttacaattatttttttttatataagaacaaatatatgtaatatatgagtatattacattacattagttgtttaagagataattcaatattacaactttattaatatttttttatttgtattgtttaaatttattagaataacttttaaatttttattataatatttaataataataataatagtataaactatttaaatcaccactgcatcatattttagccgtatactttttatagttttaagatcttacaatacaattgcaatttgagaaattataaaatttgtatatggagcttaatttaatttgaaaaacccttattatttttttgataaggcaaaaacccttattaatttaccaagtaaaatgaccttatttttgcggtaatggctgcgcgtagcgtgtagctgtgtaccctacatcacctaattaacaaacgttgtccgttaattaacagcgacgtcaaatattta

SEQ ID NO: 255216 - DNA, 750 bp, Cannabis indica
aaaataggagaaaaaaatacaaaaaattttgtctttcaccattgatgatgatctaatggtaaagattagcttcaggtggtgaaggccaatttttggttcccggagggtcctggtgcgagttacacggagcttattttcgtaaatcccttaaggtttgacgatgatagcttcagaattatgcttggggtgtgagatatgtcttgatagataatttaaacagcttcaaaatgcaagttgaatcacatcaatcgaataaaaattgagtgagttatgaccgttttactgaagacagttcaggtcccaacgcccaagtagacatctcaacgcccaggttgacgtcaggttgacatctgatgtcaacctgggcgatgtatagtgtaaaacaatcaatggaagtcctttgagatgcctaagtgataatttgacaccacttagtccttttataggttctggcaaagctagtcaccaattctcaaagatgttgctgttttggagaaataagagactcgaaactcttcatttccaggagcaaaaattgaatttgtgaatttgatttatcctacttcatggatcattgcacttatgaaaaacttgaccgacagtcatgttggggattattttaccaagatctagatttactaccatgtatgttatttagcatcctaaatatgaatttctaaaacaatggaatttcaacacataaagttcaagaaaccttacattggttgcaacagaattaaatgactcctt

SEQ ID NO: 255217 - DNA, 498 bp, Cannabis indica
aaccatatcagattttcaaaattgttatttttgaaatatattttaataatttaaattataagattagaaaaatgttcatttttgacattttgtcttattagatatttaccttaatttttatattttggtcggaataacatgaaaattttgaaaaattattaattttcgtttgaatagaaattttagggttttgtaaccataaaattttcaaacttaggatatttttttttttagttaaataaaattggtaatatcctaaccttcaaaatatcttattactccatgagtctttcttattaggaatatttttagagtacaaaatacaatatctaattttgaataataatgatcctctcaaatttttcgtccattttcccatgaatctgtccctatttatagaaatataggttggtagttatcttttatgggattgttacttgtataactgtttatgaaacgtggtacaatctctacatttttatttaaattacatgtgag

SEQ ID NO: 255218 - DNA, 2023 bp, Cannabis indica
gattgtcaccaatgtgaaaatctgcccaactttgatccatcattaaaaagttttttatttcaacaattacttaaatcttggtgccgttaaattgggtggaggaacaaaaacgttttacgtacatacaaatataatacgtgttgagagactgcatgacaaagtatagcagtacgttgattctaatgtgatacggttaagtgggaaaagagcaagatatggtggggtatgattctcgcttcgccaccgtgatattttaatgtcattcttgaaaagtgaagcctaaagtcaaacttgtcgcattctatatagcttgttgattgcatcacaccataatcaagttacataacagagtttttacatgtcattctttagcttgtaaaagttctttgaggaaacaaggtttagtttgttagttattatgtcattagagcactctgtcaattttttactcattcttttaaggaaaatttgcggcaaaagtccataaaattgtcactttgatacaaattgtctccaaccttcaaaaataacggtaatagtccacaagctcaagttttttgtaagtcagtcaatactcaatttaacacctttattaagtgctgacaaaaatatcacgtgtcaaaaatttattggtgcacatcataattttaattaaaaataaatacaaatacaaatacaaattatataaaaaattaattattttttttcttttcttcttcttcttcattttcttgttcattttcttgttctccatgctgcccaggaaccagtgaaccaccaccacatcccacgatccaaaaaatgaaccagccacacctcaactctcacgacaaaaaattatgcttcgaccaccctcgccccaaacggaccactactccgttttccccccgagaatacgaaagcctctaatatctctctcgttctccttctttgtactgtgttgggaatgggtttgaacaacctaaagcttcgactaggagctcgaacgacgaccatagtttcatcatcaatcgattcacccaatagagagtcctctaaaaatcccaataaaaaaaaatcaccaattaaaaatcttttctagaaaagaaaagaaaaaattaaagtttcattttctcaaattcattaatttttttccctaatatgctcgttgttgaatcgtgaccaagggcttgtttgtagattttttgggataccttgacaggtcgattgtcgaagacatggattgtttcattgcttgctttagggtcaaggacgattgccaaaaccacaatcatcatcgttggaggttatagcctcgtcttgtttctgaatcttctcatcccaaactaacggtatgtgtgtgtgcaattttgtttggtttttgagaaaactcagtgatttacaagctgattctttggaggaaaaagaaaatagtttgattttgtgaattttgttgtgaggatgatagttctgatgaatttaacgctgtttataatttttattttagttttatttggtggtcccgattgacaacaccggggctagagtgggggtggctagggatgattgggatcgactgggtacgttgggcagtcggaggaggtttagaagaagaaaaagcaaaaaataaagaaaaaataaaataaattattgattttaaaatatattttaattttttttaattaaaattattatttggaccaataaaaaaattgacatgtgacattcttgtcagcatttaacagagctgttaaattgagaattgacggacttacaaaaaatgcgagcttggggattattacagctatttctagaggttggagactaatttgtatcaaagtgatctttttagagacttttaccacaaatttccctttttttaaaatacctcactaaatttactttttctattttacctttcactacaagaatttaagcatttagagggacattttgagagacaccaaaaaaatatataagatattagaaatgttataattttaaaagtcggctcaagattctaaagctttttagagcatcttca

SEQ ID NO: 255219 - DNA, 509 bp, Cannabis indica
gtaagtattcttaaggaacttatcaataagagaccaacaaagtggaaagcagtggattgtaatcattttcttaaaaagattcaattaaaacttcacagttgggcaagtaggcacctctcgttcacaggtagagtgcaatttgggcattagttgttattggatgagtatctttatgcttccacataaaatagtcaaggagattgataaactttgtagagactttttgtggagtgtgaaaggtaactctagtaagatgcatctagcttcttgggatcttgtttacaaacctaaggtttgggtttcgtaaaggaaccaagtgaaaaaaggcttcgctttctaaataaatttgggctatttcaacaaagcaagatgttctgtgggttaaatagatcaatgctatctatttaaaaaagggtaaatagtggcataagtgctcaatgttttatatttgtaagcggcataaactcaatgtttatttttagcggcacaagtacctaatgtttgtaaaa

SEQ ID NO: 255220 - DNA, 666 bp, Cannabis indica
ttatttctaaatattgggatccacaataattaatttcataaataatcataaaataacagaaattagtgctaattgccttttctaatccaaattactagagcggtcattacattaacatgggtcctatttttaccattttagaaaatacatggtccattttgtcatttaacaaaacagatggtccaaaatctataacttttgaaaaacatagggtccaaaatagtatttacccttacatatttatgaagataaaatatgcaactaattttttgtgggagtcttcacaaaaattagaagtggaaataacttaacaactcaccattcttattatttctcaagctatatatgatagtaacatttagtttttttaattttttaatcataaaaatatagtaaaatttgtatttttaaatttttattttgaaatataaaaatgtgctctataaccatttttattttttaattttaaagaaaacaaaaatatattttataacttttattttcatttttattttttgactttatttaagtcaattctaggtttgggtctagggtcatggtccgtgtctgggcccggactgaggctgagagcggagtttgggtcccaaggtcctagttaggatcggagttcaaaatatttattaagaaaaaaaacggtttaaaaaa

SEQ ID NO: 255221 - DNA, 668 bp, Cannabis indica
tccatttccaagccctccgctacaaaaatggcgtcgatccctctaagttcgcaaacgattccgtcactgagttcgccataccgagtttcgttcagtcaattcctgccacgtctttaccgaaagttttggtgttcaaagattgggctcctttacactctcaaccacgagcgtctttacatttcttgatttgatttggctaaggattatatatattctccctttttttttaatggaatagttgagttgttacaatatcagcaaacttccattaaagttaatgatattggtcttatgatgttaaataacatataaaaataatataattattattaatgtaattaatattgtttcatacatattttaattaatagttaatactaagtatgtttgatgtttggctgagctgttagaatgaactgcttaatttgtatcaattaaatattgtatgacatggtgtcaagtacttccagcagttgtggggctacttgatgtggacctctggtgatcataatggcatatataggcaatgtattcggctgaaactatgttcccatataatgttgagagaacatacgtgccaaaactacaacactctcttcgagactgactagcaaaaattctcatcgcatttttttggatctacatatcttagttttttgagggtactc

SEQ ID NO: 255222 - DNA, 941 bp, Cannabis indica
ttttaaacacaacctgaaaaccaattcatttaccagttaaacaatttcaccagtttgcatctctaactacagaagattacatacaaaataagtcctagttttgttctaatgttcaatacaaaaagtactcttctgaagaccacatccaatcaaaaaccgagcaataggacactaattatgtctcactgcaatttctttccgttaccctttaatcaaacaactgataagttagaagaaaaattagtgcttcttattagactcacacatgttattgtcattcatttgtaatttgcattgttgacatttcataccaaattaacaaaacattactaaaagatgttttatcttcaacagatagaacaaattatcaatagggaaataaatacctttggaggtttaaatggataatcactgggaaatgtgatgtcgagaaaatatatatcgccttcatatggagtccctgaaacataaacacactgtaaacactgtaatcgaaaactaaaacgctcttacaagttgcgaaaggaaaacgaataaacaaggtaccaaaacccgaagtaagaagcattacatagaactggaaatttaatattcccagcaacaaaatttcaatccataaagattgtaagcaacaaaatcataaaccaaagcacaaggcaatggtttctcttgtttataaacctgtattcaaaaagctcatacaagataacaacattcccattactaatataatcagatatgatttcaaaacattagattaccaatgctttatgattactttcttttattgcaaattcaacccagttattatccattcaaataaaaaaataaaacacataacaaaatccaaacctcactcactcactactgtcattattaatcaaaccaactcaactcaacttcttcatcttcttactgatctcatccatttttaaaaacgc

SEQ ID NO: 255223 - DNA, 605 bp, Cannabis indica
aaccaaccaccaagactaagcaactagatctccctaataaaaaaactagaaccagccaaagggtaccctttggctattttctttggctagtaacaactaaattatagcattctacttcataaccttcataggatcccaattccttacctttacccttttaaaatcagacatatataaaattttccttttaatacccattattccttaaatattcaaaatattatatactatttatctcttaaaatattacttatttttagactaaaacatgtaaaaatctttaataagtcaaatagtttattattttatttatagcgtttacatggtatgtataatctttatttaacctaaatttaaccaaaatcgtattaatatccttaaaacttaagattgcactcttcacattcaaaaatacttttttcctaataccacttaatcatacatttaattaataatattaagttaatattaattaatccaattcggtattatgacataatgcttccttatttattatttaaatagatgtcctcctaattattataccattcaaattattataaaaaccatttaatattagtatcttcctatacaactaataaggc

SEQ ID NO: 255224 - DNA, 1208 bp, Cannabis indica
tggtctgagttaatatgggtctttgaaaagttatcggaggcattttgggtcagatgagtgatggtataggagtgatgacgggtggcagtgtcgtggtttgttggagttaggtttgcccttctttctagggtttgtgggtgtcatgactcagtccctttacctcatagggttagacaacttagaccctttgttttcttcttctaatatgttagttattgagtattagtggtttaatgctcgtgttaggcgctttgttcaactttgttatttgcattgtttctttattattttgctttgcttttggtgataattactttagaatgcacaaacttatttgttacttgtttgattgggattattggtaatacaagtttgtagctaagctttatagtatgtagagattttatttagcataaatagaaacatattgcgtgtttactttttttaattgaaaattttcattcaactagaccaattcggtctcaacaatgaggtaaacatcttgcgtgttattaattctttcgatttaagaacaaaaataatctttcttcttggcgtcggttggtctcgtctcttttgccttaattcgggtgacaaaagtaaatcgtgatacaccatttttaaccaatttatacaaacaaaactgctcattttcaaactaatgttattattgattaatgaattactactttttattcaaataataataataataataatttatacacgttttttttttgacaagtgacttgcacaacatgagaagaaaggtgaagaaaggtaaaacaaaattaaagaaccaaagatatacaaattcaaaatttactctattataagatcgagttagcccaaaaatatagacaaaacaacttagaaccaccaatcaaagtcatctgaataaagtaaacttcttgagccaaaagccacctacaatgtgtttaacatatcgatttcgggtttgataggtcaacttgtttttcacttgaaatttaatctttctaatcgtgtttagcctattttgatccaaacatatttatgctaaatccaaatcccttcatttcgtatcattttctagtcgtgatatcgtgtcataacctatattactacccttactttttcctgtttaaactaaaaaaagaaacaaaaatgaattgtcaacaattcattcaacatctcatcatcatcatcatatgacccccaaactaaat

SEQ ID NO: 255225 - DNA, 797 bp, Cannabis indica
attaagtatcatgttacatataacttaagataataattttttaaaaaattatcactaattaatcgtaaagtatcatttcttatgatgttaggcaacatataataagcaaattgtcaacgacttataattagcaattaattgggaattgatatttgaatacaaagcacatgttatgatattcctagaatcactatcaccaactaataatcaacacaaatatctatatatatatttttttgtaaggaataatcaacacaaatattaattacatgatttaggttgatttttataaatcttatatacttgcaattttgtacatatttacttgtactgcaaacaactaaaaaaatagatttttttagttaggtaacctatatataatgtttttgcacataaaattatatcaaatgcttaacaataatatgtatttaatctaaattaatatggtttttttttggagagaaatagagaacttattaattaattaaagtattaagcacacaaagtgtacaatgagagagtatggaagataatcatgaattcataaaagttcttttttaagtttaattgagcaacattagcttctctaacaattaatgtgtcaaattaaagttttaaggaaattaaagtaaagaaaaggaactgactatatatatacatatatattataataatgagatttggtatagtgcttatttagtatctagaaacaccaaatacattaacaattagagatttagtaatctattcttctatcttgtactcacactagagatttagaatataattcaaataag

SEQ ID NO: 255226 - DNA, 639 bp, Cannabis indica
aagtcaccaaatgccacaaacatgttgtaaaagtagtcatctttgttattctgatctggggggttcacaactacatcaaccaccctactactcacttcaaggagctcctcaatcttgcaccttctcaatgtttgagaaggctcaggaacatgtttgatagcatccacatcttctctccactccagtggaattagtgcacctggtaagatcaagtagatggaagcttctgcataattctcacttctcatttcctccaacattaagttaatatcttcctgctgtaccagcataacaccaaaattcaagtgcttcccatatggtttgaacagaaagccaaatggaaatttttattccaattctctagccatatcctccaagttctcccttgagaaaccttcagccttacaatggtcaaacaaatcatacaccccaccttcgtatcttctgtttccaaaacgggtaaaccatgtacccccgtggaatatcttgactgtgaaccgatcaacattcccatctacaatgggaaaaatgaaagaactgtaagggccctgatctaatctaggcaaaaccacatattcttggaccaatttggcaaaactccagaacattcagaccccatgacaaagacaacaacaaaaa

SEQ ID NO: 255227 - DNA, 1316 bp, Cannabis indica
atcgatcaacttcactgtttttagtcaattttttttttcatgttaggaataaataaaaaatgaactacaattgttagagttagagaattggagattttagtgtttaaggagatgatttttttagagagaataaaatgtataatatttagctatataacctactttaatttaaaaaaaaaaaaataaacctctatttataataatcagagtttaatatacaattgaaaagataaaaatattccatctaattacgtttaacatccacctaagtgcatgtacacatgattcatgggtacgaacatgaattagggaggaaaaactaataacatgttttgatatattggcagcaaaactttcctaacaatataatttttaacatttaaccacataaattaattttttaacggcaaaacctaccaaactcacattctgttttattttttacacttccatccaaaaaccttagttaagtgttatggtgtactattttaatttacatgtacacaagaggacacgtggcaaaattttagtggtccacgtaattttaattttaaatataataaaaattattttaaaatttcaaaaaaataatttaaaaataaaaaaatagatttctttttccttttcttcttttttttctcaatttatctttatatatataaatatatataataagggtacatttacagtttataattattttctttaactattgttgattgagattttcagcaactaattaattagagatgttttaatgaatttaatgcaagtattttcacgtgatttgggcattaatgagccttagtccacgagtgactactatttaatatagtagtttttagcaaagggtgcacaccattttttccgacctcttcttcagaatatagttagggtatttatagcctcatgaagaaggctaaaatgtcactttgttgtaagtgtagaagaactacttgcacaagttcccaaatttagataatagggtatgcttgtttatctagtaggttacataggcttttcctaagtgtttggtaagataagcccttaatctttcttgattgatgcgatagttcattatgcagccgtcataaagatcattgggcagagtgtaattgccgaataatgcgtttaatacctcagacacgtatttttagaacattagcagacgtcttccccatgctgcatttaatgcgtccacaatgacacaggtccgggggctagcgaccgaacctgtgtattttatccagctcctcgaggtgggcataaacccctggatttagcaagatgcggctgaagctcctagaagggtttct

SEQ ID NO: 255228 - DNA, 960 bp, Cannabis indica
gaagtatgagatgaagctgaaccccagaagtgtacctttggagtttcctctgggaagttcctgaggttcattgtcgctctagcggaatcgaggcaaaccctgaaaagatcaaaaccttcatcgacatgccttctcccaagaaacacaaggatgttcaaagcgttactggtcaaattgccgcactcagtaggttaatttcaaagtctatggataagtacataccgttcttcaatgtgttgcgaggcaacaagtagtttgaatatactgaagagtgcaaagttgctttctagaaattgaaggagcatttgactcaagctcccattttatcgaagcccgtgaaaggcaaagatttgtatttgtacttggcagtgtctgatcatgctattaatgctgcacttgtgcgagaggaagaaaaggtctagttctcgtctactacataagcaaaagattattgggtgtcctatgatcgagaaaatgacactttgcttactaactggggctcaaaatctaagaccatacttccaagcccacgtcataaaagtactaacgaatccttccctcctccaggtggttcagaagccggagtcctccaataggttgctaaaattggccatggaacttagccagtttaatatccagtaccagccatgggtatttatcaaaggtcaaccccttgctgatttcatagtagagtgttctagcttaaataatcttccggaagatctagtctcgaagcttcccacctagaagatctatgtagacaaagcatccaatgaaaagggagctagagccgagatcattctaatctccccacaagggcacaaactccaaagtgctttacatttagttttcgtgcctccaacaacgaatcaaacacgaagctctgttggcaggcttaaaattggctaaagaagtggagtccaacaaatcgaagtacacagtgattcccagctagtggtg

SEQ ID NO: 255229 - DNA, 722 bp, Cannabis indica
aacataataaatgaaatagcatataacgatatattttttattaacaacttaaataagcatccaacggctgtctacataccccaaccaaattaacccaattacattcacatacacaaattaacccaaatgattagagatttttagttttgctgtgttctttctcttaacattttcactccaagataactgcattaataaaaccaaaaaaccttattagctactactcttattaagccacaattaatttaataacaaattaaaagctataaatttatatttagggacacgattttgtccggtgatgtactttcacggaatgtattccctgatacattagatgggtcctagggtacgtaataatgggtctcagggtacgttttttttaactctaattactcctagatcaatcccagctctcagatcaaataactcccctatttaacggctgtcgtacatcacggaatacattccgtgaaagtacatcacgggacaaaatcgtgtccttatatatttaatatgtggtaaaaaaaatgataaatgctaaaatgtactattggtgcctagctccctcttatgtgtaattatggctattggtttaattaagtatcgagtcttatatagtttaatgtaataacttttaataagaagtatcgctagctaatcgcaaagagacatgtctaaaggtgttagagactactgatactcaatgacgatactaaaaa

SEQ ID NO: 255230 - DNA, 582 bp, Cannabis indica
ggtgatttgagttattaattgagttttagaacttttaaagcctagtctgaacgttaatggcattttttcatttatgggactcaattctaaatttctgttatgcaaggatggtaatatttactggtatagatgcgtcctgtgaagttacggagtgatttggataagtttttgtagtagtttacgctaagtgagaaaattgggattttccgagtttcatagttcttagaaattcctaggagatcagaaaacgtatttttgtcataactttttactcgagtgtccgttttgaaacgttttatatactatttctaagcttacgaagatctctacaatatggtgtttgttttagagccaaaatataagttttattttagtgtatttataccgggggatttagtagaaaaccctagattgtcttatgtgaatattaagtagtattttgggataaacacttattgctttatcattgttgtgacatagggcctagatcatcggggatagttctccagttgggttggccgaaatgtatgaacctagattaaaggtaagaaaagtatattgtactgcatagtacgttgtatg

SEQ ID NO: 255231 - DNA, 628 bp, Cannabis indica
ctattatacatgtacataaaaaaaatcaaaacttttccatgtatatatagtgttaattaattaattggatcgattgaacaggctgagatagatccaacacctatacatcgtggaataagattattgatcaatgaacaaatggaagatggtgacttccctcaacaggtttatatttatatatatatatatatatatttatttacaccaatatttaatctaatggtgttatttgatgacaattacgtacgtaaagtgattaaccatgcatgcatgcaggaagtaaatggagtatacatgaagaatggtgtcttaaacttcgcttcatatcgtaatatctttccaatatgggctataggagaatatcgtcgtcaagttttacttaattaattaattatattaattaagcttcattaattatgtgaacaaacttaacttattgatgatcatataataagttcatcaagtcgtctctctctctctctctcatctctttctatatataaatatttatacaattgtaataaaggacctatgtcaagcatattgctacacaagtatcctcatttattatttatttaatatatggggattcatgatatgaagtgttaaaagtttgcttaattaatat

SEQ ID NO: 255232 - DNA, 962 bp, Cannabis indica
ttttatattatattttattaaatgtaaaaaaatcataaacttaagttcataaaaaaattctaggttgatattaattgctaatattaaataaaatataaaatatttttttaaaaaataagagatttaattattatttattttattataattaatttatttaaatatttttatttttctaatatataataaataagtatggtttagtaaaaataaatttattatagtcttttaatcaaaagagttttttctaaaagttaagctagaacagttttaacttttagtggtagcttttccgtaaattatttaaaatgttttattttgactacttatcaaatacaattttattacagttttttcaattagcttttagctttttcaaaagctgtgtgaaaaggactctcagtgtccaacaactccagaactcattagtttgttcgatattaagcaaataaagattaaaaatacgttttaaatttaaaactttcgaacgtccattaaatttaaaggtgggaaggaaaatattatatcctgttatttttttttgtatatatattttaataaatcaggtaattttataaatatcaattaattaaaataatagtatacaattcaatcgaaacatctttcattagagacacaatcaagattaaaattagaaaaatgaacaaaataatcaacctcttaatttccagatcatttaacaaaaatattaaaaataaaataagataaatattgcattatcaaggttacttatattcatttaaatctactgcttaaaaaaagataatagtaaaaattattactgtaacaatcttttagtggttaaaaacttattattcttaactattaagaataatttgatggcaaagtcgtaaaaaaaaaaccaacaaaaactataaatttagaacccattgtatacttaataattaagtaaaagagatactaatatatattaattaatt

SEQ ID NO: 255233 - DNA, 855 bp, Cannabis indica
gtagtatctacctcttttcttattattttgctgctgtaaattgaagttgaaattgtgtatgtgaagccatgaatgtgtttatgagttgcatgctttgtgatgattgagttgtttttgttgttgaagttatgattgtgttggtagctatggttattgctctgggatgttttgggttttattttagggactatatcatgtgttgaatataaagtttgggttctgtgttaggttgttaccaagctgaaaacatgtttgtgaaattcaagcttttatgtgtgtagttggtgttgaattttgctatgtgttgagcttttatggattattggtaaatctgaattttgatgcatgtgtgctatgagtttgacttttaaatgtgtatataaactctctgttatgttggttctttatcatgggaaatgattttgagtttaaacatgtgttaggttacatttggatgtgttttgagcatgatttcgaactggatttttaaggtttactgggtttaaaacccaggggccgcgaccccacttattcgggtgccgcagcctgcccctgttgagggtctgggtttccaacccaggtgtcgcgatcccgtgtggggagtgttgcggcccgccaccttgtttctgggcaaattcgaacacgatattcaaatgctcgtatctttgtgatccggactccgttttgggagttctgcatatcgttagaaagctcgttctgagctctatgtgattatttgaaattcgaatgccaattttataatgttgtgaaaatggatttagggaattggattaagtagtaaatctcacacaggtgaggtcgatcccacagggaattggattaagtaccactaaa

SEQ ID NO: 255234 - DNA, 822 bp, Cannabis indica
ggatttcaaaaggtccaatgaaccctgggctaagttttcctttcctaccaaagcgtttgacgcctttcgtaggcgatactcggagaaataccatgtccccaatctaaaaattaatttctgacgctttggatcagcataactcttctgtctgctctgaggcgcgagcatttgcgttttcattttatcaactgcctcaattgctctctgaacagcctcagggcccaagaactttctttcacgcacttcatcccactatataggtgattttcactttcttccatataagagttaattaggagccatcctgattgttgcgtgatagctgttgttgtacgagaactcgatcaggggaaggtactttagccatgatccttcaaagtcaagcagacacgctcgtagcatgtcttctaagatctgaatagtcctctcagactatccatctgtctaaggataaaatgttgtgctaaactttaacttagtacccatagctctatgtagactctccaaaaatcttgatgtaaattttggatctctatctgaaacaatggactttaagactccatgaagacgaacaatttctctaacatataattcagcatactgatcaatggagaagttcgttcgaatatgcaaaaagtgtgatgactttgtaaacctgtccactatgacccacaaagagtcgtattgtcctgtggttctaagcaatccaaccacgaagtccatagcaatatcttcccatttccactccgcgatattcaatggctgcagtaaccctgcaggactctgatgttgagcttttacttgctgacaagtaagacactt

SEQ ID NO: 255235 - DNA, 1155 bp, Cannabis indica
taattgaagaagcaaaagaaacttaagctgttattactattcctcaatgctcacttgtccctttctcagagttacaaaattacgtcaagactaatacagaaatcggtatgttcttattatatacaattagcaaaaaaaattattgatcataatgtatattttttatctccataaatttaaatatatttcagatcttttgggaatagttgttgctattaaggacccaagagatatacaaacaatacatggtccaacaaaactccaagagatcacaatagttaatacagagtaggttattcttttcattaccatcaactcaaattatttttactatgatataatttatcttatatttatacatattgttcaaattttaggaaacaaaaaatcatgctaacaatgtggaataacctcttggatgctgagtgtgctgaaattagaaagataattaaaaacactcctagtttacttgctaagcatcttaaagtgggatcatataaaggtaataaagttgtagttgtgtattatcacataatattaactaatctttctcttgtattatcacataatgattgaatttcttgtatatcttctttattgacacatgtatatcattagcaactaatgcacatagttccttacttctcgaacctaagatacctgctgatgatattatgaaggactggtatattcttattcttattattttctttttccaacatcaacctacataataatgcttttccaaattcattctcagaactaataaaagttattgtactatgtgacatataggtgtgaagtgaacaaggaatttttacttcaacaattatctaaaaatgatgactcttcctcttcatctgacacaccaccaccacctggtgatttcaaagatctttccacaataaaatcaaccactaacaaggtattcacataaaacatcttcaacttcctttaatcttcattattattgtatctcttttaatttcaacttactatatttcagagtgactattactgggtaaaagcttccataacactcattaatttctagcaatgatttgcttacatagcatgcaataaatgtaacatatcaactggtgctgagcttgaagagactttcgattgcataaaaggacatgaaggaaaaggagt

SEQ ID NO: 255236 - DNA, 1106 bp, Cannabis indica
cataactcttaacataaatgcatacacttaatatatactataacatatagaatcttagggtaataaccctagcttgcatactaaataatcactcctacaacatgttacaagatgctcaaaataacacctattaagggtaataaccctaactcatgtcttcacttaatttacaatattaccatacatcatcactttcttaccttcataatattctagggtaataaccctagaccatatttaattaaactcaaggtgctagtttaccgagtccagcttaattatgccttaggcgcataattctttattctaacatattaagcatggcacaacattcaaaatcattaaatcactcgggtaataaccctaggccataaatcgctcactttaggtaataaccctaatcttggttcttcatttatcacaaccataatatacagcatgaatgccaccgcgcttaactctacgtgtaaactactattttacctgatgtcccgcaaatgtgaagattctaaatccccaggtgctcctgaccaagtgccggtaattttgggattcacaagtatagggttaatccctaaattcactttcacataatataaaattggcattcaaaatatagataaacatatagagctcagaatgagctttccaacgatataatgaacgtccaaaacggagtcccgagtcaaaagttatggccaaaacaaaattcagcttttccccgatatagtccaaccggaatttcggttggaacagccctgaaccaaccagaattccggttgtctgggcagaaacaacacgaagaatctcaattttcaagcccccataatttactcaaatcttccccaatcaccaccaaactttccagagcatcaacatattacataataaacatattttacagctcaaacacaatagttgcaccaagaatcaaaaagtgccattaaagcttgctctacacaacaccatccactaaaaactgagttaaaactcacaaataaaactcatcaccaacctcttttcatcactaaaagcatactaaacaatcaagatgcaaataacattcaaactaataccaaatttttacatacatgcatgcttgaaca

SEQ ID NO: 255237 - DNA, 521 bp, Cannabis indica
tttttatgaattataagttgtgtagatataattagtttattaaataataatttagcatgatttggtacatgtcaaaatttaagaagtatgattttgtaaatattaaagtctgagtagcataatttagtatatagataatcactggattagtacaattgaataaaattagataaaagtccttaatctaacaatctcaataattcaagagaaattattaatggaaaaattcagaaaacataatttagtacatgtcaaagtttaaagaaaaaaaaaatataattagctaatatttttttatattcaagatttatttctttgctagagcaacacaatgtgtccactaaacttctaatttagattttacaccgaaattactaaagaaaactagttaagaacaagatacagaaatttcaatgcaaatttggcatgatactaaactgaggacactgttatgtctgaagtttgaaaattgaagacagggtgagaattcaaggcatcttcattgagttacaatgaaatgt

SEQ ID NO: 255238 - DNA, 805 bp, Cannabis indica
acgtgtacaagagtatgcacataagtagaccatgatagtagttaatcgaatgacactttaaatttactaactgttcaataatttaaaaaaatttaccactaaaatttgaatttgaaagattaaatacaaataaaataataattgagagtttttagctgccaaaaactctcaaaagaattataatacgcacaaataatattatgtttgacaatataaattactaaagattttaagatttaatttttaacaaaaaaattaattatttttatagacatattaatagtttcaaatataaataatatataaaaatactaagtcataacataaataaatactcaatttttttaggagtacctttggtcgagagaaataaaaatggaatagggtttaatatgcataaaaataaattgataactttttttattattttgcattatgatgattttctttatctatcttttacgatccaatatcttaaaagatgagtgttagtattaatcttctattataatctcttaattaatcttcgagctcaaacatatatatcagaatattttttttttctatagtagtgctagttatattcataatatcatccctgtaaatttttaaaattttttgtaataatttatgcgtggtaagttaaaatatctggaattttatttcccgtactgtaaataactattcggattttttaaaaatttatatggatgatattataactatagcgaatactgttatgaaaaaaatattccgacatacaatttcaagtatatatggaagttgactaagaaattgtaattag

SEQ ID NO: 255239 - DNA, 559 bp, Cannabis indica
agttgtagctgtgctgagagaaaaaaccattgaatgtttggtaaatatatttaaaacaactgtaagttgaaaaagttgtatataagtgtttggtaaactaaatgattaaatagctgttaaatatacaattaataaaatttgtatgatatttgttatctaaattattttaatataaatttatgcatattaatatatttataattatatttttattatattacaaattacgataatttttttcttataatatttaattctttttaaatatgtatggaagaaaagatagaaaatattaagagatatgcctaatattccataccagaagcaagtaaaaatagtgattgtatcaatgtccttgtataattacattcgaaggcatgcaaaacgtgatcgacattttgaaaaaattagagataatccagattattgtgcaagtgatcaaactaatattgaagatgaagatgagacaactagagcttcaaatttaaatgaaatggacaatatcagagatttgattgctgcaagtttaatgggacataattcagatatattcatgtgt

SEQ ID NO: 255240 - DNA, 554 bp, Cannabis indica
tcttgtatcagtcttcaactccaaacttggaaaaaatatcaactgtaattaatttaaagcttttcactttcctttgtctgcattttctatgtgagtttctgtggaaaaatgtttggaaaattttattcacacttttctttgtctgcattttctatgtgagagtttctctacacgatcaccattattttctgggagacagataagtttcaaatttttaagcatacacaagaggagatgaatatgttatcttatcaaattttgcaaataactatgatcaatttctatatgatctgttaatttgaaaaacatatacattttatcttccttttatgttcaagtatagtaaaattttttcttcccatcttaaatcaattttagttgaattataaaatatttgatcagataggagttaagacttgtgtgttactcacaagcttgagttttgcaagattttctactactgatagcaactaaaggtttaattgattgcgtatggagttgtcagttcactaatattgaacaattctttgttcaggaaaaatggtccccgttgc

SEQ ID NO: 255241 - DNA, 1256 bp, Cannabis indica
tgactatgagtcaggtccaagcctcgggtcccagtctagttccacttcgggtcccaagtcccagtccgagtccaaggtcagggtccgggtctgggattgggccttgggtctcggtcccagttctgatgcccgtttcccaagtccaggtccctcatctacgtccaggtcctaggtcccggtctgagtctaagagccaatcggggttcaactcctggttcgagtctgggttcaagttccgatcttggtatgggtcctgatttgggttcgagtcttgatccaggttcgggtttgagtctcgagttatgatttgggtctgggtttcgaggcgtaggtccaggtccgggtcctaggtctcagtctgggtccatgttcgggtttgggtcctagtcccagtttcgatttcaattcagtgtttgggttcaggtttgggtctgggtctgggttggggtctgagtcctggtttgagtctgggtccgggtctgggtccaagcccggatcccggtctggttcttggttcggatccaggtccgagttcgggtcccgggtgttggtccaagtctaggtctgggtcagggtctcggcctggatctgggtcccaagttttgatcccattctaagtctagatctgggttcgagtctaggttcgtatccaaatcccattctagctttaagtttgggtctaggatcaagtcccaagtctaggtcaaggtccaggtctcggtcctaatctggcagttcttgtttaggttcccgttttgggccccgactctgggtcagggtcccggtttgggtcctggtccgggttcgggtcctggtctgagtcccaaatctggatccctatcacgtgtcccggtctggttctggttcagatccccggtcccaagtccgagtttgggttcgggaccgagactggggtgcggttctaggtcccggccccatttcagtgtctcgagtctggttccatgtttagttctgagttcgggtccagggtcggcaccgagtcaagatcagggttgagatctaagtctggttcccggttcaggtctaggtctgggttggagtctgggtcctggtcctgctatgattccgggtctaggtccaagtctggtaacggttctaggtccaggtcgatgtcttggttccggtcccgttcttgggtcccagtctacttccaattttggttccaatttcgagtcacagggtcaggttaaggtccaggtttttgatctgggactgggttcgggtccgggtctagg

SEQ ID NO: 255242 - DNA, 1088 bp, Cannabis indica
cacaacaaatcatatttaattgtagtaacctagctagtttgactaaagatttgagaaaaaagaaaaaaaaaaaacaatgaagatctaattagattattacgtttgtgctttcttaatagtaaagtaaaaaatgtagtatgttgctatatttaagcacatttatgaaaaattactatttttaattatgttctaaaaaatattctgaatttggtgtaggataaaaaaattattatgatttattaatttttagaaaactttgcattcttctttatcatattttcattatttaaacaataaaaaataataatttttgtactctcactaaaatattaaatggccattaaaattaattatttttacttattttacatcttgtgcattggaacacaaccataaatagtaggtatagttcaatcttattttatgcgctaaatttagttcaaaatttagatcttgcaatgggagatggtttaagatccactttttattagtaaagaatcgcaattattgtcacggtaaaatcatgatatacaaaaatgtatcaaatatatattttggaaaaaaaattacaatgctaaaagggttttatcggtgcatcttttatttgttttgacatttgggagaatattttagtaaaaaatttcatcgccgtctatgttgtagttatttaggacatcttacaaaattttgataaattttgaaaaatttaacatgctggaaatatggttcaaacaatctatttcatacgcgtataaaataaaatagtcatgtgcaacagcctatttaaatctcattttttgcctgttaaattttttaaaatctcacaaaattttgcaagatatcttaaataactagaacttagacgactataaaaaagaaactaaaccaaatttttttctcaaatgtcgaaaaagataaggagcaatggggaacctattttaagggagcgtgaagcactttatattttgtgtgaaaagaatacgattcatcaaaagtaaataataggtgcatttgcctcaatgctaattcagcataaaagatgattgattttaatgctaatttaacagataagatgcttcatttttttt

SEQ ID NO: 255243 - DNA, 935 bp, Cannabis indica
tgggaacttgtgcttatccataggtcaaagacaagttaccccttttcgactattcccaccaatctctataaatacccctgagaaaatgaggaagcggatcggaaaaaaagtagagagaaaatcataaaaagaacattctctataaggaaatactctcattaataaaaaagaatcgtggactacgactcattaatgcccgaaccacgtaaaagttatctgcattaattatctcaaagccttcatcattatatcatttaattagttgccgaaaacctcggtcaatattttggtgcttacattgagagctgtgggaagcattgtttgaaaaacgacaatcaagaatcaaaactataatggtggaaactcgaaacaacacacgccaacctcatcccccataggatcctcagaacccagagggtgaagaggcggcttcacgagtaaatgtgggctctgaggaatgagacgagttgaacgacgaggaatacgaagagaatcccgaaggatatgatgcttatgacgatgataggtacactgagttactggtcctaaggaaaaaagcgaatgatcacgaggccaaactagctggccaaaaagaacagaatagaaggatgcaagaaataatggttgccatgaaaaaatccatggaaatggctggaattcatgtgcatcccaaagccatgcctgcagaactagaggaaacggaagaagagtcctcgctaagcacccaaagccccaaaattagggaaccaagccccatacgatatccttccgagaaaaaccccaagaaaaatcctactttgatgtccgggagaaacaaaaaggctcaagatccgcgaaaggtccgatctgatttcccaaaagggaaaggtccggagaggggcaagctccctcgagagagtcttgccccacagaaccgagaggactgaaagagtttg

SEQ ID NO: 255244 - DNA, 767 bp, Cannabis indica
gagatgctctaaccttatgactatttttctgaacttagaaaatgagctagtggagctctccttttataagggaaagaaaacctattaattggcaataaaataatacaaaaaatatggaaaaatatatttaggttatttttgcccatagattgtgatctaacggtgaaattaactctagaagtcggtcgtcaatttttagagcttgagtcacgtctgtgggacccgcttcgggtaagctgtagcttaaattcataactctcttggggtaaaatttggagtcgataacttcagaattgcgattgaaatgtgagacatgactaatattaaaatagctttgaaatgcaagttaaattgcgtcaaagatcaatattgagcgagttataaccattctactgaaggttattctgggcccaacgcccaggttgacatccagtgccaaggttgtcatgtgatgttaacctggatgttgggtgagtgggaaaatgcgatggggatgtgttttttgatgcctaagtaatatttcgacatcacttagtccatttatgtgttttgacgaagctggttaccagttcttggaaatgttgctgttttgtggaattgggagtacacggaaactactagtttccaagtaaatcaactttatcgaaaattaaaatatgaagttgtaaatttgacttttctgacttaatggctctcagttatgaagaaaaactaacaaatggttgagcagaatcaaaatcaataagcagaacccaatgcatcaggcc

SEQ ID NO: 255245 - DNA, 716 bp, Cannabis indica
ccattaaacaatttattcagactcaggatgtttgtttggtggggctccttgagacaagggtcaaggttcacaagagggaaccttgtacctcaatgttgttgaaggttggtgtttctcaacaaatattgcttggaatcatgtggggaggattgtaatagcatggaacccgatgagatacatagtagatatcattaaatgcacaagtcaactgatgcatttaaaggtgtctacagtggataatacctattgtagttttattactataatatatacttttaatgacaaaaatggaaggcagtgcctatggaaagatttgagagagttggctactaaggctaattggcttttgatgggagatttcaatgatattttaaagaagagcgagtagggcagaaagttaaatattaccctaacacagattttattgattgtgtgaattactgtcagttggaggatgtaaaggctacagggaattttttcacttggtcaaacaagcaacaggggaatgaaggattatggccaatcaagcatggctagatcactatcaaagtgttgaggaaaatttcctaaatgagggcctttttgaccactctctttacatactctctctgtatcttaggtggacaagtgggaaaaagcctgctaggtactttagaatgtggaagagccgtgctgattatgaacagaaagtaactgaagtttggaggaagaagatt

SEQ ID NO: 255246 - DNA, 575 bp, Cannabis indica
aagggcattcaagagaaagggaagaaaatcgtgattgacccggcggtttgagctcgccacgtattgtctcttcaggagaaatttgtcagtgacgagttccagtcgaagattgaaaagactcctgctgaggagctactgcctcacttcgcagagttagcttcgcagtttatggctatgttctcaagggctttttctactgggtccaaggagattgaactcgcgaagagacacatcgctctgcttcaagaagataataaaaagctgaagcaagatgcgtcttctaaggacaaggagctcgaggaactccgcaaggccaaggagaaagttgagctcgaggccaagaatgctcagacgaagatcgaggagatgtttcgcgacttggaggctgagaaggagaatggaaaaaggcagtatgaccaggcggtcttggactacatctacaccactctctccaagattccagacttcaacttttcaatccttggagcagaagccgctgaaatggtcgaggcttttcgcgcctgtcgcccacgccaactcaaggtggtggggggaatcttctcgaggaggctgag

SEQ ID NO: 255247 - DNA, 696 bp, Cannabis indica
ttttttttttagttttttttatgaaaaacttacaacgtacaagcatttattttaagggaatcgtagttattttcttcatcattactcatacataaccatgaatatttcttcctcaagaaaactcttacagctttacaaatatataaaacatcaatttactatggtgtgtgtttacctcacttttaaccaacaacagtgagtctaattttataagtgacaagtagtttaatatgatagaaatatagtaaagcaaataaggacacaagaattttataaaggttcagccacgagcagttcggtaatagcctaatcctcgttatttgtattgacttaagaacaaggagaatagttccttttcttagagctcttacaacagtatctctgaatatgaattcttagaaaaaatctttcgaccctttgcccagtgaatatgagtcactatttatagggctataagcttggagaggaagtatttcccttctcgttacaattgatataaacagaaatattgcatagtaaagacagaatacactaatcgtgggatttggacagcttgccatatctctgtaatctgatcttaaagttatagggatttccttgatgactcacgatgcaaaagttaattgctaagtgttggcatgctacgcacattgctcactgctctgtctagaggacttcgtctgagcgaatatatga

SEQ ID NO: 255248 - DNA, 1288 bp, Cannabis indica
tttttttaaaaaaataaaagtgttctctgtaaatttcagttttatttttatttttatttttatttaagtgagcaataagaacctaaggtgagagaaagtgggtcggtgtttgacaccaacgtctggggtcgggtgcagatgtggggttatgccaagggttcaggtttggccgatgtctgggtttgattgggccaggttcaggtttgggattcggagttcaggccggagtctaggtctagattcaagtccagggtttaagatcaagtttgtggtctagttttgagtttgcagtcggggaccgagtctagggctaggaccaagttcaaggtcgggtcctagtttatgtctggggttcaggtactagtctgtgtccgaggtctaggtactagtctgtgtttggggttcaaatctgaagtccgaggtacaattctagctatgggtgctaaataaatttacatatcgccaaacccgaataaatcgaaaaaatcaaaccgaataaaccaacaaaaaacgcaacccaaaataactcaataaaaatccaaatcgctcaataaatatatttggtggattaaaaattattctaaactaacaaattaacccgaatagactgatttatgtattttctcaggaagtgtaaataatatattacataaattatgtttattattttaattattttgtatttaaagttttaactttataatattttaacttggaattcaaaatttataattaataaattttattgtatttagatgttaaatttgaaatttaaaatttacaaaatattactttttttctttctattttttatatgaagttttgtttaatatttttatgttcattgaattaatatttgtcttacgttaaatttttaaaattaatttagaccataaaaattttaaatttgaaatataaataatgtaattttattctttttaaatctaattatttgaatactaaaaaattacaataagaattataaaagaagtgaagatcagtggatgagttaatccgatcaaaccaaaaaaaattacatgggttaattttttaaaattttaattgggcgatttacattaaatatttgcagctcaatatttatattgggttggtgaaaaatatgctataatctgataagtccatatttgtcttataaatataaccaatttttatgtatcaatattcttaaaaattactgatttagtatgtatttttaatttgttagtactatttttgaaagacttaatcatgcatttagagtcatttgaatgagtttttaacatacttt

SEQ ID NO: 255249 - DNA, 974 bp, Cannabis indica
actcgcgacttcctgattctgcaagaaaagtttgtgggcgaggaatttatgtccaaggcggagaggactccttctgaagagcttattccgcgttctatggagttggcttcccaatccatggccatatttatgaaagccgttgctgctgggtctaaggaagctgaagtgctgaagaggcagaatgcccagcttcaggagagcgtcaagaaactaaaacaggaagcggctgacaaggacaaggagctcgaagaacttcgcaagtctaaggagcaagtcgagcttgaagccaagaactctcagatgaaggtcaaggagatgtctcgcgacttggaggtcgataaggagaatgggaagaagcagtatgaccaggcggtctctgactatatcataccactctttccaaaattccagacttcgacttctcaatccttggggcagaagccgcttagatggctgaggcttttcgagacatgtcgcctacgcagactcaaggcagtggaggaaacctgttccccgaggatgctgatgctgcggacaatgaggaagtcgtgcacgaggccgtcagcaaagtcgcagatggatctgcccctgccgctcctaacgcttaactgttactttaatatttacttgtgttaaactcctttttttaatatgcggtacaagggtactcgcaacttgtacttggataaatttatgtctattttccttttgaacgaatatacatcctttcggggatatttatctgtaacattttcgtagtacacgggtactcgcgttttttgctatttataatatcttgattgcgacttaactacagcttggtgtaataagtattaaggtagaaaatttcaaaatctcaaaaatttttattactctttactgatcaatagtacatagtggtatataccccctatacttagaatttttatgtaaaaatgactaagtataaatacatagcgagtacaaacgataca

SEQ ID NO: 255250 - DNA, 899 bp, Cannabis indica
tattactaatgatgtcaaattaagagaaagccaagatcttaaggtacgtattgtatttgtattatttgatttggacaaactactgaaagccacatggacaggctgaaagttgaaatgcttcttaaaaggtgcagaacttacttcaaggttggctggatccactcgcttaatagttagttgctcggaatcgagaatattgatctgttgtgctttagcatctgcgccttttcttaacaaaccatacttagccaaagtatcttttgcatccttcttggcctaacaaattcagcattaacaatcaattttaatttagtgacatcctggaagagaggtacactggaccaaatggtataaaataaaataaaaggaaaaagcactatagttttcacgttaccccatcactggagcaaagttatgcacattacttctcgcatgaacatagccgcagaaggaaaaacattaaaaaaagggtctaaataaaataacttacctttaattgcttgattcttttgaagtcctcattagaaagaataccatcctctagttcaggtgatgtatttgctgttgttgctactgccaatctcttcaatgtccgaagacttgtatcagcagcaactagttgtctatcaaaaatcagtcagttttctcttttttacctttagaatctttatgtcccacttccaccatgttcggcactataatcatcatcattatcatcttgttccagttttctcttttttcctttagactcctgtccatttccaccgtgttgatcatcatcatcaacttgttccatttcttcgtcttcgtcctcctcatcatcatcatcaatgctaacatcaccatcactgtcacttagacaatcactaccatcttcactgtcagtgccataagtagag

SEQ ID NO: 255251 - DNA, 1136 bp, Cannabis indica
atgggtaatacccattaaaaagttttcattatatattttaatgaaatcaacttaattaatagtagctaaaatagattggattcaataggaaaccagttaatgcatccaattgttggaaccaatcaaatccaatacatcaattggatcagatcgaatcggatgacttaatttgattagattggatcggatgacaaaatctaatatccgataaataattaggttagatcgattgggtccaaattaattgaatgtgatccaatgaacacccctaactactaatacatataactatacatttaatgtgaataatttatttaatatattgttatatattactaatatatatacattaattttatttacattaacaaaatattttatattgtctgttagggttttcgttcctaaatctttaggtgttagagattgtctttattctccagccaagctcgttgaccctccctggacttagatgtgacttggtcaggatttgtagtttcgctactgggattgtatttttactactgtgattagtcttgtttttgtgacatgttattaaaatatttttgcttaggttacaatgattagtcttgtctctgtgacatgtttttattttgtggttgcttcttcttctttgttcttcgatggatcgccatcaaatcattgttagtggttgaaaataacaagttttctggagctgaaggagttattagtgatgcagttgcacaataattaagcgctcaagctaaggggttgaatgaatcacttgcaacaatttttactgttgtatcttctgaacgttggttgaaattattcttaagattaactgtatgttacaatctttttcatctaattttattttagtttattttgttaaacgattcaggaatcaagcgaccgattagttagcttatagttttgaatctaatcctaatcatatttctaatgagggagatgtatcgattgaattatatatgctgttattttaactaattgctaattacataatttattaaacaaaatacatataaatatgtatcatactcgatccaaaattttaataaaaatttgaaaagaagaggagtcttatatatatagccatctaggggtgttcatccgatccaatccgcactttt

SEQ ID NO: 255252 - DNA, 1160 bp, Cannabis indica
gtggggtatttatagtgtttttgtggggtgatccccagaactgaggtacatgtctttctgtaatattcagtaaaggcacacattcccaatgaatacatcataggaaatgcatggtctaatccctaggctttttaggggtttaatggatgtaatccattatcctttcttgactgatgtgatttctcataaagtagccgtcactaggctcattaatcatagcgtagtagctgcagaagggggttacgccgtcagactttaatacttatggcagtttcaatacgccttctcccatgcggcattaaatgcgaggtgactgttcagataggatttgatacctcccggagatgcctcattgtagtcttgctctccgggagtatatgaaactttcatgccttctccgggaggcatgttaaatgctgatccttttgattaaggagacttagtcgaattatctcaaagtcttgcttcttcagtccacgtgtcacagtccggtggtccacgtattttgaacaaatcaggggcaacaatacaaattttcaagaagaaaaaaaaaaatctgtcagatgtacctaatttgtagaagtttaacattatatatatgttaataaaataaaatgttttgagtgtgagccaacccgcggccgtacaaggcaggttggaatcagttgccttagttttattatttacaattgataaatacatatctattattattattattattaattttagggtttattaatatatcaagcttgtcgcatgtcgtgcctttcaaactaatttatttatgcttacatgttgtgttttttgtgcttctcatattgtatcgtacttaagcacatttttcgttttgtgtcataccaatttgtagcatcgtatcgtgtctaaacttacattatttttttgtgtttagtcgtgctcgtgccagttttttaccatgtcaaaaaatccaacctgtatttagagcactagtggttagtgactttgcttatgcagcaaaataattacaggccgttggcgatgatgttttaaactatcagttaagagatcttaaaaagaaaaaagaaacaaaatcttagaaatgaagaagccaatagccctaaatgaacaatgagcaaatgagtgcactcaatgaaaaagctttgcctagaagcacattc

SEQ ID NO: 255253 - DNA, 1594 bp, Cannabis indica
gtatctacccattgtctttctttcaacatgttatagatcccaaatggcttatgagcaatgacattgaaatttttctcaatagtaaaattcctattctcataaaatttcatgtctctaacatgatcattataaaaaaaataatgagaatgaggcttgaacttttcaagagtaatacaagagggcctctttcttttctgaggaagaaaagggcttggagagacaatgggtctttttgctttgtccttctttggaattgtagcagggacagcaacaagttctgcaatgataggttcagcttcaggttcttcactttcagacccagaatcatcagtagagggttgttctttgggcacaaaatcttcacttgaatcgaacataccctctgattcgtgatccccctcagtttcttcttcaggttcagaatccgaagatgagacagaaagggtattttccttgagacttttggccttaaaagatgaatacatcacctttttccctttggggacacttttgggcaaaatcacttcaggtttttaaggagtggataccttggaccttgtacgagaactcacagtgggcaaagacactattgctttctcgacatttggagcaccattcgaggaagaagacttcgacaatgtgtgatcggatgaaatagatttatcatgatcaccaaacccaggagttggagtagcaatcagagaaggaatgactggaagagaagtgaggttgtaagtcgactttcgagcttgggtcttcgactttctggcagtttttgtcggagcagatgacgaaccaggaactccggtcacaagagcaggtggcccaggtggggtgatcggagaagcagaggcagagccaagagaaggcttcttggacggttgagcatttttagcttttgccatttttcttttgaaaccctagaaaaaaaaattttcactctcaaacttgaagagggttagacttttgaagtgtgaatagtggtgatcatgggtaagtgggaagttgaacatatatagcacttcaaattaaatacccaataatcagaaaaaaaaagaaagtaatttccttaccttgttcaccacgtgaggagagaaaataggaaaccaaaaagatattttaaaaattggacaaaggttaccataaatatccccacaaaatctaagaaattaaaaaccaaaccaaaaccgaaaatgccaccaaaaaaaaacccacaaaataattaattaaataaaaacaagtttcctaaaacaacacaaaaaaataagaccaaattcccaacaaaaataaagaaaacacaatagataaaatgcaataaacacaatagataaaatgcaataaagacatgtttccataaatgaaaaaatagcccaaaaattcgaaaaaatcaaaaaattatgccccatttttcttgatttttttttcaaaaataagccccatattaaattgcaaagaacgaacaaaacaacacacaaagatacataaaaagcaccaatcaacacttaagagcaaaaatagtgtctaagcaaataattaaacataaaaagaatttttaagaaagctcaaattgacaatgtcggtcacacatattttt

SEQ ID NO: 255254 - DNA, 555 bp, Cannabis indica
ttttttttctttttttttttttttctttttcttcttctttcttcttcttctttcgcctcactctctctctcacctcagccccagccccagccccagggacgactccgtccgtcccagtcccaacctctctctttctcgacggcttccatccaagataatgtaaatgcaaaagacccaaaataagaaactgtactgagagaattccattaagaaagaaacttaccatggattttcgtgctctgttatcaaacctactaatgggttcattgttgaatatgaagccacgagttttttaggatcgaactgtggctggagctcttattaaagcttgcataccatggagagttgcagtggcttgcttccttatagtttcactagtcctttcagagctctcagagcttttctagcttgaatattcaaatacccaaacaaaattaattagtatctttcctttcaatccaaacataaaatatatatatatatatatatattgtttgaaagtttgtaactttaagctaagaccatttacccataccctctgaaaacagtttgaat

SEQ ID NO: 255255 - DNA, 506 bp, Cannabis indica
aattatattgtttttatcatccacagcagcgtcgacattcagtttaaaagtaccagtaaggggcggcttccatggtgctggaacagggatgacttgtggaggtggtagcgcttgagtttgagaagcttcaagatgatacttgttgttggctgagtgataattctggcagtagatggatgcaaaagaggctagatcgcttgctggttttgctctttgtccatgaacaatcttgtttctttagctccaaatcgaccaaagtgtacaaaaaatatgttccatttcagatttagaatgaatggaatggagatgcagcagatagttgttggaattaattttaccaactatgattgaggtactgaatgatgtgtgtgggcacttctctctcacaaggaatctcgaaattttctctctctatttctctcttgatttcgtgtgataaaaggcattcaaagacataccaagagagagaggggcagctttatataggaaaaggaagagctcaactt

SEQ ID NO: 255256 - DNA, 501 bp, Cannabis indica
atgtattaggttctgtaaaccatttggtaaaagctttagattcgcgcaatcgttgatgatcaattgtttcaggtttgctatcatgttggaggggactatgggttgatgagaagcaagaaggttagtaatggaatgacaaccaacaatactgagaaattcaggagaattgccatgaattagatctttaggaagggattccaagatcctacaatcatgtatttctagttctttgcttctgttaggaaggtcatcgcttggtaaatgtgtaagaagtggacaaccttcaacagtcaagtattcaagtgacagagagagctttaaggcctgtaagtggggaaggcaatcctgtactcgggaaggattcgagcaaaggacatttccaaaccctcaactctttcaaagacgggagtttgtgcaggctttggggcaactcttctagtaatggacatcctgaaatttccatcctttaaagacttgagagcttgtgcaagccaatcttgt

SEQ ID NO: 255257 - DNA, 676 bp, Cannabis indica
ttttttaaaaaaaaaacattttgctggcgaagtatatttcaccgacaaaactaaaagaaagtttttttggaaagttttgctgatgaagtaagctacgctgacaaaacttttgcaggtaaataaatttggcgcgaaagttttgtcgacaagtgattttaacctcatatcaaggacccctcaactgacacctaattgtcgacggaaggacttatgccggccaatgaagttgtcgacataaaatattttgccagtgatgtaagttgttttgccggcaaaacgccttatgttgatgaatcaaacccaacaacctttgccagcacaaaagctcgctgacaaaataatactgatgatttatgcctagttttccagcgagaaaactcaccatcaaaagttatttctcttgtagtggttcttcatctacaaaagatttttcatacaaaatccaaactcactcttttctttgtacctttctctttctacctctaaatattttctctttctaactctcaactcaatttgatcattctgtttgaaatgataagtgttggtggtatttataggtttaagatcaagattctaaagtcaatggttgcaagaagtgaggttgttaagttagttaggtaataaaaaacttaacccattcgccttttagagagatctcaacgttagcataagt

SEQ ID NO: 255258 - DNA, 519 bp, Cannabis indica
tatttcatagtactaatgtaaggctgacactaaagagatttattaaatataataaataataacgaagataaataaataaattacattttcaacgagaggagtcctgataacccaaggtgtgacagagttgattcttatgttatcctttgcccattcacatgccaagtttttggccaactggttaatagctcctgaatattaaattattggaagagataaatgtattgaaaaattctccaatacaattactaagaaagattatgcagtggattcaattgattttttttatacaacagtagtcatttacttaataaagtgctttaatttaaatagtcacactcacacatgcatatataggtctatcacttttatgttttgtttttttatagtgatactatactatcaaccttttattacaacatcttcgaaaatacattctgaaatattttttttcagaaaatatttatgacaatactcgttatagttacaacattatctctgtaaatttttgaaaatttt

SEQ ID NO: 255259 - DNA, 620 bp, Cannabis indica
tttttagtaattgtaataggtaaccacatcacattagtaattctttaagaaatataagcacttttttattttataatttaaaacaaataataatagaaagatattgttaatttgattgtagacaacttttggctaatgttatacccgaaatttgactatgctccaaaagccgatacgtgtccaacaaaaggaatatgaatcaattctaatgatataataatgttatattattaaatgcagattaaaaaactagttattatacaatgagtaatttgcggcataaatacctaagtttaacttctagttgcaaataaatacctaagtttaacttttgacagttataatacttaagttataattttgaaatttttgtaggtacctagttaaatcctaaaccctaattgaaatactttaaaaggaataagatgactctcgttctcatccaactaaattctaataacctagttttcattctttgtcagacaactagaaaattgagagcctcattttatagctatttcgaaattcatttcttcttcattcaattcgaataacagtgaagagtacatgcccactcataccaagtcaagtactcaatcatagtgtggaagattgtgaag

SEQ ID NO: 255260 - DNA, 2415 bp, Cannabis indica
aactcttcgattttaacagagtagtcgttttcataaagcaactttaaaagctcaaatgctttatctccttgcccattaccaaaaagcagcgatataagatccgttgagagagtgatattttgtctaatttttctctccaacattaacataacaaaactagcagaatcccgagcacatcggttttcaattagctcagcaagtatagcatggaaaacagatgttctagggaaatgggagctcctcaacatcttttctagagtaagctttgcaagaataggtttatccttctgcaagagaccattgattaaagattcgtagatctcagcgtcaggcacaaaatctcttcttaacatcaagactaagagttcatatccagcttcaaaagtaccttccttacaatgccccataatcaaaatcttaaacgatgtcggatcttgagtacctcttctcatcaactgcctaaaaactccctcggcctttatagttttaccatttttacataaatgctcaaacacaaggttataagcagcagcaagaggtttacaaccagcatcatcgagcaaaatttccttctccgataactcatcaaacaattcctccgctctatcatactcccctcgttgacataaactacgaatcaaaacactataagtagctgaatcttgcagaacctttaactccgacatcttcccaaaaaccttcaaggcttcatccaaatttcccgcttggcaatgtttgtgcatcaatgtattgaacgtacatgtatcgggaacaaactcaccatctctcattgttctttccaaaatctcttttatcttatcaagcctctgcgcttcaccgaggcccttgattaaagtattgtatgtaattctattcggtttcaacccttgactagtcatttcctccaaaacaaccaaagcctcatcaatctctcgtttcatacaataccccctaatcaaagttgtataagtaataacatttggattcaaatccaaactcttcttactcatacccttcactacatttcgagcaatatcgactttcccagctctacacaatccatcaaccaatgtattataagtaatgacatccggttcgcattgaaaccgagccatgtctttgaaaaaccgaaaaccctcatcaaccatggagttcatacagaacccattaatcaaaatattgaaagtaaatgcatctggtgtaacaccataagtgctaagcatttcatcaaacaaattcttagccaaattagttctaccacgtttaagcaaaatcgaaaagagattgttaaaactaacaacagaaggagaaataccaagtgatttcatagtagtgaaaagcttaaaagactcctgaaacaacccagctctgccataattcctaatcaagctattaaagaaacgatcttcaagcttaacaaacccattagactttttctcaattgaaagtaaaaaattccttgcagcattcaaatttcgactactacccaaaatttccaacatcaaaaagtatgaatggtcagtatgagagaaacccatttgttgaacccacttgaaaaattgaagagctttagatgggtttttcacaagattgagaatttgaataacagttgtcttggaaaaagagggagagagtttagagagagaagattcaagctcacttgaccatgggtttgagtttatgagtcttgacattgctgtagctttccccttcttattcttggaagatgatgataatgatgatgacttgggtttatcttcatttttgctagggtttatagtttcagaagaagaagaacaatacctgggaatttggagaatagtaaagatagaaactttaaggaaaaaaatgacagaagaaagtgatgaagagagttgagaaacgttgtacctacgaggtaaagcaattgcagagctgtaaatgggagtgaagaggtggtttcgtgtaaccgccattgatatagtccgagtgatgaatttgggggccatgagagagtagctgtgaatgaaagaagctatgaaaattacattacattttgaaataaaaggagaatcagttttgaccacaaatgttatatgtaatattctaactcagaaatcaaccatcaagtgttcgccgtgcgtgcgggtggtgcggtttttgaccatttttttaaatcaactcgtacatgtaatttttctaattttctaaactggttgaactatcaccaaatgattaaactatcacaaatacataaaatttgaacaatacttatcaataataccataagtcttaaaaataaaaatgaaaaaaaattaagtttcaacaatacaataattagtggacttagggttggacattcacatattagacctaaataaatataaaaattagtaatgtttataaatgtgccgtgcggtgtggtttgaaccgcat

SEQ ID NO: 255261 - DNA, 2980 bp, Cannabis indica
actttttaaacaaaaaaaaaaaaaaaaaaaaaaattgaaggatatatatgttatctttaattattcctcaatttttggtagacaaatctaattcaagcaaacatttttatctatataatccaacttttaataagaattttctaaacacatgaatccaatatctttataatcgaattcacaaaaatgaaaacatctactatccgagaattcgaactcaacatttgaacatatctaaaatggtccaaaatttcatcattaacattaattgaatgaacactccaactattatttccaactattatttaaaagaatatataattcatggacactaaaaaataaaattaaaaacaaactagaataattcatcatggaataaattcccaagttttcttaccctaatggttactgaaaaggaataatcacaaatcttgatctagtgttgtatacgatttttttaaaaggaatattgtaatttcctttttatatttgaagataacaaaatggcactaataaaaaaatatagagttttgatatacatacacacataaattataaagaaaaatttacatagaccaaaaatttaataaatacatcaacacagaaattttttcattttattactctttgaacttttttatttacaaaaatacctcttcatgtaaaagtaataaaccatttatttagttattttatagtttatttgtagttgtattatagttgtcttaaggttatttttagttgttttataatttatttataattgatttatagttgtcgtgaggttgatttcttgtttttttttagtttattttttttactttttctgatcaaagtgtatttctataatttttaaactttacaaatgtgtttttataattaaaattttagaccgtaaaattataaatagaacataaaaaaattaaaaattcttcaattataaattatactgaaatttgacacatatttatgtgacaaattatttcatgactttgaggctacaagattatggctcgtggggtgaaggtgtctgtacaaatggggcccacgtagtctagacaggtatcacacgcaagagcttctacagtgaacaagaatgtcagatagacatcgttggacaaagaggatatactccctttggtggtgcgtgcactatcatattctgatataggaacataatctaatttggtggaaccaggcgtcagaaggcaatcacgtcactctggaagaagtttttggagacacctcttggactacctcttcgaatgtatctcaacaatttttcggagggcttcgtttgttctatctcttggaaggttggataggcttccggaagcatagtagccttgtctttggaggcaaggcttttggagtttagttgggctcgggctcaactccaacttggactagacttttatatgccggaagacttgagcctagatttatgtaaactaattatattttgaaaatgtcacgtgtcgtccattcaaaaacataaataacatacatataatcaataaaaacagtattggaataaggataattgatcctaaacattatttttgtatacaattatcatttagtaatattgtttgtgtatggctcacacttttcatgttccctcacaaaatcacggatgtcatgaatttggtaggtataatacaacaaagtacatttaatgttaggtaaagttaatatattttcttactgacaaatcattttttaaaagtaatattgctatgcaattgattttataaactcgattggtatttataccccacataaaatttttaaggtttgaatatatttccaccattttgtcaagaaaaattgaaccagaaaaaaaaaaatggcaagtttaaaatatttttacttttaaaaatgagatttgtaatatgtgttaatagtttgaaaatgagttggtaaccaatccaatgagattgcttacctcgtagttattgggaaaatgagcatttaatttaacttgttaaattttgtttgatagtgaaagtatcacataatttatattgtggctgaatttttaagcttcttgtatatttttaattaatgatagtaattatttttatatgtcatgtatttaatatgtcgtatacaatgagttgtaattttttttatatgatgtagagaagatctcacataaattttcattgtttttaaataattaagatactaaaattaagattcaaataatttattttataatcatataaatatcaaacacatttgaattataattttgatatccttaatttaacttagatatgttagagaatctattataaagtttaacctagattgtatataccaaaataatgaaagaaaacaaacaaaaagcagttgttggttcctgtctatattcttaaaatggcaatgtttgtcctcgtctgccatttgacataaaagcccttgcattcattattattattattattgttattattattattattaattattaggccttagcaaacttcatagttgagtgtactaggatgaatgatgatctggacaaaccagtttcaaaactgcagctttggaaagtttatgttgatagagcctcgaatgaaaagggcattggagcgagaataatcttggtctccccacatggatactagcttcagagtgcccttcacttcaaattcctactctccaacaatgaagtggaacacagagccatgataactggcctacaattagcaaaggaagtagggcttatcatatcaaagtgtacagtgactctcagcttgtagtgaatcaaatattcggagagtatcagaccaaaggtgaaagaatggttgcttacgtgtctcaatctagagaactattaaaacatttcaagagatacaacatctataaagtcctaacggatcataactcatttgtagatacgtttgcaaagttggaaatagatccagatgctgtgcaatatagaatagtgtccattgaccatctagaagcccca

SEQ ID NO: 255262 - DNA, 3256 bp, Cannabis indica
tctctctctcttctttactcccttcaattccttaattgatcgatcgaccccttttacgttctatttttgggatatttatagtattttttgggagaatcactagaaagggatcacttgtctttaagtgtcaaccccttaggggcacaaattcctagtagatacaaaataggagatacatgacctatgtcgtaggtatcttagggattaggtgaatataatcttttatccttccttgatttatgtgagccttcataatagagtcgtcactagactcgtcgattattgtgtaatcgccgtaaaagaggcatacaccatttgtcaaatcctctttatagtaggttttgatacgtttctcccatgcaacattaaatgtaaaatgactgcttgaacgagcttctttttctcccggagatgcattgttatattcccagctcccgaagagtaaaggcgtgctttatgctcctccctgggaggctcactccgtgaggtgcacttctttgtctatgacatagcctaatttttgtgagtggatgctcttgagatctacgtgtcgcatgcagccgctgccacgtattttgggaaaaatttgaggcaacatttaccccccaagtctcatttagtaaagggtaaatgaggcttgtatacggcctccagttaccttataaatatagtggcacgtgcgctaggcgcgtgggttgcatttatgaccatcatcatttgattatttatttctttctgcaggctaacgattggcttcctgtctactgtgcattttaatcctggtgttagagaggcactcgaacaattttaactgcccttttctcctcgttacacccgttcatcccatccgttagatcacaaaatgcaaatcgataccaattcccaccgtacgatggttcctgatcacagctgccttgaaccctttctggcatataaaagccaacactttctttttgttgacttactttcgccattctgccatttcgactcagataacccctttggaaaaattccagaaatcatcgatttcttactgttatttctccgtcgctgccagtccaagttctaccgtcagacgacatcaacttcttgctcaacaccattgtgtaagtttctgggtacactacactttacttttattattcattttcatgttagggaaagacttaggacattatctttgttttaatcgtacttgatttctacggtaagatggtcacggtgaagactgtcgtgtgtcgtagttctttgcatgcttactgtcgtttcccttttggattttgaaaacgatttcttgacttagggaccgtcgagagtatgaagtgattttcatgcttttgtcccttttttttctttttcttttttcattgccttttggatatttgcacccgatgtttgcctaagagaactctggatttcctatctttggcagacatccggagggggcatccttccaacggttaggggaccccatttccttcttttattttagggtttggtttgggggctaactgctggatttctttttcagatgagtgaagttctccgcgatcttcatgaacacggtttcttcggctttgactaagagatttcagtactttatcaaacctaaagcatttctacccctacttcaatcggagccaaagcttcagataaagtttccaagacattggccaccttggaggaggtgatgaaaggaccagtcgtccatgagaaatacacctgtcggtccactggttgggaggcggacgagttacactcaacctgacctgcgctcaccaactggagaagatagttacggttgtcgggatcaagtcttctgcggccggagtttttcaccgtctccctagggacaaagagatgttgaaccgtaactatggcgacttcggggcttggagttaaacccacttgatgtttggggccatgctaccgctccaagactattttatatatttttttagtttttgttggccttgcgccgtaccaacttatcccccaagcctaccgcctgctttcaggcttgtatattttttacgtttccaggaattgggccccgcccagtccgactgaaattttatatttttatgaactcttatctgtccctaagaaggaagacaaacttaaagatggatttttcaagctccagacccattctgccaacgagggtctggtgccttacaacttttagaataatgtgaaggagtaccgtcagtgatttttcttttcttctggcttcaaagtcgtcaagcgtccggagctgctcactgagtgagttagggcccttcctatgcaccgcaccgcccctacccaactcttccttcaacacgcgaaagttttcgccaactatgacaaggatggaatgttggagacttggtcacgactgctaactacaaaatggctaagttgatttcggagggccagtaagtagacgacttcaacttatccaaagttctctgccctcacgtccaaaatgctgagactgaaaaggcgcttcgggacgatatcatcgcctccgcagaagataaatacaagaaatatctcttcaggagtgaataagatttagcctacatcaaagcccaagctgcttgggaggatcctccgggtagaagcggggaaggaacaggcgacctctcggcctaaatttcctttgccagttcctaacattggggctcctgatgctagaacttctggaacttgtaagtctccattgattgttcatcacgttccttctattcaggattattctgcttgtaggccggtggaatttgatgaacggttgtataaatttcaaatgccccattcacgatggggtaataacgccaagagtttttatttttccaaccttagtcattttttaagccagtcccggatgggttctggaactctcgtacccatcctcttggatcactccgccaatctgtcttctagttggttcctcccctcggatagctttctaggggaagacaacaccagccttttaatatatacctttgctagggtagaattagattttcagggtaggattagtctcattatattattattgcatgcatgattttttggcgatgttttgacctctttgtttatttctttgagtagcaaagccaatggaggacctcctgagtgtcctcgctcgtacctacagtcctgagtccggcctgcccgagtcacgcgagatagtggtgacccccgagagatattctgctggcgttcctgaggaccaagtcgtcctaattgacgaggaagaggaagaagg

SEQ ID NO: 255263 - DNA, 1134 bp, Cannabis indica
acaaccacaaataccgactatttacacgccagagttaaacactgtgatgatataaatgcttgaggccacacaagagtataacgaccaagtttataaatccaaagtgctagtacaagtgttcttccttggatcgcaaaaattaaaaagaaaagaaagcatcatcaattatagaaagctctctggaagtaggacgttgcatccagaagagattttataattggtagaagaaaaccctctcggagtaggacgttgccccagttgtggtattctttcagtggctaaactcctcctaagtatgggatactgtacttagcttaagtttagtccaatctatatttttcttcctccctcggatttttttcttaaacctttaacaaggttctatgagttgaaatcatcaaactaggttcttcaacaatctgtgatttcacccctatacaaaagatctggcgagtttttctacactactctttgataatgattcatttcacttatgatcataaaaataaacttatgcttgagcaccaagcacacaatcaataacacccactacatctcaatagtggtctatcttgttgacagtagatagcttaaacatacaaactttcagagttttttcaccccagttactgagagtattataaagctggggggcaagagcagttaggctcagatagtatcaatgaaatttcaaatataaatggcgtgatggttaatgatcaagcgtcactaaatattataactaagacaaaccctaaaaagagtgggtcattccctaagagatccgaagccatgcaagcagctcatgtattgtttcaagtgagccaacatcgctcactgtggtaaaatcagattaccactcacagtcaaaattgcaacgtggaaaacatcactatgactaccttcatagtggtcgacattaaatctcctgggaaggtcaacacccaatgacctatgagccatctcacctatctaccacctctctgtcaagttctcgacaacaactagtatcaattgtcttcttggaaaccaaagagtagcatgcgaatattacaacaaatcattaacattcaccaagaagacctcatttgttgtgctagcagtgaaggggaacctcatccactatcaagacaa

SEQ ID NO: 255264 - DNA, 874 bp, Cannabis indica
atacatgttagtttaatcaattatagtaaaatttaacaaattttggaattacttgtttacaaaagagaacacagagagtaaagagaatgaaagaaagagattgaatattattggttgaaaagcaagaagtacaaagtgtttacaacacaattttgttgcagaaagttaaaaatagcaacaaactaactaattcttgacagctcactaactaccataacagaatcaaagctagccaatcttgatactccctctcaagatagagtgtagatatttatcaaacccatcttgtcctttagatagctaaattgtgcaggcattaaagccttggtaaaaatgtcagcaagctgttcttttctagaaatgtgagcaatcttgattaatccttcttgcaccttctctctaatcaagtgacaatcaatctctatatgttttgtactctcatagaacactggattagcaacaatatgttgtgctgctctgttatcacaatgcatgataacaggtcctttatgcttgattttcagttccttgagtaggacaatagctaaataatttctgcagtggtattagccattaccctatattcagcctcagcggatgacctagacatagtgtgttgtttcttgctattctatgaaaccagtgagctcccaaggatatgcaaaaaccagcagttgatcttcttgtgtcagggcaagttgcccaatccgagtcagtataagcttcgaattcgccttggatttggcagaaaagaaggataccctgcactggtgtgcctttgatgtactacaacactctttgtgcagcaatcatatgtgatgtccttggtgtatttaagaactggctcagtctatttactgagaatgacagatct

SEQ ID NO: 255265 - DNA, 890 bp, Cannabis indica
tgggaagaataaataagtgttgtattttctttttaacaataaataagaattgtattgaatataaatggtttacttattttattagtataaggttttctaaaaaagtgttcaaaaaaattatgaggacttaatcccaaaagcagaaaatatcatactaatgtgggagttaaggcgttgggcagcataataattggtaacatttttattttttaattttttaatcacaaaaataaaagtagaatttttatttttataaattttgttttcaaaaataaaatgtattctataactacttttgttatttaattttaaaaataaaaaaattaaagtatgttctgtaatgttcatttttatttttatttttttattttatttaagtttgggtctgggatcggggccaggtccaggttcggggcgtggatcgagtttggcctagagttcgggatcagggtctaggtccgggatcggtgttctataaccacttttgttattcaatattaaacataaaaaataaaagtgtgttttataatcttcatttttataccttttttgattttatttaagtaggattcgggattgggtctaggacggggtcgagtcaggggtctgggatctagagccggggtttgggaccagggttcgggtctggggtccagggtccaggtccaggtctagggtctgggaccgaggctggatcagagcaccgaccgggtttggggctggagtctgggtctagggtcaaggtgtgggttcaggtctagggtcaggggtcgggccgaggtctgggtctgagttcggggtcaaagtctgggtcttggtctgggtccttgaatttgtaattaatttagtgagtttttcattattttttaatttattagctttattgtaat

SEQ ID NO: 255266 - DNA, 497 bp, Cannabis indica
gaaaatatattatttatttgatttattaatttattatcttaataaattatttagtattgcatccgttttatgaagaaaaaattgtttaaaaaattaacttcaaatttcttaataaaaaaaaaaccttctgcaattgagtatttatttttttcgttttttttttaggtggtcgttttgtaacatttttgttttcaaattttttaatcacaaaaataaaagtaatatttttgttttaaaaattttgatttagaaaaacaaaaatgtgttctataactactttttttttcaattttaaaaataaaaaataaaagtgtgttttgtaaattttattttcatttttcatttgttgattttatttaagtcgggtccgaggtcaggactaggccgggtccaagtccggggttggggtcgtgttcggtttttaaggtctaagttagggtcggagtctaaaatattgattaaaaaacggtttaaaaaaatattgaaagttttttttt

SEQ ID NO: 255267 - DNA, 627 bp, Cannabis indica
aaatctagattatattgaaatgagttttatttagggcataaaacccaacataggtttgggtttgggttcgagtctaggtatgggtcccaaatccaaacactgactacggatcatttccaagccccaagtccagatctggatcacaatctctggtcccagtttacgtccactttgggttccaggtcccaggtcccgatccatgtaataggttagggtctgggtctaggtatgagttgggatctaggtttgggtcccgattcgggtctagctcttcgttggagtctggcacctggtctggttacggttctgggtctaggtttaagtctggttacggttctaggtctacgtccaagttctggttacggttctagtcccgttcccgggtccccgtctactttcggtttcggttcaaatttttggtcacagggtacggattcgggtccaagtttgggtttgggactggtttttgtccgagtcttagttcgggtcccggtcttgttctagttcgggtcccgggtcttgggatgggtcctatgtttaggattgcgtccgagttcagggttgtgtcccgatggtcaagtccttgtttcagggtttagggttgggtcccgtctctcaagtttgggg

SEQ ID NO: 255268 - DNA, 721 bp, Cannabis indica
tcagcagctggttttttagccttatggacatcaatcaagctgaggtggttgtcgatgccacaattatttcattgagcatttggaagactcgaaacgaagtcttttggccgaacaaaaccagtactgcgttgacagcagttcagtcggcaagaaaggtccttgatcaatggcgagttgcaaacaagaacacagcaacttcttttgctactggtgttttttctcacagcaacatttggcgcaaaccaatgggtggaaagatcaaggtaaatgctgacggtgctatctttgaagctcaacaaatgtttggttttggttgtgtggcgcgtgatcatgcgggtcagctcttggaagcaatttcggaatccaaaattggagtggtgttgcctgaaattgccgaaattgttagtatgaaggaaacattaagttgtattaagaggaaagggtgggaggaagtgatcatcgagacagatttgttgattgttgttcaagcacttaatagctcagttcatatgacttcatactttggtttgttggtggaggattgtcgtttgattttatctactttaaagaatgttttaatttcttttgtgtatcgatctgctaacaaggctgaccattgtcttgctcggacgtcttgttctttgtgaggttgtttgtttaataagcggaatgctctatctttttgaagaacattgtaatggctgaggctattccttaataa

SEQ ID NO: 255269 - DNA, 1609 bp, Cannabis indica
tagggatttctttgatgactcacaatgaaaaagctgaatttgttaagtgttggcattctgagcggattgctcactgctcggtctagaggacttcgtctgagaaattgtatgagatgccatgttcggtctgtgtcttgcgagcaggtacccagagtcgatgccacgtcagagtgcaaaaattgtgataacaataattttgtttaccttggagatacaaagcggcatatcttaataatttaacagactaggaagccaaagaaaaccttaaggtaaccaatcccagaaccccaactgactagagcactgagacctcgaccccttctgtctagaatatcgaacctctgaccttttctgaccaagctgatcaatacaaggagcccgtgacccatgcagtatgaaacattattttcttttttctttttatatctgttcgtcccaccggcctttattaaagcaaaatgaccggccaagcggtctttaaatttggtaatacctcattttattttgagacaactggctgacctggcagtctttaatcctgggtttatatcgttctttgttatctttttaaatgaatgttttcccttattttggtagttattcgtgcaaactgttatgttttttttgagcttgttactttcttttacagatgctttgtactagtatagctgccccccaagtgaccaagcagacttatgactcttggtcacttgtatttcacaagtatggttttcgtttgtttggctcattgggtcgagtagaccttttgtacgcattaatggtaaattcataacttcctaatataattaacacaattagaagagaaataaacatctttattcatttatttttaagaacagttttgttaccgtagtaacttacatttatgaaagctattacatgatccaactgatctttagctaaatttaaacataaaacaattgcacttaaagaaaaaatagtactttggaatgtggtcattcgacctaagtacataattatttaatcaaaacgtttgggcgggatccgccccgaaggcaaccttcttaaaagtaaatgttcttgcattgtgtacttaaggtgctcatcgaaccttgtacatttactggtaggtttcctcaaagtttcaacattccaataccttggtgctagaacgagtttcatatttttatcataccgcccaagcttatatgcccccgattctagaacttcgacaaccagatatagtacttcccaattatgtctgagcacaccagtcgtgcatttttttgtgttcaggaacactcttttaaggaccatatctctcacaaagaattcccttgccctcacttgcttgttgaagtatcgagcgaccttttatttatatgctactaactttaggttttctaaggctcgtttttcttcaattttgacaagtgattctgctaggagagcatgattagcttcttgatcgtaagtcaatcttctgtgggacggaggttctaattctacgagcaatattgtaacgccctaacatttaggcacgctacccaagatgattaagaaaccttaatcctccaaaagggattactaataaactaagcgtcgaaattaaacttttaacgaaaac

SEQ ID NO: 255270 - DNA, 549 bp, Cannabis indica
gaataaaataattaacatttaaacaagctgaatgtataagtcagtccaactgaattaaaatcacttagaagtaataggggttccttaaaaaaagaatactgtctgtacttataagaagacccttataatttaaagctaccttaactaccctatgctgagtttgttagtttccttttgtcttcttaggggttttcaggaattgtgttgtctccagtttctgataacagaaacctatgattaattataagaatgtcatatctaaatttggagggaattgacatttctaagcacatacaactcattattgttgtgctcagtttagtacctgaaagtaacaaattcacgtttatgcgctacttctatgaacatactggatcagttatttcaatttaataaaaaagaatgcttgagaaagatactaatcgatgtcatagttgccaaatttaaacgaattttgaagtcctaagctttgtgttagcctctaaagagagatctgaagttcaaggcatttgagcatttgaaagaataaaccaagaaacatggactagc

SEQ ID NO: 255271 - DNA, 529 bp, Cannabis indica
gcttgtccaacggctcatgggctcgcacaatgtctcatgaggtcgcacaatagctcatggactcgcacaatggctcaccgccttgcacattggcacatgggctctcacacccagttgtcacaatttagcggtcttagtatttttatcataaatatcttgatatattttgaaatcagactgattcaaaatgtgttggaaagatgagaaagagtctatgaattttatatttatgacaagatctaattctcaatgcatcattatgaaaattccccaataactataacttagtaagttaatcttactaactctgcttgtgagttattatgggattgacctcttcgagttgcgtggatataccctgagatttgcaagcattgattctcgagattaacgagccctggaccataagaattaattcagtcttttttcggccgactcataaagtcgatgtctctgtactaagtgtttacttaatcttaaaaatcacttccatcaattttcgggattaaaatttctcctctctctctct

SEQ ID NO: 255272 - DNA, 1645 bp, Cannabis indica
gaattatgggagaagtggtattatttctctttttcattatatgaggaatgctaaagtgtactttatagtatttagtatttttaaagtgtatattattgttcctataattaatattaagttttatttattttaatttaataaaaattattaatcaattataaattattataggataatgcttcaaaggtattgaaaatgactttatgtagtaggttttttttttttttttttattttttttttttataattatttgtcaaaaaattagtaaatattgatctgagaaaatagatatgcacacaaaaaaaatttacattgttttttgactttgccatttgaaattttttgaattcaccctctatttttcgtttaaaaaaaaaatcaaaactcttagttttagttatagtttatgttctttgataaacaacttaagaatttttaaagagagagagggaggagaaaaaccgagaagtgaatgattagttttttttttttttgtaaagaaaataatagtatttttaacaaataattaatttatatatagtaaaaaaaaaaacaagaaaataatatttaatgaacataaaatataataataatgacacacaattaaaaaaaaatgactattaaaatttttttaatacttctactactcatgaaacattatctaatatcatattatacgtaaaagtgttagatattttggtgggcctaccctgttattttacatttaaaaaaaatgatcatcacatttaaaaaatgtccccaatgcattgttaaaagaaccaacattttttttttatataaaaaaagagccaataaaaattaacttaaatttatatgaaagaaactatgcatgttcaaaaattaccaattgaaaaaccgtgtttttgcaaatgtcagttgtatataagaaaatataaaaactgtaagcgtttgcagcagcagaaagtaattctgctacagcaaaactgaacaggcagaatataaaatatttgcagaaaaataaataacttgacacaagagatttatacgtggtatcagtgttctcccgaacactcctagtccacggggccacgcccagagaatgaaatcaattaataaagtatcaaaattacaaagacaattgacttaaacaagtttagactccctctaaagtattgccgcaatcctttgtaatccactttatgaatctgacttcttgaaacaccttcaagcccgaactcccttcgtctttgaagtgtgagtgcttacttcctcccgaagtaaggcttcaacaagtcttctcccgaagaccaagtgcttacttcctcccgaagtaaggctttatcaagtcttctcccgaagaccaatctcttgttcagtcaagtagttcttcacaacctctaggatagagtaagaacagaaatagaacaactagaacctagatgaacaactaggctctcacaaaacaaagaaacactctcttctctcaaaagataaatgcaaaaaatgaataatggaagaggtaattcgaatggttgctctctaggctctatttatagatcatagaaaccaaagaggcaaccacaagttcgaattagcagctgtacaaaaactttccaaaagaaacacgatctgctacatcagattcggatgctgacgcgacg

SEQ ID NO: 255273 - DNA, 4846 bp, Cannabis indica
tctctctctctctctctctggccaactataggctgaccaacacccaaagttgtgcaacaccctaggctgtccaacagttgagatctgccgactgattcatactttataattctaaagggtgttataacagatcccacctatagtgatctggatagtatttctctcaatataaatacaactaaaaggggagtaggtcattacccgctatcacaagggggccaaacctctataacaaatccctgtgtttattgttttttttattttgtttgtgtaacatgtggcaagcattagatttatatgacctagctatcagttgattattttttgaggtcaacagtttggtgttttcattgagatcgtgaatattgtacctaattaaatgccatggttaacacgagaagaattcttgtcgccccatctacatctttaggtctccctcaagacccatagactataggtctagatactcaggttccagtcacaactaaaatcccaatgaatgctgtagatgtggtgaatcctgtaaccacaaccagtgccacgggtctggcttcctctagacagagctatagtgacttgctaggtcttgtaccccttgatctgctaggtcctacaccccatgtcctaccagatcctgcagcccttgacgtaataggtcctgcaggtcttgacctgccaaatcctacacaccttgggcagccaaacctcccttataggtctattggcgaccaagattgcctggcaggactctatagttgctagactaatagagtaatcctagtggatccaagttgtaggccgatgcctccaagagtggacccaccattggcgcctccaattgaaggaagaatccctaggggcaccccctaagaacaataaccgggttttgcccccagtattatgcgggagagacgagaccacgaattggtgagcctcatctaggcttgggagaagaccttgagttggctagactcagggaagttgtgggccgtgcaggcctaattgaagaaccacacgttgctaagtgcgatttatttcctcagtagagacgtaaattccttgaagaaccatgcactaatgattgcgatgtactcgctcagtagagatgcaaattcctgagatggatggatgactaagagtaaatcctttgatctcaccaagaaaagttagatcttgcaacagagaggcaatctaataaggcggttcaaccaaagaaccgatggaagaggctaggatctcatcaaagatccacttcaaggaagacttgttgatatatcaaggagggtctatcgatatgttgatcaacacagttctccatgaactaggatagatcttcccttgctagatggaggacaaacctttcctcaaaggccaaacggtgaaaactgccagatcccagtaaccagcagcatggggggccaaccaggaatcttaggctcaacaagagccccctctatccatcctgtggccgacaaaccaccactaggagcccccatggatggctagactcctccagaagaccccatggctggccaaactcctctagaagtccctatggtcgtccagagaagagcattccctccccaagggagggagtgacccgaaggtcaattttcaactgacgagggcaaggagcgagtggaaactcccaaaataataatttgagaagtgaagttcatcacttcagacagttagattcaccaaactccagcaattagtgtgatctaccttatgtcaatgcataagctccaccagtcaggaagagtagtgtgggcggtcaggccctgcctagcttagggatggccgaccatgtataagaacaagactcaaggctagccggccatgagtataccctctcccaaggtatggctagccaggctttatacaatccaaggctacaactcaaccaaagaaggccaatcaaccaggcccctacagtagtagatccttttatgcaagcatagttggatcaaatacgaggcatgctcaagggcctagctggtccaaagcccttagaacttgagctagactgggcaaggggatcaccattctcggcatacatcaatgccttactcttgcccaaatttaagatgccgacttagaagatgtacacgggaagagaagaccctcttctacacctgaagtactttgagatccaaacagatctcctacaagtacatggagatgtgcaatgttgaatctttctggaaactctagctgaaattgctcaacaatggtatttcaagctggccccaggaagatttaattcttgggaagagctctcctgagagttctttattcagttctctgcttcaagaaaagtacctgcacaactggaggatcttgttgaaataaagaaaagacaagatgaacctttgaaggactatattcaacgattcatggctaggccaccaaggtcacaggcctgacagaagaaggtcggtatacgaccatacttggaggcatccttccgttgagtgtcttttgtaaagatatcagaaggaccttaacgagcaatatgaaggagtttcttgagcgagttgatggctttatagagctggaagaagctgttcggcaagcccagaaaagagagaaggataatgacgaacaaacacaaggcctcataacaccccaaacactgtccaacatgccgacaaccatagacgatctctatcgattctcaaacaatgagaatggtggaggcaagcacaacaacaatggctctaaccaaaataatggcaaaaaagggaaatttaacgatccctttatgccatgaagtctatggaagaaggagtagaagtgggtatgcttcactcttctatcaaaactcccaaagaaaggcatgcccagacatcttagcaggcaagtcagcaacagacagacagaaggctggcctccatccaaagtctggccttcgactccgaaggctggcctccatcaaagaaggttggcctccatcatagaaggctggcctccatctccgaagtctggtctccatcacaaaagtttggcctccatctccaaaggttggcctccatctttggccagacgtatagttaggtaccaccaattctgcccaaacctccagtggcagaatacttagaggacgtcattgacggaccccatattgtaggtgagaccaagaaagccagagagcgctatgctcagacactccatcacgagcccaaaaattacttcttagtaggcaaagaatgaggctctaagcaaccaatgcttggagagcccatggtctctttcttaaaaagaagatcgtgtccaagagagtttctcgcacaatgatcccattgtcattaccgaacaaatcaggaatataactgcaacaagatacatggtggacaatggatcctcccttaacattcttttcaaaatcaacacatgaaaagatgaggctctaactcgcttacttggtgccctgcagtcaagtgatgtatggcctctctggccaaagcatcacactcattgagtatatcagattaccccttagtgttagagaaaatccaaccactagagctctgatggtgcagttcttcataatcaacgttctctggccttccaacgtcatgatgggctgaccaaccctatgcaactagaaggcagtagtacccatctaccatctttgcctaaatttcccaacaaggcatgaggtggatgtcaagaggagatcaacaatctgctcatcacaacttggccttgtgcaaagccaagaaaaagaagaggcacccaccaaatcaggagcatacaagcttcgtgatacacttaggcctgtgctgctacaaagtgatgcccctcagtgctgaagaatgcaggggccacacatcagaagcttatgaaaaaaatgttcaatgatcttatcagccgcaacatgaaggtgtgcgtggacgatgtgcttgtcaaagtctaaaagggcttgggggcatatggaggaccgacaaaaaatttcaaacatcctctgcaactacaacatgaagaagctcaaaccttgacaagatccaagcccttttgaatatgaagttgcccacaacaaccaaggaagtacaaagaaaaacaggatacactgctgtactatgcagatttgcgtctaagtatgcagataaatgtgtacccttcttcaacatgaagcagaagcaacaacaaatttgagtggataaaggaatgtgaaaccacattctaggagctgaagaaacagtttagctcagccacttatgttgcctaatgccctagacaaaaaagaactaggtgtgcacctagcagtcatagaagatgctgcgagtgctgccctcacaagagaagaagatagtgtacaacaccctgtatactacaccaacaagagaccgatcaatactaagtccgttcccactcatggagaagctaaccgacatcatgttcttggcttccagaaagctaaggccatacttccagatacaccatataaaagtgtacaccgatcagcagttgcggcaggttctacagaaacctagagtatcaggccaactactcacgtgaaccattgagactcggccaacataaaagcacctcatagctatgcatggccaccaaaggccaagctctcaccagcttcatggctaatcatagaagcatatctgcccaaatctctttgagtttaggagaaaagtaggagccaaagaataagcgagaataagagcccaagaggtgcattgaccacctgcctgatgcaagcatggcctccaaggcaccaggggcaactgatgcacgaggtaacaaggtcatttacaaagcttctaacaatgaggctgaacatgaagctctgaatgttggctctaggctagcacatgaagtgcgggct

SEQ ID NO: 255274 - DNA, 607 bp, Cannabis indica
caaagaaaaacaacagtaagcatgcaaataaaacaacatatgacagtggtcatctgacgccccctttttggggaggcaccaccatggcctctgccataaccactgtatcacagaaatcaagcgtagctaaatgagaatgtcaccattcttatttttccctaacatgcagaaaaagcaaagaaaatgtgtacagaggcctacacaaagatgataagcaagaagttgatggcatacggtgataaagtttggtctggcaacggcgaaggagcagcagtaggaagtcggaggtttctaaaaattttcaaatgtgttggttgggttgaaaatcgcaaaatggttaaagtaacccaacaaaggaaaagtgttggcttttataggccaaaaagggtgcaaggcagttgtgatcagacaccatcgtacggtgagaatttgtagtgattcgaattctgtgatccaacagatggggtgaacaggtgtgaagaggagaaaggacggtcaaaacacttgagtacctctctgacatcaacactaatgcaaaaatctatcaatggacgggaaatgaatcattgcctggaaagaaaaaaaaccgaatcaatgatagcgaatc

SEQ ID NO: 255275 - DNA, 669 bp, Cannabis indica
ttcatctcttttatcacagcaagcgcatgagcacaccataattcatcaatttggaatcgcttgcaactgccatgttttctcctttaaattgatcacccatgatcttgttaggtctaccacttcgaacatgctctcgtttattggctttacctgcaaattaggtcaattaatcaattgtcaatctgtacaggaaactaaaaaacaactattaggaaactgtaatgcaacttaaagtttaaagagattttacattttctgtcaatgagtccacaaagttgttgactagcttcttctctgttgtaggtgttaaaaatgttgtggttttctgtgcctttttcctgtctgtgtatgtccattgttgtatcaaagctctcaatgactccattagtgttgtgattggtagttctctagctcctaagtttgctgcatttagagattcagcaatgtttgaagtcatagttgaatacctgttgtgtttgctgtggttcttgaccatttatggtatctaacttattgtaaatatggtctaacacgaatgtccaagctgtccagctcgctcatacggtattcaaatttcctctctatgtatgctcttgccgttgcgaagaatggttcatcgagcttggttgcattcttcttgaaggttgctttcaggttgcttaacaggtg

SEQ ID NO: 255276 - DNA, 505 bp, Cannabis indica
taaaccaagaaatgccgttagatatgcacttttaatatatcaagatattctttgatgataataaaaaataatataatatcgttatagatttgtgcaaatatttcgtgaagtaaatattttatatttattaataatattgtattcatataaatacaactaagaatctttgaaataattattaatgatgcaattgaatagtgtgttttgaatcactacaagaaatagatttttatcccactttttatatttgagaaaaataaaaaaatgggatgaaaaatatattggaataaacacttttttattagcacttaagagatgaaaatagatacattttaaggacaagggttatgtttggttcagccttaaaaaattatacaacaaaaaatgagttcaagatgagttttttaatgaccaaccaaatattgacattttatcccactttagaacaagggccttgtttggttggttctaaaaaaatacaatttcaatcatttacctcttcttt

SEQ ID NO: 255277 - DNA, 1067 bp, Cannabis indica
attaattaagttagtttgtagaccaaaacaacaatgctctcaactcctacaaatttgttttgccagaccttgtcattcctagcattccaaagtgcctaataggccgccacaagcacgcaagattggtctgtattcaacgctgtaaaccgctccatacaccagtcaaggaaggacatttgctgctgcaacaaagtgcctatccccacacggttccaaacagcagcaacagctggacaagaaacaagggcatgaagagtggttcggcatccatactgcatataggttaggtcgaaataacgtttactttttttgacagcagctgagacattgtaggaaggcaacctttagccgcacgccacactagatttttcattttcggaggggttttaagttgccataacttcttccaaaacttatcttcagccaagacatcaagattgaagtcaccactaagttgttgaagcaatttgtaagcgctcctgactgtgtacatcccagatgaatccttcaaccaagtaagaacatcttcaccaggccaagattgaaagggaatactctgcaccagttgaacatcacgaggcaccagcaagtcctctacgatagtagtttcccaccccgtaccatccatagtgagcaaattacatactttaacattatagagactaggatggttggatataatcgaggggttttcttcatctggcagccaaggttcccccaaaatagatttgctttttccatcaccataacccatctcaagccttgtttcactagtgactgagcttccaaaatactacgccaaacgaagcttggatttggaccaatagtagccgtgaggaatgaaccatggggaaaatatctggctttaaacacacgggagacaagagaatcatgatttgccataagccgccacccttgtttacccaaaagagaaagattaaaatcttgaaggttgcgaaaacccataccacccttatttttgtgaccacaaagacgctttcaagacatccaatgaatactcgaaggagaattactaaaggactgccaccaatactttgacatcatgc

SEQ ID NO: 255278 - DNA, 883 bp, Cannabis indica
aatactctaatttttttagtttttaaattattatagaaaatctaaagacttattttaaaaaaaaaaatgaagctcggtttggtcggtttaaaccaatcaaaccttggattaaaacggtcggtttttttatatttatataatggtcggtcggttttcgaattataaacatgaaaaccaaaaccaaattttggatttattttgtgtaaaaaattgaccaaaccgaccgttgctcacccctagtcgatactcttgaataagatcccatatagtcttaagaggagtgaaatagttagtgatactacttgttccttgtgcaagagactgctttgttcttatggcttcaaaaactcgaggagcattcttctgattgaatcgctcttcaagatttgtccagattgttgtggcattttccatatacatgatgctctcagctatctcattcgacacagcatgaagaattcaagatatcacactgtactgttacatcgattccatagctcaaagtcatcatcgtctttgttaggttctggaagtttgccattagcgaatatgcgttcctcgcaattaacgctattgtcgtggctcgatgccacaagctgtagttttcacaactagttaggatctttggaaccaagctagctccggatgatcactattagactgaaaaaatggattcctagcatcaccagagaacgatcggccaccaggatccagagccgaaaaacgatttgaagtctctgtggagcttcgagtttgaactccttcacctctagccatgaagatgaagatcaagggaacgagaatggaatttacacagagattagctcggataccattttggctaagtaaaccagaaagaaagagagaagagaaagaagaaaac

SEQ ID NO: 255279 - DNA, 655 bp, Cannabis indica
atggcccgattttggtggaagacatcttctagtaaaggcaaaggtattatttggaggtcttgggatcgtatggctgctcataaatatgatggtggcatgggttttcgacacttgcatgatttcaacattgccatgctcgctaaacaaggttggcgtctactttgcaattcagatactcttgatgcaaaagtctataaagctagatacttttcccactctgatttcttgttagcagagctaggaagtaacccaacctgtctagagaggtatttggactacccaatctctactccattcgggtgtcagaagaataatcggatcaggggacacagtaagcttactaaacaacccgtggctacctgtacaggataacccatatgtttcaacaatacaccctggtttaatgaaccaacatgttagctccctttttcatgtgcattgccgctcttgggactatgaccttgtacgagatatgttcaataatcgaaattttaatattattttgggcatcccactaagctcaaatatctcaattgatacatggtcttgggagggggaaagaacgggcgagttctcgatcaaaagtacttataacatgctccaataacaaaagcgtaccgaagagatggtttcaaactcagacttctggcggcaa

SEQ ID NO: 255280 - DNA, 616 bp, Cannabis indica
ttcaaagcttcacaagaagacggcgtagccatgcaaaaaaagaaatgctatcatctgcaaacaacagatgagtgagtgaaggagcagtgcgagagatagcaacacccttaagggccccttgacgctgagaatgatgaaggagtgcagagagtccttcagaacagaggataaaaaggtaaggagaaagaggatctcattgccttaaacctctggtaggagagactttgccacaaacttcaccattaacagagaaagatatagtagcagtggttaggcatttcatgatattagaaacaaacttaacagggaagttaaaatggtacataagactttgaagaaagtcccagtcaaccctatcaaaagctttggacatatcaagcttaagggtcgcccaaccaactttcccattcttcctattgttaatggcatgaactacctcattggcaagaagtatattatcaaagatgatacgacccgagataaaagcgctttgattcggggaaattattttatccaaaacaacctttagtcgatttgcaagaatttttgagataactttgtaaaaggtggtacaaagactaataggtctaaaatccttaagagaatgagcacgttg

SEQ ID NO: 255281 - DNA, 525 bp, Cannabis indica
aaaataaaaataattataaatttcacgtaaaccgtggtttcgaactaagccaaaccaaaccgtttggtttctaatattcaaaaaaccgttatattggtttggttcaaaaactatgaaaatctgaaccaaatcaatccgtgaacaaccctaattcaaataagcaattagacgattggaagtcacaatccaataatgaaaatttacctggtctttgtttaattaattagttatgagtgcattaaagtgtctagcaccagatcttttttattaataaattataaacttcattataatattttctcaagatgaccccaacaactagctatgatatttaatttatagttttagtagtgtaatttgcaattcattagcaatattttgtaaaaaaatattaaattatataaaatttgatattaatttcactaataacggcataatacaggaaaaaaaaaaattattttacaaatatacaaaaactacaaaaaaaattataaaaataacggtttcacgaaattttaaacattt

SEQ ID NO: 255282 - DNA, 1489 bp, Cannabis indica
aaatatatatttattttttaaaaaatacaagtatatgaaagacaatatataatattactcttaaaattttatatttattttattgttgttaatattaataataattaataataaccataacgttaataatagtaacaattaaaaatctaatttttttttgtttattattctttaagcatagaaaaaaataaaatatattttatcctctaaaataaaaatatgaaaaagatttactttaaaaaaaaacgaaaaaaaaaaaaaaaagaagaatatgaaaagattaatgattgtactttttttttcgtttgaaataattaatgatgtacattttgacacacattacactcgtactcttaaagacacaaaatattattattattattataattattgagaaaaaaaaagacacaaattattaacatttacaaatttatgttttaattatcatgaattttctagcttttaaatgttccatcgatagcaataaacttatgctagataattgaatattacaatgttcaccatgaatcatatgaagttacttaaaatcatgaatagtagtttgcattaagtttttattatgtataattatagaatttgtagtttttttaatacatgatttcataactcttagacttggtttggcacacactatttgaaatcaattttaaagagtttcatcttataggaatgactaatacaaaaatgagtttttgcttcagaaagatttatttgtcacaaacatttattttactcaatgaaaaaaaaaaacattttaatttggaaagatgttatttatcacccaattctaagtgaagtatgaatatgtgtgatatgataattattaataatgcattttttttcataaattaatgtaattttagcttaatatagatttttacatttgtttaagatacaggatataagatttttaatgtaagtttcctagtatacatgtaactgattcttaattttacaatcataaatgattaatgacctcacaatttaataaaataataagggttgtaatttcaattagaatcttaaaataatttataattttttcatactattggttgtaatcattatttttagaggatttttcatgaatatgggattttttgttgccatttacttttttatggtagaaaaaaataaatgaaaaagatatggaaaaaaaattaattaaatggaaaaatatgggaatccaaaaaacatataaatatgcttaaaatggaaaaacccatactttccaaattgaaaacataacagaaaccattcacttcgatctctctctccctaatctctgcgcttttctctctgatcatctcgttcggaattgaacaatcaccagccgcgattgatcactgcaattcgatctgcaaactgaactcaaacgcaaagatcagtcgcctccgatcgtcttctccaaaaccagcaacgatcgccgcctctgatcatcttctccagctccggacagttcttcaac

SEQ ID NO: 255283 - DNA, 510 bp, Cannabis indica
accgacggtggcggcagacggacagtgggcagagtcggaggcgcggctgggtttcgaaatgggtctgctagggttttaaatggggggacgacgcgtgaaataatgaagtaggcttaagcaaatatattaacctcagattttaaccgaagcaaaaaagattggcttcaattttgcactgatgcaaaatgcaaaaggcaattttaaaattgccacattttacttcggttatactttttgcgtcagggtacgacccgatgctaatgattatcttttagtttcagtcacacactgaagcataaaatctccccttactttttgcctcggtcaaccattttggagagacgcgttgaccgacgcaaaaagtacattttgtagtagtggttactcccttcaatgtattttatcctgaaaacacttagctccgtataaatgatattttagcaaagtgacatgagtactcaaccatttatctctgtttagccaagctcgaaggatatcatcgtttcactt

SEQ ID NO: 255284 - DNA, 1084 bp, Cannabis indica
taaactccactgccttcacagatgctgactggggactttccctgataccaggcgttccgatcacacgggtatgttatctacctttggcaactctttgatatcatggaaatcgaagaagcgggccactgtctccaaatcacctgctgaagctgaataccgctccctagctaacacaacatgcgaaatcctatggctcttccacatcctcaaagactttggcatttcacattcaacacctgcaacaatatactgtgacaatcaagctgccctccacatctccgagaacgctgtctttcacgagcgcaccaaacacatcgacatagactgccatattgttcgagaccaagtcaccaacaatcgcatcaagctcatccatgttccttctcggcataatgttgcagacataatgaccaaagctctgtttcctactcaacacaaatttcttatgagcaagatgagcaccataaacatatactgctcatcttgagggggcctattaggataacacattctgttattgttagttaatcattctgttagttagtttcagcttcccacttatttattttgtaacaataatcttgttacatctttttgtataaatactgtacttcttctcattcaataataataagcaaattagttttttttttttttttaatcttttggtccccttcaacttcttcctaaactctagttctgtgattgccatttttgacttacaatgcgagcaagtaactattttcttttgattttgaagccccaaaagtattataaaagaaatttaaacatcattaattttcttgggcttgtgaatgataattgttggagtggtgggcttgggaatgtggcccatgttttttcatttgaatcaattcttcaaaaaatgttctaatatcccatgtgaaaagcatgtagccattttatacctcatttataagaagagtgggtatttcactcatattaattagtttttagattcaatctcatatttttaaaacttccattataacattttaatatcacaacaacaacaacaaaaattatgctgagtgtttgatccaagactgatataaacgttcag

SEQ ID NO: 255285 - DNA, 1441 bp, Cannabis indica
cgactaggtacgaaaaaatatgggttaggtatgatacggcatgatgctacaaattggcacgacacagcacaaaaaatatatccttaagcacgacacaacacaacacgaaaaacacgaaaggcacaacacgtaagcacgagaccagcctaaaagcacgacacgcgacaaatctgaaaagcacgacacgacatattaaaaatcttataataacaaattatgaatttatcaattataaataagttaaaataatcataaaacttaaatataatactgaatttataattatataactaaaactattaaaacataaaaaattaaaattatatattaatttatttatagggtgtgataaaaatttgagtatttataattatatactcaatttctaataatgttttagtatgattatatttaaaatattgttcaaaatttatataaatataattaaatctataaatatacatataatttagtaattgtaaaaagaatatatgaaaaaataaagcacgaatttaagttcagatataaagcgtactgacctatttaagaaatacgtgtcggcacgagcaaagcacggtacgaacccaagcacgatacaaaagtagggtctatcgtttaaaaatattggcacaccatcacgactcatatttttctgtggcacggcacaacactacccgtttttcaaaaagtacgaaaaaagatataagtcgaatcagcacgacacgcaagaacttaattacaaactcacatgtgtatattggtatacactttgggctcgtttggtacgccgaataagagtcgtattgtattaaataataaataacactatgtttggataaaacaatgtattgcattaattattaggaccaaattttttaatacaatgtatgttgtattatttaatacataacaaatggtctgtattagcttatattataatatttacaaagaatttggggttaacaccaatgtccgacacggacccggacccagacccagaacccggacccaggatcgggacccggacccagaccccgacccggacccgaccccgagctccagccctgaacctggacccaaaccccggacctagacccgcaccccgatcctggccccagccccagacccagacccaaaccgggaccgagactcggacccgaacttggaacccagacccgtaattggtgttgggatgaatgtattaaaaatatgttataactttacacaatcaattaatacaagtcaataccaaacattgtattgtattaaaaaatactaatacaatacaatatagtacaacacaatccaacacaatatattacaatacggcgtaccaaactagccatttacgtaatttaacaagagtaatatttagtgatatttaaagagttttatcacccaaaaatcggttaaatcgtataattccatgagataaaactac

SEQ ID NO: 255286 - DNA, 848 bp, Cannabis indica
tctaacaaaatgataccaacagatatcttttatagaacatagaatgatctgacttttcaataaactaaatttctcaacagcctgaccaaatttatcgaattaagcacgaggactttgtttcaatttatataaagatttgcgaagacggcaaactcgtcctgactcttcctaagcaataaatccaaaaggttgctccatatatacttcttccccaagatatctaggaagaaaaatattaatatcaagctaatgcaaaagccaatgatgagtagctgccatggaaatgaacagtcgaacaaatgtaagtttagcaacatgagaaaaaatatcacaatagtccactctatagatttgagcataatccttggcaacgaaacaagcctttaagcgagcaattgttccatcttgattgaatttaaccgtaagcacccatttgcaccctatagcccattttcctgaaggtaaagtaaccaagccgtaagtaccatttgcaactaaagcatttatctcttctatcattgcagcaacccaagtaggatgagacattgctttacgaacaattttaggaatagtgatagaataaagagaatcaataaaaaaagtaagaagaacaggagagatgattataagaaacaaaagaagaaataagatacgtacattgacgtttacctttacgtagtgcaatgggaagatcatctttgagttgtgaatctgatgacgaagatgcaggtgcaggacatgaaacgagaagtggacgcctggtgtacactataagaggcctaggaagtggtggaggtggtggaggtgtaggcattatgggaactgtgaccaagtaagtgaaaaaacaa

SEQ ID NO: 255287 - DNA, 586 bp, Cannabis indica
gatattattcgtactttgtactttcaaataacaaaataattattttggtgatcattaatattcaattaaaaaaattaagtaaattttttttacaagctttaaactcatatactatgtggcagttaaattttttattaaagtactatgaataataaaaatgtgattgttaccctatttgcaacaactgttattacaataattaatcaatactattaatcacttctagaataatgttaatgcaaaaccgttaataatattatgtcaaattaaaatacatgcaacaactgttataatattatgtcaaatcagaatatgcatgcaataagtgttaatattttgtaagatcatgcacgcacgtacttcgatacatgcaacaaccaataatatattatatcaaagaagaatacatgtaacaactgttaatattttgtgagatcacgtaaatactttaactaaaatattgaaattttatatgctattatgatgcttttaaatttcgttataatatatatatatatttaaatatgtacataatttttcacttgtcaataaaataaaatttattatttacaattataaaaaaaaa

SEQ ID NO: 255288 - DNA, 459 bp, Cannabis indica
gagactttctggtttccaattccgcggcccacactcttgaaccagaaggaggctctagatggaattcaggtgaccttccaatctagcaatacggttgtccaacttgccaaactgacatctattccatttactgagagcaaggcgagtagcgcccactctcttgaaaatccttcccgaggcccagctatgaaacaccaagctccaagcattctccacaatcagattactacacggatccctggtccaccaggcctcaaacttgaaaggcctagaaggtttagcttctcggttcgcagtattgataccaaagggtcggcggtctgagttgcacgtatggtaacagatgaccaacgccttcgggaaaagacttagccactccccattagccaaggccttgtcaagggccgattttacatgagcatcgccatcccaatggttatccctgttggaaattatttt

SEQ ID NO: 255289 - DNA, 638 bp, Cannabis indica
ctctcccttccaaaaatttgagtaggtcatgtgtaacttgacatccaccacgtttgcaattatatattgcacctttttctgctcggactttctttagattctacgggattgaaaatttgtaattgagctcttcctttgctgcttaacaccatattaccacgtagacccgtctatggatttgaatggaataacaacatgggcctagttcgaaagcaatgggggcgtccagtgctttatagaatatcatcgcatcataattgaggtttcgccttttttgatctcctactatcgtgaatcatttcaaattaagtccaacgaatttagaaacagtgtttcatgggtttcaaatttgtccaccacctccaatgaacctatatatgagcctatccataagttgggcctccaatggacccaggagcctttagttgcgttgggaccattagtgtataaaaagttcattgtatgcatcgttcgctgcaattccttcagcgagaaccaccccgtatctattccgtgaccttgacaatgttcttcatgccctttattcatttcattttcaattgtacattttagtatctacgaagaacaccaactgcaacaatctaacttcaactgttttacctaagatatcccagtac

SEQ ID NO: 255290 - DNA, 328 bp, Cannabis indica
atctggattgttagacttggagtgttcggatcttcgagacaatataggctcagttttgttagtcgttgggcgatatttttattatgttgtattttgtataagtttgaaaaaaaaaagtagattcaagatcctgagatttgaaactttgtatatttagtaaattttttattaagtatgattttatactaccataccatctgattaataaaggttagcacgataattaaaaaattacagtaacatgcctaaattaatagggcgttacagaaaagaaaaataaaaacgtaaaattgaatacaaaattagaaataatcgtatatgtggcaat

SEQ ID NO: 255291 - DNA, 1036 bp, Cannabis indica
ttctgtaagtgtgtcgccagcaattgcgtatatacgaagtttaccatcctgaccaccaatgatggcttcacttccatcaggtgaaattgcagaagctgtcacagcaaatccaaggttaatagttgatacaatggttgttccccgaagcatgacaactccggaatcagttgcaaccaaagcaagctcgggagaaagaagagcaaggcttaaatctttcggttgactgccaacatcaactgaatttgcctctccgcattgatcaccaagaacaggaactcgccatacctggttgtcaaatttaaaatcaaaagatcaagcaaatcaggatgaaattcataagttatttctcagtaatattattttcaactccaatacacaatagaagtcatacgttttagaaggtaatttctgaagtcaaatattttgtcaacagaattagagataaggtgcaagaagtagtaaaattcgttcatccaaaaagataagcaaaatcaaggaacatctaattttccctcttttacttcgaccaaataaaaacaatggcaggaagaacttagatatatgcagaaaaataagactcgatatatatgataagcctcctatacaatacttattatatatactaggaggaaaggccaactataagtattacatacactaggatgacgaaatggcggcatgtaatgaaatcaagaagtgagcttaggtgttagtggtgttttcctttcgtggtgctgtggggtctgtgaggggtttagactatatacataagagttatttcttggagaattggtaagtcatgttctcagaaattgagtttaggcccttggaaagtatccaagtctcacacattagttggagtgttttgtactaattttgatacagcccatcaaactagtgtatcaactgttctcttgatcttagttcaagccactcgagaatagctcaggtggtaagacaggtgtttaattccctattgtaacataaaggtaatgctgggaagtataatagtctggattcgggttcattcatttaa

SEQ ID NO: 255292 - DNA, 862 bp, Cannabis indica
tttagtttttcatttgtgcatcatgttcccaacaaaaaatgggatagggtgcctcaaagggaattaaaaaattgtacgggaatgctataagcttgccctgaccaaggtcaaaaaggagaatacctccagccagaattcgagcaaagggaaaagtattgcccaataggaagtcacccaaggcggggacgaggatgtggatccccgacttggggaaccaaatacaaatgtagggctagtggaagaattggaagagatagaaatcgacccaattatcctgaccaggaaactcaaaattggcaaaggtttcctgctcgaagtaaaattagccttaataaaatttctaagagcaaacctagacatttttgcctggtcacacgaggatatggtcattattgatccttctgtaatatctcacgccctaaacatcaatcaaaactttcatcccgttcaacaaaaaagaagattattggacaaagaacgggcacagacattaaaaaaagatgtagaaaagttgcgtactaacaagttcatcattgaagctttctacccagcttcgttagctaatcctgtactggtacccaagtccaacagaaaatggctattatgtattgattttaccaatctcaacaaggcatgccacaaagactgttttccacttctaagaatagatcaactcgtggatgcaatagccgagcacgagatcctaagctttatggacgcctattcggggtataatcaaatcagaatgcatccaccatactaagaacatataaggttctgaacagatatgggtctatactgttataaggtcatgccgtttggtctaaagaatgctaaatctacctaccagaggttggtgaat

SEQ ID NO: 255293 - DNA, 567 bp, Cannabis indica
atttaaaaaaattaaaaatccaaaagctaaccagccttcattacatctgatttattttttcccttcatgtttaaatattataaataatttactcaaaagattggtcaatccaaaatatgtgatagattccttcttgacaagatgtgtaagaacaagaggaacaccaaaccaataaggccattttgatgctgtaaaagggtatcaaatcaaaattgtttttatctctttcaatgagtagtgttaatgctagtgctagttgtgttcaattattggaatatatttcttttcttggaattgttgcatggatttcatttcatgctcaagttatattgaaattcgatatattctcattgagagagataggtggcaagttgatgtagcttggaattcaattcatgatcatttcatgttgtaattgttagaagaaaaatgttgaaaaaaaacacagttttattgaacttgatgcatctttttataacataatagtgtttaaattaaagttgtattaatattggtttggatgtagtatagggttttatcacaaaattaattagtaatgagtagagt

SEQ ID NO: 255294 - DNA, 389 bp, Cannabis indica
tttctaggtaaaatttgtatcgagacttatgaacacaagactcatgggagactcaatgttcacaaatctaataaagatggcagttgtaaggttcttgaaataataaaccaataaaagtaagtaaagggaatggtccctattcttgaaagttgtgtatgtaaatggtgtttgagttgtagagacttggtgtcaacataatatggaggacttagacaaaagatgaaggaagagatatggtgttcttagcagtccagcaagcaagcaagtaatccccttatctttatctattactctctttataaaggccttagggtttgttaataatcccccgcatgtcggggtgttccattaacaaatctcgtatttcctcctcaataatgaataaacaa

SEQ ID NO: 255295 - DNA, 659 bp, Cannabis indica
acgtataaaaactaagtatcactttttatttaagttttctttttggtaagtactttttaatacttcataagcataatattcttacaagtgtagtgtagctaaaagtttttaataattaaaacaacaacatttctaagtaataaaatagaacaaaatatcataaaaataagtactaaacaatcaagtgttacaaattcaatatacaaaaaaaatctaataaaaacataataaatatttattatatttttcaatattttttatcaaataaataattttttaatatatataaatgtaattggattggatcgatttttaattggattttgagattgacatccaataaccaatccaatccaattagaatccaacttttagcatccaatccaatccaattgtaattggatatccaactttttgtaattggattggattggatcgattcggttcaattggattggattggatgatgctcacccttaattttagtggaatgtctatttctttctaaaataaaataaaaaaaatattttcaaatacaaaataattattcctttaaatcaaacgccaaattaatattttgttcaagatgaaaatacttttattagtttagagtcttgttaaaaaacctttagtatagagtcttgttcaaataacttttg

SEQ ID NO: 255296 - DNA, 697 bp, Cannabis indica
gcatagctaggaagggcttgagcgacagttttaataagtatctccttacccgctcttgaaagaaatttagtgccccaagcttgaagccgttttctagttttgcctttaagtaacccaaagtcgcaatcttgtttcgccccatagaacttggaagaccaagatacaaactcccctcgggggcaacacacatgcctaagagcatagctagtctatctttagtttcaacactagagttggagctgaagaagatcaaagacttagaaaagttaaccctttgacccgaagctaattcaaatttctgaagaacttcttttattcagagagcttcctcatgggtggctttacaatacaagtaactatcatctgcaaagagcatgtgggagatacacgggcccattagccactttacaaccatgaatccaaccacgttgttcatattttcatagaagagccgagaacccttcaggacaaagaataaataggtatggcaacaaaggatccccctgacgtatacatcttaaagggacaatagggcctatttcgtggtgttcgtggataatatggtatctggccgaagacacacatcttagaatcaagtggatccaataactagcaaagcccagtttacgtagcatagcttcgagaaaaccccactccactcggtcatacgcattactcatgtctaacttcaaagcca

SEQ ID NO: 255297 - DNA, 1990 bp, Cannabis indica
ttgaagcatatggccgaccactccggtgggccatcaagctcaccacctagacatgcataatgactctcaactagttgtaagttgttatacccaaaatttgactgtgttatagatggtaacacacgtcagtctcaagggaatataaaatcaaacaaatatatcgatatttatatcattaaatatagaatggaataactcattaaatgcagaattaatagagtatatttgtaactcgctgactacacggtcttaagcgagataaggacgtacaaactattgattcacgtattaacaagaaaccatttcgcgtcagaaggcataatcttagtgaagacatagactacgaatagtgaggcatctacctcgctgtacgtaaagaattattgaggacgtgaaatggttattagaacacatagtgtataatacacattataataactaagtgttatagcttgaaggacatgattgtccagtcttcaaggccttatggtcaaagagcagttcttaagtttgctaagtacactagtgctcatgccattgttggaaggcatatgaataaaccaagttcttcgtaaactaggcgagacgcctcagcaagatgtacttggcagtgtgtcctaaaccacatcagcattgacttccttcaaagtgggttaaaacacatttgtgtgattttctaataataactgcattaatttacgtggagcataatgaatgccacaagtttcgagaatattgttatgggatttgaacataaatgtaattaactgccaacctatattactataaatagggacagattatacaaaaaaggggacaaaatcttatagagaaaacagaatacactgattgtaaagaaccctagttctatatcacaaaaaatctgaataagattgactcgtgaactatgcagaggtaattaaaaaaccacgtaaaaacctggtgttatttctatttctgctattctttcatagatctctaataatttttgtgctaaatctattacgaaaataggctcataatcgttaacaaaaatctacgtttacaatttggtgctttcattgagagcctacgtgataaaagctcagaaaaatccctcctatctaaagaagaaattcttctccatggctgataatggggaaaacgataacactcatcctaaagaaactactcgtcgtcctgggaaagagcctatgggctcacaaaggccacccaattcacgaacaacatgttgaaaatccagaaactgggaatgaggaaaccaatactgaagctggtggttatgtacctaggagtaaggatgcctaagatcccaccagatacgtgccattggttgaatttgaaaatctttaactccagtgacatttggatgaggcaaacaaacaaaaccctgagttggaaagggaggcagccgcagccaaggcgacataggaaaacaacacacaataccaacatgatcaaggagtgagaaggccgcgaggtagaacttagggcttgagaaccaggaagcaagaaacggttcaagaagacctccaaagtacccaggaggagaaacctagggaaactagggatattcttgaagatgaacaaccaaatgatcaggcacctcgtcaagaagtgcctcggaaaccctggggattctcaacctaggggaatgaatacagtgattttccagagtcttcccgtagaaatgcgagcagaagataacccaagactggggaacatgaaatccctcgtggtaatgagaaaaatcttgggactcaacctaggacaagtgggttgccaccgagacaccaccaacgtccttcttaaactgatagggcgggacgcatacaaacattagtaggggcatgtatcaacccgttctcaaaggagaagccatgtacatgacaagggaagttctagcttgagacgtacttgatctcaagatcacagccgatttgcttgaggaggggatatacctcgaagctgtaatgatggagaaagcatg

SEQ ID NO: 255298 - DNA, 798 bp, Cannabis indica
aatatgtaattatttttttgtttatagatttttaaagggcatatttgtcttttttatttttaattaataaaattaaaattagaataaattaagctaggaaagggaaaggtattccctataaaaatggggggagaacctttccctttgttttctcccaaatttgtgtgggtcccactactttctctctttccaaaatttagtaaacaatggtataagaatcaataccataccattcattctcattccctttaagtaaacatgccataaatgctacggaagatccccggtagtacatatgcaatatcctaaggctatatgtataaaacaaatgcaacatttaagatttcaattgttaaccacttaacctgtgcattttcaatttataacttttctccgtgcccctcctaacaattttacgtatttattctttatatattatcctaggttgacctcaacgtaagagaaaaaaaacagtgtatgggactgaagtacctttaattcaagagaaacagagctgttctttacggtgcatatatttgagaaccataatggatcttgtatgatctctttttactttctagaagataccaagctgcctctaaagagagtaatcaaaactccatttccatacctacaagaaaacatgttagattttgaacaatttctttaccgaatataggcacgatagtcacaaagtaatattaacataaatccagtaatactttacaaactgaaggatacacattatgaagaaagaaaatttgtgaacattagtcaatcaggacagtcatcatctac

SEQ ID NO: 255299 - DNA, 861 bp, Cannabis indica
taactttcaacactaacatcccccctcaaacgaaaaggggtaagagtcatttgaagtttggactttagatacaaaaatctttcagttgagagggatttagtaagcacataagctacttgatccaatgtaggaacataccgaacttgaagttgttttgctaaaatctgatcactaacaaaatgtaagtgaagttcaatatgctttgatctagcatgaaacaccggattagcagctagtgcagctgcactttgattatctacccaaattatgggagattgaagttgctgcacttgaagctcatttaggagtgaccctatccattttacctctgctgtagcatttgctaaagctcggaattcgctttcagtacttcaacgagctatcacatggcgttttttagcagactacgatattatatttctccctaagaacaccacatagcctcttgtactcctccggtcatctatacagcttgcccagtcggcatctgaataacattcaatcgaagcattcggttctggtttaaggatgagtccctcactttatagtgcctttcaaatatcttagaagtttcttgcatgcttcccagtgaaccacaatgggtgctttgagaaattgactccatttatttacaataaatgcaacatcgggcatagttaaactaagatattgtagtgcaccaaatagtacttctgtacaaagttggatcttcaaacggttctcccacggttaaactcaaatttcacagtagagctactcggattaggacaggtttagcaccttccatatgaaccttgagtagggatatcagtaatatacttagattttagatagatgcattccagtttcagatcttactat

SEQ ID NO: 255300 - DNA, 1201 bp, Cannabis indica
aaaaaaattaaacatacatgtatattctatttaacatcacataattattaaagttaattaaaaaaaaattaattatactggcatgtaacatcaatctagtattaacctagtatataaataagaggtgatcatgatctcattttttagtaggttgatttgttgcatgtaacaaaatttaacttcatcatacatattatataatgcaaatttctattataataaaaggaaaaataatataactctttcttatgtaatttagtctctaaaaaggaaatgttttggttttagtttttgggaccatagccatggtaattagcacatgcaaatgtggattcttaagagcccagtcataaaaaccagtagcatgtacgaagtgtgaggagttttcaacaatgaatgccaaggctttgtctttcaatttggggtaagaacaaacctcagcaatttcaagaatgtctaaagcgttggttaaacacaaataaagatccaaatggcgctcgcagatcttcctcaagtaggggatgtagtacttatctgcagccaatgacaatgcgtacacgtgtctcttcatcttgtcttctgatacaacaccattgtacaagaactccagcagagtttccaactcatcatgtttcatctcccacactgtttcaatctctgttgctggagccttgaaccgactctctgactcaaacatgttcttcaacacttctgatctcactgcctaaacaaattttacttttttccagttagtcccaattgctactcatatacatttaacaatttgtaatctgttttagtactttgtaaaaattgtttacagaattgtggcatgaggttacaaacttgtgaatagttaaaaagagaaataaaaatattgttacaaaattgtatattttatttaaagaaaaataaattttataattatgattataccttatgcttgtacattttttttttttcaaaatcttaagcattttttagagggattatttcatgatacctaaaaaagacaaaaaaattccatttttaccaatttaaatatatatttttacatattttcaaaaaatataaagaattatttttcaataatttttacgttgtttctacgaagataacaatatccaaacaatatttttattgggttgagatgcaaaatggccctaaatttggtaactaagttagtaaatgtacacttttt

SEQ ID NO: 255301 - DNA, 640 bp, Cannabis indica
ctcctcttctcctcacccaagtcattcattcttcttgctaataagactaaatagaccatgaatggtcacaagtgaaccattcttcttcttctcctcctcttctcctcctttttcttcttcttgcgggtaaaaccaaaaagaccacccattattcatgaatggtggcaagtggtggcagccatagacaaaagaatttgagattcattctaagaaaggtaaaccctaaataatttccttgtctcttctcattttgtttcttttctttaatttttttttttagttgtagccattaatatttttcttctctcaatctcttattacaataactaatcattcataattataatggaatcagcaagtgatgcatcaaccacaatacccacaccacctaatgaacatgaacatgtaacatatatatacatatatatatatattttattatagtcttttgggttataatttagatttttgtaatttatatataaaagaccttgaatttgctctgaataactatacactaccttaaatttacactatgcgatcatcatggtcttttatattctttaactaattttaaagaacttgaattttctctgaacgatcataaacgaccttaaatttacattatgcgaccatcatg

SEQ ID NO: 255302 - DNA, 920 bp, Cannabis indica
agaccccagaagctctaccaagaaagtgaagagtatgagatttggggggtgaaggtcaatgaactattccacacttagaaatactttcgtggtgaatgaggtgcttggtgtaggtacttctctagaggtcgtgatgaccaacaatacaaatactttccatgggtgcatggagacatgttaaacttgagcaatcgttccaattccctccacacgtcactctaaggaagactatttgaaagggaatagtcggtatagtactacgagtagcttctcatgaagcaaatgctcaagagatgactttatcatcatacaggataagtccccacagttgccatcaaggccacacgaccaagtaataaccacaaggctcaagtcgatcaatgccttttctcgacttggaataaaaaaaaatgcataacaacatcaacaagaagcggaaaactaatacacgcatcaccacagtgtgcaaggccaaatttgacaccattgccactctggttaagggtatcactactcaaaagctaacaaagtactagttagatcaagagtggtgttctccattcttagattgaatgaaggctttggagatccccttaaagttcaaaaaatccagtgtggcatccatacactggcaaagaagaccctctctctcacatatacaactttgaagtacagactgacctacaaggcattcgagacgattctcgttgtcgagtgtttctagtgatgctatcaaatacaacacatcaatggtatatcaattcttgcgaaatgcttaagcaagcattctatatccaattctccctatcaaggcatagaccaatcaagcccaacaatttggtttgcatcaagcaacaagaagaagaacctctaaaggattacctttagtgattcttggatgccaccacacagacgaagat

SEQ ID NO: 255303 - DNA, 3091 bp, Cannabis indica
aactctcatatatgttagattaaatgacacttttcttcagacacaataaaaaatatgttagattcgaatttaataaacaaaataaataaaagagattccaacttgatagaatcttcatcaagataacgatgggttatttttttgttaaattgataacgatggttatttatatgttgcaattagtcatatttactattttgattccatcctactttatctagctttgtattaaaataaacaaactgttttattattattaatattattatatttactatagtaaggatttttagaagtttattacattaattttgtttgttgttttcgtatagtaaaaggtcacaaacttaggaaattaatggaataaagtattatttgttttttcctcaataatgctagtcgaagtcattattagtttacgaaccttttaataaataatcaatagctttgggaattagcctaacttatgagtttgttcattaacatacgtttgacaatggccattaactaccacggctgatttcaaattttcaataaaattagaatttaatttgttcaaatatatagatgacataatcctagattcaccaactctattgatttaactaactaatatcaaaaggtctattggtaatgagtagagtagtccatattcttatatatgactcaattcttcaccatttattctatatgagacaatatccacaatattctccctcaagatagtggctatttttgcttgctcactaatcttgaaccgtatcagagtggacatggtcactatctgttaggggtgttcatcaaaccgctcaaaccgcccgcatcgcacacaccgcaaaaaatgcagtttgaaattcttgcggtgcggtcgcggtttgaatttttcctaaaccgcgcggtgcagtgctgtgcggtttgcggttttgaattgttaatatgcggttcagaccgcaccgcaccgcatattataaaaatactaatttctgtatttatttaagttcaatttgtgaatgcccaacctaagcccactaattattgtagtgttgaaacttgaaacttttttttcatatttattttcaaaccttatggtaattttgacaagtgttgctcaaactttgttgtatttgtgatagtttaattatttagtgatagtccaaactgcaaaaactgcataaatcgcaccgcaccgcaccgcactattttttgcggtgcagtttttgcagttttttaaattcgcggtgcaggtgcggtttggaaaataaaaaaaccgcatgtgcgggttggtttgaaaaaatagtcaaaaaccccaccacccgcaccgcgaacacccctactatctgtataggtgcagatcgaataggattacttgcccgcaagggatatggctctgataccatgttgaaaatcatgggattctatctcaaaactaattggtaatgagtgaagtagcccatattcttatatatggcttaattctctgtcatttattctatgtgggacaatgtccacaatatgtattcttaattcaacttatgtagcatgtggtttctttgttcctttttcttggtcgatatattagattcattgatcactaattgaaggctggaaataagattgacatacccacccaaaaagccaacctatgacccttatatgtaagtattatcgaaagaatttagacaataccaaatattgttagtattcaaaaacaattagaacactccaagtagatatgtcagtattcacctcaaataacgagtactcaaagtatagctatgaaaataaacaaaaacaaaaatagaaaagtaaagaagacaagagaattatagtagctcagttagagcttaatctacttagtccacttttgacaatagtttcagcttagtttatttgatttagatcacccctttatatagaaagcaagtgtcttttaggattacataacctgtcagattagaacatttttacaataaataatagaattaaattaagataaacgtttaaagaataaatgaagaacagtttcgtccattattgacttaattgtagcaatgtacgcaacttgataagccacagtttgtccattcatattctaaacacacaagtttatgggctctacagtgttgtacttggacgatgggcctttggacctatttcattgaatttctgcgttcaccctgatcgcatagtcagacattctatgtgttgacgacttggaacatgcgagtctgtgatgagtcgtcgaacacattagtcattcggactaaacttatgtaaagaaatgatatttactctcacaggaaagacatacttggtcatcgcaaataatcagtatatgtgcgaccagcattaacttctctcggtcatgtttatcctttaactatgtggggcatagtatgcgactagaacctgtctcgatcacatcttctcacaagttcacatcatgcgaggtgaattgatcattctttctcttatcgcattggttgttgtgtccacacttcttctttctgcaattaacaacactttctgctagttaacagcacaggagtggagacaagcgtacactgttagtaaatcacattttcttgtgaagctggctccacgtggcaacatttcacaagactgtactcatatttctaggaaaacaattcacactataacacatgtccctagttttgcaatgacaactgtttgtcaaatagcgaaactattcacgagggacaggcgagttgtgttgtcacatggcagtgaccattgattgctttgtggagggtttcgaaatgagtcgtatttattactttatctttccaagacaacacgtcatcgaacccttcagaatttgtgcaggcatggtttgagacaacaattggattgaatgacctttagttttcaaatgccacatgtcataatcttaacggatgagactgacccatatttaaacccctttgatatgaaatgactcatttcattttccctcacattttcgggtttcattgaaacttttctctctaaaacttcaaaaaccttttcaaaattttaatctattttgaggaatctccctttgctagatcatttcaaggtttgaaggatt

SEQ ID NO: 255304 - DNA, 507 bp, Cannabis indica
aagtgtaaaaataaaaaacccccaaaaaattatgtgtatgtagtgacgcgtaatgagcaactctaaaagtgttcatagtcacacaaagcacgtcaataaagattcaataaaataataataaaaatgaaaaaaaaagacacgacattaatggcatagcatgttactattactagctgaccttttttttttatatataattataattaaatatgtaaaattaaaaaaatatttagggtatctaatgaatagttataaaccctagtcttcttcaacacaaaaattggtcccatatctctctcactcttctttgtgcgccagccatgcccaagagccaccgagaaacctagacctcaagaaatccatgcttgtttacctccggttaccgagaaacccataccccagtgaaaaatgccagatccccctctctctctccccctccctctcgtgccctttctctctctcctatactcttcgctattctctttcgtctctctctctctctctctc

SEQ ID NO: 255305 - DNA, 776 bp, Cannabis indica
atctcaagttgaatggtagatattaatgaccgaggcataagctttgttgatactaggtagaggttcttgcataagaatttgtgaacgagtattactatatgattcatacaaacccaccaagtctccaaggctctgtcttccgcccggttagtcttgaataatcttcattgtgcttacatttacaaacaggtaggggtctatcccacaaagctttagatcacgagatccctaatgaagcacttgcgtagatcacttggcttcaaagattcttggagcatttcgttgatgaaacctttctcgaagatcatttcagatatctgatgcattttccatatacatcacattatcaacaatgtccccaatcacaacatgtaaaatccaagaaatgaccaagctattgcatcgattccaaatatcataatctttgtgttcttcatctggttgcttgagctttccattaacaaactgcgttttgtttcgggcaagcaatgctaccatcaacgatcttctccaaggattataattttcactaccagttagaatctttggcaccaatttagctctagggtgatcgccatggtagagataataaggaccttgtgttgcatcaatgtaaggtcaagaactaggctcgagaacggaaaatgggttggattctttagaggtatttccttgagtggcctgacttcgagggttgacacctccatgagccatggacacaagcaattagaaaaaaaaattgaagaagatgggttcatgaatcatgtggttctgat

SEQ ID NO: 255306 - DNA, 682 bp, Cannabis indica
aactcattagttacataaagacacataacaaaaataatagtagacaatgcaccaccaaaaaaagaatcaactactcaacaaccaaccatgcaagggataatgctggaagatggtgaaataatgtttgactttattgactatgcaaaactggtggctgaggaaatggttgtgcagctagaaaacaataagaccagagagcctaaattactgattatgtcgaactactaatcacagatcctcaacatcctaaaatagaagaaaaaaaatatacaaggacaaagaaactctacaaagcgtgttaagcttctatgccattagaaacaacttctaatacaaagtgaaaaagtcttaagcaaaaatatacaaaattattgcttggatccaaaatgcaagtgggcactaatggcatcaaagaacggatcaatcaaatttttcataatctgtaaatataacataaagttcatacacacttgtgatctcaatataagatttgtagacaaggacaagctacaacaaagtgattagaaactacatcaagccaaagttcaccaacataaaaataactcaaacgccacatgacattagaggagacttgaatgctaagtatgtatttgaaatgaactacatgaaagcatggagaagtaaggagcacacacaaaaagaattacatggaaaagcaaat

SEQ ID NO: 255307 - DNA, 663 bp, Cannabis indica
aattgttatacaaggtcccaaggttcacactattagagggaaggttatatagaagaggctattccatgcctttgttgaaatgcgtgatagtggaagagtcacaagtcatcctcaaagaaatacatgaagggtttcatggggactacattgagggcaaatccttgccaagaaggtgatccgcaaggatattattgacccactataaaccaagggcccctcccatggaattcacatcaatgatcaccatggccctttgctgtttgggggatagatctaattggagctcttccacaaggaaaaagatgtgtaaaatatgtcgtggtcgtagttgactatttgaccatgtggactgaagctgaacccttagccacaattacaccaaaaaagatgttggactttattgtgaaaaacattgtgtgtcgcttcggtgtaccacaaaaattagtgtcggataacgacacacagttcaaaagcgatctccttgccgattttcgctagaaaaatggaaccataaagagttttgcatcggttgctcatcctgaagccaatagacaagtcaaagctgttaataaaactttgaaagacacattaaaaaagagaatcaaagcagcaaaagggaactggcctgtaacaccctaactaacataggcgtattacgtgatt

SEQ ID NO: 255308 - DNA, 522 bp, Cannabis indica
ttaattttgactcaatattagagtgttctttaggaggaaaaaattcaacatggtttagaaactattaaggatggtgtattataggttatataagggtgtttagttatctttgtaaaagttgtgaaatgggtgattaatagtatcaatctagcccacttactcattttttttaaataaagtacatactatttattttctatcttggtaaaaatttaaaatttattttaacaataaaattattttattaatttttttaatttaaggttttttaatgttgccaatttagttaaaacataaacattaaaaaataaaattctttaaagaaaattatttgagatttttataaaattggcaaattatgatatgataatttttcttttttatataaaatttgaagttcacacaaaataacgaaattaaaaatataattataagaagtatgagaagtcaattcatcacttcaaaattaacaaagtataaaaaactactttgaatatatatatagatatatagatatatata

SEQ ID NO: 255309 - DNA, 1175 bp, Cannabis indica
aatattatgcaatcaattcttggacctgttcaaacatattcctatgccaagcaagctcaagaataccattacaagcacaactctcaattgttacacaaggatataacatattcctatgttatttctaatctaatctaataagattaagatcttgtgtcattcaagctaagtccattacatttaacctttccagaattaaatataactcaatatcaagctattggtggccaaacaatatcaagaaactaacataaagcacacttgaatgaacatgagaatttttactaaatatttgcataagaaaattactaaactaaaacatagggttcttcaacaattcaaaccataaaaagtttagctcatagctaacttaaaaaccaccattacaagataaaattcagccatggagtttgaatgctagagttagagaaaataaaagagaaaagaaagaaatgacaaacaacaatagaggagaagttttccaaaagggtagatgttgaatcttgttgttcttctcctcttttctccttcttcttcctcttctttcactctttctttttctgtagaaaaaatggcagaattcctctttcttacgtgctgccttttcttgctcaaatggagctgcctctttttgaaatccttctaggttttgtaccatttgccccaaataaaccctacacatggcatgcatctagcctctccaagtaattgctccagccatcactcctagaatgacatgtcatctccacaaatgccaccacttttaatgaagtgccagctcatcttttgctcaagaaaataaagcaaatcagctactaacctgtttgctgcagcaaaaacttcacataatttcagcaaaattaagaacatgactaacttgctattttctttgctaatttatacacaaaagttattgatttctactaacagcttcaaattacacacataaacataaaacactgaaactttcacaaattaaaagataaaataacttcaatgacacacaattacataaaaaaaaaacaatgtttacaaagatatcaaataactctttactcaagagttatcatttacactcacccaagtgatgcttcttacagttgggacatttcgggtaagtgtatcgagtttcggaaccaccctgacaattgtcacgaccttggttcccttggaac

SEQ ID NO: 255310 - DNA, 596 bp, Cannabis indica
taaagcttatgtactttgagtatggagaatgtcccaattgagctattatcatgttttgtcagagaatttgaaagttataaaacttatgaatattcattaaaaaaaaacattgtaataaattcctatacattactattcttatttcattgcattaccattactattattattaccattacattacatcaaaccaaacactaccttaaagttaccttccatatctttcacgatatttgtggcgtctagcatagtagggccaactctgatatcaaccggcgggttctaagaataataatttttgggtattttaaaaaaaaattgaaaaatactaaaaagatatgtatacttttacaaatgatattattttggtcacgtttaatatttgagtcttatttaatttaatttaataattattataaaaaattactgtttatttataaaatatcacattgtaatggtatttgacacgggaaatttgacaatatatgcttaaatatagcatatattgttttaatatactatgtaaaaaaaattaaaaaaatactctccaattaattataatcccaactttaccctccccatttcaaactttcact

SEQ ID NO: 255311 - DNA, 538 bp, Cannabis indica
catgtaactcaactctagcaaattccaaattactattttttcaacattatattttttttgctgttttgtaatttttctgattttttattattatatttaactcaacttaatcaatatatcaatatataaaggaaaacatatacaagattatgtggcaactcatatgagttcttttatcaattctttgcttcttaaaatttcatttaattattattattttttaatttctttcattacctttaattaattaaattaattattttttttggagagggggaattaatttttgatttagtgctaacaaatacttaagcacatactcaccaagacttcaaacattttttcttcttttcaattaatttacactaagtgtcaatacatattctaattttttagtcattattattttttaaatttaataatatagtaaaaactgttataaattttaaaattaattgttttcacttattacattattttttattcaaagattaactttgtaacttattttacccctccatcttcctataattaatta

SEQ ID NO: 255312 - DNA, 2166 bp, Cannabis indica
catattttcaagcacatcctattaagatcctaataaatcaaccattgcaacaagaactatcaaaacctgatgcttcaggaagattaataaaataattgattgagttaggacaatttaaagtaacttaccactcaaggactttaatcaaagggcaagttttggctgacttcttgatagaaggagtaaactcaggagaagactctagaataggaagtgaagttgaaatatagaaattttttgttgatggggcttcaaatgggaatgtctcggaggtaagagtaatagtgatgtcaccagaaaacttcaaattcccctacgcacttaggcttaagtttgaaacttcaaataataaggcagagtacgaggccttgttagcaggattagaatagctgaggtactataattcaagagcatcacatgctttagtgacttgcaactaatagtgaaccgaatcttgggagaataccaagcgaaaggcctaaagatggccaaatacttagattatgtttgcaagaactttaaaaaagtttgattattttaaatagaacaaattccaatagaacaaaactctaatacagatgccctagcaaaactagcaactcagtttgatctcgacaagttaaatttggccccggtggaggtattagacgagctgagcatatgtgaatggaaaaatgtcgacatgatagatgcaacaccaatatggattacaccaattttcaagtatcaattaagtagagaaattcctacacataaaacagaggcacgcaaacgcttatattcgatccctcactacatgatggtcgaaggaaaaacttatagaaggggttattccatgcctctactgtgatgtgtgttactagcagaagctaatgaaataattagagaaattcagaaggcttctatggagatcatgcaggttggcaaagcttgtcttaaaagataatctgtcaaggatactactgaccaactatcaataaagacacacacaaatttatcaagagatgcgacaagtgccaaaggttctcacatatacctcgattaccacccaccaaattaaaaatgatgacctcgccatacccattcgcaatatggggaattgacctgattgggggtttacccataggacaaggtggcgcaaagtatgttgttgtggcagttgagttctccacaaaatggatagaagtcgaacctctggtatccatcacgtgcaaaaaagttcttgattttgtcatcaagaaaatcatatttaggtttggcattccaattaagatagtaaatgataatgggactcaatttgatgataaattattcattgagttccgtgaaaggaataaaataattaagagcttctcatcagtatcaaggcctcgagtaaatgggaaagttgaagttgttaataaaaccttaaaggatactattaagaagaagttagacgccgccaaagggagatgggttgacgagcttccacaagtgctctaggccaataaaacaataaagaaaatagcaacaggacacactctattttcattgtcgtttggctcgaaagcaatgttacttgtagaagtaaatattgtgacccacaggcgtgaatttcacaattaagaacaaaaccaagaacttcagaatatgtccttggatctacttgaagaaaaatgcaacaagtcgcaaataaccaatgctgcttatcaacatcgcatcaccatatactttaacaaaagagtttgaaagagactctttaaagtacgagatttggtaataaggcgtgtatttgcaaatacgcgagattcaatagcttgagtgctcaacccgaactaggaaggcccgtacaccattgaagacatagtttggagtttataaattatcttggcttaatggcctgctaataacgaatcactagaacaacgagcatctatggccatattatcagtaatttattgtgtaaatgttgtattaatctgtgtaatagtggttatttattctgaataaaaatttgaatgattcaagtaatcataaagttttattttctttaaaattaattggggcatatatgtgtataataattaaattctacctaaaaatatatacaaaaatgttaaaacctaaaataaaaaaaaataaaaaaatacacaaggatcaactggtaatatgactgcttgtccttga

SEQ ID NO: 255313 - DNA, 2352 bp, Cannabis indica
gctttgaagctcaacgaagtcaaagcccgttgcatgttgaccatggaaggatctatggagttctctctgtccgctacccctgaccttcagcgtcctattttctgcaaatacattgatttattcattgcgcacaatcgaatgctaaccttgaactgacccttcaactgactaggcgcgcgcttgggaattcttaaaccatctcctttttcttttgagacctacttcctccttgctttcgacttagtccttgcttgaattgcgacgattatggccctttttgacttgtactcctctttgacctttggaacggaggcaaatgtagtactatgcacaatttaaaatttgtaaacaaaaaaatatagaaatggataattttttttaataggaaacatacatggatagttgaatgttgattcttagagaaacagaaatattcattaatagaaactcagacaaagtctattacaaaaaaattaaacctcaaactgccaatagtaaatttaagtatagagaaaaaataaatagtaaatgaatgaataaactcagctcagtgacaatgacgctgactgctttgtatttatattcaatattgataattacaaagaatcatttagaaaattgtacaaattatacacgcattattaaaaaccaaaaggaatatgctaatagaaaaataaaagtttgttagcctagggatccagacaaaatttattatgccacctcagcagtactagaagtcgtggaagaattttatttcttgacagtccttctcaaacttggtggtgttttgggctacaccaagtttgtccactaagaaataaaatttgtaattggtgagactcttagttaggcaatcgacaacttgatcactggatggtacatatctaatttccaaggacttgttatgaacgaaatgaatatctaactctatgtgctttgtgcgtgcatgatacactagatttgtagccaatgcacttgctcccatgttatcacaccatgtcactggtgtgtattgcaatgggaattcaaactctttgagtaaggcttgaatctttggtgaaacttgagtgagtgtctgatactctgactccgcactagatcttgacaccacgatttatttcttggatgatcatgacaccagagtatccctaagatacacataataactagttacacttcttcgatcatcaggagagcatgtccaatcgccatccagatactctctaattgcaagtctatttgagtttttaaaatgtaatccatggtacacattacccttttaagtgtctaagtactctctttgcggcactctaatgagccgtggtaggagcttgtaggaattaactcaatttattgactgcaaaggaaagatgaggtttggtatgtgtgagatacttaaggcctccaataatgcttttgtaatgagtaagattttaaagagggtttccttctatttttgacaatggtttgccaacttctattggagtggatcatggtttcaaatgcatcattccagtcctgagcaagagttccttgacatacttacgtcgattgagataaaaaccagtttcatctctgtacttcaatgccaaggaagtaatgcaagggacttaaatctttcaaagtaaacatggcatgaagtttgttgacaaactaatttaacttatcaacattatttttcattacaataataatgtcatcaacatagattaataccatgacaatcaaaccaaaagctttgtaacagaatagggaagaatctacctcggaattcttgaaattcaaggttattaaagtagtcttcaatatatcataccagacccttggagcctgttttaaactataaagagacttggtaagtttacacacataatcaagtttagaatcatctacaaagccttgaggttattacataaaaatatcttcatgtagttttctatttagaaagacattgttgatgtcaaattgtctaatctcacatgacttagaaacaacaatagttaagatgattcaaataacagggctgtaagtttccccaaaatcgattcctggtctttgattaaagctctttgcaactaatatgattttatacctctgaaatgtaccatcaatattcctcttgatcttcaacacccatttattaccaataaaattcatccccagtttttgccaccgaaatccaagtttcattgtcttgagtattatcatttcagttggcatggacctattctaaccactggtcctgagagcttcttctacactagtgggttcttcattgtcccagttctataagcgtgacctcaaagatatgggtttaaatatccatgccttagctctagtaatcatggggtg

SEQ ID NO: 255314 - DNA, 1612 bp, Cannabis indica
gtctcactgagttgctctaattaattaaatagcatgaatatgagttggcttattaattttgaaaatgctgcttaattaatttaataactaaattaaaaatgagagaaactatttattaattatgaatatttgaaagtgctgcttaattaatttaataactaaattaataacaaggagactaaaagtttgagttaacacacgtgtcaatagcatgaatatggtgtgatgagcatcttaatatcaaataagaatgtatgaaatcattcttctattgacacgtgtcaaaccataatatcgacacgtcttacaatttataaagctgttttggtattttacttttacccacctctcttactccacagcttgacacgtgtcaaacatgtagaagaatactccatgctaataatacattagtctaataaaattaagatgacgaatagaacaataatgttactatctccctatctcttcttactttgttcggagggattatcttgtctcatacatgaagccgagagagatggccaacttaatggagttcagtttggaaaagatagagtcaaggtttctcatttattctttgccgacgatagctttatgttcctcaatgccaaaacaagtgaatgtgatactatgaagcttgtgttgcaaaggtattctagactttcggggcaacaaattaatctagagaaatcgaaaatttgtatggggaaacggatctctcctcaacaaggacatgagtttgctaatagattgggagttcgccttgtctcgaaccatgccaaatacttgggattaccgagctttgttgggaaaaggaagaaggaggtctttgatgttatcaaggacaaggtttggaataaactcaaaggatggaagagttcaatgttttctcaagcaggccgggaaattcttattaaagctattgtacaagcaattccgagttacacaatgagctattttcgtcttcccgaaaagctcatcaaaaatctccacacattggcagcaaacttttggtggggagacacaaaggaaaacaagaagcttcattggggatcttgggctaaactttgcaagcctaaagaagaagggggtctcggctttaggagtctaacggagtttaatcaagcacttttggccaaacaaggatggagacttacccaaaatccttactcactcctagctcgggtcctaaagaatagctactatcccaccacatcatttatggaagccggttgtccctcgaattcttcatgtatttggaaaggtatttgttgggggagaaagattttgacggaaggggctagatggaaggttggaaatggaaggaagataagagtttgggacccgaatggaaggagctatgctaacccaaaatcccagagtagaagccaacacaacacttcaccaatttatcacaaccgatgggcagtggaacatggcaaaaatcactcaacattttcatccaaatgacattccttggattcaaggaactccaattgacatgtatgtggaagactcgctacattggccatatactccaaatggccaatacttggtcaaaagtggttatagagttggtagagaattgaatttacatcctcctaggtgc

SEQ ID NO: 255315 - DNA, 1369 bp, Cannabis indica
gattggaaacatccaaggttgaccatatgtcaacctgggccataggcctagtgctatatgacaaattaggtgctaggtcccctttattgcccttcaaaagttttgtttggtctgcgtaaatagttaaatcttaatctttgatgaaaatggagaagatgcttaaaagtgttcttgaaaagcatcatcgaaattgggctaagttgaaaaaatgtcaacctgggtgttgggccagccccatttgtcaacctttgcggtaggctagccctagatgtcaacctgggcgctgggctttgcttcttgcacccaggaagttttgtttcttcaccaaaattacatatttcccaatttatgatgaagaagaagaagatgcaaaagttggatcgttaatgaacattctttgaatctaattttgatgcctcaaatgtttatgtgttatgtatgtcccattgaaaaatttgacacattttcactagcgcggtcccagatactgaaatcctagttaaggatgtcaacttgggcaattggggaaaatttgaggtgctaaagttaacttttggggtgtaggttcgtgtaatttcaactcttgaggcctacatttgattgctcatgtcctcgtggtacaaaataatgaatgatagtgaattgaaatcaaattattgaagtctgaacttcctcaccggatttcctaaagtcaacttgggcatcaggctagggatccttcataggtcgacatgctatgactcaggactactaaactcagatatgtcatctttcttgctacgtgtcaaatattgatgtccacatcatcaaagctaatttgtgtaaatattttccctaagtcaatttcacacttgtgtgagattgacttaatgatgtgaactaagctcgtatctctcttaacttctaggtgggcatcaattttgacaatcttggattatgtcttctgttcttcaagcattcccaatgagagtaggatttgcaatctccaatccttgttgcatagtggaattcgtaattttatgtacaaaaggagaagaagaacgacgatcatctttccatatcatttatcttttccttttcaacttaaaattttgtctactactatagttatttcctttgatttgagattctttgaaatcatggtgatattgaaatgtcaacatttactctgatcttcggctgttgtcttagcattgactctctcatcacaatgtgggtttatgtgagtatagatgtagtcttcgtcttctcttaggttgtagccttgaatttctttagcatttccttggttgtgtttcagctaaggtgctattattaatctccttgattttatagcaaatgaggctttcgtcaactccttagctttata

SEQ ID NO: 255316 - DNA, 500 bp, Cannabis indica
ggtgctaggccagcaccaggtcaacctgggcaatgggctcagtttccaggctctcgagtttatagttttctctccaagttttttatttatctcttttaattcagatgacagaaaaaaaatgtttggaacattttttagagaaattgattagaactggcctaggttgataatatgtcaacctgggtgttgggtctcacttttggcctcctagaagttctgtttagtccttgaaaatagttgatcttaatctttgttgaaaatggagaatatgccttgaagagttctcagaaaaaatccttgaaatggcccaggttgacaaatgtcaacttgggcgatgggtcaggcccaagtgtcaacctgggcattgggcctctgttctaggagtgtaaatgggtcaggtcggatctgatccggctatgatccaacttgatccagatcatgtaaggatctgccccatcccgccccagccgctagattagatactcgaatcggatcagatc

SEQ ID NO: 255317 - DNA, 853 bp, Cannabis indica
gctatctactattgttagaatcagaatggcaaacggattggatcatggtgccccaccccacctcgattgccccgtaaacttaatcgggtatgacccgacccgacctttgacctttttttttttagttattatcattgtaaagatgttcatattaaaattaaacattacccaaaaagaattgaagttctaaacaaattctcatttgtgatttgatgagttgaattaaagttcaaatatcaattacacttatattactaataacaaagtatattaataataaaaactaacaatgaaacaacatatattctaatcattaagatcaacaacgtgaggctcctgcaaaaagaaaaaagaaaaaaaaaaacaaaattaatttgataaattataaaaactacactagttaccattgttggatcaacatcaacatcttcatcatttactattgctataagaaaaacaaaataaaatcagtactaattatgaaacaaatatatataaataattgtttaatgatattttttttttgtcattcatcaattaattttgtgtgcacactaatgcttttattgtagaaagatgaagtctcgatcgatgtagactcacgtatgtgtctactgaatgtagattctgaagcaatagtgttaataggcacaacaaatactgttggtttttattatactcaataaggtacgcagcgaaagattatcgtattatctgattattattgtaccatatctcaataaatctccagatgtatgtacattaaaatcaaaataaataaaattaataaagtttatagtatacctcttgtagagtattagggtatcgtcgaaatttcttgtaagttgtatcc

SEQ ID NO: 255318 - DNA, 593 bp, Cannabis indica
atatatatgtaagtcagactgattataaaataaaatcgttgtacgtagttatagtaaattagagattttaactaagggtgaaaattaatataggattgaacaaaatctatttatcaatgcacgagtggtgtgagacaccacacatttcactgtcccgacaacaaggaatggggactctattttgatgggccaaacacattgactgccccaatggtctctctctaataaaaagaagaaaaagaaagttgtttagatatgtgtctattcttttaagctttaaattaatgggtcactgctcaattatttttggtgtgacttaagtttatttagtacttgtttagaagttctcaaatataatttttcagatttttctttattatattataattattttttcttattttgtttggtttatttgaaagcgcatgcatgataaagactaaggatggatttccaaaattaatcaaaaagaagaaaaaaatgtagtgctgtcagtgtagttcaggttgatccactcatttaattattatttcagtcatttgaaacaaataatctggaaaaacaataggactaactgggattacatgtaccaa

SEQ ID NO: 255319 - DNA, 600 bp, Cannabis indica
aagagaaagtgttgcagaataaggcgattctgttagttaaagtgctacggagaaacaacaaagttgaggaagcaatttggaagttagagtcgcagatgcaagagcagcatttcgaattattcaggtaaattttaatgacaaaattttcataagaagagaatagttgtaagatcccataaacttaattgtaattatttaaagaatatttaatgaaatatggagtaatatgtctattaagggaataaatgagtaaggttataatcttactaagttaatattgtgaaagtagggttattattataaatgagaaaaataagcgtaatatattaactacatagattttattagaatatatgggttatatgaatcctattttaaaaataaaataactgtgaaaattcgattggttcactaaaaatatcacagcggtattagtttcaaataaaatccaacaactcctagttatcatgaataagatcttctgttaaaacgtgatgtcttactgtgttaaatcataagtttagcatgttaattaattttttatttattaaaaaattaaaattttaactgagtcaataaaattagttagcatatttaata

SEQ ID NO: 255320 - DNA, 654 bp, Cannabis indica
acagaaacatatagtatcagttacttccaaatattcttttaataaattcaaaacggagtttgtattgacaaaattggaagaaaattacagttttacaaacattgggtacttatgccactaaaaataaacattgggtttatgccacttacaaacataaaactttaagtacttatactgctatttacccttttatttatagactttatgagcaacgcctaaagcatttttaaacaatgtgagattttttacttaagttttttttttttttttttttgtagtagaggattttttactaagttagtaaaaaatgatacaacattagtattgaggagttgcattagcataaatcaaaaaggaatcatattgtctgcaggaaaatgtatgatcatattatttacaatgatcattttttagcaatgtaatattacaacaatgttttagcttacctttgtgcgatgattctgcttgactgcacataacaaagcactttttcttcagctatcgaattttttctactgttttgtaatttgtcaagcaataagtctaccatttttattggttgagaatcgttttcttttgttgagaacaacttcggttctaatttttgatcgaaattctagagatcgttgttgaagtcttttttcttcgtcaatg

SEQ ID NO: 255321 - DNA, 842 bp, Cannabis indica
ttctctaaaagacatgattcaaaaacaaaagtattacctttgttcttatggtttagaagtctgggacatcttgctttaaaatgctcattctctccatagtgagaacataaaagaatacgtctgctcagttgttctttaattgtctctattgtcggttcaatttcaattctagctctcaaaattgaactcaaagtagtagcattgttggaggtatcatcctcaatatcttcaactttcctcttgcccttttttgtaactctggagcgagccctccttgcaagtgacaatgtccgctcataagcacgcatttgagcttttagcttatccatgtcggatgagttaaagttgttgatcatgtaagatacaaaaatttttgttatactaaggtgaaagactgttgagaatgaactgaacccattgttcttttgatagaacaattttttaagttcatcaaaagtaagtgtgaagtgacgctctgaccaggagacatctttgcactagaaagttcatttgcaaaggcataataaatgaggattggggtatgggttgttcatttttacactacaaatatcaataaacagaaataaattacttggttcaaataaattcatacacaaattcaaaatataacaagtaaaacaaatatgtttgcaaaaataccaaaattaaacatattaaattattttccaaggtttccaataaactgatacagtgtcctgtttaggcaagagtcaaagatatcattcataagcacataagcacatacattgcgatttctaaactatcatcacataagcacataaaccacatgaagccatccaaatcaacacaaatcatcgttt

SEQ ID NO: 255322 - DNA, 497 bp, Cannabis indica
tttgtccaaaaatttatttccctttatctctaagcgctaagaaaactctctagttttagaaattatcatgtcttttaggatttctagcaaagtgctttgttgatagaaacttctaatatcaatataagcaccttagatctctttatataacattaagaatatcatcatttgaaatttaaactcataaccctcgtggatgttatagactcaaaaataacttatgcacacatcataactcctatagcattaagaatttcaaattaagatgtgtaatacatttttacacactaataacaagtaattccatcatatgttacaaaataatgacaactaatatgtattgtcatattggtttattacacatatttaatctactagataaatgttacgtacaatgtacgtatacttagttatatatttaattattttttacataatttgtattttagttatataattagttgtattttaatttatgaatgttattaaataagcaa

SEQ ID NO: 255323 - DNA, 479 bp, Cannabis indica
gtaaaccatattctgggacatttatattgactagataaatgtttacaacttaaatacccatgtaaagttgaatcatcaccaaagtgaaattagcaattatggatcgaactctttattattaatctttacaaggtaattttaggagtatagaataataattggttggttctattctaaattctttttaccctgcagatcatgcaatcaattggctttcttggtccagccttctttctcactcagcttagtcatgtcaaaactcctgctatggcagtgctctgcatggcatgcagtcaggtaggcacaagtttaacatgagttggcatcaagcaaagttaagctcttaaaaatgtaaaaagaaagtcatcggcatcatacctcttctatatttttataactatgaaaggagataaacttcttgtacaatggagattcaaatatacgattctatgaggaaaaccttaaatagtaatttatca

SEQ ID NO: 255324 - DNA, 545 bp, Cannabis indica
attattattttattatgtaaaattataataaaaattatgtataaattgttcatcatttaatattatgggtaagtatactaaataaaaaaaaataaaaaaagacataaaaataaaataaaaaaagtattatatttatagtgatgcaaaacttttatcatagcagtgacactttatttgttatatatgtcaaatttgcatcattttttttttttgacaattggagcatatttttatcaaatgaaatatattttagttttacttcacttatttacatttttattaaaggtggtaactttttacaactaatcatattgattttatatagatctggacatatgaaaaaataatatgggaaatttttaaagtataatttgtaaaaaaaaaaattattttatgagaattttttttaaaaaaaattaaaatttataaaaaaaataacataaggtacctgattactcccttatgaaaactagttatccttctggttatccttacacgattttgccaaaattttcttcaagttttctcataaaatagtattattt

SEQ ID NO: 255325 - DNA, 627 bp, Cannabis indica
aaaatataatattttagacaaaaatataatattttagacaaaaatataataaaacttattattatataaaacttatcgaataataataaaaacttataataataataataatttattatataaatattcttagaagcttggtatcgtgttattgagatagttggaattcgttaataaaaaaaaaatcaaagttaaacatattagtaagtgttgtaattttttttatacacatcttactttatttatttttctttttactttatttgttgtaattgtatgtagctagaaagtgaatagtacatactgtatgatttacgcgaagaaaagcttcttgagccccctcgaaggtggagaactccactgttgctatcgcatccacagtcctcttgaaaatatgaataccaacgattccatactgactaaacaatgtctccacgccttcattttctacctctgaggaaaattttttgacatacaatctccgcataagagattcaagcttgtccttactctgtaaaagagaagtgaataaacttaagtaaaaacaaaaacaaaaaacaaacagagattctctctaaagtatacataattatacaaaaattaagcaactcctacccattgcggtag

SEQ ID NO: 255326 - DNA, 483 bp, Cannabis indica
atgtgtttaatttatcgttttaaaaagttcatatttagggtgtttaaacaacatagttgtgagtagatctaagatcctggtaaaataaatttccaacacacccaactctgaagaaaagcttggaatttgtagtgtgatcttgcttatttgggagttttgaggatttgaggtagttattttgaattagttcttgattaatttttgaatataaatacttgttgttaatgcttgatggtgttcttgaagttcttatgagtttcgatgcatgttgttaattgtgaagtaaaatatggtgattttgtgtagttgagcttataggattacatgttattgcatctagactatttgtgtgacattttatggttgttgatgttgattaatttctaggtttggccttgaattctgggatttcgttgaagccttgaagttggttgttcaagcttgtgaaatggagaatttgtattgatttttggaacatgcttt

SEQ ID NO: 255327 - DNA, 998 bp, Cannabis indica
attgtatatacactataaattttcaaaatattattttattaaataattagattattttttaaataatatttgttttaattatatttaactaaaatgagatattatgtttggtttgtatttgatattcaaattttgaatttaaaaaacacttttaattatttaagataaaaattgtgttaacttaaattaaataataaaatgagttttattatttaattaaaaataattaaaataaaataatatgaaaattatcttaaataaattttttattttaggataatttaattaaattttttaatttaatttatgggcttagcgaatagtgtcttaaatattttttttttatttaagaataaactaattaaaagtgttttaactagtttatgggtttgaagtgaccctaaaaattacaaaattacccatcgagtgaataaagaagatggagcatgattttgtaatttatttctaaatttttcaaagattgtaaaattagaaatacccgatcggtacgctgtttatcattattatttatttatttcttttcatttaacagttgattaataacatgatcataaattagtgaattatatatgccatacatagaaatctcacacagtttttaattaccatgcacctcttcatagaaacatgatatttttggagtatcctacgtgtttatgtctttattatttttgaaactgaaagcatgtaaatgaattaactaaaattaattttagaattaacttggtaaatttaaaataaacctataaatttaaaagatttttaaattattatttgataattatggcaggtgatttatttataatttaaggcttttattataaataaattaatcataattcttaaaagagttaatatgtattaattctcagaactaataactaaatacattactctcaaaatagtgagtgggagaaggagtacatgtcaatgtaacgtacggtctccatgttggggattattttaccatgatctag

SEQ ID NO: 255328 - DNA, 1170 bp, Cannabis indica
agttacactagaaaataaaaataaaaataccaaaaaatatcaatgtacaacaacaacaataaataattatttacactatattataataaattatttttacgtaaatgtaatatttataaatatattacaatttgtaataaaattattaattttacgtaaataaatttaaactaattaattaggatttttgccccttgaaatttgacatgtattaatgtatcaaatcatgtccattgagtttttttttattatgactgaactaaattaaaattttattttttataataaattaaaaattattcttaaataaaatatttttataccgatattagtaacttactaataacttaaatcatgtatataacatagtatgttatatatcctagaatttaaattgacatagagtaacttagagatggtttgacttttacaatcataattaatgtgtgtttgcttcttaagtggaagatagagttatatatatagagcttttaatctttagtgggaataaaatgatgaatattcatctttaaacattttttgtgagcttaagaatataacttactctctatttttttttatttttttaaattataagtttgaccattttactaaaaaggtagcactacgtagtgaaatataatatataatatataatatataatatatatttattaatttatatatatgatttaagtctaagtgagattcggctgagagaaaaatgtttaacctttataagatttaatgaggatttcttttgaaatagtcatcattggaaataattattatcttagtctattatagacatatcttcccaattgcacttgaaaaaaattataaatttgataataataaaagaatatatcatataattttattaatttatttatttttatgtatatataaagtctaaaaacgacaaaagtaaatttattattgatccactaccaatgaaaatttacaattggctcacccacaaacgacaatgcatgacacaaaagtatacatagatttaatttggtcttttactctttagaaagttttaaatgaaaagtactacaaataatattatgtttgaaaataattatacaatttatgtatttataataattatactttttaattctcatattttttattactcaaaaattttaatttaaaatatta

SEQ ID NO: 255329 - DNA, 1206 bp, Cannabis indica
ctgacctgactttcagaggctgttatttgaaggaccgtgagtatataatgagtatcaaataaatcggactggtccaacaatgaagttaaaatcttgcatcaagcatccattaacttcttcaaatcctaagggttattgatccaatactcgaattaaagaagaacaacttctacaactccaaattcacctctagagccactcaatgtctctattcaccacctgctgagggctctccttctcatgattctcagtcaccacctggtgcaactagtgatgcttttgcagcacaatcctaaaaggtccttcatctcggaccagtggccaggaagcttctcttgaaaagaaagcacgaaccaaaaggcgtcatgacaggcctattcctgttgctaaaaagctcaagcttaattctccctcggcctcctcgagtaatgatgaagaagaagattccatggaagtgtcttctaaggaatccgatttcaaaactgagtctttttcatttgataaagtaatttctgcagaagatgatagtgtctcttctgaaattgaagaagtcccagttaaaaatgaggaagattttgttgatcaggatcttgaaccatctttgccaaaatctgcagcagtaacttctcgatctgcttctgcagtcaaagcattagcagtagcaaagggaaaacaacctatgaagagctctttttctggtaacctctcttcctctcaagttgtaaattttagatttttttataatgacaatcaacatgattggaatttatatgctacccgtaagtttaaaatgagaaattttttgatttacatgctcatagagtttatggcattgtgaagtatattcaatatcagaattaggaggacactttaactgcctttgaaggttatattgatgacatagctaaggaattttaatgctaatttaactgatgatttgcttgacaaaaattctaagttctttggtaaagtctatgctcgtggccattggttttcattcactgaagatgaaattgccaaagccttgaaactgctaacagatgtgaaaagtgatgaagtgtctatggatcgtgactgcattcttactaaacttactagtgaacaagttgaatgggctggtggtcaaagtattctgagtatgcagtgagttttgggtgtggtacgtatttcgacggttctttatcgtgcaatgaggcctgatatagt

SEQ ID NO: 255330 - DNA, 849 bp, Cannabis indica
tcttcatctttagagatctgaataaatcctctttgtagttcccttgtacaggtcttcaaggctacaaggtagaatattctcaatcggaaatgctttcttaggcgcaccatggttcatggagccactgccaccacttccacctccttccccaaacgagccaaatatgtcatctctgaaaattccacttgaaaaccttgaacccctcatacttcctcctccaccacccatccctcccaagcctccaaacggtcttgaggacccgaaaaactccgcaaaaatatcgtttgcattttgagcattgaattgaaacgtcgtgggtccatctcaggtcaagaagtatgcagctccacccggtcctccggcgcctagtggtggcatttgacccttaagcccttcctcaccgtactgatcatacactgcttttttctggaaatcactcagaacctgcaaaaatgaaattaaccataaattgacagctaattaaaaagcttcatattaataaagttctatattttggagagaaaaagaagggtgggttttggctaaagagacatacctcataagcttcagagttttgcttgaatttggcttctgcttcctttttattatttgggttcttatcagggtgccatttcatggcaagtttcctataagctttctttaagtcatcatcactagcattcctgtctactttgagttccttatagtaatccacaatggccatcgagatcctatcatcgttctcttcgtgcagcgtgtgtcgcctgccggtgatggaataccagtgtcgggtctggaggataaaccatcgagagtgaaggagagggagagagagatgatctgaataat

SEQ ID NO: 255331 - DNA, 2296 bp, Cannabis indica
aaataaaatatattaaatatatgatgtcatatcgttgttataacaacaaaaattaactatttggacctaattgcaacaaaatatctaactttttgtattattaacgtaaaaaaaattaaatatttaactgcaacaatcgaaaagatttgagtattattgctgcagatatttttatttatttctttataattaaattgcaattattgttttttaatttgaaacaaaaatgtgatacagattgatgatatgaaagaagaaaaagaagaacaggcaacagaagtacaccgtctcctgcaatttaatcctagtaaaggcgaagaatcagatttgttgttggactgccaggttgctgagctagagatggagtcatctgatcctattgtcgaagaaccttctagtcttgaagatgctagaagggttgggatcctaactgctgaagtaaaaaatttgaaggtaaaataatgaatgttacttaaccgccaccatcttcataatgattgtaatgattacacaatttctgtttttaaacaggccatgctaaatgcggaaagaagacgagctgatgattatgaactgaaatacagagaagcccatgaaaatagtgaggaaatgtatagaaaattagaagaaagtgaaagaacagttgataaactccaggattccttaaacaggtagcatttgcaatcaagattgaaattataataacactttttactaagtctcataattaagtgctgtcttatctttctctcttatcagaaatgaatgatttgactaatgctagatatgatttagtgtgtctcaggatgatacgttccatgtcaaatcaattttccgagctgaaatcgatcttgcgtactgcttcaaaatcatgttcaaactccgggcttactattagacacaacgaggttgaagcttcttcaagtagttccgaatattcatttattgacccggatttcacttttccagtgacaagctcaacctcggttccaaactccgggcagttattcgttcaggacatttcctcagatgtttcaggttcgttcatcagcttatagtaaaaaaaacgagaacccttttgcaaatttacagtgtgaaaataaacaaccataatttacactgttcgaccctatgaacatagtaaattcaatgtagttattttgcaaatttacacatttagtttggcaaatttcccattttattacctttgttttcatttatttcaggatctgaaagtgacaaggaaggagcctttgatgactatttctaatcaatggtggagatctctactgctgtaattttatctcctatatatacaagacacacagagtaggaaaaggcacacctttcttaggtttgaaattaatgtactttcacattagttcttcaaaatatcatatataggtaagtaaatagtctcattcattatattacttagttacaatgttaattagcaaacatttttataagtatagtgaattaattcattgtggattagtgctatacaatatgcatggccatgaaagaaaagaacaacaataataataataaaacttctttctgcaatacaatatatctcaacatttatttatactatgttttgtttggtagacaagaaaagtggaaagtgagtggtcccattaattttttttgggtctctttttgtattttctcagctcaatccccattagtgattttgtatgcatggccatggatggagagtgatcttataataataataaaaaaaatgatatatgtactttattaatgttaatttccaatactagaaactacacattttgatgccaatgaggatgaaatgcatttgcttttcacatttttagtgtcacttaaagtatcgtagtgactatgagggggaataaaatgtaaatataaaatttaaggggctaatacatatttttttacaaataaaaattacaaaattaaaaaaagttaaaaaaaaataaaaattgtgagggggagggaaggcctcccacaactctcaagtattataaaatatcactaatcaattataagatgctacctttaaatggttcttagtattagtattttatagcaatgctctctcaatttattttggtataacaatttattgatcaactttgatatgccaaattgataacaaaagcaaatcatattttataagttcaattgaactgaccaaactgattgatggacacttttagttcttgaaattttaatctctgtcattgtatattctttaaacatattccttattgtattttagatactaagggtcagtttggcacagttg

SEQ ID NO: 255332 - DNA, 2114 bp, Cannabis indica
gggcataaaacccaacattatggtcttttggaagcgtactctaaggatgaaggagtacaaaaggttccatgactcatgtggcaccgcatgtctgtttttggacagtttgtttcccaacgtgtggaaggttttggagcatggagttggtctcatatctcttgcggtgcccatcttccacttaggacttacttcgcagaattttgtgttaaagctggaattgttcccttccagcacccactagtagcatacaagtttctaaggaaacaatttatattctgaaaaatcccagggaaagtctgctccaaccccaaaagagattttgtatttttattagttaaaatcccaacctatgcgaggatatccctctaggattgggttttaggtctccagaaatacaacaatgccgaatgtcccacgagcacttcctctcacagtctaaactaccgtgagtactggtttttcacaaccgacttccccatgaggcgagttttaacactctcgttagaattcagaattccaagtgtcatcttttagccctttgcacttttactattttgatgatttgtatagtggctccatttcaaaacctgattttaattcatttgttgtgttccttttttgcaagatctgttcctaaaacggagctcacagaggagttaagacaaagaatctccttttatgagccatttctaaggaagaattgtaagttgaggggctgcttaccacccagttattgtgccaatatggtctcattacaacctttcagtgcatccacggagttaacagtaggggaaaacctcagactcccagtgacctcaaagaacaaacgactttagagctttcattggaaataactaaggcagccaaggatgaggaacttcttgctgctacctgggacaaccatcatccggagcccctcacggaagaagaagaaatccaggctaggttcagggctgcgtacctagaggcaagtacttttggagccagtacttcaggaagacgtaatcagcccttccggatgatccgtaccccaagcctttctcagatgtcattggtagaccaagggggttttgatcactctttcctagataaagccttgtaaatatcccatgaaagattacatcgatatggtagacaaactagttaggcacttgaacaatcgagaattccctccaaacactcttaaagtgggctcttttctcactatgttcttcccaagcttcaggaaaaatgatagcttcatcaatcaggaacaattaaacttgtttgcgagaggggaaccatatagttgcacgtttcacggttggactcacatgatgtcttcttacctttgaaactatatgatttaggttgtttctttctaccttttaactgatttgcttgtttgtggcgttttaattcttccagatacacttgagtccaagatgctcagcgacctcatgaacaccatcaagaagtaaatgttacggcagacagcaagggaaagtagaagaaatcccgagcccagaaatccaaacaagtaccgaatcctttggcaccccactcaaaattaaataccctctcatgactcaaatgagaacattaatatttctctcatttgtgaaattcattgtttgtgttcactgaagaagttcctaagcaaccaggtgagaatgcaaccaatacagtaaaagaaaaagtttgagtgttggcaagctgctaacaataaagctcattactttatgttgtttagcatggttgataccttaaagacaagttttgccaacactctcacggctacggagatcatggaccagttaacataattgtttgggaaggcgttagatcaagctcgttttgaaacgaccaagaacttcatcaatgcatggatgaaacctcatcaaaacatgtgtgatcacctactcttgatggctagttatttctaggaagctgaaaaatcatggagctattattgatcaagaaactcaagtgagtttgatcttaaatagtttgactctagattttctgccatttacttcaaaatacatcatgaacaagttgacttttgattttcacaagttgatcagcaaccttcacgcatttgaaaattttattggaggaccgcaaaaaggagg

SEQ ID NO: 255333 - DNA, 1045 bp, Cannabis indica
atgcataagtgatagataataaatacacttgaaggagccataactcccccaacattacttaaagtaggcataagacataggaagagacagggagagtaataaacacaagtctattcaaggattgcaaatacaagttacataaaaaaaggaataggaatagaaagacatactaaacaacagtcgagtacagccaaaaattacacacaaaagtgacaagtatctaacaaaacctagaacttaggaagttagaaacgttcgcggtcgggatggtgccagcagagtatgcacagagaaccagggatcacaatagaccctcgaacgaccctcctcagacaacggcggcagcccgtggggaagcccgggggtaaaaaggaacaccctcccttaagcactcttccatccgcctctcgttagctaaacgctccctctccaagtcctcatcccaggcccgcccgttccgagcttgcatccgacggttatcccggcgtcgctcagcacgtaggcgaagagcatggaattcagcaggcaccctagtggtagcagagatgttacgtccctcattctcaaagaaattctgcaaccattcttcatcagaagatgaagatgtatcattgcgcctagccctataagccgtcatcatcctaccaacaatagcttcaccacagggccggtagtaacgtgaaaaaatcgagggacttgggggggatcgatccccgacgtcagagtggaactcatctccgcttgaagattcaggaagaggagaacctgggggattcgacatttctaaggtaggaaaaaaggatatataatataaaaaaaaatgttgtattcgtatcaaaagagaaacttggaagctacgctagaaagacaccatgaacaaaaggaagtgttggtttaaatagaacacaaaaggtggccaaggaagggcaagtggaaggcggaaaggtaaatctgcctacatataaggcattaaaatggcaataaaatgtaacgtttcccaaggtgtcaaaaacgtttcaaaaaaaaaaacggtaaaaagaataat

SEQ ID NO: 255334 - DNA, 616 bp, Cannabis indica
tatataaagatatatatatttaaaaaaatattggtgtcaagcaaatcaaagatagagggaccaaaaaatatactccttaaaacaaaatggaaaagagccttctaatatattaaaagtttaattagtataattgagaaattggttccctacttttttttttctagcaaattagtcctcaaattttaattttttgttggggtttaataatactcgttaagctggcaagaaatcatagttggaggataactttttaagtgaaaacaaagttggggaccaacttgttaagctatgtatagtaactcccaatagattgaaactttactgtttaaaatattttactaaaatattatagtatcgtttggtaatatttttatttttttaatttttaaatcacaaaaataaaagtaaaatttttgcttttgaaaattttatttttgaaaaacaaaaatctgttctataaccacttttgtttttcaatttaaaaaatagaaaataaaagcgtgttctgtaaaattcatttttatatttattttttgattttatttaagtcgggtctaggtctagagtcgaatctgagtccgggttaggagttaggtttagtgccagggatggggtc

SEQ ID NO: 255335 - DNA, 672 bp, Cannabis indica
aaggaaaattcatgggagacttctttggaatgatgctcggcgtgccccaagttgaaatatatgaacttgggcacccaagatggcatgggagcctgcactaagcgcccaggtggggtccacatctctaaaattggtctcgttgatgttcaatcttcttcttaataaaaagtgctccacgaatttcagttttgtcatttgcacgggcggaacttggtgaaacgaaagcaattcccaagttgaaataacaacatgggtgcccatagttgtgtatgggctccttcgggatgtcgttgatgaaatatcatgtccttgcattgttccttgatggatttaaggatttgggatccaagtatgtccccatatacctaaaccctagttacagtgcgcccagatcgactatatgtcagcttgggcttctaggtgtcagggtgtcgtttcatgcaaactcatccccaaagtatgaaacttagttggggcatgtctctcatgtatctgacgacaatggttgagcagattgcccataagaaggtgactggaaccaaaattgatgcgagtcagcgcacaagatatcaacttgggcgcccaacactaatgttggtcctaagttgagctctgagatgtccacgtgacatcctcagctccatggttcttcattttagggtaattatgatg

SEQ ID NO: 255336 - DNA, 933 bp, Cannabis indica
agatcctggtaaaataattcccaacagttccacatactcgatggaataaacaccacaatcaccactgcatcaagcagccatgaagaaattaatgtaaaataagtaagaataaaaataattaggcacaataaaaaacaatgttacctgatttttgccttcagaacaatttcgtgactaactctatcaaaatgcatctttagaagcttgctgtagtcattcatttcaactgcaaggatttggttgttgtttgggaattctccacatgcatggaacaacgtagggagtagatcttaccacatcttcatgatggctgctaagtcttttttagggaaaatggtggaatcacaatcatacactgttatttttcacaactcgatgtctacctcaacagctacccaatgtgaatttgttggaagattcaacacaaagtaaaggtaatcattttccctccattttgggtagaattggtcctgtataaatagtaccattaaaataatgacaaacaacggattcagtcgataatatgacgataacaactaaacatagcacgtaaaaactcttatttctatcaagaacctatcaagatagtttcaataaacagtcgagaataaccatatttgacggcaacccacaaaggttaaatattattaagaactcatcgagaatctatcgataataactaaaactatagcaagaaaaatttcttaatcctatcaagaacctatcgagatacattcgataatcatcaaaattaacccaaattttgttgaaaactcatcgagaatctatccatgacaactaaacattattgtaagaaaaaatttcttattcctattgagaacctatcgagaaacttttgataattagtcgagaatacggaaatttgatggcaactcacacaagactacatattatcgagaactcatcgacaat

SEQ ID NO: 255337 - DNA, 1984 bp, Cannabis indica
ttctattttctcacctacttggactgtctattattatttcaaatttaatactatacttcttaatttacattatgaagatttccatgcttatggttgattacaggaaacacttcactttcataccaaaaatggatatgatcagatagaaaatttggaagaacttgaggaaaaaagcccttctccaaaacaaagtctttttaagaactggcccctaatgtcatctattatagtatttagtgttttccaacttcatgacatggcttacgcagaggtagtagatcaaattcttgcattaattcaataaataaagggtttttttttttttctaataaccatagtacttcttgggcaatctattttcttagatttttccattatgggctgtgagtcccaaaaaccatggaggactaagctattcaagtgaagaagttggtgaagttcttgccatttcaggtacaccgctgtatcatcgcttttaatccatcgtgtaagtttgcaggggcggggctagaactttccttcaagttagggaaataatcaaacaatgtttcatatagccattttcaagttaatcatatctaaaatttaaaatttaatattttaaaacaaaacataacattagtccattagtcaattgtagacattaaaattgaaggtgaatattgccatgaaattgtactaaattttatttaaagcttaacatatttgacatacaattattaattataataagaacttgaggaggcatatgcacatacaattactgtacagtttcaagtgcactaccttttgttttgtattgttgagaaggttttacttcttccacttacctattattatgagaaaatagagatgttagaattattgtagaatccattggaagaaaagaatgatattgttgaattgtctctaattacttcttaatttaaaaaagttgtttagtgctgtgattgaggagatttgtggagattagtcctatataaagaggtaggataataatatgtgctcataatatttacaccaaaaaatacacttatgcaacaagtcattttaatctagagagacttgtcttaaataaatataattggttataaaaaacttacaatgtaagtgtatataatgttttgatgtgtattatgagtgcccatgtcatgactctaaagagatcacacaatatttaacatgttgcatatgattctcctcaaaagactaacaatcttattttttttcctaggatttgtaatgcttctctttcagttatttttgtacccaacaattgagaggacctttggacctgtactgttatctagagttggagcagtatgtctctaatattcttcatctataaccagttttggcattcatattgtgttgtgaaatttatactaatttcattgttttttattgcaaaggtcatcataatagttgtgttatcatgttacccttttatagcaaagttttctggactcaaactcacaatattaattgatctggcatctgtgttacatattgtaatatcagtaagtatctatccacaaattataatttcaattatgttattatatattttgacttaacatcattgttaaatacattgttaggcatgtattactacaggaatgttactactacaaaacagagctgtggtaattgttctatcttacttaatgtaatttgtatacttaattttaagatttcaaagttagtaaccttagttttttgtcaaataaacttcttataccaatttttttagagtcaaagccaaagaggggctgcaaatggcatatccatgactgtcatgtctctattcaaagcggccggtccagccggtggaggtgccttgtaagtttatcaagttcatgattcatgattctcaacattaactgacaattatgtttcttggttctttaaagtgttatatttacatattaaaaaatggtatgatttacagatgattaattagagatttttccaaaaaaaaaaa

SEQ ID NO: 255338 - DNA, 939 bp, Cannabis indica
aattatttgtgattaaaacaataatatttagatacaagttgtcactaatttaattttaaccccaataattattgtgaccaaaaatacatttattcacaaattttttaatcataacatatgaatgatgattaaattttgtgaagtgtgctaaaacacctttcaagagatgtaccacatatttttcctaagctacggttatggcttcttttcttcaacagttctcttcccgccaaaaagtatgtcactttaattgttgtttgtttctttttgccttggaagaaaacaattttaccatcaatccatcatctctctttaaaaccaaaattaatcgtactcttttgttcttttgttcaatttttttttattgtgtacttggaaagaataaaagggacggttttaatggaattgtcatcgtaggtgcaaaacattaatgtgagtttctacactactgtcgtcttattttacctccataaattccatgacattgaaaatattccatcacagaaaaattaaataggaatctttttgtacttatattatatgtatatcttaaaagaaagaagaatgatagtgttagagatttgattataatagaagtaaattaaaatgtattacactaaaatataatataacagattaattaaatatatattacaaatatatatattatataagaaagaaagaagattagaagtgaggattacctcatttgaataagatattattatatttgtccaaaaaattaattttttgtttttttatcctatgtgaattctctaaaaattaactttgagaattatcaaactttagagttttctaacaaagttgttttttttgatataaaacttgtcttcacaaatgagcatattaaacgtccttatatagtatttaaaattcacagttgatataacacatcccatgaatgttaccagccaaaat

SEQ ID NO: 255339 - DNA, 496 bp, Cannabis indica
gtaaggtgtaagcacttgaaccacattaacacgtaatgctttccctccaatttcaaaaagaaagttgcatttaaaattcaacaagagagaagttgcaagtacgcaaaacaaggatctatatcataaggtgtattacatgaataattcattttcggctttttacaaagagaacagaaataggcatcaatttgttcagaagtctctgctatctttcaacagaaaatcaaactatatggttagcaatgaaacaataagttcaataataatactaaatgagaattgggttgggttagattgaacattttgtgataccctttatcttgtttaaccaatcaaatccatcaacacttatagtcacttcttctgaacttttcgtagtatattcggggactaatttattggttatggaatttactctatttcagcttaccaatttgcatacggtgaagaggcggccttagcttttcaatagttgaaccaatggcttcaacatcaa

SEQ ID NO: 255340 - DNA, 1042 bp, Cannabis indica
taataaaatggattgcatctagtcctttgccaaaatcttaagttgtttaacgttttgaacttctttagttcaaaattactggagagtagttttgttacttaaagcctcaaatatagaaacgttgcccagctatgtatgcaagtggcatagtgagttccatacgaaccttagaaacttaaagatggtccaagggccattcagtgattctaatttgtaattactactgaacactggtgtttgagaacgagagatagagacgaataggggatggaattcatttatataaaaaataaataaataagataagcagggctggctggttacgacccgatcagcggggcgaaactccaaaatttgcctgaatatttcaggtcaagaaccctatgtaacaccaccagttatgcagtaaatttgaatttggttataagtgaaaatttgtatatcttcactaactgactgtacttggtccaaaccaaactaattagaaccagctttttgagatttgaagtttcagttaactgcttcagaaaattaagtttcaatttacttatccgctacttttgagttaggtctttacagcttgaccaaattgagaaatgaagagtgttactgtaaatctcatattacaattttttagttaatttctgtgcttgaaaatacatgttggaattattttttttttttatggcggtgttcttatacttacaacattattcttgtaaattttttaaaatttttgaatagtttatagtgctgaaaatacgtttaaattttttgaacgctgatgataaattttttaatatctatatttgcacttttttgatttactagatgagagttacgtggcgagccacgtaaatattagttttatataaattttagtggttttatttaagaattcagtaactaagcaacgacaacaacaatggtagataaatctatttaagttttcatatttgtaaagattataaatttaaacttttaatttcttgatttgagattttgaattgttttgattttatttgtttatgaatttattgaa

SEQ ID NO: 255341 - DNA, 377 bp, Cannabis indica
tggtttcggcctctttcccttcgagttgggcctctttccccatgagaatcttctgatgttcattgcattcatcagtcttggtctttgtggccttcttgacatcttcaaggcttttcttcgacctctcggcttcctgtttgagacgggtgatttcctgctgagcatcattcccttgtttaatcacgacctcacattgggctagtgacttttggacctcgccttccaggtatttgagccgctcaaggatcaccgatgggaggaaaaagagaggaaagaagtctggataattacaagcaaatgaatttaagaaacaggcagtaagaagaaagaaaaaatactatggattaatacaaaaaatttaccatgagggcataatg

SEQ ID NO: 255342 - DNA, 524 bp, Cannabis indica
gaaggtttatttgatcacacaccggctgtatcaactgtacatccagaagtacaaagtggtagaaaaccattcaagactttcatatgtggtcatctcatctgcgatatccagagctcatcaaaaagacttggcaacaaacaataagagggacaaaaatgtttcaagtggtattaaagctcaaagcactcaagtgggctctcaaagagctcaacaagcagagcttcttcaaatagcagaagctcaagcaaaggctgctttacttgattgttaggagaacctccaaagagatccactcaatcttgaaacttcacaacaaagtgctagctgccagaacgaaatatgcgaagctacataaagctcttaattcatttctccaacaaaaagctaaacttaattgggtgaaagatggagatgaaaacacgacaattttccacaacagtatcgggcaagacaaaggcagaatagaatcctctcaattgaaaatagagagggcattagagtggatgatccagctcaggtacaca

SEQ ID NO: 255343 - DNA, 602 bp, Cannabis indica
accatctggccccggggatttattcctaggaatagagaaaaaggcagcttttacttcctccaaagaaactggggaaagaagaatatcagcatgctgtccggagattataaggccttgatttatgacagataacactatttgtttcctgttatacagcttgctgcccaataaagtcgataatgtttgtttatgtagttaatatttgttatagattacttgttatgctttttttttcatgtacgtagttactttgttatagctaactttatattttgtttgttaatggtgtagatatggctaattaggttcaggatcagattcagacccagtagcagagtgtcctagggcaatacctacacgaggagctacttagatgaatgaagtatccaagctgatggaccaaggaaaaaaaaaatggcactctaactaaatgataaagaacagtactatggcaggaagaaaagggaagtttttgatgttgtggctcaaaaacaaaaggagattgacaaattaacagccgaaatcaaatcccttaaatagaagtaaaatattgcccaacaagagtaagaaggagaggtggctaatcaggcgtatgttccaca

SEQ ID NO: 255344 - DNA, 891 bp, Cannabis indica
gtgtattcacattctgagcttctttcttcagaaagaggtgttcttggtagagttgatagaatctattgcaatgtcaaaagagtccatgtctcatctcaaagccatttacttccttcgacccacctcagaaaatatccagcagttgcggcgtcagttggctactccaagatttggagagtaccatctatgtaagtttttctaattttgttgggaaaattgaatttagttgcatgaattcagttgggaagagtaacttatttcttgaatccttttcttacgccataccgtatggaaggaagaaataatgacatttatggtttcccaaaaggctttgttctaaccactccaaataagtgatcacgactttcttcatgagccctacagatcaagcactctttcactgtaatctctctggtatgcagcctccacacagctaaccacactataaactcttttttaggtaaggctatacatgatccatattccataataccacttctcctcatgctaagtaaaaagtaacttagagctcatatcttttatattgtagcatatatgaatcaaatctgtttggtcagctattgtctctgtcgaaacaaaaagaagattagaatccaccgatgagtattattatttttcttatctacaatttttagtacagaggttatcttcaattatcaataatttaaagattgatttttaattttcttttttatcttacacacatttaatttgtgtttccttaagtatttgaacatcaatttttagttcatttttggattattttaagatcataatatattacagttaaattataaaaactttcttaaacgctaatgtattgcatccagtatttatttttaattgtcaaaattataaattatattattt

SEQ ID NO: 255345 - DNA, 506 bp, Cannabis indica
taaataaaagatttggacattcacataattaatactatttataacatcattattattattattattctaactatattctctactatagttagtatttgatgcttttgattaaaatacaattaaaaatatttagcataaaattatggagctccttacatttagagagctacctatcctttttctattatagaaaactaatttttatattgttcgacctcattttttcaagttatatttcctattttagctaaagaatgtatttagagagcatgattgaagatgatctaacaataatattgctactgttcctaagaataagcaaggatggcgataacataaatagtcacttgtatgaaatccacacatcttttgattttttcttgagccaaacacattcgaaagttataattatttaggggttgtttatacattttggtactctgtattttatctaaatacaagttagatactctgtgttttaataatgcttatttggtaccttgtat

SEQ ID NO: 255346 - DNA, 1128 bp, Cannabis indica
actctctctctactctctctctctctctctctctctctctctctctctctctctctctctctctctctcaatgcacaaggtttggtatattttttaggttaggggtggtggcgcgcgattgggttttgggatgacgagtttggggtggtgcatcgaatcgtctcatatatgaaagtatctttaaatctattttttagtaatttttttttaatttttagtttgcgtcagttattaaatgaagtaaattttttgcttcatttaataaccgatgaaaaatgtgaattacttttggcatcggttattaaatgcaaaaaaaaaattagtatcggttatgaagtgaagcaaaaaataacaatacttgtgtctttagttatagcgtaagttatacaaattggcacaaattttttaaatagtcacttaaaaatcaaagcaaaaagccttttttgtagtagtgactactataattactgaaataaaagctcttccatttatctcgtttagcgaaactctaaagaaaccatcatttcacttctagacaaactagaaactttagattattatatctatgattaactctttcactcaatttcactaccgagttcccaagatataagcatgagctagacctacaggtaagcgggtaacggacaagtcaaaaaacttgtgtagtacaattaagctgaagcttaatcatctaataattgagattaattgacttaagatcaactagataatattgactaagaaaatatcaatttatgatatctaaaaaaatatctttctattattgttttgtttttaaataataaaaattaaaaaaaaaatgtttatatttcttaaagaattattattgatgctgtaaaaaaaatatttattattattatattttcaaaaacaaaaaagtttatgatcaatctttttttttaaaaaaaaaaaaaaatctaattatataactaaaaatatacataactaaaataatataattaagtatatgtgtattttacttttacctaatattaacctagtaatatatatatatgtatatatatctattttatataaagtgtgcatatataacagaattcttcgtttatgaaaaattcatgggtgactttttatttatattaa

SEQ ID NO: 255347 - DNA, 988 bp, Cannabis indica
gaaagaaaatcagatggagcagaaagctcatcataaatacaatctgacataaaataagaccgtctcgcaatgcagtgagccgccctatttgcagatcgtttgacaaaagaaacaaaaacattagttaattctgaaagaaagctttggcaatcttgaataagtaagccaaactgagatgacatttgaactgaaccattaatagcctgaacaactactagagaatcaatttcaatttccacatcagataaatccttcttctttatccagctcaaagcctcctttacaccaatcacctcagcgatctctggagagacccttcctactctgcttttcgaaaaagcttcaaccattttggcttctccatttcgaattatgcaaccaattccaaatcgattttcagattcgaaaagagccccgtcaacattgatcttgaacttagttaaaactggtttcacccaatgctctcttccattgctgaaattaacattcaacaatggtgtaaaaacctttgtttgagcatttttccatgtgtcaagattagtcctagccgaacgaacaacttctgaaactgtagtcgacttcttattccacaacatatcattgcgcgccaaccaaatccgccacaaaatcatagcagtttcctctgctatatgcttgctgccctgctgcagaatgtcacagaaccaagtgaaaaattcactttcatttacaccagcagcagaaactgctgcaatattccagcaggagtgagcaaactcacaaccaaataaaacatgaggaatcgattcaggggccttattgcacagaggacaggtgagatcgacatgcacatgtcgattggagagctgtagctttgttggtagagtactagaaatcacacgccaaactaaatgatgaaccttagctggaacattcaactgccaaagtcgcttccagtacacatcagcaccctcactcggccaatctccactaatctgctgcaacaact

SEQ ID NO: 255348 - DNA, 851 bp, Cannabis indica
aaaaaataatgaaatttataaatacctgggagggcaaattattaattactatagatggacgattactgtcatttcttagaattctccatcgagaatctttctagcatcttattgatgtaagttgcttaagaaaatgttaatgttctcttttttctatctttatagatacgaaggccaaaaacttaattaacttctcccaaatcttttattcaataatgcttttactgttgttatttttttgctttcttgctccttgctgttttggttgtttttgctttggtggtagagctggattagtgcatgtctttctgttgtggcctatcttttgcaatgtccacactttatttgtgcctttggctctccttttgatcttattcttcttcttctaggtctttctgcatgctttttcgtgtctagtggtagttatatcatttccaagctcttaggcagtgtccattcactttcatttggtaatgagtttgctgttgtgtcatatgttgctttcatttcgtctgttttgtagtattccgcaacatagtcataaactcgcagtcatcttttcgagaatacaactattgcatgagcacatagaatttcatcttgctagaaccggttacattcacatgttttgcatgtccaataaattgacaaggaatttccctttcccgagcacattcacttggtggagtattagtttataactggttattttatactgttattgaatatctctaatatatattgtctgtatatatatttatgtttagtgtgttacctcatattttcttgtttgaataaagttttctctgagtattttttctgtcactattgaaacttttgtgaatgttcca

SEQ ID NO: 255349 - DNA, 2969 bp, Cannabis indica
aaaagtaaaatttttatttttgaaaaacaaaaatacgttctgtaaccacttttatttttcaattttaaaaacagaaaacaaaagcgtgttctgtaaagtttatttttatttttatttttttattttatttaagtcggggctaggtcaaaggtcatattcgggttcaggacagaggtcgggttcaacgccagggccgtggggggaggatttgggttcgggtctcgtcggaggctaaaatattgattaagaaaaagaaactatttaaaaaaatattgaaagtaactttttttgtttttaaaaattttgattctcaattaaaaaattaaaaagtaaaaacagttttatagaacatatttttgaaaaatatttttacttttccaattttaaaaatagaaaactgattaaaaaagtgttaccaaacgccatcttaacaatatgaaaaagaataaacattacaacttaataatgtcttcttgttcgcacatccttcttaaatattattttaaaaaaagtaatttatgaggtaaatgtttaagtttaatttctaattgtaaataaatatttaaatttaattatttacgataataataattaaattaatattttaaaaaaatttatagctatcttgtaattaattgttaaattattattcaagctttattttttttattaataatatatttaaattattttttaaataaaaataaaaatttaataatatgtattaattataaattattgtgtagctattaattttttgttagcataataactaattttattgctcagggtcagggccggcccaagcattttggggccttgtgcgaaattttaaaattgggccctttaagaaaaaaaaaaaaaaaccatgtacattaaaactacaattttgttagtagctttttttttttaaaaaaaattgcttcataaattttcaattaatttttttttatttatgtataaataataagaaaaaaaaaataaggcccttttaaaaaaaaaaaaaaactagggaccttaaaaaagtggggccttgtgcaatggcccaagctgcccaatgcttgggccggccctgctcagggtcaaacaatatatttggttatataatggtcattatataaggagaaatttcttccaactaaaaagtctcgttttctatctgtagtacatatcttgctaacttatgtgttgcattattaccatttttgcattacatgaagaagacatgcatctgaaaagacagataataatgacctaataaatctaacaatacaactctatcgaaaaacatattttaaaaaagagttgactgaattgacaatgatttcagcatcactctctacaaaaaaaaccaaaaatcctaattctaaatatcattttaaagtataagaaatagcaaatacttcaacttctttaagaaaaaaaaaaccaaagatttaacaaaacatcccaacgaaaacaattaaaacaaaaataattgagacactattaattaataaataataagaaataagaaagaaggtgttgtttcttaaaaataaataaaaaagtaaagagggatgtggtggtaagtgagtttgactggtccatgggggtttgggttgtagtgagtagaatagaagtagggggtgtgtgagtgtgaggaggtcggcaaccgcctcttcttgggatggtgacgtgtccgtacatgtgatggacacatctgatcccacatcagaaagcgacagctctaccaatcatatatcatcaaactccatcgggtccttcatttccacgttacaccacacgtgtattctttttttctccagccgccctcttcatcaatactttggataagactaaatctgccaactcattattattattattattattaaaaaaaattaagtcaagcctagttttaaaataatctttgaagattgtgcatatttgactttttcttattttatttttactttttaaataataaataaaatcttattcttttattattattactcttataaactcatcattaatcatcttaaaattacaactaaattacttaaattttatagttcttacgagtataaaaatttaatataaattagttctaagttataagaaaatatataattaactttaatctaatatttaatataatttttttaatttttcagtccgtttattttatttaatttttaaaaacaattcatttgtaaagtaattattcgtaaactatattacatttagtagttatcaaattaaaaaaaataagtaattaaataaataatatatttagtgtttttttttataacaaaatatatttattcttttaaatttatattttttaatgaaaaaaaaaccttgaatttctttccgtatggaaagaaaaagcatggacaataaaacacaatttgtttttcattttttcttttacatttatgaagtttagcgttctattatatatttttatagaaatattcttttttttaaaaaaaattttattcaactcttatatttatatatattgtaagaatttaactcttattatattatgcatgcacaaataagaaaaaaaaagacaaacatttttgtagaaatagattagaaccatatgttatagatagaatggaaaactacagtagatataaaaaaaattgtttattttgaattataaatttacttttacatgtaattttatggcccgtttggtacgcaggattggactagattggactaaaaaggattggactggactggacaagattagattatgctgaaagtaatcctgtgtttggtttaagaatggactggactattttatttattttcttttagaaagaaaaaaacttaaattaaataaaaatataaaataataaattaaaattaaaatatataataataaataaatataaataaataattcgtaacaaaaaaaataatatatcatatataattaagaatatatcataaatatataataaaat

SEQ ID NO: 255350 - DNA, 626 bp, Cannabis indica
aataatttaatattaaaaagtgataaatttaaaataatcaattcaatcagcttagattttagttattatgtaaattaaattatatttaaaatataaaattacttacaagttaaatatatgagtaaaataatactgattagattaatattcatctaaaacagatgagctaatacttccaaaacgaattcacatgttccaaaaaacgacaatgagatcatactataattaatttgactttcattattaaaagttgcattgcatcatttgaataagtttggcaattatgttatgaattgtctcattgacatttttattttgggcacaattacacgtgtttttttcttaaaaaattaataagaaaaaagaaagaaaaagaagattttgagtagaagctgagagggtctaaactcgaagaggcaagcaaatataagaggggaaaagcgtgtggagacatgaggtaagcacgtggtgggcacgtgcatgtgtggacaatatagaaacggcaatataaacatttgttttgggcgggtggatccaatccaaccctacgtgacgcaaagcttgaacggcttctgtttcatattaacaaatgcaaaatgagaccaacttcccataactaggttaaa

SEQ ID NO: 255351 - DNA, 905 bp, Cannabis indica
ttttttttacttgttgcgcaccgtttaagtaagattttcctacaatttgctcttttatattttctcaaactaaataagattcttagtattttgtaattttttttgtcatgtttggagttatgagttttgttttgtttgtaccaattattaatatttttttgtcctttttttttcagttttctcgaaaaatgtctctcatttttttactctattttctcttttatttttcttataaactttgcttattagcagataataatagaacaaatcatatgactttatatttagataggacgactgatgatcttaacttcaataagtgaacttataatataaacattggcaggtcctccacacctagtataattggaaaaccagtcttttttttatttaattaataaaatattaagaccatgtttaatggttacattaatttggtgtataattttcactaatttagtgtaaaatattttattctttggtacaaactttaataatttatacttatattacactaaatattctactaaataaatttattttacttaaaatattttttattttatatcatttatattaataatctaaaatagttaatttatgaaataattagtaaaattatatcatatctactaataaaaatttaaaatcttaaaataatttaataaaataaaatatttattaaatcaattaaacactaacttttttaaaaaaataaattattgaagttttatagtgattttactattttcaaaatgaacaaaaaaaaaagaattaatgcaaaaaaattgtttcacctataataccaagcatcttaagaatattaagattctcgtaatatataaagttcatatagttaatattttgatattctttcaaggctaagattcacaagtgatcaattt

SEQ ID NO: 255352 - DNA, 763 bp, Cannabis indica
tacattgaaacagagttttatttagggcataaaacccaacacatacttcatccatgacacctaaacactaagtgacatcttctcataagtccttcacaagaactcatcaattcttggtctgcaacaccttgttctcattattgtaacattcaaagagaaccatagctagaattcataaacttctcacccatgatctgcaaggtagaatatcaatacaactaaaataggagtacatcattacccactaaacaagagggccaaacctctacgaatctttttgtctcctgtacgatatatggttcttattgacatgtggtgattgtctaatataaataatttggctccactgcttgctggccaaatcctcagtgaacattgtattttgaataaattagaaaattcttgttcatttagaaatagaaaattaagtcttctccaatatttcaatattggttctacgagttctttcatttataatttttttgaaatttacctcatataaaaaatcttacaatttgtttttcttatggtaaaaaatgtaaattgaaccgtgagatttttattatacctttgtataagaattatggttatatctcccaatgaagaataaaaagacttatttttgatagaatttttgaccccttaatttaacaaatattagattttgtaaaggggtaacatacaaatataaggaaatgagatggcaaaataaagtttcaacgtcttataattgatgcatatttttttatgaatctttccttat

SEQ ID NO: 255353 - DNA, 633 bp, Cannabis indica
aaaagggggtggtgatctgagttacacgtgtggatagattgaacaaccgccttcgggaagagacccagccactgaacattggtcaaatccttgttaagggccgatttgacatgcgcatcgccatcacgatggttatcctgggtgagacaattgcctttaactggcagatcaattaagccagatctactgatcaaatcataaatgaaaggcaagaattgatctctcccccttgagcccatcctttcagaactcttcaacacaaagttaacgtcatcaaggatcaaccaaggccccacaaaattgagaccaagctccatcaatttcgtccagtatgtactcttttcattgaagtagggcggtccataaacacacaacaacagccagggatgatgcgcagggtccgagtacacaaaaccagagatatgattctttgttatacagaccgtttcaaattcaaacccagccttccaagccaagaggaggccacatgcaccaccaatcgcaggaacaataatattaaaataaaagtgcaagctttttagagaacgtaccaagtgagcggggtcgcttttgagttcgaaaatgaataagaagtcaggcgagcacaaacgaactagggctttaacttctaga

SEQ ID NO: 255354 - DNA, 617 bp, Cannabis indica
acccgggacccggaccccgaccccgacccggacctcagacctcggaacccgaccccaacccggaccccgaccccaacccggacccagaccccggactcggaccctgactcggacccggacccagacccgtagttggtgttgggatcgaatgtattataactttacacaatcaattaatacaagtcaacaccaaacattatattgtattaaataatactaatacaatacaatacaacacaatctaactcaatacaatacaatacattacaatacggtgtaccaaacgaaccccaatacgctattattatttatgtgctaattaaaaaatcataaaaaatggttacatatttgttgataagatagaaaattaagtattaatcattaattttattgtaaaaaattttagtgttaattttgaatagtaatacatcacatttattcttgccgactattttttatttttagtatatggagatattataattaaaaaaaaaataatatgacaatatattattagttataataagagttttactcgttttcagaaaatatcaaattatttacagtattaaaaatataatttaaatagttagctgcaagtgtctatttttgttata

SEQ ID NO: 255355 - DNA, 1163 bp, Cannabis indica
aactccaaggaaccaagacgcaaagagaggcaatcacattgagaggaagcaccatctactaagagatatagtagaaagagatgatgtaacactcttgaagattgcatcggaacataacctgacaaatctattcacaaagacgctaccagcgaaatgttttatgggtcacataactaatgtgggacaaaaagatatgcccaattttcttttaggggtaagtgggagattgttagagtttatgtcctgaaatcctataaagacatttctgtttataaataagagttgaacattttcatatatacttgaatgttaaattattaatatttaatattaaataatttatacataaatatttgtttgggccatagcaaagaaagaggataatctttgggtaaagtgggttaataatgtatacatcaaggaagaaaattggtggtcttacaagaccactcctactaccaactggtattgacaaaagctggtagctatataagagagagcaaaagaagtatttgatgagattaatgtcctaaatgacaaatataccgtggcagcgggttttcactctctaaggccccttattttttggttcacattgcttaatcggcttaagacaaaggacatgattcaagtgtacaacactgttaaagatactaagtgtctattttgccaaaccgaagaggaatcaatgcaacacttattttttgaatgttctttctcgtgtgattgcttaagggggatcaaagagtggctttcttggaggatggcttctaacacacttcctcgaattgttagatggattcgaaaagccaagattagcaaagttaaaaagatgatcctagcggctgccttggcagcacttgtatacaccttatggcgggctagaaatgactttttgtggcaaaaatctatcccaaatatggacagcatagtttgtaaagtaaactatgtatcaaaaaagagaataacttgtacatggcccaagaaggcatccattagtgacaaagtatggttagataacttgtaaagttttatttttcttaggttcttcctttggaagaaagctatttgtttgtaaaaattagttttgagtaatgaaattcacttgattcataaaaaaaaaattatacataaatatcgaaaaaaaatttattcatatatga

SEQ ID NO: 255356 - DNA, 2408 bp, Cannabis indica
tattagtatgtcttaatcacactaaaataatagtcatttacaacttaaaaatctatattatttcaaaagttgggtaattattttttataaattaatttaattattttttattttttaattaataatttatttttcaaaattaattacatgatttgtttttattttattttctttataaaattcaaagcatgggattggtaacaagttaacacttaacaacacacagcatacactaaaaaaatcctaaagcaaaaaataaaatatgctaaaatatatgcaaaatacattaacactataaaactgtattaattgtataataaatgttcattattgtctatataaaaacgacactgttaattatgacttgtacaaggctactcaactaatatagttggttacaattatatatataagtatatattactatgtgcattgcacatacacacaactatatttttaatttttattttgttaaatgtatttttaaaattttataagttaaaagaaattatttattaacttttaaaatttaaaaaaaaaatgtttaaaattttttaaaatttaaggaaaataaatataaagtttaaaaatattaaaattgaacatactctctatattaaaattaacaataaaaaaataataatattacaaataatatattcatatttatgtatatttaaattatctaaaaattggtataatttcaattaacctaaaaaaaattatattaatatttatttaaattttaattaatctaaaataaattatattaatatttatatatatttataaaactaaccttactaacaccgttaaatttaattgaatattcttatatttttaaaatattttttcaaactaacaaaaacacttagatagtcaatttttatatataaatatatatatatctataaaacaattagtagatttgtcgctaaattttaccactagcattaatttacctcttgacttttgatatagtattgttttacccctatgtggcaagtaagtattagtttactttttcacttttgacataatatttgtttgtcccttatgtggcaaagtaagtattattttactccaatctttaatattgttaacccaagttaatattttttaaataaacatattaatttttactataattatttaattaaggcaccccactttttaaaattaacataaaatattttttttaagacttatattaactttttttttattttttattcttaaaaaaatctattactctaaaagtaatttttcatgttaaagaaaaaataattaaaaatatttattattttgtaaaaaaaaataaaagaaaaaattaaatacgtaaatttaatatgaaaaataagttaataatataaaaaatgaaaaaaaaagtattaaaaataaattactttaatatttataatgaattgtgtgcctttatatatttttaagatgaaaatatattcactattttttttttttaaatctataacaaaataaaataatttgagattatattaatataaagagtacattgttcttgctaataaaacaagggtgcaatgctaaaaaaaaagagtgcattatatgttcttctaaaaataaaatgaaatataagagtgcattatataataatatacaaataataatatttactaaattatataataatattttattatccaaattgattagtaaaattatcaaagtgaagaaatttattcattaaaatataaaataattttagtaatatatatataaagtattataataatagtatttctcaaatattattattgaatattatttatataaaaagtatgtatttatcttaaaaatataaatataaaatatattcttgttaattgctatataatcttaattgtttttaggttataaattggttaagagaataattgcagttaaaggttattatgtttataaaaaagttttaatttgtggtttaaatttaatagtgttaaaaggagtaaaacaatactaacttcgctatataaagagcaaaatatgtatgagtagattgattatctcgatgagtgttaacatcatcatgctatagcggtctgagactaaatggattcatatcctccgtacgatctaatataaataaaacatcatacctcatttatgcaaccacgtgaggcaatcaatatatataatagataaattcaacttcgttgatagccttgaaactaagcatatactttgaaaaattaagagacattagcgagaagtccaaaagcaattttgacatagaattcccgtgctgggtaccaatttgaataaatggaactattatatgaacatataataataaaattgggaaataatagaaaacaaacagagaatttgcaaaatattgtcctacgtttattagagttagtcttatgttg

SEQ ID NO: 255357 - DNA, 703 bp, Cannabis indica
atgttcaactagccactcagcctggaatctgcattcatccatctgtacaagcatagttggatgaactaaaaaatatgttccaacgcttggacggttaaaagctcaatgatctcgagttggaccgaacacgcggatccccatttactcatgagatcaatgttctaaagctacccctcaagttcaagatgtcgacctggaaaatgtacacaaggaaagaagatcccttatcacatctcaattattttgaaatgcaaatggacctggaaggggtatgagcagatgtgcgttgtagagtattccctatcacactttcagaagccgcacaacaatggtactttaagttgacaccaggaaggttcaactcttggaaggccttctcctcagagtttcatgcacaattatctttttctcgctaactctcactgcattcactacaagaatgcccgcttttgtcggcgctgtttagtacttgcgtcgacaaatgtccacctatgccgacgcagttgttgacctgcgccggcataggtggtcaactttgttttcccacctccacctattgtcggcgcttaatttcgccggcaataggtaataatgccggcaaattccactaattgtgccggcaaaagttggcacctaaccgccaaaaggtgggaaacttttaccggcgcaattacctgcaccggcaaaacgattattatttttt

SEQ ID NO: 255358 - DNA, 1099 bp, Cannabis indica
aagtcggtaaagtgtgaagatcatacacaaaagacctcgcggagtgctttgagatactccaaaagtacaatatgaaactcaacccaaagaagtgttcctttggagtctcctcaggaaagtttctagggctcatagttaatacaagggggattgaaccaaatcctaaaaaaattaaggctttaatagagatgtcatcgcccacaaagccaaaggaagtccaagccttaatagggagaacgacagcactaaacagattcatctcaaaatcaactgataaatgcctacccttcttcaatgtgttgcgaggcaacaaggggttcgaatggatagatgagtgcgaggaagcctttaggtaaagaaacatttatcaacaccttcagtcttggccaaaccaacaactggagagacttatacctctacttggctgtctcggaaagtgcaatcactgcagcattagtatgagaagaaggaaagcaccaacaacctgtttaatatgttagtaaaaggttgtcaggggaagaatcgagatatcccatttttaaaaaacttgccttgcctaatccatgcatctcgcaaactaaggccttatttccaagcacatcccataaaggtgttaaccgatcaaccactaaggaaagttttgttgaaaccagatgcttttggaaagttgataaaatggtctatcgaactgggacaattagatataacctatcagccgagaacatccatcaagggccagggcttaggccaatttcctaatagaagggatagttccagatgaaaatccacttgtctagtgagatacggaaacttggaaattatacgtggatggagcatcaaatgaaaatggctcgggtgcaggagtgatactgatctcgccagacaactttaaattttactatgcattaagattccaatttgacaattctaacaacgaggctgaatacgaagctttattggctggtttaaggatggttgaaacgttaaaagtcaaaaatcttatatgctatagtgactcgtaattgattgtgaatcaagttttaggcgaataccaagcaaaatgtttaaagatggaaaaatatttggagaaagtttgaaa

SEQ ID NO: 255359 - DNA, 1002 bp, Cannabis indica
aaatgagaaaataagtgctttcgggaaacaaaatgatcaatttagaggccaaaaagcacacccaatgcctagattgacatttgtcaacttggatcatttctaacgaagtcttccaggttctttgttttcatctacaattaagatactggtgctttcaggaaataaacagagtcatctagtggctaaaaagagaatccagtacccaagttgatattttgtcaacataacccacttgtaagcatttttcctagaaagtttcccaaacattttttttcatattcatcaataacaaagatacgagtgttctcgggaagtaaacaagatttattgtgggccaaaacagggacctagcgctcaagttgacactggagctaagcttgcgactaagttgacattcaacctactttgtatggttctgtggctaaaacataaattctgccatggggtctcaacttttgtagatttctaactatccggacaaaataacaaagttcattcaaaaataaataatgaaaaaaatcctaagtactttgaaagaactagatcaaattagagagtcaaaataaaacaactaactttcaaaaactaaaataaaccctaattcaataaagaatgaaattgaaaggtcaaatccaatctatttgtaagtaggtagtaactagtaacaaacaaaaaccaaatttgatgacaataaataaggtcgagagcttttccttacctagtccatataatatgagaattattaaaaaatattattggtgtcttatattttttttagtattatatagatatttgtgtaattaaataataaatttcatataccttaaaaaaaataaattttaaaaaatattgctaatcaattgtatgacatctagacaatactcaatagaatcatatagtatcaccttataaaagatattaaatatcagtaatattcaataataatatttatataatataataaaaagagaacccacttcatcttcttaaacacacaatact

SEQ ID NO: 255360 - DNA, 595 bp, Cannabis indica
gttcgtcccacattgctagtgtgtggaaataaattgtcatgtataagatgaataagctatttctctcattacaaattcgttttgagatgaaatcctattcatgtaatcgaaaattctaacttggtatgagaacgacttgtgattcgttgtgagcctaaaatgtcactagtccaaaaaactgtttgtgatccgttgtgagccaaagtgttgttggtccataaagatacttccgctgtctcttcttaaacctctatctgggaccttttggccaatgtgtgccagttttagtgttggggtctttgacctgttttaaaaatccacaaatatctcgacatgtacaccaaaaaatttctcgatatttggccttgtgggattctttgaaatgtgatgatagtcctatggtttcttaaaggtcgttcgttatacctacactttccaggcacaaacgtgaggaaggtgtgtgtattagatttagtcccacattgttatgtgtggaaataaattatcatatataaaatgaatggactactcttctatgttgagatagaatctcattcatcttatcttaaattgtaacaaaataataataaaaaaa

SEQ ID NO: 255361 - DNA, 698 bp, Cannabis indica
tactattttatatgatactaatacatatgatatatataagttatacatatgtgacatatcatataaatatatatagtagaaaataatatattgatatttgaattttatatcatgttattatatgtatatatgtgagatatataatatatgatatgtatatgagtaatatatattatatatatgtagagcatgtgagatacatatatatataagtgagaattaaatatgtaaaaataattatttctatgtattcatacgagacatacatatataatatatattatatgtatataatatatatcatgcatgtatatcaaagtttatatatatgttatatatgtgtgagatatgtcacataatagttgtaattaatatattatgtgtatgttacatatgagatgttgataataacatacataatatattaattagcataagattacaatttgagagttaaaattttatgtatgggagttatatattaattttatattaatatatgagttacatagcatgataataatattaatgttgatagtaataaaataatgtttattattattgtgagaattattattatttattttgtgaataaagaatagttttgaattcttgttcaatttagtggtgaagaattaataaaagatgaattttaaaaagttacatcttttcatcttttattagattataagagataa

SEQ ID NO: 255362 - DNA, 922 bp, Cannabis indica
gggtcgggcctaacccggcccaattatctcgggtcgggcttgacccgctaggccaaaagaaggagtcgggccgggccgggccgggccaaagtgatgtcgggccgggccgggtttgtggcgggccgggcccggcccggcccgactgacattcctacatataatatgaagttgaatttgtgataacataaaagttagatatgataaaattataattaaattagtcaattagtaataataataacaaattaaattaacaataatattaattatatacaaatttattatgtattattatatatattttgtatgtaaacatgagaatatgtttttaatggctaacaaaatgtataataaattgtaaataattttttttttcatatatattgtaattagctaatataatgtacaaatgattcttttgttcaaagaataaaagaaatcttagttaaattacgtagtacaaaaattaaaccttaacatataatgtacagttactaggagtgtttattttgttgttagttatatataaaaatatattttttttaataaatattaaataatttaatattaaatagtaattagtttgaaataaccgatccaatccgtacttctgcggattagattggattggatccaaaatatgaaatccacacttaggtggcatttggttagaggtaatgaaattgaatggaatgaaaaggaaacaattttcattatattcctttatttggttgcattttaaagtattggaatgacattccaatagaatgttcttttcactattttggtggaatgactatttcattttaaaaaggaaggaaagaccattccaatgtaacaagagaaaaaattaatgatttttttatcaattttttatgcattttaaattttattccattccattcctatttctattcccatt

SEQ ID NO: 255363 - DNA, 642 bp, Cannabis indica
ttttttcctctaaaataatcaccaacgactttatcgttggtgaaaaacatgcagaaaaaaataaaagccccgcacccctccttcttctccccatttctattttcatttcatcttctcccttctccttcatttcatttcatttcatcttctccccttaccattttatcttctcccttcttcatttttctctccaaatatgaaattctctccattttttcctcttttcatattcttcatttcatctttattcttccattcctcttctcattccaaatctcctattcatatccaaacccacaaaaccctttgtatcaccggaccaccgcatgccgccgcctcttctccaccgcctgaaaatttgtcgaaccacgatttcagtaatgtaaagttattattctcattcttttcttatatattaatgtaatatttatatatattgatttgtaatttatatatatgtgtatttatattaatacatttttttatactatttattttattgtttaaattatgttaactatagtgttcttgtgtatataaatttatttatgtgtatttttattttttatatttgtaatttattattgtaatttaaaatattttatttttgttattttgtagattgggcagaagagtttaagt

SEQ ID NO: 255364 - DNA, 1802 bp, Cannabis indica
aatactaatatactaaaaaaatgcaaacatagattataaattacaaaatattattaaaaatatacaataaaatactaaacgagtccctgtctgggcaggaagtgtgatccccgtctccacctcgtttaacattcgggaacaaaaagtaattctcattcctgttctgttttctatttagacgagaaactcctactacattaagggtgaactcccgcggggccatgtccatcgaggaaatgtgcatccctatatatatgacacatatgtcaaggagatctatactaaaagagtaggtaggggatttatgtatatctttcgtgatgcatgcatgccttaaactttggagctatatatatacctctcctatatatagctaagctaggttaattttgaaattgttaatgttaatatttatataatacgtaccttggatcttacatcgaagtaatcgttagttaattggtgtttcttttcctcgtttagtgctaaaaaactacttttacagaaatttagactatacccttaatataataataatacgacaacaatatataataatcaactttttcatgacaaaatatattttttttaaaaaaaataataaaattaataaaattatgttcatattaccattttgttgtttgtgcattaattaatcaatgactcttacttttctatattttttgggaaagagaatattgctttgttttttttttttttttaatttctttttttaaattatgttatatctttttcaatgtatgtatttaatgtagtaaatactatttttgtttacaagaagaaaacactcttttttcataatactactagagtgacgtcatcaattttgaaattataaaaaaaattaatatttattaaaaattataagacactctttcaacacttttccaagttattctagagaatattcttatctcttaaaaggtagctatattaatatagctagatatatacatatactatataggaacacattattataaatggttatctacctcaaaatgcagttgtagcaatagtagtatgtatatactttataataatgtacacatatttaatttattagtattattatatttttatattatatgatcaaaagagataatgtttaaactttggtaaacccttttgcttcatttggaaatttttaattaaggtcaatggtgggcaaccttattaggattttattcccaaaaaaaataaattaagactctaaccttacgtgtagggttgaaagtaggaaaaaataggaaaaaaatgtaaagaaaatgtaagaaaataaattcgcatgtttagtatgaaaattaagactaatcctgagttggattaaattttcacatgtactagattatgttttctgaactcaagtcttaaaaattaaattccttgtaaactattgaaattgttggattcaagaatttttatctaattttatattagaatcctaacatagatgaaagttcatgagcatgatttggtagatattaaaattcggaggtaacgagttggtacatattaaagttcaggagacacaatgtaattagtacatgaacaatcattgcattagtaaaattgagtagaattggataaaaaaatttaaatctaacaatctcaatagtttgggaaaaaattataacaccataaaaattgtaaggacacaacttagtacatatatcaaaattaaaataaataccattttagaccctgtattttaaaagttactaattggaccctttattttgttaaatgacaaaataaatcatgtattttctaaaatggta

SEQ ID NO: 255365 - DNA, 547 bp, Cannabis indica
cacctgtgtgagtttactacttgattgcgtatacttgcgtagtgattataaattatagcaacaaagagcaagtatgagcttgacagaaacaagatttgtgacaggggcaaatgtttcattgtagccaataccttcttcttgattgtaccccttggcaaccagccttgctttaaatctttcaatggagccatcaatattgtacttgattttgtaaacccacttataccctatggcatgttgaccagcaggtaaagtaactacaattcaggtgccattagtttctagagcttcaattccagtgtccattgcagcatcccaaacaggtatgcctcgagcttggtgaaaaaattctggctcaaaatggctgaaaatagctagcacagttgctcgaaactttagtgatagcctgttgtagtcaataattgcataaagagggtgagtagtagatgcaatatgtacctgagattgcacactgttagtggataaaaagcagtgataatcttgaagatatgatggttttttggtataatttataatcactacgcaa

SEQ ID NO: 255366 - DNA, 1951 bp, Cannabis indica
atgatatctcttaatatattatcgatccagaaatattatagagtaagtgataaattactagtttttttgtcatatgccaaaagttataatcaaattttacatttatcctttatttattgtaatttcaagttattcaagttattgtttcagaaattttattttaactgaagccatttatcaataaatatagtaactctcaattagaagctccttgctaatactaaatttaatggtggcttgattattcaagttgtatatcaaaaaatttattttggttgaagctcattaggtgttttctcttagactatttatatatatttatatatatatatatatctatattcgatctcaatatatattcctctcatacttataatacaatcagcaaaatctagctaattaagaaaaagaggatatatgagtgggatgacgcgttgtatacatgctgacctgacccatagatgggatatatatatatatatgtatatatatatatataaatggattggattttgatatttattggcttttccaagagtacgtacataaatatagattttcatttatttagtttaacatattaattatcaaaacgtttgatgtatacatgaacatgatcactatatcaaattctatatataatataagttagagatttgatagcatatgcttgttatggattggatgagaatatataatatattaatattatatatacataatattgtagttattgataaaaaaaaaataggtatatgtggtgtttttggtatgactatttggatatttattatactttgatatagatgattaatatctctttttaattgataacagttagatgaatcaactcaaggaatctttagttaatatataaacatataaatataatctcaaacttatatggccagggctgaaatattatttatagcttagatatcgatgatgtattcctttaaatcaatctataaccaatacgctcttaaattgcaataactatatataaatggtgattaaatttattaaactttatacttttgataaattatttactatacattataatactactagctacttctgtagctatataggtagaagagaagagagtataatataatgagaattatcctctctggaaaattataagcatctagtatttgattggagggaaaggtataataatcgacaagtagaatatatcttatcctaaaatatatatgttgaattttttggggcactttttctatgtctagtttttgtccaactaaagcaaacaattgccaacttgcatatatttctactatatatacgactatatatatatatataactcaactgtctttctttaaccgtaccttgctccatcacaacaaaagtactaagctatatatacgtatatatatatacctctattttctatttttatatataattattctacttcaaaaactaagttgttcataatagtataacatgctaataaatatatatagctttagggttacgtaacatataatgtatatcgatcgatttatatatatttgtgcgtgtgtatagcttatcaacttatccattattacgtgaattttggtatgttcatgaacttatagtactatttatactactagctagctagctagctatatagtatatattcatcaactaaaaagttctccaaaggtttaaggaaaaggacatcattcctatccgtttgagtcaacaatttaaattttactttcctatgtgttatatattaattatatgaatacatattcaattgttgggtttgctcccattataattaatattattttgtttaggaaaactagggcataagtctatagagacttatttgattcacactataaaaaatttacttttagtgattactttttagtcacaatataaattttttgtaacttaataagacttttagtcacaacaaaaa

SEQ ID NO: 255367 - DNA, 662 bp, Cannabis indica
aaaaaaatcatactattaccggcggatttagtccgcccctaatagttccgccggtaatagaacattttcttgtagtgtaccttaacactctcttgcaaaggctatattaagccttgtcattgttaggtattgtgtagatcacctataacacttccgtacatggttttgaattttgcataagagtgcctgcgtgagcagtgagtttgtgtttgtactcaaaagtgaatgtttgaatacttatactcgcaagtgcacgaatcatttcagaatataatatttatgtaagtacgaggttgaacccataggagttgactaacatcaaaagaaactttttcaaacaaagcaagaatattttaacctagttctaaatatttgatgagattttgatttcgaaatataaaagacaattaataaaaagatttaagattaaaaatgagtgagtatgaaaaataatttttaaataagattattaagatattagattccacaaaatgcaacttcaatagtatttataagtatattaattcccaagctcatatgtagttaaaataaatcaaattatattttctaaaatatattttctatttaagcacaagttattttcaaaaaggtaaaatttttcttcacttaaataagatataatttctaagtattaaatgtgt

SEQ ID NO: 255368 - DNA, 957 bp, Cannabis indica
acaaaaacataatagaataagaagtaaatgcacaaatttgttataaaggttcagcccctgataatagcagttaatgacctactccccttttggttgtattaataccgagcgttaacactattcagatcggtataggtgggatctgatataacacccttaaggatacaatgtatgaattgggattggcaaatttccagtgatgagagttcttgtataggcatgtgagagaggaagtgaagaagaaaagagttatcaggcttaggcttagagattggaggctagtgtcccgcgtaaactgagcttaagctttttaggttagagttaaggcctttatataggaagccttaaactctaatttacacttaaaaccttaaatatttgtatatttaattaattaattacaaaagaccaaaatgccattgaacttagatattatttagttattatgttgggcttttagggccaaattcgtagcccagatgtagttgtgtgcacaagaaccctacagaacccctcttgcccgactagacccctgcggaggtagattgaccgaccatggtgcagttcaaaggctggccggccagctcttgtgagggagctggtctgtcacttgatgctcgtttgagtgtcggggtctccatttgtttaggtgctaacttggccttcttattagtgagttgtactaccacatggtactaattttattaatgtaagcatgtcacgttaggaggacaaaaatagagataacatttgtcccccaagtccttgtgcagacgtttgtacagatttggacttaccaatcggtgcgatcgagactatcgtagcctttgctaaataaaagttgctacgtttttagccttttaaaatacatttccttgactgtctaatctcattaactatagaaaaataattgatttagttgtcttctttgatgtgttggtgaagtaagtgaagaaa

SEQ ID NO: 255369 - DNA, 501 bp, Cannabis indica
ccaagttgagattgatgaatatgggctgtaaaaacttacaggctcttgtatactttatttatatagaacaagcaatacagagataacagaattctgttatgaatgagctgtgcaagagtgacaactcttacctaaacccacagctcactaactaactttataacagactttaactacctgttaactacctgtactaacaataagacataataaagaaatatatatatatgtatattaattaataatgggagattattataagttaccatttgtagtcgactagtctccaacttggaaagaagaactatggtaattttcatttgagtttgagagcaagctataagactcaaccttcatcaaatagtgaactggtggaatatttcttattcatcttgaagtttctaaagattattagcaaaaatgtaattaattttcaaacaatatatatcatgaaattgaattaattatatgtataatgtatatagtaataacatgaatgta

SEQ ID NO: 255370 - DNA, 504 bp, Cannabis indica
ccacattctctgtttttgtcaaagattaagattcgagtatttttggggaacaatagatactgtccaagggcctaaaactggacccaacaaccatgttgacatattgtcaacctgggttgtttccaatcttatttctgaaaaagtgtttcaggttcaacttatccgattctgattttgtctcgactgtttgtctagtttttcataatgattgagagctatgaagtcagaagagtcaaattcacaacttcatattttcacttttccaaaaagtgacttactcagaaatcagtatggttcatagtggaccatttcacaaagttacctcattttctaccgataaagaatatttatacaatggattagtatgtagagctgtatgtggaggagacaatttgtctccttggagctcctaaatacattgtttcagacgaggatttgaagtttacattaggattgtcaatgggacgggtcaaatctgatccgactctgatccaacctgatcca

SEQ ID NO: 255371 - DNA, 662 bp, Cannabis indica
ggcctcgtcttccaccccgcatttattaagccaacccgctactactatcactatctcttttttctttttacatttatagtcttttttcccttttttcggacaactttaatttttatcttgaaggggagatagttttaaggcccgtcccaaggcccttagtgattttttagggcctgttattgggtccgaacatctttacatttatgcttaaatacatatttttcttaaatacatactttgctttaactttgctaaacttttggcctgttttacatttgcccgtgtggtatgccttactaccgccctgagtggcgtgaaaaaattgtttcaaggcactcagttttacgcataaatttggaggttgcatatacttttttggtacaaattttcttgacaaagcctaagtttacattttctgactattggtaatactttcagaggtgatcagcgttccaggccctaggcaccatggctccgtccattctttttgagcttgtaggtcccgaagccgatttcgtcctcgatttcatatggtccttcccaattaggccccaagtccccccaaattcgtcttaggaccagatcaccatagcgaattttttacttttaactttttgagttaaagtacttagtcactttcttttggtaagccgtcattcgta

SEQ ID NO: 255372 - DNA, 899 bp, Cannabis indica
atttaatttaattttaaatttattaataaaaaaatacctaattaattttattaaaaaataaaataagtaaataagtttagatattttaaacaatataactaataaatatgttataaaatatgattaattaattaaattaacgtcgaatttaaatttaaattaagatttatataaaattatttaatttttttaatacttttaaataattatctacgttatattttaataaataaattaaatttagatatttaaaattatttttaaaaataattaattaattaatttaacggtattacttcgatctgttaaatttaacaaaaaataatcgtaaaccaacaatttttgttaaataatttaatataaaaagatatttcaacaaaaaaaaacttccataacttgtttctattaaattttacatatctcatatataaataaatgattaatataagtttatttatttatttgtttgtttttccatgtgatacacgttactcaaaagttgaatcatatctgttttacaaaaaaaaaaaaaaaaaaaagttgaaatcatatccctcccatgactatttttttttttatcattaaagtttaaataatatacataaataactattctcattttaaaatataaaaataaatataaataattatattgattgataggctagctctcggtataggtggactagacctatacctaggactcacttagatcaggggttcaaaaaaaattacaccaaataatatgttttttttattttattttgaagaaataaaacagcaaataatatgttgcatagtactttttaattgatcgtagtctataaaaattaaaacaacaattaattttataagtttggaatgataaataattatatataggaataatattaaatgtt

SEQ ID NO: 255373 - DNA, 1899 bp, Cannabis indica
tatttcttaacagaaaataaagctaggagtaaaagtcgtctggctggctatatgtcttaaatttaatgggctttatggtcgtgcagaaaataaaagataaacaaaataagatctttaaagctctggaatgtcaaaaggagtaggtgggttcatattatcaccggtctggtcctgaacagcaagttcagaagatggtttgacaagagggtccactcgatcaatagcttggccaataacatcagcaagctggctggaagatatagtttcctaaatagagttattctccctaaggggttagatgcctttaattcctcgtgccgagctaccagaaattcgagcaactcgggcctcatgtatctttaatcacccttggggttccgtttctagaacttgtaaaagatcttaatggccaagtttccatattcttccttctctgtagcccaggtttgctttgatttgccagttttgtcttctcagccttcagttttgtcttctcagctaccaatgcctccttgattccagtaatatccccatcccgagcaattagcagctgaaccaaggactctttctcgtctatcaagtctctcacttgcctctctacttcctctaagtcctctccaactttgtggtagatggcatatcttcaatattctatttcagctccttgacagaattatttgcagcaaacatttatttcttcacctctctgagctgggtctcaaagtcctcaaccttctttttggtagcaacacatgtctccttgagatgggcatacgtgtgcccaaacttcaaggacatctaagaataaaaaattacatgtcagaatgagagttgcacgattagcagagataaaagcctcttgagttatcaaaaaaagaatacagtttactagagcctgatcctttaggaggccaaagactaagatatcaacaaacttaatgtttgtgtcgtgtagctactcatatgcctgaaccaagcacctatctagataattatggataacttcttttgctttctttgcccagagttgagtagatgcacaggtggatatctagcatcccttacttgactcttggcaggaagaggatgcccctctaagtttctcatataggctggttagccagaggagagtaagggggaggcagtggaagacatgaccgggtagagtttgacccatctttctaagcaaacttggatagggactcttccccaaatatacccccactcttcctcatgataaacggttccagtttggaatccatatctacaagatgcaaaatattggttagaaactaacttcaaaagatagaagttcaatatatagtaaagaatttttaccctcggtctgcctagaaacatcatcccagggagggttgtacggaacaccatcatcatctgaagaagactcttcactttcctcactggcaatgccttaacccttgccctcaataactactgggcaggtagtcctggcagactttgacttttgaggcctaatgagaatagggcctctcccaaagattcaccccgcttaaccctcttccgagaagctctctctctcactctcttggtttatgatttttttttcgaagaaaggttatcaaaaggggctttggtctcgggttctttcctcttggttcctttcttcctcacaaaaatcttatcaaatgaacctagaggtttgcccgttgaaggatagagaccatacttgatgaagttttctctagtttccaacttgtagatattccatcttgaagctggcaacgagaggatatgattggctctatccctaaaccttagggtaggtattggccggtcaaatgtagggaccctccgaaaggcatgatgcacaccctctgcaccatagaccatgaagtagtcttgggcatagcaaccaat

SEQ ID NO: 255374 - DNA, 704 bp, Cannabis indica
tttttatttctttcctaataataaatattgtatatataggtatgtttttaatgggtattacttatatatgggtattttattattgactattaaatcaaatttaatagttgatatttataatcattaattaaatattttttttgaatcaaccattaattaaatattaaaaattaatatttttaattttcccacttttttgtttgatttttttattttctctacattcttaaaataaatgacactattaatagaaaactaaattatatataaaattgttgttaaagaagtgaaacaacacgtacaaaaaactaacaaactattttttttttaacaaaaaccattttaaagattaaaagaaaagtgtatatttattttttataaaatttttccaatttatttttgtctactgcttgttatgtttattatgcttacacgttaatatacattaatatatatttttccaatttatctttgcctactgtttgttatgtttaggattttgcaatttatctttgcctacttgttttttcaatttatctttgcctaccaattttttctaataataacatataagagcaactccaaggattacctcaaatttgaggatgcagtggctaatcttctccaaggtagcaccattttgatggacaaaaagccagtctttgctacagtgctaatgcataaatgcagtgcactgtagcaaa

SEQ ID NO: 255375 - DNA, 844 bp, Cannabis indica
gtgtaagggaggtcaatgcctaaccgatccctaatctgtttgttttctttcttgctctacaaatcttaatacgatagcccatgatctagccaagcttgctttgtcaatgtcaagctccaagattcggtggcctgttaaaataggcttgttatatttcctttattggtcttttactgccactagtttgtggttacattccgttgtgttctgttatgttggttaatttggttagttggttcttgtaactaactttttaactaactacatattgtaatcttcttgagcttgagctatataaagctcactcccttctttgattcattaatgagaaattcactctgttttccttcttctctttctctctcgttttatattttctggtttgtaatatggtatcagagccacgactttcgtgagctccttttctggttcctttgttgattgtcgttgtggctcatggctcgtgaggagccaatactcgaagcacaacaaaccagggagatgaatctcaaactgccaacagattctctgccctggaaaccaatgatcgaccacctggagaagatcctagaagtccttacttcatttcgagtggagatcaatcagctgtgaatcttgttccccagattttgactggctgtgagaattacagctcatggaggtgatccatgattgtggctcttacagcaagaaacaagatcaagtttgtcgcgattacctgaaccgacatctatgatgtgtggtttcgatgtaatagctaggtgatttcttagattttacatgccatttcgagtaagattgctgatagtgtgatgtacctagataatgatgcaaagatttggac

SEQ ID NO: 255376 - DNA, 655 bp, Cannabis indica
caaggtgataagacaatgactgaatatacactggagtttgatcacttgtctaagtttgttagggatttggttccaatagatttcaccgaaggcatccataaaggatagcaacttgaaacccgaggtggcgtccacaatctggtcaatccggggcaatgggaagtagtccttagggcaagccttattaagatcggtgaagtctatgcatacctgcaatgtcccatttggtttaggtaccaggtccagattggccaaccacgctgggtaatacacgtcccggataaggttgttggacagtaacttatccacctccttctccaaggcgtaagcctttactgggtcaagcgggcgtcccttttgttgtacttgaggcatatctgggttgatgtttaagacatgggtgattacatgggagcttattctggtcatatccccctaaaaccatgctaagacatccgtagcggcctttaacgtgtctatgatcgtactctgctcctccggctctagatttttttcctaggtagataattttggatgggtcgaggtcgcacacccttacttcctggacatcctccataggttctaaacttatcttggatccaatacgggagccaattcgtcctgtctactgccatcggctcactcgccccctcgc

SEQ ID NO: 255377 - DNA, 541 bp, Cannabis indica
ttattgattttgattaatatttattgtattttcttttagggtttaacatatcttctaccatcatcttcccacagtaaattgagaaaagaaattctgatttttactggtttcacgagaagtttggaaaatttccttggaatctacgcatcttgtcacggtagggagtcaccgatcaaattttccaggtttttctttccttaattttcgacttcatagttagatcttttatcatataatatattgcttatataatagttttgatttgatgtctggttgcgttttctctatctctatctctttcatcttgaaagttttttgttttttgtttttaataaattatacatatacatcattaaaaccaatagcaaattttattttaaatataaatatcttaaatatttgtgtttaattaagtttataagatccaaaaaaaaatgttaaaaaattttatattctcattttggtttttgagtaattttttgtttttgttttaaaaaatttatggaacaatccttcatttagaaaatatcttttttttttt

SEQ ID NO: 255378 - DNA, 1101 bp, Cannabis indica
atcttcgaattgtagttttacaggatcatcatcatatcctgaaatgttgaccaacctaactcaattactacaactcacttcattaagccttagtgacaacaattttggtggccaaatcccattgcattatctcaatcttcaccaattcaatattttgggtctttctggaaacaatttcgttggtgagattccagaattttcaaaaacatcaaactcctcccaaaccccactacctaaccatttagaatttctttacttatctgataacttgctcagtggaccaataccttcttggatatattctcttccacttttaagttatttatccttgtctaataataaccttactggcccaattaaagattttaagtcaaaatctcttcaaagtctttacttagattccaataaactcaatggcgacattccaaactcaatcttccaacaagaaaatctttcattcctagatctctcatacaacaatttggatggtgttgtggagctaagcaagttttcaaagttaactaatcttgacactcttgatctttcttttaacaatttcattgtgcactcaaataactttaccaataataatccttttcctcagctttttcaattgagtttggcctcttgcaatattagcgcatttccacattttctaaaaagcatgaaaaacctacaaatcttacaactttcccacaaccaaattcaaggaagaattcctaaatggctatggaataatattggaacaagtttattgaatgatttgaacatttctcacaacttcctcacacatgtagagcaagttccatgtaagaatttacaatccttagatcttcgttctaacatgattcatgggcatcttccaattgttccaccctcattgatttttttttttcatctcaaaaaataatctacatggagaaatatcttctacatattgcaatttgagtggcttgcaaatccttgacatctcaaataataacattcaagggaaaattccttcatgccttgcaaatttatcctctctctccgtgctagacttgcataagaataattttagtggagaaatccctcaaggcatgtttaaaaatttaactagtt

SEQ ID NO: 255379 - DNA, 513 bp, Cannabis indica
tacccttttgtttggtacttattttatcaatatttttttaaaggggaattcgacactaaaatgtattcacctattgtaacacctaattagggtttcccattagtagccaaccaaccccaactaaaccaactcccccataataaaaaaaaaaaatttaaaaaaacacaatatggagccagtactacattctgtgcacagatttacgattttccatatttcctagtatgggaggacacaaagcttagatagtcatcatgtctgattttaaggaggtttgctggtaagaggcaaaaaaactacaagaaagattttgagaatatggtaatttagttttaaatttatccaagtaaatattttacagttaaaagaacgcaacatcattattggttatagtatcatcattctccagcaataattgactagaatgctgccatggcaagaaaataggtcccatcaagtttctgtatatatgtatgtatttatgactagcgtttaaccacggagcactaaaat

SEQ ID NO: 255380 - DNA, 1145 bp, Cannabis indica
gtttctccttccattgaaaaataaaaaataatacttcttgattgttagaaataaaatgagagattacaatggaagataaaagaccaaacaattacaactctaagcaaaatattacaaggataatattttaaataaaaagtttaacaaatctttaagcataaaatacaaataaaagaaaagagttacaactcaaaactcaaagatacaaataaatataaattatataaaagcatatatataatagtgtatgtgtataatatagaatatatatataatagatgatatatagtaaagatatatagtatattaagagtgtatagagtatgtatatataatatatataataaataatactatacagtagagataatatatatatatgatagtatatatatatatatatataagagtgtttagagaagaaaagaacaatataaaactagagaatagaagaacaaataacacccaaagtgaagatggggatcaccaaaagcttgaagatttctatacctttatctaagaagattattttcctctctatgatacacttagggctttgtggaaataattttgggaatattatcaaaccttagaagtctctagctttgtgtttgaaagaaagaagagaaaagtgtaactcaaaggatgaaccgatgtctctatttatagtgtttatgatcacacactttgaaattcaaacatcttacacccaatggctgctaccatctcttaattgggtgaaaatagaattaaatgggttatttggaggttatgggagatgttaaaaggcatccccatcatagaaaatattacaatattaaagctgaaaaaaacagtaactagttactagttactaaaattttcaacttttgtaaatataactttcaaaatcattccaattttattttatatcacttatacacattataaacaacaaaattaaaatccccaaaaacctaatatttccattatagctttgaatttcaaaagattaagttgtgtaaccactctttacatacttaataaatgatcatgtagaagttacaaaataatgagtaactctatcccttatgtagaaacttgtatgaatatatatatatgtaactcttaatctcattatataataattattatatgtatgtaac

SEQ ID NO: 255381 - DNA, 821 bp, Cannabis indica
tattttgggcctcgaacacgattaggctcaaaatacccagttgtgactatatcgtgtcgacttgtcaaaaaaatacctatagaaagttgaaacatacatactatataatattatagccataagcacaatatatcataaaattacgattttacccttctcgggtcaattacaaaaaatgcccgtagcacaccaacggggtcttaaaatataatttattagtataattttattcattaaattatataataatataattctacattaatacataattaaactagttagggttgctaatctggtttcttaaaccttaggatattataaaagccattgagaagattcgagcttgtatgcttgcctcacagggtagacagaagagctacgctgatccaaagggtagagatattgaattccaggttggaatttttttttcctttaggtatccccaatgaaaggaattcggaggttcagaaagaaaggaaagttaagccccaaatttattggcccatttgagattattgaaagggtaggtcaggtagcctataggctagccttaccccctgctttatctgaagttcacaacatgtttcacatctcgatgcttcaaaagtatgtgtctgatacgactcatgttttaagctatgaagatatcgagcttcaaacgaacctgtcatacgatgaacaaccatttcaaatcctggataggaagaaaaaggtcttacagaacaagactattctgctagttaaagtgctatggtggaacaacaaggttgaagaggtgacttaggagttagagttacagatgtgggagcagtatcccg

SEQ ID NO: 255382 - DNA, 436 bp, Cannabis indica
atggtggagcttttttgggtcgaagtagtccaaaacgacgtgaaggctaagggctttcttgataacggagagggggtgtttggctgtaagggaggagagagctcagttactcaggacaaggacgattagtgtttggcggctattgatttcatcgctgagctttgtttgggataaaaagttattgtaatcactatactctgggaatccggagaggattttttgtgatgttgtgggctgaaacgacggcgtttagggcgaatagactaagacagaagatgagataatggtttagtgccccattgtggggcgtaattttgaattgtaattttgttcccccgccaatggccacccgatgatcgagaccccctggctcaagctctccatcaccgaattccacccacaatggttcagaaacgcacctgtagacttatgccct

SEQ ID NO: 255383 - DNA, 704 bp, Cannabis indica
aagaaggcgttcgtcgaattctataggcctataccgagaatactcttggactgaaggaacatgatagaccgttaaaggagacttaccggacccagatgtgctggcgttgggagccccagtgttgggaaccaggaccaaggacttaggcctggagggcacctgatctgcacccgcttccaagcgaagggtcctcccggcggcagcctgggttttgatataagccagatcctgttccctcctgaagaggtacttctggtaccggtcctctgccgaggctataatctctgcccggagtgctttctctacgactggggtgcgaacggtagggcagaggacctttaagagatttaagtcatccaccgactggctccaagagatcagtttagccatccgacagttcttcgtcgtgaccaagtctccaatgttgagatattttttgtcataagtggagaaggtcttggcgtgttggaggaacagccgagtaggagcagtgcagagaagaggtagaatcctgacccatttcgggagaagctccgggcggtccacggcttgaaagccggaagaaaagaaaaagtggtggcggtactcttttacattcttttgatggttaaaagtgatcgggccctcatttaaaggatgggcccggagggtgaaaaacccatctttaaacttgtccccttcttggggacagaaacaagttcgta

SEQ ID NO: 255384 - DNA, 558 bp, Cannabis indica
cgactttcctagatctaagctaagcctcgactctgaggcagtctctaggcttcggttgggcttaggcccatcttttgtctaggctggccttattctcgtgaaaggctttagtctagaccattttaggctaatcctactttggaaaagccgcgtggcccccccttactggaaacacgaacaatatttaaccctaggtttttgggacttgagagtgacagaggcttgcaatcttctttctggattgccatggacacgtggacaatcttgaaaatgaagagacattttcaccttttatgtttccgaatgcagaaggttggaaacttttggattacatctaatgtcatgcacatgtcattagcctcttggtctgtgaacctcatgcgcattgggaaagaccgtgatgcttgggataccgtgatgatggctaattcatgttagcacaggtattgatgtgaatatcattacgaaaaatgcctcgattctaagaatcaaatgcaaactttcagctccccaattgttggatcatttctttacattcttagatgatatatgagtcgt

SEQ ID NO: 255385 - DNA, 707 bp, Cannabis indica
ctaatttttgaacacttacaccatcccctgggcattgaataatttaagaccaaattcctagtgcccccagtgtttcagtgctgctttagatgtcacactcttttgtacttcttattcttggtgtctagtttaagtatttatttccgatttaataatcaacattactttaaaaaacaaattcctatgtagagatgaactatcttccttgttctatttttttttttttggtagggagttactttggtcataagagaagaacttgattgaagaagaaagataagaaaaaaaaaactttatttatttaaaagcgtactaaatctctagttacatagtcactagattattggtcttcagtattggggggtaatctggctcattgggcccttctggcatttcctcatcttcggattcttaatctgaaggaatctctattacttctactattttctctgcttctatttgaggtgggctttttagttcaagttccaacatttctgctgtcacttcaaaatagtctggcatttctgattcttccaaatctcgttcattagttacgttcacagattcagttatgtcctccacattgtcgtcacttagcttatatcgtatgttcttgacgcgttcttcttccatgccgtttgtttccacatataagtcttttcgaaaacaaagttgtggaagtcaagcgtcagctcacatatgaatgc

SEQ ID NO: 255386 - DNA, 690 bp, Cannabis indica
aatcactttttgttatgtgagatatttgcattacaatttggcacaccattaaagtagaattttgacaaaatgagttatattttgtatttgtatttctattggagatgctctaagatagttcattttgttaaaagcatgccaaattatgatgcaaaatttaaattacaatataactacaaaatttaaattactataaatactatgtttttatattttttattaatatgttcttttacattaaataacttgcattattgttattaaattttatatttaattttgtattattagaagggaaatttgattttctatgcattttttattacctaaatttgtttcccaaactaatagttatagctattgaaaaaaataaggaatacttttccctaaaatcttaaaatacccctcccatattttcaacctctctctcttcctcctttctctctcaaatcaaacccaaaccaccgcacctccaagccacctcctccaccgcacctctatggcgagccacctcctccaccgcactgctcgactgccgcaaccactgcaaacgaaaacccacgcgcaggtccaatttaggcgtgaatggttggggaagacgaagagccgatgggtccgatgggggctgtgctgggtccgatggggctgggtccgatggggctgggctgggtccgattggggggggggggg

SEQ ID NO: 255387 - DNA, 583 bp, Cannabis indica
ataactttactctttgcaataaaaatatggatcaatttttactagatgctatatgctatacatatattaatatcaatcaacttatatagtacatataaattattaaaaattcagggggggccatagcctctgtgattatatacatacatacatccatccatccttatttcacataagtataatacaattataaataaattatataaaaatagtttattaattttattgaaaaggtattttttgtaaataaaaaagttctaaggaaaaaaaattaaaatttttcgatgttgacatattcttgtaatttttatttatatttccggtctattttataaaaaattttaaaaaaaaaactacaaataattctagaaaactatttaactattacatatataatatatcaaattttagacacatataaattaaatcgattcaaacttttgttcattctaaccatgttgtattattcttcaaactcccaaccaagattcagttagtttgttagttgttcattaactaacttaactataaaataggacaacaagtatctttggatcctttggtctatataaagaggactact

SEQ ID NO: 255388 - DNA, 593 bp, Cannabis indica
cacgtgactaacgaccttcagagttagagtcgtgaggacacataaggacatgtgaccaatgaccttcagagctagagtcatcagagcacatgaccaacgaccttcagtgctccacgttgggctgacactcagtgctggtctatctctgaagtgtaagtaactcatacgaatttgaatttacgtgaagatacacttttgtgtgccaccaaagctatagtgcaagaatatctacaacaactatcgtttcttgagatatttattttgaaataatattttattattattttatattttaaatttaatgtaattatagttaggaaaaagatatgtcaggttaaataggttgtgaagtcaattgtaaagggactctctcactctcactctctcatgctatttcactctaaaaactcacttcaagactaaattcttggagaacatataattattttctccgtatactaaaactatataagcctctattggtgaggacaaaaaaggtaaatatgtctcccaattttattttatttttttgatttaaacgtttatatattacaacatgcataacctgagactcgaatctaggatctccaaca

SEQ ID NO: 255389 - DNA, 2604 bp, Cannabis indica
  modified_base (51)..(51): a, c, t, g, unknown or other
ctatatatatatatatatatatatatatatatatattttttttttttcccnctaaaatatatatatttatatatttttttttggaaaaaagtcttatttttgcaaacttgttccataaacaccgtaaaaatgaaaatttcccaattaatatggaatttttatatgaaacaacaaatacataaacaaaaacaacaccaattaaaaaaagaatgaacaacaccaattaccaattagcttaaaagaatctgtaacaacaccaattaccaattagcttaaaagaatctgtaacaacaccaattacacccacaaacaatcaatatcataaacctatcagaaagtggaaaaatatgggttgggtgagcagcagggttatatcgacgtgtgtttatgtgagatatattcactttcttcaagtactcctattgctagactttgcaagactgtaaaggcttggggtcttcactcattaatggggtcttgaaggaggaccttgaaatttatgctctctcgagtagatatggaaatttgtcccgcggagatggatacccgaagaggataatggggtaggagtagtaggggaagccgaagctgatttggagcggggtcaagggtgatactatccacctcatatatgatctaatatataattttcatataattttataaatttttattggtacaatcatattaaaattattgactatacaaagtttattattaatctttggagcggggtcaagggtgatactatccacctcatatatgatctaatatatagttttcatataattatataaatttttattggtacaatcatattaaaattattgactatacaaagtttattattaatctttcttattatcgttataatttttttttaatatagtattctatataccaattttaattttcaataacttattcaatttgttattacttacaaacttaacatattaacatcgatatatgtcgtattgagagtggagatgtcaagctaattgtcattgggttaggctgaggaagtcgatcacatgtttttcacaaagatgagatgctagggcaatcaacaagtcaagttctacattaaaatctaggtttgcacttttttctagcgtaaaactcctgatcattggggattgacgatgtggaaactctcgtgctcgaatcctcaacagaaggtgaatgaaaagtcgacagcgtgatccagattgaagaaggaaacttggctctgagttcagttcttgattttgaagagtgcaaagaaagttctaagcattaaaattttgaaaaccagagaaaagtggtaactggaagttgtaaagggtatttatacccaaaaagcaatccacatgaaagaggatgaagggtccacgatcaaacctccagaaataataagcttcatccaacggttggggagttcaacgatgctcgcgcatcttcacaattagtgctccccaaaatcgaggcacaaatcaatgatgaagatgccattttttaatttttgtactagaaaagtgaatatccgtcaaaataaagtcaaatctagaaagcaactcctcgatggttgtgtccttccaccaccatgcgacgtggatatgccactatcaaagacggaagtcaccttccctgattgattaacacttgtaaagtcatgatattatccctcatcctccaaatgtccacactgaaggtgtgatgcaagcttccatcatacgtagcattctggaagcttgagggtaaatgttatctacgtttttggcagtgaacacatgaaatccaagtctgcatccaaaacccatcaatgggtcccccaaagaagataaaatgggccaaacccatttggacaggtccttccaggaatgtacttcagcttcgtgatcggagaaactttcgccattaacagctcatgtccggaagcaggtctagtaccgtaaggtcggaagggtaagacaacatgttcctgaaagtggtccgatttccctttttattcttgtgcacaaataaagaaataatagtttgctggatcttgatagaagatcgtatcaagctaaataggaaaaattttctaaaacagatatcaagcaattaattcacaattaattgcccacaatcatagaacacaatgttgactaaatccaaccaaatctaatctgcctagtcagcatattctctccttcgtggactagacttcacgagacagcctaagtgtgttattcattgcgaattctccaatagagggaaaatagaaactaaatgtaattctcaaactactataaataccgagtgaatcctataaattaagggttgaattctcttgcaatacttgcttaggcaaacttgagaacttacattcatggtatatcccaaaggctttttaagctaaagaattacttaataacatcgactcgtggactaaggctagttaacgccctaactacgtaaaaactgtttgtgtctttcttattttttctcttttaattgtttatttctctcggtaaacacttgccaagtggatcaaccaaagattgacaattagtacaagaaatggacgtagacctactatcctgagccaagacgttatgcacctcccctctgacagtg

SEQ ID NO: 255390 - DNA, 913 bp, Cannabis indica
tgtactccgggtatatcctccaggacccatgcgaatagcacttcctggtggcataaaaagacttagcaaatctttccaagctatctgatccacgtgtcccctcttgactggtccacgtatttttggcgaattttggagcaacaatggtgtttcctaaatacattttggagcaaatcaataaaatttgtagagctttttttgtggaaaagcaactatgatgctaatgctccaggtcttgtggcttggaatcagatttatcttcctaaaaatgttggaagattgagttttagaaacattgaaaactagaattttggagctttgggagatatatttggaatattgctagagacaaacactctttgggttaaatagattcataatttatctcaaagaccaagattggtggaatgacattgctccactgagtgttgtagttcgtattagaatgtggaagttaaaaatgcaatgaagaaaaaaaaatgaatatggaggaatttagagatatgaaattcaatatctcaagtctttgtaataagttgtggccgattcaaatacaaaatgcttggcatgctttcacttggaacatgtttaattagttttcctaaacacaaattcataacttggatggcttgtcaaaatagacttcaaactaggattagatcagttctttttggtattaatgtagaaagtaactgtcttctttgtgattaagtatagttgaatcacatcagcctattttcgttgattttttgctactgcagtgagatttttagatccatttttcaatggcttgatttacccatgcaacagactactttagagacttgtttgaagaatattaagcgaagaattaacgctctctaaattcagttgtgaatttcttgtaggcgcaatggtgaatgctatggtttat

SEQ ID NO: 255391 - DNA, 609 bp, Cannabis indica
ttttttttaatgtacctttgttttgttataacctctcaattagaatataatttttttagtcccaaatatatttttagggagaagttttaaatgctaataatattctattatatttaaataaatatttaatatggaatttaaaattaatgtgaaaaatacttttacttgtaagagcaaaagtggtgctttcacttaaaaaagtattgtatagattttaatacattataaattgtattattcaatatatatgtataatagacagtattagattcttttgtaatatttataattttgatcttattgtggtacaatcgtgattggggttgaggttggtattcgagttaagattggggttgaggttggtgttcgagttaagatcggggtcaagattagtgtccgggcctgggatccaggtcaaagctgaagccaaggccaggatcaaggtcggggttcgggatcagggacggggatgggggtctaactttgtgtcgaggtcgggatcgaagtctgggtcaaggttcgtacctcggttgggtatggagctaaagagagggtctgatgtctaggcaaatgtttgagttagagccagggtttgggtcaagatacggc

SEQ ID NO: 255392 - DNA, 1125 bp, Cannabis indica
cttttttctcctcacacttaaacctaacatggacgtcttgaatgtaagcataacctcacaaacacaagagatgatgagcaatgatcacggctagggtcgtttgagcaaagatgttgcagacgagatagcaaccacacaataaatacatataatgaagacaaaacttacctcaaccaaagtacaaatagaagagagaatttttgtcctattaaaagttctagagacatcagattatctgagttactattctacttagtatgaaaacagcttgacactcacaaactagaggaccagatagaattcaaaattgtatgaaatacacactatagataggtccttcaaggtatttgtaaaagggattttttttgaaaaaaagatcaatgaaacagtaattttttggagtgagtttaagagttttctttaattgttttttaactaaaatttctgaatattacatttgatttttaacatttcgttaacgaattctcactgtgaacgataacctatactaaaacccgagaaattaaaagatccatataaagcttcacatgattggaaaccgtgtagaatgaacttggctagacaccacattaattagttggataggacttgtcaaatttgtgctaattaatgaggttgactccactttacatgtgtgagattgtaagtctaatagggaggtcagaaaaactcttcgagctcaattcaattcatggtgtttccccccaaaatagtttcgatttctcccagatcttagtgatgtgttgaaacctttggagattgaaaaaattattaccgtgatgtggagactttagaatggatggaagatatgggctcaagagaggaaatgaatgggttggaagacgagcacacactagagtgggctcttgattcctatctcgttttccaagaggcaaaatactactccaccatgtggttgggccacaatcgagctcaaaaatggtttcatcctccactgggatggataattattgatgattaggattgatgctgtggtggataacaatgggaatatatagttacatagtagcatcgactactcatagtcgctgaagcagctgccacatgcttcaatctaattgcttgaatgcaatccaatactaa

SEQ ID NO: 255393 - DNA, 814 bp, Cannabis indica
aatgtggatggctggaaacataatttacaattatgaaatcctaattttctaacagattgaatgctggtgccctttaagtgttaattctagaactggaatggtgtgcacaaatttagatgagatctaaattatactaccactagtgaattaatggtactaaaggataaacaagtaattagaagggtaaaatggtaatttaatcaaaattaattatgcaccaatacatggagggctaatcattggaatgattatattcatggacactgtagtaaaactcagtaaaaaattctataattattaatagtttaattccatatttatagttgggttatcatggaattaataaataaaaattatttggttgatgagactcaataaataatctagtttattggagcttagaattataggtctatagtccccgaattgccaccttgaaacactgtcaagagggataaagagttgtatagtcgttcaaaaaaatatattttgaattagcaaaatagtaatgatttatttttatagtaaataaataatttttcaaattaattaaataacgaaaagacaaaaattgttaatataaaatttgtgaagacaagatttgttaagacaaaagttgtcaggacaaaagtcgtcaggataaatgttgtcaggataaatgttgctagaatttctctcaaaatacgtggcagttcaagaggaagccagatggcaacgggacccacgtcacatgacacatcgccttaattactcttggagtccattatttcaaaggattaatgacaaattacttatctccaggaggatccagctg

SEQ ID NO: 255394 - DNA, 593 bp, Cannabis indica
aaaaaaaaaaaaacaaagtttacataactaaaatagactttgtagcattgtcaaattttcaactattaaacaaagtttaaccgacaaaataaaaaaaaaagtatattgtatatttcatttttatttgttaattttatttaaataaggtctgggtccaagtctgaggtgggaactgggaccgaatttgggttcgggtctaagtttgggattggggctggagccaggtctaggttcgagtctgagatcggatttggggctaaattcgggttcaatctgggatttagggtctaggtcaagtccaatgtccgattttggagttcaagtcaggtctggggttcgagttggcccgtggtttgggtttgggatccgaggtcttggttcagggttcgaattaggggtctcggtgggggtctgggttaggtttcaaggtttaaattagggttggagtccaaaatattaattaaaaaaaattatttaaaaaaaatgtaaaaaaattttgtttgattttgaaaaatactttaaattttttaattttaaaaaacaaaaattaattaaaaaatattagtaaactctagggttgtacaaaaaaattt

SEQ ID NO: 255395 - DNA, 645 bp, Cannabis indica
gattaattcaattctatatatatattaatttatctaataatttgatatgttgtaataatgtaaccatcatagtaaattataagaacaagtaccattcaaaaggtacccatatttgtgttcttataaaatcataggttagttagattccttaatcaaaacatcatattgtaatatattatattgtattgtgttggattgtattgtattgtattgtattgtattgtattagtattatttaatacaatacaaatgtttggtattaacttgtattaattaattgtgtaaagttataatatatttttaatacactcgatcccagcaccaactacgggtccgggtccggatctaggtctgggttctgaatcccgggtccgggtccgggtccgaattcgagtctgggtcacccgggtccgggtccgggtcggagattggtgttgaccccaaatcttttgtaaatattataatacaagctaatacagactatttattatgtattaaataatacaatatacattgtattaaaaatttggtcataataattaatataatacattgttttatctaaatatagcgttacttattattaaatacaataccattcttatacggcgtactaaacaagttccatatgaactatgaagtata

SEQ ID NO: 255396 - DNA, 1428 bp, Cannabis indica
atacacttaatatatattattcacataataatatatattaccacattttaatctatattatattattaaataatataacagttacgaggataagatctcaggagaataaatttctatcccaaacatctataaataggggagatttcccaaaattaagaacggccaaattaagaatcatagaaaaaaccaaacattgcattttgtactctgtaagaaatttataaaatctcgataataagatggactcgtggactatgaagatttaacttcaaaactacataaaaatcttcttgttaatatgtatattattaatattattacttattattctaaattttatttattaaattgaggcttatttattggttaatagagatcggcgttaataatttgctggcattgagagccttgtaaaaaacactcaaaaaaacacacatccctttgataatattcaaacttttcttttttcttccaaccatgtctaaggatacccatcaaaatgatgacaatcaaccgagggaaataactaaacatcctaggaaagaacccccaaggtgcccagggagcaaaaacgaatgagatcccacactcgggaaggaggaatactgaagagctttttgagaaaactggtgatgaaatccctgaaagacgtagttaggatgcatatgatccaaaaagatacgtagagtatactagggtgcttgaaagaaccatgtcgaaggaactcggtaaaatgacctcgtaactttgggagaaggagtgctctcctttcttttgattaggaaagcagtacataccagggggtagcgactggttattaaaaatacatgactctgctaagtggtaacacgatgtatagagtctgacacctgcctggtactggaaggtcagaaggagaagtgttataagctttgaatggaagccccagtaaatggtggaagtaactctaactgtcctaaggtagcaaaatttcttgtcgcataagtagtgacatgcacgaatggtgtaatgactgcctctctgtctctaacatggacctagtgaaattgaattctctgcgaagatgcagagtaccaacggctagacggtaagaacccgttcaccttaactataacttcgcagtgacaaccttgatcgaatgcgtaggatatgcgagaggtggtgacacacaatgaccaatcttgaaataccactctttcgtccaaggatgcctaaccatcacaccgaattctcgggggagggggagagacactgggaggtgtgtagtttattaaaaaaatattgtagtaaatgaaatatataaatgcattctctctcgatgcacttgatatggcaggtgggttatgttgggtattatgccctaaataaaactcatttcatataatcagatttacttactaataaagatcagaaataacattttatgtt

SEQ ID NO: 255397 - DNA, 847 bp, Cannabis indica
caaataaaaacaagaatttaattgtttggtgcttaggtacgttttcggggaatgatcacctgagtatatgtatatatatatattacttgtaaaaacaatatgtatacttgcgtgttcgatttatcgcaataagtttttgacgtcgttgttgaggactatgttaattaatatctagttaaaattctattataatttggtttcttttagtttaattttactaatattttattgaatgagtttgtcttgcgagatacgtaaaaaatgctacatcaaaattaccttatgtatttttcctaacaatacagtgagtcattttacgctacttcagggtgatttaatgatctggtagagagatgttatcacaatttctcaagacgatctcataatatcttattttataatgggttggatgatgtaacaagaagtttggtgaattatggatcagcgataattggagaacctttgttaataacttagaccacttaaggctaattcaagtgacaatagaaagttatttggggtgcatgtgtgggggtcataagatcaaatcccatcttgtgtaactcatcaaaaatgtatttattaaacgctttaataaaaaaaagttcataactcagagggaattctaaagaaagttgagcactatccactgcaatttccaaacccaaagttgacccaaaagtggggcaaacagcaaaaatttcgacccttatttaaaaaatgtagtatttttaaaatcagtaaaaaatatgtatattttcaaaaagataaaatcttttttcatctgctaggtgaaccataagcacataaactcgaagattggccctacaagtggggcataggtcta

SEQ ID NO: 255398 - DNA, 1290 bp, Cannabis indica
atataatttattttgtttgataagtatattttttaagaatataaattagaaggaataaaattagtataattaaaaatataaattttatataaaataaaaaatagagtgtagttaaaagttttgagagtctacataaaactctttgttaatattactattaggcactttaaagtatccaacgatatatatccaggtggcatattatgagtgataatagtttcttatattatttatcaaatcaaaatatgtgagacttgatattaaattacaccagagatatgtcactcttgtggtgcctagtatcttaagggaatgctaaaaggcaccagtggtgtctagcaccatccaatgtgtcatatcgctaatgataattaagtatcgagtttcatataatttaatataataattagcttttttactcctaaactaccaagttctgcctcctatagcacaagactcatttaataatacctctcgaaatataactttttcatcatattttattcaattttattatgaagcaagtaacgtggtgaatggtagtaataatggatgcaaatcaaatattgttcatccttttttctttaataattaaaatgaacttttttatttttacactttaaaatagtttttttttttgtatttttacagaattctatatagaaactcttattgcaactactgctgcaacctaaattgcaaataaaaataatatagaaaccagcgctgcaactactttagaaactcaaaccgtaaatttggaaaaaaaaaattaaaaaaaaacagtatttaggataattctcctaatcaaaaaactaaaaaatataaatgtaaattattatatatatatataataaaaaaaaatcttctattctattgttaatttattaacgtaaaaatagtgataaatattaaattgacatccatttattaactaccacaaccaattcacacattttacgataaactaaattaaataaaatgtgatggaaagactacacgttgttgtaagagttatatttcgagaggtattatttacaagtcgtatattataagagacacgactggagtgtaaaaagttctaagggacaaaaattataattattctataatattataccttttatagaatatcactaactaatagtaaagcgttacctctaaatagtattggtcatcattcattagtggctagcttatagcaatatattctaccttatggtgccttcttagattttctttttctctgttttcccgctttttttttaatctcgctttttattgtagaat

SEQ ID NO: 255399 - DNA, 590 bp, Cannabis indica
atataattaaataatcactcgaaattatacaattatataatatactttaattataatttataaattatactaaatggttatacacatacatactttatgaaataacatagaaaatatagttaaataatttattgtcatctatacaatgtatttaaattattatattgaaatatactatggtagcacatagtcgcacatgatcgcacatggtcatatagatcaatattaagatatactttgaaatatactatggtcgcatagaccaatattagaataaatttttaaatatactatggtcgcacatggtcacatagtctaatattaggatatactttaaaatatactatggtcgcatatagtcgcacatggtcgcatagatcaacattagaataaagtttttaaatatactatggtcgcacagggtcacatagaccaatattaagatatactttaaaatatactatggtcgcatatagttgcacatggttgcatagtcacacagagtggcatagaaacatattaggataaacttgaaatatacttggttgtacatgatcgcacagagttgcacaagatccataataagtact

SEQ ID NO: 255400 - DNA, 386 bp, Cannabis indica
cttaaaaaaatagaaaaaaaaaaaagttcgtacatctggcgcccaactatctctttacaaggaaaaaaaaagataattagacttatgtacacgctacaagcaattgaaaaatatattctgaatattttgttaaaaataactagacacaacttgcgattaacaacaaattttatgctcatattaatgaagattaagtatttaattttagattaaaactttacaattacaattagtaaacatttttcatttaaattttgagattaaatcttcaagaggtatgaaccatttttgatagcctcgaccctaaattgaaatataggccataggtaattttttctttttgcctgttattataaaaataaatggtattttaaaaattattaaaa

SEQ ID NO: 255401 - DNA, 528 bp, Cannabis indica
taggtgtaaagacttggttgaccgagtccaaaagagaaagatatatataataaatatataaatatatatagggacatgattttgttctcttaatgtatttaggagtacatattctgtgatgtaccctgaccgttaaatgaataagttttgtgatctaaaagttgaggtttatataagggtatttaggaaaaaaaatagataaccggttcacttttgtaataaaaaagttattaaaatttaaaaaagtaaaactaacatgaccatccatcagtcatcaccctcaaccgtcttcctctctccttcttccttcttaattcataaccctcttcatttttcaactttcttttagatttaggcaaaactcttcaatttctattttcatttcagattaggcaaaacactcactttgtattttcatttcgtgtacatactctgagagaggaagtgttagtagttcattgtggtgtatattgtttgtgttctcacattggttggttctcacagttgtggatctcgatggctgtctac

SEQ ID NO: 255402 - DNA, 1797 bp, Cannabis indica
tgaaaacatagaaaacaagcgtaattccgtcctaacaaagctaaaaacgcacataaattagatccaaaacataggctaaaaatagcctaacaagggcttggggcaatgacttattattctgtctgaaaatcttcgaatgtagtaaggtttgctttgagaagatgaagtcgtaggaatcttgtagaaaaaatgtcaaggatagggatggcatgcaattcctcaggcaaactcgatggtgattcttagcgaaaaagcttaagaatttctcagactttctaaaacagaggaataatgaaaaggtggatccttttttcttacattatacttatgatatcgacttcgttagatcagggaaatgtttgatactacggatgtaattcaaagtggaagtggaaaagatggtcatttaatgctgatatacctcgaaaccgcacaactgccaaaatcaaagaacatacgtcttttcaaaagggatcatgacaaaaataacttttgtaatcattaaaaagcactttttattgaaaaagaacttttttaggggcaattattataccccaaatttggcagcacatcagaggaagacaagtgtcaagttgggaagattaaagaactcaaacacgtaatcataattacatttgtcatggaataactcgctaaaagcataattagtagagtatgtttacaactcggctggctgaacagtcttatgcgagataaaaatgtactaactattgccttgtgcctagatgagaaaccatgtaacttcaggtgtacaagacgaggcactaacctcgttacgtaaggagatataatgacaatgaagatacttagcgtataatgtacggtatacaaaccaagtacaaataaatgggtgaaccaaagtgagagatagcgaggagtccacctcgccataagaggcatgcacgcgaaaaggatcatctcgtcaccagaaaatgtagttgtcagaattaaagtaaaagcattatcaacattgggaagacgtatggggagctcccgctcgccatcaaggttaacttgaatccattcgcagcgaggcattccaatacgataaggcttaccatatatctttaatacacgttcattttggcccaataaaagtgggatattcacagctgtgtgaaatttaaataaaaaccgcgtttgcttaacgtgatatgtaataagatcccatgattccaggggataatcgttggaaaaagattacattcaactttgtaattaactgcctattatgtgattataagtagtggcaagtaagaccaaaaggaaggggggacgaaaaaaatcatatgggagaggccctgaaaaacaatcagacatctaataagattgactcgtggactatgtacaatttgaaatgcaaaaccacataaaaaatcatgtgtgtttatactttctattttacacctttttttttgtgtgtgatattgtcactattaggctcaaatttggttaacaaaaatttgtgttaatagtaacgtctatccgaatagtggttgctaagagtaggacttgcaaggtatgaaacaatggtagaagctcatgaaataagaatgaccttgactctcgattaaaacaaagcaacatcgaattctattttcgatcgaataaaaggttactagaatagtgtccattttagttgagctgattgctctattcaatgattgatatctttgactctcgcccaatacgaagcactatatcagtttgttggaaatcttggaaattatttaggattttttgttttgtattttcacttgtcattgctacttgcta

SEQ ID NO: 255403 - DNA, 735 bp, Cannabis indica
gattaattttaaaatattgacaactatagaatgaacacaagttaattattaaatataagaaagaagactaactatttgtttaataaataaagactgacagtattcccttaaattaatattaactaaataaattatttaatataatatgcatagaaattcttaggtgggttcttacatattaaagattattttctgtattcacaaagaagttataataatatgattctttgttatatgatattataaattttagttataccacacattcttccaattttcaaatttttttaataatttacggtatcataaataaaattcaaaatactcagtttcacgagtaaaaaaatagtgtgtgcaacatatacctatttaaactctattttaagcattgtcaaaatatttcaaaatttctttaaaactaacaaatattaatataacaatcatatataaaataaaaaaaatatatataattataacagaaaccgaacagatgaaaatgttgatgataagggaaaaagttaatttgtaattacatccttatattataaaagtgtctatatcattatctcttgttggtttgagaacattttttttattatttttctgtcaatttaattagtttgaattaaatatataatactaatctgaatgttagctattatagtcttattaattgtaagagtagcaagaggtttcagatcatggatccaacaatggtggcggtcttcgtcattt

SEQ ID NO: 255404 - DNA, 500 bp, Cannabis indica
aaaacatgtggtgacatgtttttttagtttatttaatacatagtctaataatatgtcgtcccgtatttctgagctgatacttgatggccaaaaaataatatgattatattaaaatcgtatgataaaatacttttgtcgtcaattttttttattagagtaatatgtgtaataatagtaaatgttaagaatttcgccacaaatatcccgcagtgggcatcataataattattctacaataataatagtagtttgggctcaaaattgaaacttcttgatttacacttaatcttgacggtaaaaattttcaactaactaaactgttagcaaattttaggtgtcattctgttaacggccatcatagactacttatgtatacactcttgtacacgtgacacatttatattgatacacctaatattattattttaaaattattcaaaattcattttaaaattaaatataattataaaaataaataatgtacattttaaaaataaaaa

SEQ ID NO: 255405 - DNA, 820 bp, Cannabis indica
taaaataaaatatatagaaatatggaaacaaaataatcaagtaataataaccaatcactatatataatgatttaattattattaattaactaatttaaaataaagctgggcatcaatgttttaagcatatatatatacattttttttcataaaaaaaaaacaatatatattttaagcaagagcctaatagtatcgatcaaaggaatctatagtgatataatatatgttttatttttatatatatacactatattctatgtaacttgaatcgattatgataggaaaggaataattctatattgatgaaattcaaacatgaatatttctaaagtggacacattctgaaaaagaaaagaaaaaaaaccaatgaacttttatgaagggtaactttcaaaatataaaagaaaaagattatataataataaaagtctaccgtacatccatttaggaaccaatggtagattttttatatgtttcgacaaatattttaatttaatttttttttatataattgtgtatgttatagttatttaagatcatttgtaaatttttgaaaaattctaagtaatttacaataccgaaaataaaattatatatattttgttgcacacgcaactgtttttcttataagcatggtaattgttttaaagcttattttttgacactgtaaactattcagaaattttttgaaaaatttacgagtagtcttaaatggtataacttatgtgatcatgaaaataaattggattaaaaaaactctcttagatgacgaaacagataagggtctaaaaaaaagctatatttagtgacagctttttta

SEQ ID NO: 255406 - DNA, 1034 bp, Cannabis indica
ggcttcccacccggatatggagataaaaagaagcaggacaaaggcaaagctaaagctcaccaagacctctcttccaaccaggttgatactcctgtcaacccaactgatctactgccaatgtcagcaattaatctctctcctaagtcagcagctcacaaacaccactgctcgcgtggaatcggaccaacaacctgctgctgcctccaatttggctggtaaaaattcttttctctctgattttacttggattatcgacactggtgcaacacaacatatgtgtgcacacaaatcttgctttagttctttttctaacactacatatcccaaagatgttatcctacccactggccataaagctcctgtggtaaacataagtattgtcaatataaactcttctctgactttacataatgtcctctttgttcctagtttcaaaattaatcttttatccattaatgaactattggacagcactgcctttacaataaatcttgacaataatacttgtgtaatccaggatccttctcagaatgtggagattgggatagctagaaagcatggaaaactctatctcctgcaacagaagacatccattgctgctgcgtctcaaattttttttttccatttaataaaactagtgttgactattggcacaatcgccttggccacccatctatgtacatttccaatattattaataaaaagattggttccccttctattcattcatcttctactcactgtcatatatgtcatttagcaaagcaaaaaaaactaccctttgttgcaaatcacaactttgcaaataacatttttgacttagttcatatggacatatggggcccctttcacataattagtacagaaggatataaattcttcttaccattgatgatgacaaatcaagatttacttggacttatatgctcaaagaaaaaatccgaaggttcaacacatcataccatcgttttataacatggtttgtacacaattttcacacaatattaaagctgtacggtccgataatgccaaag

SEQ ID NO: 255407 - DNA, 494 bp, Cannabis indica
aaaaaaaggtaaaaatgatagaatttaaaaaagaaggtaaaaataaaagaggacaatataaaaagggtatagagtgtaatttcctcgtaaaaatatttaaaaaagtattgaacgtgaaaatataataaaaaatacaaaatagatgttgtatgtaattatcctaataataaataaagaggaaattacactccatgtagattttcaaaactttgttagaaaaatatggcaccattaagtttggtcattccccacctactccatctaccaactttgttgaccatcttcggtgatcggtgaactgcacatttggcgaagggatttgtctcacctgaagccaacgccgttagccaccactatgagagatgttgtctccctcgaagttggcgatttacaatattgagcatcaatagagatagaataattccaaccattattcttacctttgttgaatccatgctctcggtatataaatataattatatgtatattaattg

SEQ ID NO: 255408 - DNA, 604 bp, Cannabis indica
gtccgccgctaatactattagcaacggggcccaccgctaatagtctgtcgctaataagtgggtgagaaaattcatgcctattcaattcaaacatttttaaatactaattagcggtggatttgtaaatacccccaccgacccattttccatacttttactctcagctcttcaacttatttctccagccctctctctcaacccttctccaccaccaccaccaccaccggttaacatcaccacgactaccactaccgagttcaccaccatgaccaccacggagtaccaccacgcacccacaaggacaccccgcaccaccgagtaccaccacacactaaaactcattacatgtaagtaatttttttttaaatctaactttcttttccatattctcataagagctatgtttaactggctatgtcattcaggttgaagtggaagctctggtgattcatagaccaaaacttgctacagtgatgaaccaagtgaagaagctagaggtttctgacggagccgtattttgccgctaataatattattagcgactatttaatagtggcagactattagcaggggatttccgtcgctaatagcctataggggctta

SEQ ID NO: 255409 - DNA, 1316 bp, Cannabis indica
gtctctcgtattaagatattaattaattaaaaccaataacatatatatcttcatacttatatgtccatttggaaatatttattttgcaagttataattaaaaagatgatactttgatctttgttatcttcttaaacttcatattcttatttttttttctaaccctaaatagtatagactttggtcaaattttaatatatataattccaaccttacaaacccatcaacgtatttaccaatttttatttatttgtgaaattaatatggcgaaccgattggttgtttgagctaaataatagtaccatcactgcttacattatcgtcgctagagaaattgattgaaatcaaaattagtttttaatttcttttatatttgttaaccaaaaaaaagtaaccaaatgttacacaaacaaaaattcaatataacgacaaattaacttcatattttaaatttaaaagttatgagatgatattctaaaaaaatgaaattacaaaattttcatagatttctaaaaagaaaaacctaatatggtaactaaatgatatgtcttaaacttatatgactatgctattttgctaataagaatgataatttttaatactttatagtttataatgactcattagtttctttaatataatttcaaaagtaaaatatagtaacattgggtcgggcttgagctaaggcagactaagcttgcgcctaaggtccacccaacccaagggcctaaaaaattattttctatttaaaatcataatattttaagaactagctaattgaaatcatgtaaccaatacacgatataatattatttaaaaatgacttttattaatgaaaaagtaattattatttagtattttttttcatgtatcataagcaactaaaatgttacttttaaaaatctcatcaaattgaaagcaaaaaaatctaaaaaagtataaattttctattttaattaggtgttcttgtttcactctaatgtagataactaaatatttcttttttatatttaaaattgtaaatatttaaataccctaatggtatttcaaatatagtaattttattattattattatttaaaatttatgtttaactagatcagtacgatcataatttcatttatacctgattaatctaaaatcaatataaatcttaattattttactattgggctttatcgggtatattacaaagatttagatcaatctagtattgatcatcattttgtatatgtaaattaggtcttttaatagtaaactaacatttagataaaagacaaacttcattcatatcagtctttgttatatataatctct

SEQ ID NO: 255410 - DNA, 1017 bp, Cannabis indica
ccacaagtttattgatttagtatgatgtggttaatttactattattattattatttaaatatatgtgatacatcttatatattcacaaactttcctagtgattctactttaaattcaaaagacaaaattaattaaataaaaaataagggtagaagaagatatttgtaccactagtgcaatttatctttcttttcttttattatctttttgagtgactttgtggatgttataaaacgacattattatgtagtaaagtataatttgtacgtaataacaaaatcacataaattataaaactaattaaattaccacgtatttattacttttacatcataaagttgagcctcgtgaataaatgttttcttttgtcatctgaacagttcagaagtcaatatacactgtgtatatataagactacaatttggtgttcgaaaggccagaattaggttggggagtcaataagagtccaatgtcccattctataacttgaccctcttcatggcctttggaatttttataacattaagtgggtcttacaatgtcaaacattattatatttactaagtataatggggtagtcactcactcactactcaataaaaatatttcaccttcgaccatctgacaaacaaaaaaaaaaaaaaaaaaacctaaatagtatctatacgtatatatgaaatacatttatttatttcatatgtgtatgtattccatttattattacattcgttagatcaataatattgttaataaaaaaaatatatgtcaaactaagtttataatacactataaagtaatttgttccaagtattaattaaaacaaaagaacttcgcagcaagtaacactattttttattattaaaagagacaaaaatcattattataattaataatgtgtgaaaataaaatatgatataaatgaatttctattctcattgccaattaattttaagatagaatcacatgcacacacattttaaattctaacactcatagtttgaaaacagagaatagaat

SEQ ID NO: 255411 - DNA, 1482 bp, Cannabis indica
ctctagggagtcccttttagagtacaatttttttcacagttatcattttaaattattaatagttataacaattaagtatctccatgagtcaggcccggccctgggcataggcgggctaggcctgtgcctagggcccacccagtccaggggcccaaatttttttattcctcttttaaaattatacatttttttttaccaattttgaaaaataccaaattttttctctaacataagggcccaaaaagaaatttttttttacctatgacccactttgtttcagggccggccctgccatgagtacatctagatttaacatctttagaacaaattaaataaacatttattaataatttctatattgttcatttacgcttcaagtatttttttactcattctaactcaactttgaataatattgatttacagttggcatatgtcatattgaactatatcgttcatactatactttatgcaaggattatttttcaaaatatcttaatcgatcttaactgtatttctctccctttaattgagaaattttttaaaaattgttaaatctataatattaacaaatttgtaggaattttaatatatcacaataaattaatattttttctaagtactcatatataatatatgaaattaattttcaaatttaataaatataattataaatttgattcatttttaagtatgagtgaaaagtcaaataataatataatattcaataaatacatatatatatatacataaattaattaattgaattagataattttaacgtatattttttttgaaatatttttaaaaatatatttgatcatattaaatttgtgactatgtttacaatattttaatatcaatatactttatttatttatatatttattttttgaaatggtcaatatactttatttccacatttgaaaaagaaatagatttttcaatagtggcaccctttgtcgccactatgaacttaggcttttaggccttttgtttttcaataaagcttttgttttcataaaaacaaaaactaaataaacatgtacatacgtaaatacgtcaatatatataatcatcatgacatcatcatgctaagcacatttgattatggacatttaaattacatggttaagcacatatcattatataatcatatgattaaattacatgattagagatgtacatgtttatggatatacgtccactaattatggacaatggtatcatgtcttttcatgcaaatgaagtggtgcactttatagctaagaccacttataatattagctaacctaaaatagttataagggttaaaaaatagttaagagttaagaaaaaattaaaaatttactttatgaatagtacttagttaaatgtagttaatagttattttgattttagtatttagttataattttttgttatttttataatgtattttatttaattttaagtgtaaaataaataaatattatgtaatat

SEQ ID NO: 255412 - DNA, 686 bp, Cannabis indica
tcaaataatccaataattaataaaatttataagagtaactaattatcaacctatattgactagataatattttatatcattttaatatttaaaacaaatgattagcataattaaaaatagcatctggttaactatagtaaaactaaaatattatgaatagtattaaaaaaaaatgaaaataaaactaaaataatgtataatagttgaactaaaatatagctataatatatgcatcataaaaaaattaaactaaaatattttttttgttgacgaaacagataaaaaaatttactagaacaattcataaggtctcccacaaaaattcaaataatatttactataaaaattaattaacattaactcacattttgttagaaaaaacttatttttagtatttattttaaaacactatatatttcacatgacatatatctccatttatttacttaattactatgtccatataaatttgagagtttgacttttcaactcactttttctctattatttattttaatacatgaaagaaaacaagagtatatatgctaattatattgatgtaaaattcgaggggggttagggccgaccctaaatttgtcactacattcgcccctgcgatagagtcacgtctagagatattgggaaaacatgtcccaacctgtctagcgcgtcactatatcatacct

SEQ ID NO: 255413 - DNA, 1117 bp, Cannabis indica
cgtgatgaacttaatctgatcggccaactgagcatgctggcggttgaaatcacaacgtcgaccaacttaatcgcacttaccagactatggtggtcgaagagatcgtcgtggacgattttgactcccagagatttgaaggcatcgatgatcttggccttgtctagattggacagcgtgcattcacggaccaagatgaaggtctcgtgtctgaccttggccctggcttccacgatgaatttataaacgtaccctgttccgcggatgaacaagatcgaaacgctactccatacgcaactccatagatttgaagtgttgaacaatctctttatcttctgctgagaattactgtgaatctctcagtataatttctctcacaaaacaaaggaatttttggatttaagaatattgggatgttctgaaatatagaaaaaaatgagatttttgtatttgaatgaaattgaaaactttaattgttctcaatcgtaggaaaaaaaattggatttaagaatggaattttatattttattgggattgaaaactttcaattattaactctcttatattttttattaaaaaaaacgttaaaccaagaattctttaacaaccacatttatttttgaatagaaaacttaaaagaaaaagtcccccatgaatttctcataaaccaaaaaattcaaaaggcacactttatatagaatagagaataaatataatttagaatttaaattacccaacttttttctttttttttttcttctaaaatttttaatattacttcataaatataatattactttccttgcataagactttgacaattagaattcgctgaatatatatatatataaatatatatatatatatatcttatcaatagaatagattcttgaatatcatcaactattattattattattattattattattattattattattattattattattattattattattattataacttaactagggaactaaatcgcgctttgcgcggtgttgtctaaattttataatctttctatacatatatatgtatatatattgtacttattaagtgatataatctaaaatataatatttgtatgtgtatattataacaaagtagt

SEQ ID NO: 255414 - DNA, 643 bp, Cannabis indica
gcttctccatgagtggatatcgaatttcaacgtcgatcagtctcttgctgatgtagtatattgggtgttgtatattgtcttcttctcttgttaaaactgctctcacagcatgttttgtgacaactaggtacatgcctagctattcattgtccagaagtttcaacaagacagggttgagccaaattttttttgagctcttggaatgcttttcacactcctctatccactcaaattttttgttccctctgagattattaaagaagggtacgcatttgtccgtaaatttagacacaaatcttcttagtgtagcaatgcgtcctgtcaagctttgtacttccttgatggttgtgggtgactttatgtcataaagggcttggatcttgtctggttttgattctggcgttgactatgaagccaagaaattgcctgagactactctgaaagaacgcttgagaaggttgagtttcatgttgtacttacagaggatcttgaagcatttttctagatcttccacatgccccctagcctttttggacttaaccagcatgtcatccacatacacctccatattgcggctagtgagatctttgaacattttattcacaagcctctggaaggtggcccctgcgtttttcagcccaaa

SEQ ID NO: 255415 - DNA, 525 bp, Cannabis indica
gaaaacgaatctactatctatagcagacaaggtgagttgctccactatcaacaatactaaaaagtagtgaggaaatacaattttgttacctgaaaattaagtgacagcaggggtgtcattggatgtggaagcaactggttgtagttgttatggcaacatggagatcaattgttgacattgatcagatgtgagctgagaagagttgatctcagtagtggatccaaaaacttgagattcctgaggtgtttgttttattgattgattttttatctggtttttgattagatgcatcaagaagccttctattgccatagcctggaggaaaaccatgtaagaaatagcatttatctttgaaatgcccaggtttcgtgcagtggaaacacattggacgcatctttctatttcttgatgcaagattggatgctgcatcagaggttgcaacagtagttggagtagtagcagcaataggggcattattacgagtacctagagttcgttttcattctcgatgaatgatcatagaaa

SEQ ID NO: 255416 - DNA, 981 bp, Cannabis indica
aaagagacaaaagcaaagaaagaagagatgatggtgttgtgacatatggctatgagttagttgatatattggttgtctctagccaagaatcaagagagactcatggatacttaacttagggtgttcattccatatgacaccaagaagagaactatttgacagtttcaagaaacttgatggtggatcagtgctattaggtaacaataaggcatgcaaagttgtagggattggaactatgaggatcaagtttcatgataatcaaggcagaataattcaagatattaggtatgttgcagatttgaaaagaaacttactttcattggtgaattgattgaaaaaggacatatcataaagatagatagctcttttaaggttatgaaaggctcattagttgtcatgaaaggagaacttaaaaatagcatctattatctaaaaggaaaattgtcactggtgagaatggcatggttgttagggggctagatatggaaagcacaaggctttggcatctaagacttggacatgtgagtgaaaggggcatgagtgaacttgaaaaataagggattctcaagggcacattgggggagaaattagaattctgttatgactgtgtttatggtaaatgctgcaagttaaaatttacaccagggaaacacactacacaaggaaaactacactacattcactctgatctttagggggcttctagaacaaaaacattgggaggttctagttacttcatgagtatagtagatgactatactaggaaggtttgggttttcttgctcaagacaaagaatgaggcattcaacacctttgtcacatggaacagactgattgaaaactagataggaagaaaaataaagaaactcagaactgataatggcttagagttctgttcagataagttcactagattttgtcaacttgagggaattgattgacacaagacagatgtgaaaaatccacaacaaaatggacttg

SEQ ID NO: 255417 - DNA, 563 bp, Cannabis indica
agctcgaagatttgatgagtttcgactgatcagtctatgcaatatggcctataaaattatctcaaaaatcatcgctaggagattgagtatatcttacagattaattccccctaccagtcagcttttgtcctaggaggtggattgcggagaattcaatcttggcgcaagagattatgtttgatttcaggaagaagcgaggtaaataggggtatgttggtataaaatgtgatatgccaaaggcttatgaccgattagaatggagttttcttgatcaggtgttgatggctcacggattcaatgagaaattcaaagagttaatcaagtggtgtgtggcaactttctgatattccattcttcttaatggtggacctctggagaacttctctccgagcagaggattaagacagggagatcccctcttgccttacctctttattctttgctcagatattttgtcccgcttgatattgtgcttggaacgggagggctctattcagctttatgttgcttcgcgtaatggccatgaaatctcacatcttatgtatgctgatgatactatgatt

SEQ ID NO: 255418 - DNA, 559 bp, Cannabis indica
gtagagagacaaagaactaaatctaaattgtctatcttgaaagaaaaaaaaaaaggagaaaaatcatgcgtcaaagatgaatccaacatcaataaaataaataaaaataaattaatatattaaaataataatatatattgaagtaatatccatcaaatttattatttttagacaagtaatatcccatgattttaatataatgccataacaattcaatccatttaattttaataaataatagaccaaaacgttgtgacgtgtcactagtcacaccagcttaagcaaaacttagtgaaaacaggcacttaaaaccatttatatataacataaaataagtatatacatatactatgaaacattagaacaggtgtctttgacacttgattattaaaaaacattataaatttactgatatttatttttcaactataatagagataagaatgtctttcactccatcaaaaacgaatgtacatatatattcttcaacatttattaatatactcacttgaagtattaattatttgagtatttcattttttataattcatatataata

SEQ ID NO: 255419 - DNA, 1033 bp, Cannabis indica
gtatcagagtcactagtttcgtaacgaaataactaaccgataccgaaatagggttctacttagtggtgtcgatgtacactcgcagtagttacactatcactgttgatgtttaggtgtcccgtgacacaaagtatgtaatcaagttaggtgtagggtaacagagtcacccactaatcgataccgaactagggttccacttagtggtaccgatgtacactcgttaggggaagagtcagtaataaagttaggtgtagtgtatcagagtcaccaatttcgtaacgaaatcactcaccgaaactgaaataggtttctacttagtggtgccgatgtacactcgcagtagtgacactatccatgtagaagattatgggtcccttgacacaaagtttgtaatcaagttaggtgtagtgtattggagtcgccagttttgaaacgaaataactaaccgataccgatatagggttctacttagtggtgccgatgtacactcgcagtagtgaaactatcactgtagtttttaggggtcccctgacacaaagtatgtaatcaagttaaatgtggggtatcggtgtcactagtttcgtaaaaaataactaatcaacaccgaaatagtgttctacttagtggtgctaatgtaaagaaatctctaaccgatacaaaaattggattctacttagttgtgccgatgtatactcgtagtagtgaaactatcaatttagatgtttaggggtcctttgacaaaaagtatgtaatcaaattaggtgtatagtattggagtcaccagttttgtaacaaaatcactaatcgataccaaaatagggttctacttattggcgccgatgtacacttgccgtagtcacacaatcactgtagatgtttagaggactcgtgacacagagtaagtaatcaagttaggtgtagtgtataagagtcaccagttttgtaaaacaatcactaattgataaagaaatagggttcgagatagcggtgtcgatgtacactcacaacatggacactatcactgtagatgatt

SEQ ID NO: 255420 - DNA, 674 bp, Cannabis indica
ttttttttttttttgttaaaatgcaggactgggtttacaaatacagtcccaatgatttctacagatcgaagtgtgtatgtacgagtaatttctctattattaataacaataagaatactttatctgtcaatttgttaaatatgtttcgtgacacctaatttggtcattttttgaatatacctgacttttttttttcacccccaagttgttcatagcctacttttgaggaaggtataccagcccaatcccaaagaatttgggctaaggttgctagtcgttgtatacggtttaatgccgagaagtattatcattgatcataaagctatagaggatgctttattgggaagtaggtggggacaggatgagtccctaggttcgaaactatctgttttgtatttcatacaatgtttccttcttagcaatactctgaataagtaagtttctaggtttgatctagatgtcgatgacagcagtcgatgggatgagtattgttggggtagggagtcgtttgaattgactattgattcttttaaaggaagaatagagcatgggatcaaaatgaaaaataaaaaagaggagaagggaggtcagtcctaggatggttggtatagagcgttgggctgtccatgggtgttcattgtttggttttatgaatgttgtcctgcgatggtaaa

SEQ ID NO: 255421 - DNA, 829 bp, Cannabis indica
aatttgaattcaaattaagatattttttaaatattttattttaaaatagaaatatcttaatgaactttccagatcttgttacattgtttgtttgtttatttaattgttattcaaaactttttctttaacaaatctactatttatttgatttaaattactatgattaacttgtttatagatctaatgatctaattttaatcatagtccaattgttaatagatcaaacaaataatttgtaattagtaattttataatttttttcatctgtgataaacctagtaatatgataaggtccatccaaatcatttgtttgtgagagtaaattcatgtttaggttgttagattatagattataatcaaatatacatgttagtaaatctagatcatagtaaaataagttccaataaaatctcctaaaatggttcgaagtttcttcttggctagacctgataatatggcttttgatttttgcatcattaatctgaagtaaggtttaggatttctgggtctgaggtttataaactaaggttggaaataaaggacattcggattctgaggattcaaggagtgtgaaatctaggttaaattgggacatgacttcaaagaaaaaaatgccctatttcctggaaaaaaaaatagaagcaaaaactaaactcaaagtctgcgaatcgcgtaaccttaaaaatttctaagccctagactacccaaatattcacacaaagcttatataatcagattgaatatgcaacatactacactcatagagaaatcaagattgaaaacctaaaagtcaaaagaaagcagaattcacttactagtttttcgaaaa

SEQ ID NO: 255422 - DNA, 971 bp, Cannabis indica
atgaggcacgagatgagtctaagagggagcaaatggctataatcttaaggtttgttgatgatgatggttttatacaagaacgattttttgatcttgtacatgttagagatacaactgcattgactttaaagaatgaaataactagagttctttctcaccattgtcttgatattcaaaatattcgtggacaaggatatgattgtgctagcaatatgcgtggtgaatggaaaggtttgtaagcattatttcttaaagattacccatatggatactatgttcattgctttgctcaccgattacaattagcattagttgctgcatctagagaggtactttatgtgcatgaattcttttcaaatttgaattttgttatcaatgtcgtgggggcttcatgtaaacgtcatgatgaactacaagctgctcaagcaacacaaattgcacatatgatagttattgatgaactcgaaagtggacgaggagcaaatcaaattggtacaatcaaaccagctagtgatactcattggggctctcatttttcttctatttgtagtctacaaaatatgtttggagccacttgctcagtgcttgaaaacataataaaggaaggatctaattaccatcaacgctgagatgcaaatgctgcttataaaatgattacatcatttgaatttatatttatattgcacttaatgaaggaaatcatgggtattactgatattctttgtcaagttttgcagcaaaaatcttaagacatattgaatgccatgaatatggtatctactacaaaaaatcttatccaagaactaagaaataaaggttggaaaaatttgcttaaaaatgttgtctctttctccaagaaatttgacattgacattcaaaatttttgctctcgttatgtccaaggacgtggtcgtcatcaacgtgatcacattacaatagagcatcattatcattttgatatatttaatgct

SEQ ID NO: 255423 - DNA, 566 bp, Cannabis indica
cattttatttgataagtgataatctgaaattaattggaatttatttatgcatgaaatgacaatattacccttgtgtcatgcttatgttatatttaagccctaggggcattttggtcttttgaccatttgattaattatcaacaaagggaagttttacaaaatgagaaaaccaattttctggttttatagcacaccaccgacccctccctctctctatttctcatcttttcaaattttcaatccttgagaattttgccatggtttaagcttgggtttgggaagattttggtgcttggctttgaggaaagcttaaggtagctttctatttaatttactttgaattttgctactgaatatatgtgaaaattatgcttttgatattgctaaattgattggttgcatgtatgtggaagattagcttaatcttaaagctttttgcttagttgtgttgataatccttggttattgttttggattaagtttaagagagaattttagggattgtgctggtgcttcttttctgttatgcatctctgaattttattgttgagcttgagcttgtgttt

SEQ ID NO: 255424 - DNA, 940 bp, Cannabis indica
tagactttaaaaaagaaggtaaaaatgaaagagggcaatataaaaagggtatagagtgtaatttcctctttatcaattaaccaaatctacttctaatttatatttaatcgaaacatatatttttttatatcatatgacataagggagtcatatggagagtatattgaagtaataagggaaaaattggttaagtgtttaaaaaaagaaataaaaataatagaactttaaaaaaaaaaaaaagacaatataaaaaagatatagtgtctaatttcctctatataatgggaaattttcatatatatacgtaagaaataaattaattatacaaataacgttctcaaaataattaacataaatcttgtgacacatcagcaaagttataacgtcaaacaaaacatacacttactgcaattagagaaggaatcctcaactaacctccacacaaacgcaccaccttgttttcaaattattgcttgactaacaattgaataaatacctttaaatatcatccaattaatttgccaaatcatacaatcctaaaataaaaactagaaaccttcatcagaaaactccattaaaaccgatcaaaaaagcttcaatcgtgaaccagaaattagaaagcttcaaccatgaaacgaaaaatcaaccaaacagtcggtatagcatttcaatcaaaaatctgaaacaaaaaacaactttacctttcacattgtgatcgacaattactgaatcatcatcatcgtcatcgatgcttcatctctattgtttttctcatcacttcaaatagtaaccgtacaaccaaaagcttcaaccatgtaattttaaaatacattaatatccaagctaattagtaaacgaaacaaaaatattgattaatatacctttaaaaatagtacaattttatgaatataactttaataaattgccatcaatttttttt

SEQ ID NO: 255425 - DNA, 1017 bp, Cannabis indica
aaaaaaaaaaataaaaaataatagactttttttaaaaagaaagtaaaaataaaagaggacaatataaaaaaggttatagagtataatgttctctaaaaataatagtagaacaactaaaaaataaaaaataacattaaaaacttaacatagtacacagtataaaacttatacagtatttttaaaaaaaattccgcctacaatataaaagtaaaaaaattaaaaaatttaatatataatgtaattatccttttttaaaaagatcgtatttaaattttattttttaaaaatattattaaacaagtcctattcagctcaaatatatacttataatacatgaatcatgatataacaacccacgatgctgaatggcgacccgtagataccccatagcataaccgaacatagtgaatatttgttggtttcttcgtttcatcattgaagaaattaataaacacacaatgttgtttctttttcctttttctttatctctgcaatataggaccctctgccaaagcaaaattgaattttagtttatttatttatttattttgaaaaagtatttgggtttatttagtaccattaaagtctcttaaacttcttttcaaaaaaaaaaaagtcttaaaactaatatcatttgatgggtttggtttgagtttaatgtacaaatttagtatagaagatcgttagggttgtataacgtgtcgaaaccctctccatgcatatcgacaattgtaaattgcacgaacaacaccttcattcatatcaaaataataataataacaacgaacaacacgtaccaccaccagaaaaaatcaaacggcttttattttttttcttcctcatttttgtttttaagagttttatttacattttaaaaattaaaacacttatttattattttttacttttgtaaaatgtataatttaattttttataattttattttattttctttcctctcatatttttttataaggctcttttcttatattctaatgagtaaattgcggcataaat

SEQ ID NO: 255426 - DNA, 696 bp, Cannabis indica
gagaaaggatatatgataagttagacactcccaccaatgtcaaaaatattatatttttatcatgtctacgatgataaatgtgaattaatttaataagggtattatattatagaactttatatatattattacgaattactaaagttataaataacattagagtttttagaaaggctaattaggatttttactttttaaattttaatatgtactaaattatgttctttgaatttttttgaccgttaaaaattcatcctgaactattgagattgttagatttaaagacttttgtttaatttcattcaattttactatttcagttattgtttatgtactaaatcatgcccttcgaactttgacatatactaaatcatgccccctgaatattcattcatgttagattttttttattaaaattagataaaagtccttaaatccaacaatctcaatagttcaggagtatttttaacgaccttaaaagttcaataaacataatttgatacatgttaaatttcggaagtaaaaattctaattaaacttttagacatagaggagggactagggtccctgtcacataatagctacctcttgcccctaactataaatgaaatacattaatagtataacagttatatatatttttgtgttattaaaaaaaatgaaagtttagtaaatttaatactcatattattaaaa

SEQ ID NO: 255427 - DNA, 674 bp, Cannabis indica
tagacacaattactaaatggtcataatcaatttatacaatgaattttaaataaaaaacctatccaacgttacatatattgtcagacaatatgtctgaaatactgaaaatctctatcttccactaataagttaacaatcaatacttattctacttctttcaattaatctaattgaaaataagatgtttaaaattgcacaaactacaaaaatactaataaaaatcactcaaaactatttctaaaaaggttgaaagtactattaaaaaaaatttatctgctaaaaatattattttctagcaaagcaggcatatcatttcaagttgccaaaactcacaaatttctatttcaataactcaataattttattactctaataaatataactaaaaataatataataataaacaaaaataaataggtaatgatatttttaaaataataataaattgataataaataaaaaatattatttaaaataataaatttaacttaataactaccaacacatattagataaaaaattaccaacatatatataaaatattccaaaaactttaaaatatgatcaccaaccaattaaaaaaattaattgtactagtcataaagatgtataatttaacacagggccgaccaaagggtggaacagtcaaggcgtagccgcaagtcccataattt

SEQ ID NO: 255428 - DNA, 1073 bp, Cannabis indica
atacttgcttgtgcaagcaaggttaagcccatttccactatatggcgatgtttcctctcgactcttccattttgggctgaggtgtgagggcaagaatgttggaaatgaattccatgttcttgaactaaactctcaaaggcttggtactgtcccccataatcactccgtattgacttaattttggtttcaaattggttttcagtaaagtttttaaattggacaaaggcttgtagagcatcggatttgtgttttaaagggtataaccatgtgaacctgctatagtcatcaatgaaatgaatataaaacttgaaatttgtattggatgctataggtgatggaccccatatatcggtatgaactaaatctagcattttggtagccctactgttagaacttttaaatggtaaagcatgggatttcccatattgacaggcatcacaaaagcttgtatttaattcagaagaacaagttacattgctagactttaagactttcttaaggactctaagagatgggtggcctaagcgcctatgccacacatcattcttggaatttaaaacagaactatgctgaacaacattgacagatttcacagaggcattaggaaaacatgatcactgattttgatgacaagtggacttggaaagagtgggagagagttggtagagaccatctttaagcatccctttgagcagaacctgctttgtggctttgtccttcacaaaacaaaattcagagtcaaattcaataagaatatcattatcagtgacaagtttagatacacttatgaggttcttagcaatctcaggaacaagcaaaacatcttttaacactaaggatttaaagctgtcatttgtgggaatatgactgtaaccaatatgagagatggtaacttgatgaccatcacccacaaccaacttgtccttaccaccgtagtcagatttctgactcatgttgcttccatctgaggtaacatggctgcttgctccgctatccacgtaccaaatgtcgctgccgactgttatagtgagatttctctcacctagaaactcgagaccagactcctctttaaa

SEQ ID NO: 255429 - DNA, 657 bp, Cannabis indica
attttgggctaagacttaagagtacatttattttagatataatcagatggtagtccatatatactccatagtaagattagactatgagtgaaccatatattaagaaacaatgaatctaaaacattttgaaaaaaactaaaaatatagtgacttagttaataaggatggagtttctaataattaaacttgtactgaaataacataaagatatgtaattatcagaaacaaaataaatttggtgtacgttctgccataaagcttaattttttataaactccaaaccatttgcgtgcaagtaagtctacagtacttccaaattcaacacaaattttcaaagaaaaacattattgagtatttacaattcctctttctttcaagtaaataaaatggttgttatacttttcaatgaaaatgaagattatgatcggaagaagaaagacgaagcttatgatcggaagaaagtcgaagacgaagcccaagtcaaaacacaggtcagtcgtagtctagtccaaaaagatagatattaattattttttaaatcaaaattacagaattaattattataatcctaatactaatatgatcatttcaaaaacaaaaatcttatacataaaacacgaaaactacaaataattaaattatcccaataaaagtatc

SEQ ID NO: 255430 - DNA, 959 bp, Cannabis indica
aggaaagttcagctgaaagtgcaactttccaaacaaggaaaagagcaactacaatccgaatttataaggtaagaaatccaatatgaatgcacaataatcttaccataaaaggaaaaattattttgtcaactaacttgccaaaaaaagaatttacagtaatgaattcataaaaagagagttctaaaaaaatgtataataaaatacgaaaagaaaatatatacccaatagaaaatcgagatcttgatgttgtctattgatgtcattgctatgctcattatgatattttaaacaacaaaagaaaaaacattaaaaaaaacatataagattagagaatgagaaagatgaagaatgtatgctctaaaagactaaagaaatgaaaaaatagaaaaaaagaaagaaagagcagccaaattgataaaacatatatagctttagggttattaattagtagtgttgcttaattaatagaaaaagaatattttaagaattttgatatgaaaaacacaaattttgtactgtactattgatttattgtatgtatattatatatatagttaaaatcaaatatatatagattaataattttaaaaattaggaaaaaatagataaatattaaaaaaaatattaaaaaatgagatatgtacacgattagtattaattttatttgaaatttttttgaattgtataaatatatttcttattaattattcaattactatatataaaaataattaaaaattaaaaattagataaaaagtgattttagagtattattttattactttaaatgagcgatagatagagttaattggagtgtttttagagtgtcatgtcctcgcctcatacttctcctttatatatagactaggaaacaaaccacatttcgcgtacggttgtaacaattaagtcataaaattatatcaaatttcaaaaattgatattttttatttaattttttt

SEQ ID NO: 255431 - DNA, 605 bp, Cannabis indica
tatctttcaatttctttccttccttcagttcctcataacttaggagcttcttaacaataaattcaaataccatctgccaatttttataaaccgacatatttttaaacttatagatcaattttgacatgcatctattaatataatagcactaataatagtagtaaaattatatatgttatacgtttaaggctccttttacgtctacaatgccacgccatgatgagtaacccatgaaaatatgtgagtgcgagtggattcacccatctcaagaataagaccttccttcaagttttgagggctatgaaggtgtaaaatcaagttcttaagatacttgtgaaacgatccttgataagctagcatgctttgattttcacccacaatcttgttgaaagagtccaagtataaactctggaaatcctttccttctggttgaaatatttgataattgaattcatggtcagtcgacactataaccttctgcccactatgctagtgcgaaacaacgatccatatctgaaatatataattaatccaaaatatatcttttactttagaatagtaatttattaatataaaaacgttaacggtacttactttgacattct

SEQ ID NO: 255432 - DNA, 1142 bp, Cannabis indica
ggggatagttgtaaagaccgcttagtataatttagaaattagcagttaatcaagtttaattatggaaaattatttatagctatttaaataattattatgctgttattgttgaattctgaaatgcattttatgtcatatagcgattttcttaattttgcatttccgttgtccggtaacatggaactcggtgttgggctcagtaaaatcacaacttagtatgttagtattaggggacggtttattagaagttgggaatgtcgggattggccgggaatttagaatttcccaaaatacccctttagtgccctttatgttatttagtatggagggaaaaattggtcattttgccccattgttattttgtcctttagtggacctaataattacaaaatatgtcttttaagtgggttatgttggctgaaataaacgttattatttgcatgctttctctcatttctttcaaagtaagaaaattagaaaatttggaaaaattgcttttctctcttcctctctctttcggccacttcttgggctgctggaattggagtttttcttctgtattttcagcaagaatcatcttgattttgaggtgctttaactttaggtatttttccttgtagcttttcttggtgttttcttgtgttttaagaaaaagttagtgaattgcatgcttgtttttggagtgttcttgctgttgtatgttgtggttgatttctgaagtttattcatgattatttgagttgatttgagcttctggtaatttatgttagtggtgtggttttaagttaaggaatttttgttcaaaagctttggttttcaaagagaaaatgtgaaaatagttgctgtaaagtttggttgtacttaagttcagtttccgaagtttttatatgcatgaatatgtagttttattctggttttgatgcttgtaggtaagctttaaccaagtttgagtttgaaactcaaagcttggagctcacatggcatttttagtatctgtgtgttctggactgttttgttgctttagaaatgttctatggggtatttagaacaggtctggaaggttttgtgtgatttggattggatttgagcaagttatgaatttttaaatctttcctgcgaggaaccggaatttcggttgtgca

SEQ ID NO: 255433 - DNA, 756 bp, Cannabis indica
gtctctcccgtgtggtgacttggagacgtggatactattttctttatattattttaaaatgcttttcattgagtattacatataatgctgacagtggaaactttgctcaaatagattgatctagaggaaaaaattgccaacttagaagttcctgccttagggattgattctcagctaaagttagatgcaataaaagttatcggaacccacaactattataatgctgctgttgctgcactatctgttgttggattgggaattggagttgatgttgaagccattggttcaacaattgaaaagctaaggccgcctcttcaccgtatgcaaattggtaagctgaaatagagtaaattccataaccagtaaattagtctccgaatatactacgtaaaagttcagaagaagtgactataagtgttgatggatttgattagttaaacaagataaagggtatcacaaaatgttcaatttaacccaatactcatttagtattattattgaacttattgtttcattgctaagcatatagtttttctgttgaaagatagcagaagagacttctaaacaaattgatgcctatttctgttctctttgtaaaaagccgaaaatgaattattcatgtattacaccttatgatatagatccttgttttgcgtacttgcaacttctctcttgctgaattttaaatgcaactatctttttgaaattggagggaaagcattacatgttaatatggttcaagtgcttacaccttac

SEQ ID NO: 255434 - DNA, 1191 bp, Cannabis indica
accactgatgatgatctaacggttaaattgattcttgatgaaaattgtcaatttttggagtttgaatcttgtctgtgggatcgctttctgaatgatgtgtggagaaaattgcaactatattgggcatgaattttggagtttaaatatttagaattgtgatatgggtatgacacatgactagataaatctttgaaataacttcgaaacgtaagttgaatcatgtcaatcaaatcaatattgagggagttatggccattttactgaaggttgttcagcacctaacacccaggttgacaacccagtgcccagttgacatccaacgcctaggttgacatcctgacatcaacctagacactgggtaagtggaaaaatgtctcaaacttgtatttttttgatgcttaagtgatatgttgacatcacctagtcaaattctttgttctggtgaagttattcactagttcttagagatgtcgctttttggtgaatcaggtaggctcgaaacttcttgattttgccaatgctccaccttgttggaaggttaaaatatcaaattgtgaatttaacctttcacaagtcgtagctcttgtttaatactaaaaaatagtcaaatgctcgagatggaattagattatgataagaaaaacccaacgcaccatgctacatgtcaacctgggcattgggtacttcctaggtgtattctcggggctcattttggtacttctaaggcattcacgattgtgaacgagctatcctatctaatttttgaccaaaataataagaatgcccaaagtagaattttcatttgaggagtagattcatgcgaactaggttgatgtcaacctgggcgtagggccaaatgcccatgtcaacctgggcgctaggtccctgtttgacccccagaagatctcatttgctcctcgagctcacttgtgtcctcatctgaagacaaaaaaggttcccgaaacccatttcaagaaaatgattaaaaatagcaaggttgacaaaatgtcaacctaggcgctgtagcaagcaccagcgtcaatctgggcgttggttctagctttttgccactagttgattctgcttgattctcgaaaaatactcatatcttaattatttgtcaaaacagagaatatgcccgaaagacttctctaaaagctgattggaaatacctcaggtcgacaaaatgtc

SEQ ID NO: 255435 - DNA, 2468 bp, Cannabis indica
gatcagtaaaattaataattaaagtttctttgaactctattttaggcttagttcttcaatggattagttgtaattttgttgttttttttgttaaatttagatagtctttttttattggtttagaattgttaattttattgcttatgttaaatttattttatctgtagctactaaaaatgtttgatggctgaagtttgtattgagaatattattatgactgaggtctttgatcaataaatgatctctccaatttttttttagagtttattgcactaaagggtggttgattgcggttattttttcttctaaagacataattagaggtgttcatccaattcaatctgcattattttgtttatagtgcatccaatccatattaagggtggattttaaattttgaatccaatccaagggcaatagctcaaattcaatccaatccaatctgcaaaagtacacattggattgattattttagattgattactttttaatattaaattatttaatatctatgaatttttttttcttcacataactaacaacaaaataaaataaattattgttattttatgtctccaacaataaattaaaataaataaaataacaaataacaaataacaaattcaaatgatgaaaaaaaaattgtatggtataaagaaatgtttaattttattttaaattgtatgttgaaaaagaaattatatataacaatgaaacatacatttcatcttttaaattttgaaacataattatatcatatgtattaaacttttaaattattattttatttacattttaattgaatatatatttttgttttttttaataaatatgtgtggattggattggatcggttacttttacatatcaatcaacattctatctccacaagtatggattttgaattttccaatccaatccaatctgcacaagtatgaatatccgcacattacggatttgtattagattgaattgtgtagattggattgaatcgggtatattataaatacccctagcataataattctaaattactttgccgaaaaaataaaaataaattctagattggaatttgatgtgatcaagtgcttgatcatgtaactcatgcaaaaatcaaaacataaaaccagaacaacaaagatttgatcaagaacaaggtaacttcaaaaacacacacagtatacaaaaaccagtatgcaaaaccagtaacaagaataatttgacaagtagaataaagaaaattgagcacaagagattacgaggttcgaacagtgtgatgatgaatcacctgtctactcctcggcctgaacagtcccaatggctccaatctttattaagctagaagaaagaattacagttgttgatcaccaatgtgtactcgacacaatcactcaagaagtacagctttaatgacaaaacaacctcactagtggcactatgatggatcaaacacaccatagtccaatacaccactctttcttttcgctcttttctttcactctgaactagctcaccaaattatgaaaactctctctcataacacactgtctgaagtagcaatacgtaatggctataactagccgttggttgttgagctcaatactaattgtcataactgacagttagttaaacaagttggaagttggtggagtcaaaaatatgtttcttcacttaaagaccaatcacaacaattatctatcttggtcattaaaatggaaagagttattgataattgcgactgaactggtcttgaatcctcatttagcacttgaggatgtttagcaagtttaggcaaagtctaaacttagcgaaactcacatattttgccatcatgtctgcagggttttccttttttctaattttcttcatattcacttccttcttaactatgatgtctcttaagaaatgtagtttgatatctatatgtttgggcttctcacgaaacattagattcctcatcaaatacaatgccctttggttgtcacagtgaactattatgctgtttgatttgaaccccaactcttttgtgaaacctttgagccaaatagcctcttttatggataatgttccagccatgtattctgcctcagtttatgacaaagcaactacctttcgtacgttggatttctagctaacacatccacctagaactgtaaaagcatattcactgatggatctccttatgtctatgcttccagcatagtgtgaatcgacataactattcactctaatttcaaatttagacttattatcatagacaagtctcacatccatagaacattgtagataccgaagtatccatttcatagctgactaatgctcttttcctggatctattataaatctgcttaccatgcttagtgcataagccagatcaagttttgtgcacaccataaaatacatgaaactcccaacacaagatgcataaggcactgtatccatgtacatcttgtcttcttctattttgg

SEQ ID NO: 255436 - DNA, 2058 bp, Cannabis indica
ggcattcaaatagttggaaattgtagaaattattgacatagtagatcttgcatttcttcttttggaaagtaggtttatacaatgacaattgcctcggtgatgtatcaggggtggaggagccgtaatttagctttttgggagaagaaaatttcgtgcattccgagatttttacattgtttgaaacaaaatattaataagaaggataatgatttttagtataaatagactggttgaacaattataattgtatagagattataatactcaggctatttatatggttcgtgctgctagtttgtaaagaagttttgagcaatattgttatgtattatgtaatgatcaattagtaaacatatttataccatgttttaaataattatttctatatatgtaacatgtatatcgacaaacaagctagatcaccagcgccacgggaatggagaagaaaatgaaaggtggagaggctatttggttgtggaggtggggcacaaaaagcactttcaaggccataggtatattcaaaatcttcaaaacctaaagctagctattcttaccacaaattaataataccaaaaacaatcatcaaacaaataatattattaaaaaataataatgaagaagaagagctatattggtgttgcatgttgcagattccaaattttccctcctctcctccaaccctttcatcaatcaccatcacctttatttagcattttccctcatatttgtttatgacccgtagttaatttattttatcaccattcatcaaatataataattatttttttcttcccagaaatatctcgttaataaagaaactatacatatcaaatcctagaaccttccactggatcaataataataataataatgcgataaacctaatctcttttcatatacctttatatcaagaacacaccaagctgttatgatacatggccctctctctctctcacacacacactcaaacatgtagtggggttcactttattattatttgtttcaatattgatgggactctttgcctataaaaggccaagtcttcaagacagagttaattaagttgtgtgaacatcaaagaggaaaagacatccttagtattattctctctagctattttctttcattttgtcattatttccttggaggaaataaaaagaaaaaaacatggtcagtcttatttacatttttatcatacttatttacgttacagtttttattaattagtttgaggttgtacagttcttgcattatgttataattcttctttgaaatgtgtcaaaaaaaaaaaacaatattataggaagggaagatgagttggactgcttctgatgctgtggactacaaaggttttcctgctgataaatccaaaactggtggttggctacctgctgctcttatccttggtatgttcttaaacactcacatgcacacactcttaatactcatcttcctcatcatcacagatcagaagaaaaagcttgttatatatcaattatatatatatatatatatactaccatgatatatttgattgttatatatatacatagtacatgatggatataaatatataacaatcaaaatattatatggtaggatatataattgagcatgtatatatatgtatgaaatcaaattaaaagatataaggtttattttgtttttttttaacatattcatgcatatatgattatgattgtttaagcgtttacagaggagatgagatcattatcatcatttaatataaaagaattagttggctgttaaaataggacagttgtatatacatgattggatatcaagtatgacatgtttcatttgttgcattattggtaaatagtagcacagtatagtatagtaagtaagaagtagatggttcatgcaaaaagaaaaagttaagaggaaacatgcacatgttttcatattagctggttttgttttagatgaaatcttaaaaaaataattttgtactaatgcattacaatttggcagctctctaacacaaattcaaaaaaggttcagtttatagtcaaccaaaatttttaatgttattgc

SEQ ID NO: 255437 - DNA, 856 bp, Cannabis indica
aagaacaatacaagaacaattacgcagacatattattcaatgttctcattgtgaatagaagggacattttaaatcaaattattccagatttctcaacactaagaataataataatgctttagttttttaatcatgtgttttagagaatgacaaatccatttgaattatgtaactgttatattttaggataaatttttaacaagtcatatattttagagggtaaaatcaggtaaagccgaaaattcagagggaaaaagtattaattattcttttttatataataaaaattattaaatagggtgcttttataaattttttgggtaatttttatttttttaatttgttagatagtttggttgaattaattattaaaattgacaagaacgaatagaacagaggagctctaagatgaaaagaaacgaatgctaacctaatttgaaaaataaaatttggcttagcatacttaaatataaattatgttcttttaatgtaccacctaaatagaaatagggcatctgtatttttgactttatgaaaataaagttatttaacttttttgggctcgtttggtacgcctataagagtcgtattgtattaaataataaataaaactatgtttggataaagtaatgtattgtattaattattataaccatactttttaagacaatgcatgttgtattatttgatacatagcaaatggttcgtattagcttgtattataatatttgtaaaagatttggggtcaacaccaatctccgacccggatctggacccgggacctgtaaccaggaccggacctagacatcggaccccgaactcggaccctggacctagaccacaaactcagacccga

SEQ ID NO: 255438 - DNA, 558 bp, Cannabis indica
agttcatccaattgcagtaatctttctctcctggagccttcaaatccatgttgagagtcttcatagcccaataggccttatgttctaattccaccggaagatgacaagcctttccaaacaccaaccgatatggtgacatcccgatcggcgtgttgaatgctattctatacgcccacagtgcatcatctaactttcttgaccagtctctccatgatctctgcactgttttgtacagaatcatctttatctcccagttagaaatttcagcttggccattactctgcagatgatacggtagaggaattctgtgacggacatcatatctcaaaaggacgcttcaaactgtttgttgtagaagttactcccttcatcgcttatgattgctcggggagtaccaaaccgagtgaatatgttcttttgaaagaagcggagaactgttttagcgtcattttgtggtgttgctgcagcgtcaacccatttcgacacatagtccaaagccaataagatgtatagattgctaaaagatgaaggaaaaggacccatgaagtctatccccca

SEQ ID NO: 255439 - DNA, 687 bp, Cannabis indica
gatgttgctgagaagtttgagaaggcttttgaccaaatggaggatgatgatgttgggtatagtcgtgaattttgtagcggcacaactaaaaagtgtcctgatttagttgattgggctcatgctagggtacttacaaagttcttgagaattttttatgatgccacacttaaattttctggttctttgtatgttactgccaatgcttttcttgaccaagtttgttttattaagacacaattaaacttttggttgggaagtgaagatgaaaacttatactttatggcttcttctatgatacataagtataacaagtattagggtggggtagacaaaattaatatcatgatgtttattgctgtgatacttgatccacgacacaaggaaaggtttctcaatttttcgattagattattgtgtaacaatgaagaagaaaagattgttgagatgaaaaagaagattagatcagttttggataagatgtttgaagagtactctttactttccaacaaaagtgttttagactcaagtgttacaaattcattacaagcgacaactatggaagtggatggtcatagtggtgatgtggatgcttaccaattatactctttacagtataagaaacttgttagagaagaagaaaatacagagaaaaaaactgaggttgatagatatttgatggagcaatgt

SEQ ID NO: 255440 - DNA, 1072 bp, Cannabis indica
aaactctttccttcagtaaaattttgtgccaccttctctctacctatttcgaaatcctctctctctgttcctctcttcaaaccgaaccctagagtgattagagtaaatgcccacacacatcaagtggtacttaatcatagtgtgtaaggctgtgtttaatccaaatttaagagaaggagaatcaggctcaaatcttggtgatactctgctacagaaaggataaaagggttagagatctgagtggaaggagccattataattccgttgcacccattgtaaggtttctgaaactttatatgtgtttatttcatatcattttagaagttcatgtttaggatgttaaaaacatacttattagtaaatctagatcctggtaaaatatattccaacccctattcccacaacacatgactcaagtattatttcgagaattcacaaaatgaaaacaaggtctcaaagtgggatttataaacctaaggcctatctatcaacaagacatccacttgctaaatctctctttcctactgaactaaggtctgttcagcaagctctcaaggatccaaagtgatttcagtcaatgcaaaaagaaaatactgccttggttaaagaaaaaacttggacacttgtcccatatcagccacacatgcatgttattgataataaatgggtgtatcggattaaacttaatgctgatggttctctgaacacttataaatccaaattagtggtaaaaggttatctacaaacgcctggcattgactatgaagagacctttagccccgtggtaaaatcggttagggctgaacatcgggcgggtttaccgagtttcgagtttgcgggttttgggttcacgggtttcgagttcaaaaaaatgaaaccgaacccagactcggatagggcacgggttggcgggtcacaggttggcaggtttcagttggtcgggttaaccgaattggcgggttgattcggtcaattcagtcaactcttttaaaaaaaataattttttattcaaataattatttcttttatttttttatttattaaattaaacatatataatataacaatttta

SEQ ID NO: 255441 - DNA, 825 bp, Cannabis indica
agctccctactaaattcaaattcaaattgaaaacaggtattaaacatcagagccacaaaattcgaaatgaatagataaaaatctatagtacacaacatataattattatttaaatgttgcagatcatactagaatgagttgaaaaattattgattgaagttccctactaaatccaaattcattttgaaaacaggtatgaaaaaacagtcataaaactcaaaatgaagagagaaagatctacagtacataacatataattattttttaaatattgcagatcatacaagaatgagttgaaaaattgttgatcagagctccctatcaaatccaaaaagaaaataacaaggtattagattactgctgatgattgcatgctaacgattgaaacatttgattcaaaaaaaattttaaaaaaatatatagccgtgaatgtttattgttgtttaattgtttaatttatgtaaatcatttgatgttcaatttattcatgtataaaacaaacaaaaaaatgaattacatatatcttgaaacaaatagaagttgtcgatttattgttaataagttggaacaaaattgattttcttaatttcctgtgataaattttaaattttagtttgataaagaattaatttttctttaaaaaaatttaaaataataaagtttattgctgatttattggttaattaatgtaattcgaatattttcatacataaaaattcaaatttaattcaaatgtttattgttgtttaattgtttaattgtttaattgctataaatcatttgaatgttcaatttattcatgtataaaacaaaaaaaaaaaaaaa

SEQ ID NO: 255442 - DNA, 964 bp, Cannabis indica
ctggtagtctccctataatcagttgcattttatcgtaagtccatggactaccgtcaatgacccttttaatatccacttcatgataaaactgaaacaagaagcgattattgtccatttgtttgacgaacatgcccatccccggttgccatagagatgctaagatattctgcattttttcaaaatccacaattcgattcgacaaaaatctgccgaccaaacaccatctatcatcaattccttcattcccactatccacactcacagccatctcctcgagttcttcttcttcaatctgaaaattgaagatatcctcccccaaaccacccatgcttccactgccagcctccattccgtagtacagagcaataccaaaaccaatcaagctataccaaacaatcgaaacgatcaaaacgaactataactggacaattgaaacgatcaaaacaatcaaaaccatgtcataagacaagacttctacctttgtttctggagttctatttctgaatctccactaaaattcgcgacccccttttattaaaatagagtttttcagccaaaaattgagaaaagacaaagttgcccatgtcccatacgaagttgtggttgcgaccacaaatagtttagtcacgatagtcgcgaccactatagaaaagtgaaaaaaaaacaccattacgcccatttttggtcgcgaccataaaattcaattcttacttcaacctctctcagtgacttaatacattttattgctgcagactgttacagttgtgtttttactattattgtgtacaaatttattatacctacaaaacaaagttggccacaccatttattcttccctttggcactttagataaccaaaatatttttaacaaaattgtaggggtgaaaatcggtcggttatggtcggtttttacaattttataaccgaccatttagaaattataaccgtataaaaccgaccgta

SEQ ID NO: 255443 - DNA, 1222 bp, Cannabis indica
ctgaactcagctgagctcaactacacaacacaaccatggctatattactactgcttcttccattttttaaggtgtcatttcaatgacccttctatcaggtctctggccagaccaggagacctctgtaacagtgtttccacccacgtgtaatcgaattgagtgccctagcttcgaaaccatcgagtgggtaatggctacgaaattcgtaaatacaattcaaccgtctgggtttccacctcccctattcaagatatctctctcgtcgaagccaccgtactgggtttttgcagtgagtttcatttctttctttattcccattcctctcttttcttttttttctttctttttcttcttcatctttcttcttcttcgtttatttttccacaaaagaagaaaaatcaataaacagattaaaactaaataattaaacaataaaaaaaatcaaacaaggtgagaagattttgacaaaaaaaaagaaagggtgagaagaaattctaaatcagagatctggtatgggttccattctagtgaatctcttatcgttttcgcaatcggagttggctgaagaaagaagtgattggtcagatggaatcgaaggagagcacgacgatgatctcactctggttctccagtacaggaccaaaggtttgcttcgaatgggggaaaactcctctaatccttcagtggagccaagataaactcaatgagatagctctgggcttagagctttctggttttccatttttctgctccccagctggttcttccgccattgatgaacatatacaaatcaaaacgggttaacgattcagccataacttcgaattacaacgaaatgtagcaaaatctacatactctcctaaaccccatttacaccgtaaagatgctgccaatctcaatttcaacttgcacgaagtgaaaataaaaacacccaaattcttaacaatcagttttcttccactttcttgggaaccaaacacacagaaataagaaaattatatataatatacagaaaggatctgcagagatcatcaaggagttcctttggcggtaagccgttcttaagtggaacactggaagagcggtggaggtcggacatggcgtccaaatacggtgtacggaatgaaaatcgtcgggcaatctggaagctttattcgccggaagtatttcggctatgttgatttctgggtttcccccctttttttgggggggggggggggta

SEQ ID NO: 255444 - DNA, 670 bp, Cannabis indica
tgtcactatagagtaatatttttaaagtaataaaaattaggggtttactctatagtgacactccatatttttagtgactcacattataagagactaaccccaaatatttagagtctgattgtgcatgtcattaaaaattactctcaactctttagtgatccacacttttgtgcgtgtcactaaatagtgtcactaaaaggctatattgtagtagtgcttgtttctgaggtgtttttcttcatgaaaaacaagctgttgtagtctcctaatttgctgagccgaaagtctctatttaaatgggcaggttgctcctctatttatgttgttgttgttgactgtgatgtgtgtgttttgagctgagaaacactgttgttgatattttcttgtaaagctgaaagttagttagagtcttgagatattgttatttacttctttgttgtaaagagataaaagatttaggcctatgaaaacagaaccgactactctatgagttataatagtctgttaaggcttgtaaaatgtcttatttttattttccttgtaacttattttatgagacagttagtatgggaatttattatccaacagtttatattattatctttttggctaattatttattattctacttaatgattagtttacatttttttttcaattcaaatatttt

SEQ ID NO: 255445 - DNA, 793 bp, Cannabis indica
agatccttatgcatccagaagaccaggagaagacagctttcatgaccaacctaggaatcttttgttacaaggtgatgccgttcggactgaagaatgcaggagcaacctaccaacgcctcgtgaacaagatgtttgctgaccacctgggaaagaccatggaagtctacatcgacgacatgctagtgaaatcactagttgcagaagagcacatcaatcatttaaaacaatcttttgaaatacttagaaaatataacatgaagttaaatcctactaagtgttcttttggtgtaactgcaggcaagttcttaggctacttggtgacacaacgagggatcgaagccaacccagctcagattgattcaatcctaaggatcccctcaccaacatgcatcaaagatgtccaaaaactaacaggccgaatcgctgcgctaggccgattcatctcaaagtcttccgagcgatgccactctttcttcaacacacttagaaaatcaaagacattcgaatggacagccgagtgtgaagaagcgttggacaaattaaagcaatacctgactagccctccactattatcaaagccaaaagataacgaaaacctctttgtgtacctagctgtctctgaggcggcagtcagcgcagtcttagtaagagaggataaaggtaaacaacttccaatttattatgtctctaaatccttacttgatgcagaaactaggtacagtcagctggagaagttagcattggcactcattcacgcagccagaaagttgcgtccatacttccaatgccaccc

SEQ ID NO: 255446 - DNA, 715 bp, Cannabis indica
atcaacaatagtaagaaaatatcgataaccttctatactggtttcgtgaaaaggaccccaaatatctaaatgaattaagtcaaaagcagtaggagctatgttgttagccgaattaaagggtagtctatcaactatccagagattatttgagaaagaaacagatttaccaatggggttagatgccgatggagtgttgacatcaactgttgattgagactgttgagcatggtgaatctgttgggtgagttgtgaaatcatttcttgcaacggagcaagtttgtccgaaacagagtgaaaagcggaagcttgattagcagccgaccctttgacttgggaacttgatccaaagaggagcgctgtgaagattcaaatttgtgcttgtcaaaataaccgggagggaagccatggagaacatagcatttctccttttagtgtcctagtttctggtagtgagtacaaaaagtcgcgttttcttattgcgaggaggatttgagggctgagacgaagtggtagcaatgcaatttgggagaatgtggagtttcctttgtcgctcatgctgaatgatagtagagaacaccttcgatagagatgggaagggttcggtgattaacacttgatccagaccgactggtgcgattggttaaggccagtaagaaaccgaaagacctttcttggttttgaaattttgcatgatcgacagaagcttgacaagtgc

SEQ ID NO: 255447 - DNA, 3598 bp, Cannabis indica
atttggaacaatcgaacaagctcggctgctgcttttgttactacagcacatcaaactttaaaccagtggaagtttgcccagagttgccgatttgaacctatacatttgaactccaattgctatggcagtaacgattcttggacaaagccagatgatggaatgattaaagttaatgtagatggagccacgtttgaaaccagcaactcctttgggacgggcctcattgctcgagactcaacaggggctgtcattatacaaccaagttagtatttctttcaaccacattacacattaatacttaacaaatatgtcatgtttgtgaacagttgagcaaaaattgtgaggcatgaatatgatagtaataatttagaaacaaaagtaatcctaacaaaccattttattcatttattttattaaataggcatggttatactatatactctcacccactctaactctaattatcaaacatttataaaaatattccgtaattttatttagttatttaaggttattttcccaaattattacaactaccaaattgtgtattcccataatatttttgtttattaataattctatcaaactattcataatgctaaaatataagatttttattaagttttatcctatatggctaacaaaatattgatgtgtcaatgttatattagtgccacatgtacaatttaattttttctaaaatatattcttataactattaataaataaaaataactaatttaatgtttttattaaattttttaaaattttaattagtttttatttgaattatacattattaatttggtgtttatttggcaatgacacattagccgcatcaccaattttgttagataaatggaataaaatatagcaaaaagtgatatatttaaacattgtgaaataatttgggagaacactttttaccggtaaaaatattcacaattcttgatttagtatagtagtaataattcaaaaaagagaaaaaaattctaatctattttctcattaaaaattagttgtcttcaaattcatttaagaaattaatcttcattttttaaaggaattaattaattaatcttatgaaattatagcattttagcttaaaagtgacccaatgataaggaaacacattcatcatcatataacctctagtcaacaaaattatttgcatacatagtggaattacaacttacaagcaacatttccaatgagatgacaatacacacacacaccatggcaaaccatagaaatacaaacatacagagcttagatttatttaaacttttcacaaacaattccctctttttcattctcaaacaccatgaccatttttaccctcttcttaaaccttctccaaaagcatattttgctttgatgatcaaagtcacattcctcacattagaataacaacatatccatttcccatttcctcccatatgcatggcaacaacaatatcatcaagaaccatcatctccaaaaactagtaacaacaacttaagtgttttgggattcatgtttgtgtaaaagggtaggcatcgatgccaagttcttttaccatttgaactacattggagttcacagtcttaccatccggacctattataactagtgtaggaaggcttgaaatatcaaagtaatacataagtttctcattagtcctatccttatatggtaaggccaaccatggaattgtttccaatacttttttgaattcttcctcttcataattcagagatattaacacaacttcaaaattctcacctttttctttgagcttattgtaaaagtcaataagtgtattagcaaattcaacgcatgattcatcagaactcattaataagagtccaactgttttaccttcaatctcagacacaagtacctataaattagaatcattgttaaaagtttaaaacaccaaagtaataaagttaggttgcttttggtaacatttattttagactccgattaaactttgacctggcactgaacccggtcccagcccctaacctgacttaaataaaatcgaaaataaatataaaaaataaactttataaaacacactttgattttctgtttttaaaattgaaaaacaaaagtgccctataaattacatttttgtttttttaaaaacaaaattttaataatataaattttacttttatttttgtgattaaaatattaaaaagaacaaaaatactatcaaacaccctctaataattagcaaaataagattaatgcatgtaggcagggaaatttacctgattcccatctttggaaaggagatagttacgagagctagataccaaaatagaactcaaggtttggttcctcttagtttcttccttttggtctatcaagatagaaaatctttcacgagaaaaagggtatgaatcaacaccatattcttccataattgagaccccattatccgtcgaaaccttcccatttgaatcgataaagataagctgaagaatccccattacatcaaaagtttcatacaatcgttttatggtgtcagtatcggaaaatggaatagcaagccatggcatttctgagaagttgtcattaaataattcctcatctggatcagaagacacaaacaccacttcaaactcttccgaaccaaccagctcgttatagagttccactaattttggggtaaaatggcggcacggttcataccatgatccacaaaaatacaatccaataggtttcccatgcaaactactaatcttaacctaccaacataaaaatcaacaaaaatccccatcaatcaaaaaccctagtaaactataaactttcggtatcgacacatacataaatcatacagaattaaatcgatatatataatccaatctacacttacaatatcagattaaacactataaactatttacaatatgaataaatatgagtaaaatagtgcaaagtgaattagataaacactcctaatttttttaatatcagattttcatcatttcaaatttacatattcatcccaaacttcctaatcaatttttattgttacgcctaataaaaagcaagtctcgctataataactttaatttttgtttgttggtaaagtgttagctatgtatgtttaaaaaaatagtcaattaattatttaaatatactgaaggaattattaaaaaattatttttgtaataaatataattaaataaaaaaagtctataataaaataaaaacatttaaacatctaaattctccactttaatttttttcctgggtaataaaattggaattaataaagcaataaaattgctgaaaatatcagacctcatcaccattgttgcggaggagaaaatctctgtgggcagaagataatagagccgataagtcgtgagtaacatcatcatcaatatttctggtacccatgattgtttctctctactatatattctctcattgcggacatttttttttttttgaagaaaagcgtacatgcattagaataaaatcagtcagacctcgtggtcattacaaaatatagtttcaggcagagatgatagaggcaaagagccgaacctctgatgggaaaacgcccacttggccacattatgagccataaaatta

SEQ ID NO: 255448 - DNA, 1067 bp, Cannabis indica
aataaaaacaaattaaaagtgagactacaatatgagaaactagttaaaggttattcaccaccctcaacaatcatttctaatttctattagtgaatgtaattttaattttcaatcaaactattaatctcgcagataaagctgaagcagtaaattattcatatctccctattacatgtaatcaaggcgaatcactccataattaactcttttatctaagcaataaatctacaaagcatgtaatttatttaagttagataaaacattgagatttatggagatagattaatttaggcaacaaattcatgtagcatataattcatttaacctaggttctattcttcatctcaactaaagtacctttgacaatattaaaaattataatttatcacaaacacttagaattctagactattaggtgaattgtaattctaagataacggtagattaaagtaaaatctaatttagcggctgtctaaagaaaattaaaacaataatcatgacattgaacatagaaggaaagaagcaatttgatatataatagaaactagaaaataacattcaataatgaaattaagaattcatgtctcgggtttcgaaataacccttaactaaaaggaaactactcagaactagacattataacgataatcataataattagtaagagtttcaggagaagaaaagaactacaatgaagaacacttcgaagctgcgatatttgtctcttccttgctctctctaagtttctctctcaacttagtagctctacggttgtgaaattagaaacctaaaagattctatttatagtgcttgaaaagatagataaattcccttagaattaggatttttttttttaaaaaaaaagataagtacagtgctactgattagtattttgcccataactttttcaatacaactcaaaattagacgatttaaaatgttctggaaagctaacaatgagatctaaaactttcatgttgagctccaagtccatctctacatctaaggttgtcaaaaattgcaattaagctcttgtaaaaccgagctcgccgacttccactattttc

SEQ ID NO: 255449 - DNA, 870 bp, Cannabis indica
cttttaggctttaaagttgctagaagagccccagctatctctcacctcctatttgcagatgacagtttccttttttgtcaagccaacattagctcctgcaatatcatcaaagaggtgctcgaggcctatgggagggccacgggacagcaggttaatttccaaaaatcctctttgtatttctccccaaatgttgagctcagggatcaaactttgatatccgattttatgggtatcccggtgcggtcttccttcgaaaaatacctgggccttcctcagcacattgggcgaacgaaaaagcaattgttccattatctgcatgacaaggtctggggtcacctccataattggaagaataaagtcttttcaaaagggggcaaggaaactttgcttaaatctgtcatccaggccattcccacttactcgatggcgtgctttcgtcttccggtggccacttgtcattctctcgaatctgttatggccaatttctggtggggcgtcaatgataataaccgtcccaaaactcactggcaaagctggaaaaaactctgtcgatccaaaaaggaaggtggtttaggctttcattccctggtccacttcaaccaagccttactcgctaagcaagcctggcgcatcctcaaacagccaaactcaacggcgtcaaaaattttgtcagctaggtattttcctcactcatcctttcttgatagctcgataggacactcaccctcattcgtctggcgtagcatttgctggggaaaagagttgttgcacaaaggaataatttcaaaaataggtaatgggcagaacactttcacgacccgcgatcattggatcccgagtctccgtcaggttcctaccctctcccctgtt

SEQ ID NO: 255450 - DNA, 766 bp, Cannabis indica
agttgggctagccgaatattgttcgagattagtattactttgtgggccttctaaagaaagtgtaatggaatttataaggggtttttacaaaatattaaatgtttggcaaaagtttataatttttgtgttacatggaatttttataaaaatattgtctttttataaaacaaccataaaacaacaaaacaaaacaattaaaacaacagtggaataactaaaaaacaatcgtggaacaacagtgaaaacttaacacagtacatagtataaaacttacacagtaattttgaaaaaaatttcgtcctacagtaaaaaataaaaaagttggaaatttcaatatccagtgtaaaaccctaatttatatggtatttttgggaataaattaagaaatatccattaatccaaaatactcttatattatattttattaaaatgtacctactttagtgagtgagttgcctaatgtatccccaccctctacttaagtttaacatataatttacattaatctaaggggtataatgggaacaccatctataaaagtggttatatctaaaagaatatgaaaatagagataaatattaaaaggataaattgcagcataaatacctaatgtttcagatttaatacacttaaatacctaatgtttatatatgtccaattatacatgtaattttaaacacttacctaatgtaaaaatatctttgtcaaattataaaagtaatgttcgaaaaacaaaaagttagtatttggtgtaaatttttcaaat

SEQ ID NO: 255451 - DNA, 1237 bp, Cannabis indica
taagtgtttttcttttttagaaatcggttatgattatgtttttctatttttttaggtattttcaaaatctaatgttcctgattatgatgatgactctagtggactgcaattgtcgattgtatgggaagataaggtggtttgtttgttcgttgctattagtgatgtcattattataactgattatttttaacttttatgttttttttattcatgttcattctggttttgttgaagggaatgatgaggactttgtgtttacttatgatcgtgttgatgtcgaccaatccattttgaatttggttgacaacttgactggggcatatgcgtccccagataggataaaaaatgatcaatgggatttggttttaattcttaaatctgcatcatatcctgttgatgatgttgaagtactggatgtagtacccttgcaatttagggttgctgtcaagagacaagaaaaacctggagtgcattgtagatctccgtttgtgaatgagtttggttcttctgaacaaaaagatcagaagaagaagaaggacaaggagccatctgttcaagaagaggtcgatcataaggagatgtttccgtttgtacgagagattgggatgaacacaaagtctgaagattgccaggaatttattaggtggattgaaggtgctcgtatgtataatatttttttatcttgttcttttttttgtttttttttagttattgaattctttctttttttagctggtttttgattttgattttggattgtttttttgtaataacaggaaaaataaaaaatcatgtggtgctattgagcctcctttagatttcagcgtcgtgcaaattgaagtcaaatcccggtttgtcattttacaaacttgtggagaagagttatttgatttggtacgaaactgttatttttcattctgtcccttatcctattgtttagttttttgcttgtcaatttttaactggttattatttttatttattgtgtgtagcatttgaatgttgcattctattatcttaagaagagtattttatttgatgccaatgtgaataagagagtgatgaccacatgcactcatttcgaagcaacactgaagggagtttatgatgtttttattaaaagctaagcgtgatcttagtgttataaggtatgacaatatggttaccgactatattctgggccaatataacttttgtttttagccttgagttgatgtggatgatgttgtcggtccct

SEQ ID NO: 255452 - DNA, 712 bp, Cannabis indica
aaacaaaaaggttaaagctttagtctattattgagtgagacattacaacaagtttaattaatagggttaggttgtataccatgtgccctattattatattgttttcactatacccaaaacaaaacaaaaatccaaagtcttttttaaaagagaaatgctaaagggcaccactggtgcctagcaccctcctacgtgtcaatatcgctattggtgcaattaagtatcgggtcccatatagtttaatataataatttttatagagtatcgctagccaattacaagtcgacacatttagaaggtgctaggcaccactggtgtccaatagcaatgctctttttaaaatgctagattaattttatttgaaccagcagtttatagggattgtcatttttatactttgaaaaataaattctacttcagttcaattcaagccatatgaaaagtaataatttttatagatatcacctagctagtacaccatcgtacgtacatgtaaaggtattatttggggaatttttatttttaagagtttaaaggtataagtttgtaaaaatttgttttttttttaaaaaaaaaaatatatattaagaagaaaattggaaaaaaatagttaaaaattaaagtaatttgtgcctttataaatacataagtttaactcttagttatgaataagtatttaagtaatttttaacggtaataatacttaagttat

SEQ ID NO: 255453 - DNA, 747 bp, Cannabis indica
aaaagcatgtttctaaaagtactctttacaaaaaaatcacaatttatctgtcactaaacgtgtgtttagccacaaaactaaattagtcatgacaacttgtatcaatattacttattagtgacaattaatttttgttatgactaaggacttgtttggtacaccgtattaggttatattgtattatattatattgaattgagttatatatcaatttttttttttatatatcatattatgttaatttttaatttatactatgatgctatatatttaagtatcaataaaagttaataccacacatataatttttcataaaaatatcacacaaaatataatttaatataatattatacaatataatgtgatgtaatacagggtactaaacgaatcttaaaagtaatatttaattacaaaaaatccatatttattgactaaaaagttattactaaaggtgatatttttggtagtgtctgtcgtattcatgtaccataatcgttgtcgtgtcgtaatataactgtgttgacatgataacacgattgaatattcataggtttcacaatttttcaaaacaattttcgtttatcttgacaattgtgtcctaatcatgttgtcatgtcatgtgacatgctaattaattgcatggtgttcacgtatgttttgagtttttttacacgattaggattttttgccccctaaactttgacacgtaccaaatcatgccccctaaacttttaaagttattaaaaa

SEQ ID NO: 255454 - DNA, 1085 bp, Cannabis indica
ccatgtactatagcaagcgcatgataggggcggatacacgatatccagtggttgaaaaactagttttttgcctcctaatggcttcaagaaagttgagaccctactttcaggctcaccccatcaaagtattaacaaaccacccgctccggcaagttctgcaaaagtcggaggcgtccggaagactcctcaaatgggctatggagttaagccagttcaacatacactacataccgtgcacttctataaaaggacaagtgctagcggacttcataacagagtgcaatgaagcagaagctagcgcaaacgtaccaacaccacaaaacgcagcgtggaaagttcttgtggatggtgcctccaacgaaaacggatccggagctggagtagtaatgatatctccgaacggactccgactccaggtggccctacatttcgaattcacagcttccaacaatgacgctgaatacgaagccctgattgcaggactgaggttagcaaaagtcgtgggtgccacaagagtagaagtcttcagtgattcacagttggtggtaaaccaagtgtcactctagaaaagtgattaagttctaggaggtactaagaggaatatctaccaagaacattctatgtaataaatactctcataaataaaaaacactcgtggactaaggctcattaatgctccaagcacgtaaaaatctcatgcattaaacttcctacaactttcttacatatattattaaattggttaccaaaaatctcggtcaacagtaataatactctcaaaaataaaaaaagactcgtggactaaggctcattaatgccctaaccacgtaaaaatctcatgcattaaacttcctacaactttcttacatacattattaaattggttgccgaaaatttcggtcaacaattaataatgtgataaattattttaattaatcaatgttatttaattgcaacttaatatatttttatttagtatgttatataaactagtaaacatcccgcacttcatagcttatgtatataatattttaaattatgtataaaaaataaattatatgctttaattaataataattaactta

SEQ ID NO: 255455 - DNA, 743 bp, Cannabis indica
ggggcaacctcacaagaagtcactcgatctgtagcttgggccctataagctgatttgcttgaaaagttaccattagattctagggtccagaaccaattgtcctcacctatgcctgaaggattacctccattcaagatagccgaaacagtctcattatcaaacaagcttttaagcttttggatatcccatcccccattagccagcagaagatcagcaacttttaaatcctcattctgaacgggacctcttggccggggtaagaagcctttctgatgggctatccaaggatcatgccaagcattagtgtccttaccatccattatacgcctacaggcacccttgcgaatagtagctcttgattgagtcacattcttccaaaaccacgagtccgtggccttcggtttgcagtccaaaaagtgcttgcctttaagatatttagcttccaaaatccgacaacataaggattggtttcctttcagaaggttccacccccatttagccaggaaagcctggttcatttcttttgatttacggaaccccagcccccctaaagacttggggaggcacaatttatcccaagctttcaagtacagcccatgattacccttctcagagccccaccagaagtcacgaaccaagccgtcaatcttcgaagctaatcggttggagagcttagtagtttgcatagcatacaacgggagggacaggcctaccgacttaataagagtcgctcttcccgcttt

SEQ ID NO: 255456 - DNA, 969 bp, Cannabis indica
gtgggatcgtgtgtatgccgtatccacgtaaattgatccctaagttataaggattaagcttatgactcatgatgtgaaagctgaattcgctaagtgttgattgctctgcacggattgcaaaatatcttattcaggacatgccagcgaggcatcctgctcggcctatcttcctgagcagatgctccaactggactccacgtgtcaccattctcgtgatgccacgtcagagtgcaaaatttgggataacaatgttaaagatcaattagaatggggtagagaagacatcctaggaagttaactgctacggtactttaatagaggtaatacaaaaatttgttggctgaacaagcttcatcaaagcatgccacaataactacttccgcttgcctagataagacatttgtttctcattttatttaaaatcattttgtataacatcataaaattatatcatttccacacttattgattttgaaacaaatgttccaatagtagaaaagcctgtaaaattgttgggtaaggaattagtaagcttttattcttgattggcctagttgtactttaatttactttttgtataaacaaattcgccaaatctatctttctgaataaaaaattaaatcaagtgaattagccaagaacattgaaattattggaattgtaggagtagtttttgttttgttttatttttatatattggaattatttcaaaagtaaatgagtttctcatcattttaaagtacttgactctgtaacatgtaataagaattaaaaatgaatatatgatttggtactcttaaaagaaacatgttagtggttcagaatcttttcttttgcaaattgctccattgtatttaacaattagactatagtacatataatgaaatgatattatataggaagagatgcttacctgttattggaaacatacaggaaaataagtgtagggatgtcatgaatacactgaaa

SEQ ID NO: 255457 - DNA, 863 bp, Cannabis indica
gtgtaataatctattgtttttttcttcttcttaggtctctatttatgtaatgtagctttgttcattttgtatttgttcattatataatattatttcataacttattttcaatcaaagttaaacaaagggattttggtaaaaatgataataagaataagaatgaaatcaaatttgaagtggataaaaaaattattgaaatggataaaaaattattaaaattattaattcattggaatagttttttctttattttaagatggaatagtcatttaactaaaataataaaaatatcattctattagaatgaaattctaatactttaaaatgcaatcaaataaaaaaattgaataaaaattgtttcatttttattttattactttcaactaaacgccacttaagaattaaattggaatagaatggaattaaatttaaaatgaatataaaaataaaaataaaatatcacattttttctatcttgcattagaatggtatttctttctattttaaatgaaatattcattccactaaaataatggaaaaatcattcattggaatgacacctgataattgctcaaattgattcattttaaggctttatttgtgcacatataattaatataaattaaatatttcttaattttaaaaataaatttatattagttagaaatatttaattcaccttaattttgtgtcatttttatagatttttgagcaagaaagtagtgtaaataaaactagagcccaattgtacaagcccatcaaatgtgaattgtaaactcactaattatttatagtttttgaaaactctctctttctctctgtttattactaaatcagtactgactttttctcctctcttttgc

SEQ ID NO: 255458 - DNA, 546 bp, Cannabis indica
ggcacaaaacccaacacatccaagttcttgcacttggaactcgtactttgcttattctcagctttgtacattttaactgtctggctagtatccttaggtttggttgaccaatatttcatctaagtcttctcactttgtctgattgctcaccctcttgtcttttgtaagtagatgaacccgcgtgacttttggggaggtgacaattgaatagacaaagattttctcagtcttctctttgaagacaaccttctagatggttcttcaagtagttccttgggtgatctcaagtttagcagtggttccccaaagcataaagtctagcatcaccactattcaaagcaaataggctgtgaattatatggctgattcgtccgggagctgaaccaagggtggaggaagttcctccctagtttgtggacttatattgtctaagaaggtgtacctgacacatttcccactggtcgggcaactccattagtgagagatcttcctaccatagagattgcacttactgttgctaaaaactcaaagtcggccatggcaagg

SEQ ID NO: 255459 - DNA, 688 bp, Cannabis indica
cttatcaagagcatgggtgattgtctcacgattaccttgatcagccttaaggaaaatgagaaggtcatcagcatacatcaaatgggtaatagaaggaccttcccgagagaaagagaaaccacacaaactcccattgccttcttccctcaaaagaattctagtgagcacttccgcacctattatgaataggtagggcgacagcggatcgccctgtctaaggcctctcttaggagcaaaggacttagttaatccaccattgagcaaaagttgaaagttgactgaagaaatacagcagtgaatcaacttacagaataattgattaaagcccaagcatttcattaccttcaaaataaaactccattccaagcggtcgtaggcttttgacatgtcacacttaatcccaacataagccgagtttccttgtctcttgtttagctcaaagaacacctcattagcaataattgaattctccacaatcctcttccttgaacaaaggccgactgatttggagaaatgattttgtccagcaccttgctaagccgattcgccaagagcttagcaacaattttatacgaagtgttgcatagactaatgggtctaaattcatcaaaacagttagcattggctctcttggggataagaactataaaagttctattaatctccttggtgaagttcccagttctaa

SEQ ID NO: 255460 - DNA, 1213 bp, Cannabis indica
atccaagaaagaagaaccaaagaagaacaacaacccaaatccaggacgcttgtgcaccaagactcaggctgacgctgatactagtccatcaatggtgacaagttagttttctattaacgattgtttttattcagtattatttgatttgagaactactcattcctatgtatcaagtagagtaatagataattttcataaaccactcaacatgtatgctttggggtttggggccctattaccctcaggacacctaatcatatctactcagtggattaggtctttgtctttttggattgacaattgtgagttaaccgccaacctgattgagttacaactatgtgactttgacataatcctgggtatggatttcttatataagtacagagaaaatgatagactgtagacggaaaatagtagtttttaaggcagaaagtgccaactcgcctttgtttgtgggtttagtacaaggatctcgagtgcccagaatttcagctttgaaagctgaagatttattaggaaaggttgtttacggtttcttgtaacagttgaagaaaccgaaagggatacagttgttggacctgataatacaagactcgtttgtgagtttttggatgtgtttccagagaatttgcctggattaccaccttctcgagagattatatttgttatagaattagttctgggagcaaaactagtatcaaaagcaccttatcgaatggctccagcggagttaagggaattaaagattcaacttcaagaattagttaacttgggattatcatattgagtttttctccttggggtgctctagtgttatttgtgaaaaagaaagatgagtcgcttcgcatgtgcatagattattgggaattgaacaagcttaccattaagaacaagtatcccttacctagaattgatgacatgttcgatcaattgaagggtaagactatcttctcgaagattgacctacaattgggatatcatcagctgaaaatctgagaagaggacatttcgaaaactacttttcaaacaagatatgggcactatgaatttctagtgatgtcttttggactcactaatgcttcggtgacatttatggacttgatgaattaggtattcaaggactatttggatatgtttgttattgcattcattgatgacatattggtgtactcagaatcaaaagccaagcttgacctacatctccaatttgtac

SEQ ID NO: 255461 - DNA, 922 bp, Cannabis indica
aaaaaaaaaaaaaaattggttgataaaacataaccaacgatctcacgaataaggagtcacgtaacgtaatatatctgagaaaaaaataattaagtagataaattaatttattttaaattaaaaataaaaaaatgttaattaggatttttctccgctgaattttaacatgtatcaaatcatgcgccttgaactttttaagccgttaaaaaatcccccgaactattgaaattgttagatttaaggacttctgtctaatttcattcaattttactaatatgacgattccccatatactaaatcatgtcccttgaactttgatatctagtaaatcatgcccttcaatctttcaaaagtataaaattgtgccccccaaaagtataaaatcaggggaaatttttaacgtcctaaaatgttcagggagcatgatttagtacatatcaaagttcagaggccaaaaatccaaattagccttaaaaaaatgataagcctggagaaggactagaggctagaaacgagtttctaacaaagacgatcatgaaaataacaattcgtttccacatatccaagcactcttctaccgtaagctcctcacaatttagctttgtcgatccatacaccgacatcgttgttgatgtacggatttccgagatgcgaactctgaattctacctgtcgctaggaagaaccgaccgaacagttcaaacaacaatcttttaagctcttcgacggttattatatttctaccgttgccagtgccagttgacaaaactactcgtttcttatattatattggcaatttcttccttcttccagtattggattcggaaaaaaactagctgaaattctggatcaattaagcatcagaatgaaaaagcaggaggaaaaggtatgatcttatttttctctactcccatactctattt

SEQ ID NO: 255462 - DNA, 918 bp, Cannabis indica
agtaatcggcttgagtaactcggcattttgggcagtggagattgagctattgataccacttacaacctggttataattgacattcccagcagtgtaaatgttggtaaaataattggcaattacctcttcaagaccactattccaggctgtccacacaccagaattattttgaagatattggatgttgttgctgcgttttcgagtgctagccatagcatgaaaaaatttggaatttttatccccgctgtgtagccaaaactgcttcgaccgctgcttccagtataactcttgttgtgctagaatttcaaagtaattattttgttcatggccgaaattgacaatagaggaaggatcagagttaccttgaagagaagcaagttttgctttactgcggcgaattctttttttgaaattgcaggttaagttctttccccattcagataaatgcttgctgcagagagatattttaccttgaaagctcagatgagcattatgttcccagcaggatttgacaatttctgcacaaagaggctccctggtccatgcattttcgaacctgaattgatgcaccgaaccagtgacaatcgcaggagaaggcttaagaaaaataggcaggtgattggacgaagaaacttcaccatttgagagagttgcagacgggaaagagtgaagccagagagaggagacaagagctttatcgaggcgtatctcaacccagttacttgctcctttgccacgttcccaggtgtaaggatggccacgaaggtccatattgatcaaactacaattgctcaggacattttggaagccttcgatcagggaattcgggtacagatggcctcctcttttctcattttgattgctaatgttattaatgtcaccaattatgcaccaaggaagctgggattcagaggaaag

SEQ ID NO: 255463 - DNA, 915 bp, Cannabis indica
ggagttcatacgaaggaatagttaaatcttgtgaaatcccaaagttgatatctttgtctatgatattaaaagttaaagaaggttattgagaaccatggagattaaaggaaaaatagtacaatgtgtattcttgaaggatgggtaacctgaaagaaggttttgatactaaagtaagtaggctagctttaacttctgtgttgtctggagtgtataatgtgtttcatatctccatgatgagaaagtatgcatcaaatctgacccatattctacgcaatgatgattttgatttattatatggggaatagcccgtccagattttgaactggaacgagaaagtactttggaataaggcaattccactagttaaagtgttgtagaaaaatggcaaaatagaagaagtaacttaagagttggagtcgtaaatacgggagcagtaacccaaatagttcaggtaaatttagaagacaaaatttctataaggagaggatagttgtaacatcccaaaaacctaattatgaataattagggtttattatatattatgggttaattaggtagtaaggagtaggattatgatcctgctagcctaatttagtataaattataaattttaccataagtggataaataagcataatttattaattatggaaatttatttggaatatgtgaatatattgtaagctatttgtgaaataaaaatatttttaggttcgcgcgaccctcgagacccgatcagagatcaaaaatatcacaacaactttagttagtaatattgttaggattactgagattagttgattatagaattgccaacgtattttaggatactcggggttgactaaatatcctaaggtttagaaattttttagtggctaaaaaatgtcaaaaaaacttttattaataaaattttaa

SEQ ID NO: 255464 - DNA, 1354 bp, Cannabis indica
ttgtattcatctgataccatattagaacagagtatagaaaaagaagagatctgtttattgattgtgaaattgtatcttggttacaaagagtacatgcctttacataggaaagggtacacagaagttataacaaacacaattggcttaaactaacataaccgactataactaacataactgacagaagggtagaataggaaatcctaatataaggcacactagtactgtgagtcggatttataaaaatacatcaaaataaatttgacactttccatcaatcctaatttctatacgatatgttaaggaccatcatattactatatacttaaccaattaaaagtttacattaaatgactcatagatggttttttttaatgcctcaccttaaagatttcctatatatttgtacatactatggggtgattctacaatgcaccccttaaaagagatctactgatgtaccttttatttgtttcgacttccataagaattttttagtctaattttcatattcatgtacgttatagctatttaagataacctacaaaattttgagaaatttaaaataatttacaatataaaaaataatgtttaaaaagtctattttacacgcgtataaaataaaataatcactcgtgcaacacactgtttgaacgtatttttcggcatgttaaacattttcaaatttcttgaaattttgcaggatgtcttaaaaaattatttcgggtactaaaacagataagggtgcatatgtatctattttaagagggcacattgtagaattttcccatactatgtatatacactcttatagtattggtaaaactaatgcttaaaaaagaattattttttaaaataataatatgtagagtgttcgtgatacgggtggtaatttttttcaaaccaaattgcatatacggtttatgtaatttctcaaaccgcaaccgtcgtgcgagatcttaaaattaaaccacaaaaactacactacaaaaatacagtgtacagtatgagcagtttacactattatcattaccaaacattataatgaaaatttaaataataaactaataaagttttaacaatatgaaaaaaaaaaattatattaaaattttaaaatcataacgcgtacactaatcatcaaattattatattaaattatttctaaaaaataatgtaatatacacatatagtacatatatttgttcatataaaaaaaaaaactaaaaattatattgtaaaaattagtaacttaatttataatatatagtgcggtgcggtttaaattgaaattattaaattcaaaactgcaaatcgtactgaaccatgtgatatgataaaaatgcaaatcacaacc

SEQ ID NO: 255465 - DNA, 2202 bp, Cannabis indica
ttttcaattttttgacaaaatagactaattatgagttatcaggttatgaggctctcatattctatttaaagcattctttttagggttaggatttaaattatatggaattaaaaaagataaagaatggctaaataatcctttaagtggtcggccatgcttgtggaccccactgattacaattttgttattttatttaagaacttatcttttcttttacaaatgtcatattttaattttaaacctataaatgtcaaatctatttatttaataattataattaattatcaaataaaattatcatttaacttatttattaattagatcttataaagtctcttaattaacaaataaaccctaaaagcttcttttttctcaattaagcccttccttagtaaaaattcataaataagacatactctaatttagaattataattagggtttagggtttagggttaattaaaaccaattaattgagtttacaagccaatattatctcaactagtgtggggaccatgagcctttatgatcaagcttccaataagtagttctagatcatttagcgaataaatttcttaacttattatttcctcctgactccactatatattcagaactgcactcttaattatgtagaacgctctatatgttctaaatatagatatgctttaattatccattgttataatctaaataatcaaagatcctctatagatgatttatatcgagtagggataaatttaccattctacccttcaaggtattttatccttaaaacacttaacttcccataaatgatatttcagtaaactaatataattactaaaacaagacctcttctatttatgtctattaaaccaagctcgaaggaaatcgttatttcacttatatgtcaatataaagctatagattctgtatttatgattaacactcacactcaattgtattaccatgtttccaagatgtaagtattgggccgatccaattggtcagctttaacgaacaactcaaagaacacaaataatacacttaagctataacctaaccatctaaggataagatctattgatctaagatcaactaagtgatattgacttagaaagatataactgcaagtttatgaaatcttatccaagttcaatatcggtcgagtccgatgtatactccatatatttgatactagcatactttaccaatgccttggaaaggacataacacttatccaaggtgtaagtaaactttattgcttaatatcacgtcaatgtaaattcagtgcactaataaattatgggacaacacttttgaagcatataatcacaattaccttccactgtaatgatttcaattttattgtgaataactatatattttagatttatcagaaattatatattaaaccataagcatgaaaataacatgtaacttaaatgacttctaatcttctattggtagtaaataagattatattgaaatgagttttatttagggcataaaattccaacaatctcaccaacatagacttccatattcttccctagaacttgtttaaacattttgttaacaaggcgttgatatgtggctctgacatttttcaaactaaatggcataaccgtgtagcaatagattcctttatcagtttgaaaactagtgtgctcctggtcagccacatgcattttgatctggttataaccggagtatgcccataaagctcaaaagttcatatcctgaagtagcatcagccatttgagctaatcgtggaagtaaaaaatagtcatttgggtaagctttgtttacattagtgaaatccatacacattctccaggttccattaggttttaggatcaatactagattggctaaccatactggatataaagcttcgcggagaaactctatattagtcagcttgtctactttcgccttcactgctttagatcttattggatctagtcgtctccacttttgatgaactggttccacagcgaggttttgggtttagagcatgaaaaatcacatgtgggttgatttcagtcatgtcagattggctccaggctagtttatcacatttcttttttattgtagagataattttctctcttacagccgagggcagattctttcccactttaatagttttagtggggtcttcgtcactagtgcacacttttttcacttcctccacaaaaagagagagagagagaga

SEQ ID NO: 255466 - DNA, 648 bp, Cannabis indica
ataattaaacataaacaactgctaatttccaaattaactaagcgggctttacaagataagtctcttatgagttactttatgacacttaagaaaatatatgaagaacttcatgtgttattaccatttagtcctaatgtgaaagttcaacagtgccaacgagagtagatggctattatgagttttcttacaagactctcatctaaatttgactttgcaaagtcacaagttctctttagttctgatgtcttctctttacaagatgtgtttacatgtgttctttgcatagaaactacccatcagctcctcttaatagcttcttggtgagtcgtaataattctgcattgaaaaaaaaaatctattctaagtggatacaaaggaggtaattcacaaggacctgataattgaacaccagattctgggagcatcatgtgaaactattgtgagaaactaggtcacaccaagtttgagtttaggaagttatagttcaaaaattgacaacaacactctgcttatattgcaagcactggtgatgcatttgacaaatcagtgctcatttttgctgatgaatttgccaagttctcaaggtatcaagaaacacttaagtcttcatcttcttctatcactgcgattgttgattcaggtaactct

SEQ ID NO: 255467 - DNA, 794 bp, Cannabis indica
ttgtaaattgatgaatagaagtatacccgcacaaagagcgataataatatatagtatttctaaactcttgctatttgatgttcacccatgaaaataataaatattttttacggtgagtatatttcgctataaataatttcactacattcttgtagtgacaattaataacgatctccgaaataatttcgttgcattcttgttgtgacaactaatattgatctccaagcagtcaattcacactccaaaattatataattacatactatttatataccaagtaacattcaattttcatcattcaaaacaaatataattacatactatttatataccaagtaacattcaattttcatcattcaaaacaaaaaatgtagtttatatatgtatgcttatatatatacaaatatgtttatacgattcttctttacaaaatgagaaaaggaaatatatactatccataatatactaaaaataacatgataaaaaaacttttctttcttagttggtgaaatctcttttatatatatatatataacttaggattacacttatatatagatttagattaataaaatttgtttaagtacgtgaggcttgctagcattatttatgtagcatagtttaagatattttattttaaaaattgttaaaactatgattttgaattttataatagagatttttttttgattctttaaaaaaaaaacgtcagatttagagtgatacttgatctatactattattaattaataataaataaatatttataaatttaataaaactttaaaaaaaat

SEQ ID NO: 255468 - DNA, 1466 bp, Cannabis indica
aatgagaactaagttttttttttttgaaaaagtagcatttagtttctgatattaaaaatattaagttttaaaataaaataaaaataaatgtgatgcatctgaacctttcacgtgtccatatttataatttaacaaaagtggtagtaactaggaatgtcaatctgggccatttttgcccgacgggccgactgtggcccgaattattcgggctcttattgggttgatggcccggcccggtacatattatttcgggtcaggcccggcccgatttcaaatattaaaaaaaaattaaatccctaaaaaaattcctaagttctaatttcttctcacttctcattgttctcagttctctctcgtttcctctctctcacttctcactaattgatcacggagagaaagcaaaagatatttgtagttttgactaactttgatggaagaatttgaaggtgggcgaagtgggttattctttttattctcatttttctgaaaactttccctttgattttgcatcatcaagaagaattgatttcaacttttgtgaggttccttaatgggttatgggattatattccatgagatctatggtttcctctaatttgagctttctttctaagtagtatttatatcttgcttgaggttctttcattgtttacgtccactgatgagctttttgatattttgatagtttttttttctggggaatgcttgtttcaagttttgtgaccaatatttttggtataaagaaaatgctgtttttgattctgtacatgagattattagggtgcacaaacgaattttttgatgtaaattgttattatttttgtctattatatataataaactgatttaaaaaataaataaataaataaaaaaaaaaaagggtcgggcttgacccgctaggctaaaagaatgagtcgggccgggccaaagtgatatcgggccgggccggatttgtggcgggttgggcccggcccggcccgattgacattcttagtagtaacggtgtaaaagaattgtaacattaggtatttttacctacaaaaataaatattaagtatttaagtatataaaatctgaaacattaagtatttataccgtaatttactcatttaataataataatatatatttattaataaatattcaattctataaaaataattgtattgtaaaaaataaatataatttactgattaattcttgtaaaaaaaatagtaagaaagtaaagtcctaattcaactagtataagaaaatagattaacccatttataaaaaatggactgatccgtgtaaagcatgtcacaaaaatgcttactctttaaaattttgtcacagtatgacatgacttttatcttttgagggcccgtttggtacgcaggattggattggattagacaggctaatttgtccaatccagtgtttgggcatgttaaaagtctggaaaactaatccagttaacctcatct

SEQ ID NO: 255469 - DNA, 1455 bp, Cannabis indica
ctcctttaggtgtatttattgccaatcatttatacatacaattattcgtattcattccaagagtttttttttaaaaaaaaaatggggtgctttgggaagtgggatgacatatatactcttaggggtgtttttcgaaatttgagtgcacgtgctttagtaggcacgtgtttttaaaacaaagtggtgactcttcgtttcttttttatggttattattttgcatgtaattttgtataaataggcttctcgttgagttccttttttatctagaatattcttcaactctcttttagttttctgggtcagttcaactgtgctcttcgtttgtccttcctgcattatgtcttccctacccaaaaatcagataccttactcaaaggagccttcctcctccaacattttctcaggactgcagcctttagatcctgcttttctttctttgaaccctttttctagctttcgtgatttcgagcccactacacttcctccattgcatttttcagaggtctgcagctgtccttggtttgagcaagctgcattgggccttggaacttatgttgcttctcgcgtcgatgttgcgccacctttggctatgtgtccttttgctatttttcctcccacattgacaccagtcgaagcggctaaggaggagcctgaagtatcagaaggaagttcgactcagacgacggcggcttattatcccgagatcgagtctactgcccaatctgagtacttcgaagaagtccctgctcctacggatgcttccccctcagctttctgtatatttgcttcttccttccctcaggagttacctcgggtggtctccgagatcatacgcccccttctttctccaaccgtcgggggtggcttgcaatgcggaggatgtttcagcagagggagagtttctccgtgtagggggtctcctctccttttttttttatttaccttgtaggcttacgtcggcaccttttcatattttgggtttgtattatgtaaattttgtaagtttacgccgtcggcgttatataacaccccatttatcatattttgtacgggccactactccccccagttttttgaaaatagagaaagtactctcttttcataaaactttagtttttgtgtaaggtggggtagtggattttctgtttcgtgttcttgttgctctttattaatgataattttactttatattctgttatttctcgacatgtacttgcttatccatacgttttaatttcgaacgaagtttttgtttttttttatgttgtacttgctggttgtcctcttacgatttttgtgctttacatattatcgtaccaaatggtcttattcttgccttttgtgaaaaggtcttttatgttgcctttcgtgaaaggtctttgcattgcctttcgtaaaaggtctttttgttgccttccgtaaaaggtcttttttgttgccttccgtaaaaggt

SEQ ID NO: 255470 - DNA, 890 bp, Cannabis indica
caatcaatccatttaagtcattttcaaccgtgtagtcccatacctgcacggtctcaaatcatcccacttgaccttctccaggcggtgtaggattgcacagcttacccagtgtttccccttacggatcacgggactactgactgtcacagtgttggtcctttatggtgttatgatcataattgaattatcatgttcttatttttgagcatgattgtttttatttgtattgtattttaaatgagttcataatttacttttaaacaattactttgtacttttaaaattcataaatcttattatatttcctctaatggctagtggcattgacgacattcagcttctacatgggtctggtttgctgctaaccaaacaagatctacaacctttctattcttctctcttcgttttgtttctctatgccaaggtggttacaactcatctttgcaagcctttagagcagatcagctagacgagtaatattggttacctttagcgtctttaggtttagctgttattatgggcttgaatcttgttgaggtttcttgttattataagagaatgtgctcacttcatttattttgaaaattatgacgtgtgactaatcttaatgtaaattttgtagataattaaattgcgactttcatcttttttcgtacaataacagtatttgcatttatggatattgcatcggttacaccaaccgaagcaaaaactttatatgtcacttaaaagttgaagcaaaagattatttttacagtagtgttaagagatattaataggaatttttgttgtagtattgttggctttgataccaagagaaaatatagaattttagaaattttgtattttgttaaatctcagttcccatcagagcaagaggaaaacttttt

SEQ ID NO: 255471 - DNA, 844 bp, Cannabis indica
gcagtggatcccgcaatacagaaccaaggaaatgcagctcaaagatcattaagttcattttttttaattgtatccaaacttacctccctagaaattcggtttgtacattgatgaaagtataaggtctatgattagttacttgtagttgcataagtccttctagggatttaccctagtgataagaaaattttagaatgatggaatagttgtgtacttagtgtaaacaattactagaatcatggatgacctgatcacgatatttcgaaaagctaaaactgttaactaaggtttgcatgtttgatagctattctatgtgattatgtgtggaccatcacatagtcattagataagaaattgtttgtttcaacaaatactacttttctaaaaaaatgactaagtctgaaaacaaagtagcaaaatagaggagataattttttttcttgatgccaaaagtgtctatcatcttattcgaaataagatggccccattgcctcttttgtcttgacacaatcgaataggtcaataccatttagattcttagacagatagtcacggtacctcgtcgtagtgtgaggttttcaaggaactccacttgttataactttagagacatttgtgattaaaatccattgtttgtttaaacaagaaatggattgtcagaataatgaattaacaagtaaaaccaatagaactatggttaaaactattcataaggagttactaaaggttttctattacaaggacaagaaaggaaatttttgaaaataagtcttttcaacggtcttaacaaaacatcttgttccttgtattaaaggtttgagtttatctaaacctatggcttgtg

SEQ ID NO: 255472 - DNA, 1248 bp, Cannabis indica
tttatcagctaacaaattctcaaactcgataagagaaggttttgtaggtcaaccttgaattgtaacaacaaaacttttatatccggtccttagctcatgaataattatccttctatatctaggcctaaacccatgaataattatccttcttattcttgtttatagcattatagaagtaggctctaaactagaaatctcaaagagattttaccttgttaaaatattggttgttgtgagattgataagagctcattctctaaaaattgaagtcttgcgtttcttctttgagaagagtgtggcaaaattgtcacatgcctcctttggtgattcagctttcctaatgtgccataatatttcctcttcgatcgtggtcttgattgcaagcatcgccttcccaactttgatcttccatttcttcaaagttgcactgacgacctctcaggtcttggccttgtaggtatgactctatcgtcgttgaacaagtgttgtaattctgattgtaataccgtcaattacttgagcgttacccattgtggtatgaaaaataaatcaccaaacaagcttaatctatcttgtaagccttacaaactcaaattgtgcatgacaacaagaagctcttctaccaccacaaatttatcgaacctagctctaataccacttgttgagtaaaaaaaataatgatactttatttttattgaagagtactagtacaaacttagaacactttgtacaaataactcttagacactctaaaacttttacatacttctaaatctcttacttctcttgctccaacttgcaccctaagcacacacctcacttctatttataggttacaaagatgtctttaaatatttctagaattctctaattaactaactaattaaataccttatactatgttctaaataactttggaactatttaatcttagtttaagtaattctattttttttttttaatttttataaggtgttattagcttcttttacaatttcttagaacattttaatccattctaacattttgtagatgttctagatttgataataatgactttaaacattcaatgtccctcttcttaggccaactccaatgggcatgcaaaaactcattaataatgtgattttccacaaaaatcacttcaaccgcacgacaaaattaatattaattttgagtttgtttacagtgtcccaccatatttaggtgggcactatagacaacactattttttttaaaaaaacttta

SEQ ID NO: 255473 - DNA, 830 bp, Cannabis indica
actcccagccctcttcgaccccccttaaactgaccctccatcttcgtccagccccagattaacaaaactacggtcatcacgcgagtcaccaatagcaaccgaaccacctccctccaccttcagcaccaccattacctccgttcacctcgtcagcacccaaatcgcaccagcaactccatcacaatctgtacaaccacacataacatcaaataaagctataatcacccaccatcttcaccacagctactacctccattaccattgtcaccacccatcaccataacctatatctcaaatccaaatctaacaccaaaaaatagaaatcaatatctcaatctgttataacgcaaaacaaaataaaactaaaaaaataatctttgtatcaaatccaatttgccacaaaaaaaaacccaaattaatatctcaaaaaaataaataaataactagaaaaaaaaaagaagagatctaaactgcctgaaacccccatcctcggatccacgaacaaaccaccgtcggccgtcattggcctaggcaaagaccccgtcgacttccccatggttctccaagtcccagaaacctccaagcccgagaacgccgtcaataaagcattgtcctccaccgagaacaaacgactttcccatctcgatggtctctctctccattagtccttctctccaaatctaaataatcactggttcgcacacagagaagcaggaaaagagggtgatgtgatcgtgtcttgtgttgattttgcaagaagtggaagggatgaagaaaggaagaagaagaaggagtgggtgggtgtaacaccctaactaacttaggcgtat

SEQ ID NO: 255474 - DNA, 533 bp, Cannabis indica
aattagttagttattgtgtacaatcgttttctgtttttgagcatctttgtaagtgctgtgcagtaggttttttttttttttttttattaatatttttccctcttctctaaattttctttctaagcttttgtatctgaatttgcatgtctaaccatttccatttttattgaccggccatttgtaattgttgaaacataattgcctacatatatttattgaaatcagttgataggatgaaagttttatgaactacttaattagtttaattggtgaaccaataatttttcgatgttatattttcgagaatgattaaattgaaagtatgtagtttatattttattgtgattaagtttatttgtttaataacaataatattttgttggtttaatttttttaaacatatttagtaatactattaagtagtacataattaattttactaacttatttattaagtatcacgatatcaataaaattgagagctgataaggatattatgttattttaaattgatcacatattaaacataattc

SEQ ID NO: 255475 - DNA, 368 bp, Cannabis indica
tagccaattttattgaagcagttgttttttttaagtaaaacaacgtgtaacaattcattttaatttcttcatatttgtttaagcttcttgctctgtatttcgttcttcgtgcttcttcaatttatatttatgacactatttttagtgattaatgatgatttgatatatcttatgtattatttcatataatggacaaaataaaatctgcataccagtattgttaaagatataatgatcaagtgggaattggcttacatgactttgacctattataactttggatgcaaactcaaattaaaacagtaagaacacacaattgaaaagcagtcaatgaagtaaataaagcttatatatgttggaaattattt

SEQ ID NO: 255476 - DNA, 636 bp, Cannabis indica
tatccatgcttttggagtgcctcgaacaccatcaacaactgttagtagttcaactcaagctcctcaattctctacttcgactattgctccgttcctaagtgtataacagtgtatggacctgctgtcttaggttagacaactacacataccaatttttcgggctttggggtggaacgaatcgaatgtagtgttgcccccgaacaaacaagttaacaaacagaagttttggaatcatatgtgagtcattctaggaacaagaggtatggtaagaatcctagtcgaagtgaagcttcgtaaaaaaggagaagtcatgaatcaagatattctgagtacaccagtttgatagatactcaggaatgagctggtgtggaaaaattagcaaccgactatgagtagtattgtttctattttaagcttctttgattaatggtgtgttaacttctttagataactgtaagcactagtatgagccaatgaataatatgattaaagttaatacaaatgctacaacatttcattatgagggcaagcataattactcttttgtagatcgagattctattggagctctatcacaggtggagatggttgaagctcttagagtgaaggatcgaggtgttgagttggttgataaca

SEQ ID NO: 255477 - DNA, 553 bp, Cannabis indica
accaccaccagatacaacaatgtctgagaaggtaaatccattttcatatttattttattatatcgttcttattcgttttaataaattacactaattataattgtttgttgtttggtttcaaaatttagaaagcaaagtgttcgatgtacttggttaccaaacaacccaaaaatagtactaagtgtgttgcaaaggggtatttggtgatagaaaatgtgaccaccctggaagtacataatgaaaagtttgaattcctgtcacacaagaaagcctcaccacggtaggcgaagtggtgaattcctatgtaacctggccaattccacttgtcaagattgatggtgtacaccagacacaggtaaatatggtcatttttatttgcttatgtatttgatttgatttctaattattgacaaatataatttcttttttaactttgtaaaatatattgtataggagaagggcaagaagaggattctgacgataatatagttggtccaccgactcaacctttgaaacaccctcgaaggccggataagcttccaatagctcgtta

SEQ ID NO: 255478 - DNA, 598 bp, Cannabis indica
tcaattcttcatgtgaatggtttagagttggagatgatcttgttgtgcttctgttaagatgatccaaaaattcacaatcgagattaacactactttcacctggtgcagaagcaatatcacaaatatcttcttcaaagtagaattcacgatcaaagtagttatctactaagggttgctcaatttcttttgtgcaactttcaatatccttttcacctatgtctttgtttataagctccacacgtagtgcagatctgcaattgttctctccacagtccaaaagataagctgcaagacattcatcccctcataaataagtggcggcatattttctacaagtattacgagtaagtaacttatttttaattcgatgtcattttaattggctccaatcattttattcaatttatccaataacatctcaaatgtagtgctcgaatcatcgacaattatagatataacttccttattttttgacgaccacttatatgacccttgttcatccttccactccccatcgtactgaacatagattactattcgagtcattcttacataaaaaatagatggttgatattaaaaaatagttaaaatatattga

SEQ ID NO: 255479 - DNA, 2477 bp, Cannabis indica
gagagagagagaggtgtattagtttctcaaaatattgtagtgtaacattacatatatatttaatatgcagatttacacgtgtaacatgatgttaaaaattaggaggatatatattcatgaaattgatcagataaagatgataaaataatttggcatgatgatgaaattatttatttgtgtagtggtagctgatgatgtgggaagattagcattgacatagtacactacaactgaccaaaatgatagtctatcattgatgccacatggcctcacatgtttccctcatatatatattgatatgtgctaacaagaatatttgtaaaattcccacctaatgaaaattttactttttaatatattaaatgtaaaataattataaactataatagtaaaaaagttctcacaaagttaaataaatttaataagagtaactataatataagaatgaatgtttttttatcataaataagtcacacaaaataaaaagtacgagtctgtctacaattaagtatcagatcttatttaatttaatatattaattgatttcgggcactactaatgctaatagtcactataaaaaatttacgtttagtcacagtaaaatttagaattaaaagtaaatatttttgatcaattataaatcataattcttatattgtgactaaaatatctgtgactaaaactattagtcataaaaattaaaatttgttgtgattaaatgtgtataattttattcacaatgtatctaaatattatgtagtcacaaataattttttattataactaaaaatcatatttaattacgaaaaatttatgttataattaaaaaattctcactaaaaataatattattcttttagtgagcaatgctaataattacactcgaatattctataaaatatagtttgcatcctacataaaatgtcatttaattttgcaatgagttacaacaattatattgctgtaagattataattattaattatattttacatgttacttttattataaaccaaactatacatatgtacgtgttttttctttaatttaaaaccaatatatatgtaattaagtactttaaaacactatagataaatgaaacttggggaccaaatccaaaaaccatacaaatattttaatatatatcagatgcaaagatagagatcgatgagtagctaggtgaaaatgacaatggaccacatctctactactaaataaactatatattataatttaatcaatatatcatgtttttcaaacgatgtaaatatataattattataaaaaaagaaaaaaaaagagaaagagaaaataataaagtaaaaagcatatgcggcgtcacgagacatgatttgtttagggtttccattccaacgtggatttgattcaatgaatggttagaacattattgattttattagagattttggttttattatcatcaatgtgtgatgtctcttttataaagatgtgtctcatttctttgtcccctttctaattttaattttatttttttggctttttcctttggttgagctggcaaaaggttaaaaattgtggaggccttatcggtaaaatgatgatgacagtattattaggtcaagtatattaaaaaaatgagatcaacgattagaattttttaacatattggaatatggaacaaactaataatattcctcatcagatttatacattgatgtgatccatgactcgatcatgtaaccacacataaagaaccaaaaattgaattaggaacaatttgagaagaaacttaaaatagatgtaacacaaagaaataatgaggttcaaacataagtatcacctgctcactcctcccagaccacagcttccagtggtttcaatctttattgagctatatatatatatatatatagaattgattacaagatattcatctcacttgtgaaactatgaagtaaacacaccataggccaatacaacactcttttttctctcttcttttctatgaactagctctctaacacctctcaaggtgtctctgaataagtcatcccaaaataatagcagggaatggcaatatatagcctttggtattgggacttgatactaaccgttataactgacagttggttaaaacagttgaaaaatattagtgccaaatgcttcctcacttaaagaccaatcacaacaattatttaccttagtcattaattaagagaggaataagctattgagatctaaggctgaactggtcttaaatcctcatctagcacttgaggatgtttagtaagtttaggcaaaacctaaacttagctaaactcacatattttgtcatcatgtctacagggttttccttagttctaattttcttcacattcacctttttcagctatgatgtctcttatgaaatgcaatttaatatctatatgcttggacctctcatggaacatgggattcctcatcaaatgtagagcactttggttgtcacaatgcac

SEQ ID NO: 255480 - DNA, 1009 bp, Cannabis indica
ttcctatagcctattttaactcaggatcggccttacatttagtaaatgtattgtgtgtaatttaattatacatgactatcgatataaattaatatattttatcgatgtattgtttattatgaaaaagataatttatattacaaagataaatattaatatatctgtctaaatttttaaattttaagtatttatgaattcaagtttgtgttaaataagttatttcatttactttataaagtttttaaaaaatgagaattacaatttatcttttgaaacttaataacataaatggttagaaacatattgtaacaacccaacaaatcaaatttcttattagcacacataaagctacatatttgtatgaggataaggaagtattcgaaatacatcatcccattttgaaatcttcaatatcccattttgaaagagcattgctattgggcaccagtggtgcctagcaccttctaaatgtgtcgacttgcaattggctagcgatactctataaaaattattgtattaaactatatgggacccgatacttaattgcaccaatagcgatattgacacgtaggaggatgctaggcaccagtagtaccctttagcatttctcattttgaaatcaagcccaaatatttagcctacaggaaaaaggatgtccccaccgaaataattagtgtaaaatcacgaaagccccctaataaatgccatatcactttaaatatcttggtccactcaaatttaatgccttcaacaaacacatgtatatgtaacgcctgtctaactttctccatttattatagagaattgttaaaagagttttgttattgggggtagtggtggccagtactttttataggtgtcactttatgattgattagtgatattacttaaagtttatcttttttaagttatatagaacccgctatttaaatgcaccaatagcagtatgacactaaagaaaataagcaccagtgatacccttcaataattttcttgttagaagatatta

SEQ ID NO: 255481 - DNA, 849 bp, Cannabis indica
gctaggaactgacgccataggggcccatatggcgtcggttcatatggaccctttagcgtcgccctgatcagcgtcggtagtgaattttgcgaaaaccgacgctgaaagggcttaaaaaccgcctctaaagaggatttttgtagtagtgtttatttatatagatattgtgatctaaattaatataacataataactttatttaaaccatttgtagattaattattttattttaagtacatgtatgacactatttcaagaaaaagtacatgtatgacatcaacaatagatgagatagttatactactatattttttgctttttttttttcaaaatttattcagttatttaaagtgaaaaaatattatttttatttatttatttacttatttactttatattttgtaagaatatatagtttactcttctcattttttttattattttctctcttatctttaactttaaaagaatttctggtcacgtcattactcggttgagcctacaaaaatatattattataatctactcatgtgaatatttcaaaatataaaaagcatatagttttttttttttctatctagaataaaaaaattattgaattactcatgatcatactgatcatatattaattacttacaagtttttttttaaacttagttaatatttattttagaatttagttaattaaattatattatactatgataactaattagtttctacaatgaatttagattgccaaaatatatatatgcatgttaagagtgggagagatatttttattaaaagaattgggttcaagataagtcataaatataagaattttctatgtaatatgcatgttatata

SEQ ID NO: 255482 - DNA, 809 bp, Cannabis indica
ccttttatgggccaaaaaaatactaaatggcccattatgatgataaatcaatggcctcctctccctattatccccagccaaggccatgttagagtgaaagataattttatcatccaacccctttcggcctaaattaattctagggcccaccacagataaattactgacctggcccattttattaaaaatatctttttcatatgtctgcaacatatactttaaattgatacaagtaataggcattaaagagaacctcacacgtggcccttctaggtccctcatcagtcttctaaagacggtatggatcgttgtcattcccctggattcctgcgatttctttttggaaatcccaatcgcctccacagcattaatcctcgcatgaaaatcattatcgataaccccaaaatcatctctgaccgttgagttcttccctgactgagcaccattcaccatagccaccggagctactgaactccccgactccgactccgttgtatcctctgaaaaaatcgttcatcttctctgttaatttcatcctcattcgtgaaccagctttcaacctcgtggtgaacagcaagctcgactccatcatgattctcaacgctgacagccaccctcactgtttcatcttcgtccctaccatctccgaccttctcgactaccaccgcaccttttactccattttttccttctacggcagcctctataccttccccaaacaccttgttgtgatcaagtcttgataccaacaagtaccaaatatccatgaacctataacttaaatcattaagcttgaacagttcaattca

SEQ ID NO: 255483 - DNA, 489 bp, Cannabis indica
tattttttttttacttttttttctttttcttcttcttcttcttcttctttcttcttgaaccgccatgaagttccagattgaagatgtgacaatgtacttcccctacgaccacatatacccagagcagtacacttatatgcttgaactcaagcgatctctcgacgccaagggccactgcctcctcgagatgcccaccggcaccggtaagaccattgttctcctctccctcatcacaagctacactctctctaagccccaaactccactcaagcttatttactgtacccgaaccgttcacaagacggagaagacccttgccgagctcaagctcctccatgactaccagctctgacacctcagtccccaggccaagatccttgccctcagcctctcctcccgtaagcgaaagagggatggaagaagaagaagaagaaagaataagaaaaaggacaaaaaaagtaaaaaaaaaaaaaaaactaaaacttaatt

SEQ ID NO: 255484 - DNA, 764 bp, Cannabis indica
tcctacttaataattagacataatattattatcttagaaaaaaattaacttttcatgcatacactaggggaaaattggtcccctaaactcatattttgcaacattaagagacaaggccaatattaagtataaccccaaaatacacatacagctcaaaatcaccatatctctcttctcttctctattctctattctctcttctctaaatcttacccactcacaaacttcattctcttcactcatttcatcatcaaataacataaaatttttatacaagctacactacattctcttcactcatttttgaacggagcatcatacacgaattcaatgggtaatgatttttctttatttaatctttttactggttgttatatttagtttataatattattttgatgctcgatctattagttgttgttgttttatgtttttttttgtgtagaaataattgttcttcaagttttttgcgttttttagtttctggtttattttcgtctggtctaataatgtatgatacaggtctgatggtggcccgatggttagttcggtttcaaggttagggatgatgtctaaataggtatgatggtcagtccgatatggtgtccgatgctccttagaattttgttggatatgtcaggtccaatgttatgtcggatgggtctgatggttgtgtctgacaattttttgttggaatttatcatatgtggtccgatatgggtctgcttgtgttcgatgcttgacagagttatggctttttgagg

SEQ ID NO: 255485 - DNA, 1635 bp, Cannabis indica
cagaatttgaaaaagacgctagctagacagggttataataaagacatatggcgtagtttattacaaaataaccgacgaccatatgtgtttttcaattaaaattaaaaatcacctacagagtcagttattacaaataacttacttcctaggattttttcaattaaaattaaaaaaaattatcacatacggagtcggttattataaaataaccgattggataggtattcttattaaaactttattaatttgaccgaaaaaaaaattgcctctaaaaacttatattgtagtacttatttaaatttttaattacttatctaaattagttttcagaaatttcaattaaacagctacgcatacttttaattaggatgatggacaacttatttggatatatataggattcatctctatttattagaaatgtattattctctcatgattttgaatgaattattcattgttaaaaagaaaatgataaaacaaataatatatatttacactttaaatataagatttctttggtacgtagattttcaatgattgtgcacaagtacagatataacaaagccacacaaagcaagatttgatgagaagaaattaatgttaccatatattgacttggaaatgattccatattaaacaaaggctaatcaaagaatcttttttttaactgatcactttatagttgttcttgtcttatttaatttccttttcattatatttatatgatttgacatataattgcattggagagatggatttggaaaataaaatgctataaagatgtataatataaacgttaattaatcaactcatacatatagttatatataataaatatctatatacttccaaatcccatgaactaagcactttctggcactatatcccacgtgaacaagctagaagaagttttttttgttagtaatggagtgggcggtgcgctaatctaatattacattttctccttattttagtcagtctaatttagacccagtcaacttaattagagactgagggagacatatattagaaacaaatccagaaaaaaaaaagtctggaggcgcagcctaaggaaaataaaataagaactataatatttaaaaattgtttatgaattttcgggacttgctaaatgccaaaatcttctaagaaatgtgatagaaaaatgtgtcaacaaagaatcatatgaaatgtatacatatttatatatgtgtgggggaacctaagactatgtttgaggttggaagaaaagagagtacgaaggttgcagagtgaaaaatgacagtaaaattaaggaggatgaagatgcactatgaaatacaactgcttttagttaaatttttagtgacaatataattttttttgtgacttaatattaattttagtcacaataaaaattacttatgactaaaacatagtttttaggtacaagttgtcattaatttacttttagtcacaacaagtattgtgactaaaaatacatttagtcacaataaattataatttttgtgactaatacctttaaacacaaatgttttagtcacaacataaaaatgataatttataattagtcacaagttttttacttttagtcacaaattttgttgtgcctaaaagtaaaattttttgtag

SEQ ID NO: 255486 - DNA, 716 bp, Cannabis indica
tggagtttggcttttaatttttttaatctccttctgttgtcgagccacaacatcagacacttcccttttctttctgccgaatagtttagatgccctagtgaggaaattgcaaatcataaaaatgcaaattaactactatttttttataactaaagaaacaacatttcaagtactagcatacccagcagccttgacacgttcaggatgctctggtgtcccgagcacctgcatcaggatattgttttgaccctagacttgaatttgtccctgagtaaactgctcctctaattgagcctaatgcacgcatatattcaagcaattagtatatgaattatatacactaactcatgagtagaactcaattaaggattaatatatacttactatcttctctgcaatttccttgtcgtaatcagtgacaagttttagtactcttggtgcgagatttgatccaaacacggtggcgtgggggatcttgaacgccgagatcatttttctacattattttataaaaattaaattagtacaaattacattttaaagcacattattagaattcaagcattacttaccacatcttcccgtacgttcaccattccactccgacaacttcaatgtctagattgaatttttgacgaacgttccctttgcgccttactcaattcctacaatgccaaaaaaattattagatacatgtacttgtatttaagagttta

SEQ ID NO: 255487 - DNA, 590 bp, Cannabis indica
tggtcaatttcaaatggtaataacactgcctcctttatcaaaaatattcacaaggctcgaatggctcttcaagcttggaagaaaaaatacaagacagtgagtgaaggtgacattaaggacttggaaaatagactccaatggctccaaaatcaacccatctcggagttgttcaaagaagaggaggctagaattcaatcccagataaggatttcttggtctaaattagagagtatgtggaggcaaaaatcaagggagacttggctttccttgggagataagaatactaggttctttcatgcttcaaccatcattaggagaagaagaaatagcatttggtccatcaaggataaagaaggtagagtttggaaggataagaagcacattgcggaagtcattaacaatcacttccaagagttgtatacttcgtcaaatccgaatattaatgaagatctggcaagtttgttttccaatcggattgatgctttgtcgaatgaacaacttgttgctatcccttcggatgaagaaattaaagcatcagtttttaatttacatcctctaaaggctccggggccagacgggttttccggttg

SEQ ID NO: 255488 - DNA, 648 bp, Cannabis indica
ggttcggttgacactgaaataggaaaaaaaaattgaaagtgtatggatttaggtatcaaaaatagaagatttaaaaaataaataggctcaaatggtgcaaaaataggggagatatatgggctggaataagggtggttggcgaaggtggcgagggtttgggtatgtctctactgttggtgtttggtttcgtgaggaagacgaagtgaagaagacaaagctgatagggtttttatattaccttataacgtcggttattaggaaataaccgatgggatagactattcaaatcaccctcagaaatatctctctcccaaccgactttaaatggtatagtctaatgatctatacatgtaatttctataaaaaaaatagcttctacaggtcaatcttcaataagtggacacttttacactctttaacttcctttattatgaaaattgtggaaaaaaaatctctaaaatgttgttttgtagtagtgattttaacacaatatatgatactaatttttaacaaagatgttcatttaaatatttttgccgcaaattattctttaaaaaataaacaacgtacattagatatgtggcaacagtgagtcctcaccaaccaactaccatcggagatgttgttagtttgtggtaattatgaatt

SEQ ID NO: 255489 - DNA, 1062 bp, Cannabis indica
tgtttggagaatatttagagtatttatttaaaggtggtatattaaaagaatagtcaaaatttttaaatatattttaacaaattttcctttctaatttggcccctcattagtatacgaaaatgcacattttaaagcattgatcatgtaataaaattaagttttactatttattttcataagttttaaatgaaaattttattaaatatgaaaataatattattacttaacttttgtattatttttcaatgtttaaaaggttttgaagcccaaagaaatgaagctccaataaacttcaacaaaacccacacgtgggaagcttcttaaatcatcatatgcatatatatcacttgcgtcatttggatttcaattcatgggtcgtaattaagtaagtatagcccaactcaacatttagttcaccatcaattgtgacgagcaaaccccaaccaactgctccacttactctatgcgcatcactatccagtctccccacttgcacataagcccaacttcccaccttcctccgaatttgaagccacactttttcttattttattaatctctcttattactattttatctatactcattttagtgacaaaaatgagtgtattagaatagtaatattggtgaggttagagtgtagcttttgtaattcttatttctaatattgatattgattcttttgtgcttcatctccatatcttatttattaaatttttcttcgtcttctaatttttcttctaaaattaatagtatcttttatataacttatgtcatgcttttcttatgtaagttaggctattaatatattggtatatttattatattatatgtcgtttactgcattctgccaatagtggtattttatcgatttatgatatataatatgatatgctgtgaaattagaagtaagattcaatttatgcaagattaattaatttgtgcttttaacatatatatcttccagttgtaattaatggtgtagaattgcaactgcgttcgaattaatatcggtattagaataggatttgtataactacatttctaccttaccaaactctt

SEQ ID NO: 255490 - DNA, 775 bp, Cannabis indica
agcatcttggagcattgtcattcagccccatatggtggccattttggtggacaacgtacggctgtcaaattatttcaatcgggttattattagccctcaatattcaaggatgcccatgattttactcaaagatgtgatcgcagcgagtgggaaatatttcagcaaggaatgaaatgtcactaaattgcattttggaggttgaattgtttgacgtttggggcattgacttcgtggggcctttccctcaatcttttggaaatctttacatattggtggttgtagattatgtgtccaaatgggtggaggcaatagctagtccaacaaatgatgctaaggtggtaatgaaattgttgcataaaaatgtcttcacaagattcaggacgccaagagcattgattagtgatgaagggacttactttgtgaaaaagtcttggctgcccttttagccaagtataatgtgaagcacaaaatagccatagcttatcacccacggaccaacgggcaagcggagatttcaaataagaaatcaagggaattcttgaaaaaagtggtggatcccaacagaaaagattggtcccagcggttagatgactcactttgggcctaccgtacagcgtttaaaactcctcttgtcatgtctccttattgcgtagtttatgggaaggcatgccatcttcccgtggagttggaacacaaggcattttgggcactaaagaacctgaatttggatctttcagctgctggaaaggcccggaaattgcaactaaatgagcta

SEQ ID NO: 255491 - DNA, 1234 bp, Cannabis indica
atcaccttccatcatatcattaatcatagcatgattctttccattcttgtgcaatattccttggccgtgacttgtggccacaccaactggaggattagtttccatattagtctggtttgaactatgaccaggtgcattgtccccagaatttgccgccggcgaccaccctctgttcctcagccaccttgctccgatattcttgtacgatctttgtggcgtagcaatcatgaactcaccataaggcttcgtaatctggtcaataggctgctggaataaacgactacagaacttgtcggagtggccaattacaccacatatgaagcaaaaggtaggaactctttcatacttgaagtgaacccaaaaccagctaccattttcatgagtgagcttcagtcttctccttaatggcttcctaatatcaagagtaacccttacccgaaggtaatccctccaaacaccaacaaaatttttaggatcgttctctaaaaacttcccgatcgtatttcctacccctcgcaccgtcgtttctttcatacatcctggtttaacatcatgtatttgaacccatatatcaagatgatttaattgaagagaagtcggatcccctcctaccggtagtcgttcaataatcagttgcatacgatcaaaagtccaaggactcccattgatgactctttgaatgtccacttcgtgatagaattgaaataagaaacgattatcttcaagctttttgacaaacattcccattccgggttgccataacgaggctagaatgttctgcatcttatcgaaatctatcatacggttcgacaaaaatcttcctacaagacaccatctgtcatcgatcccctcttcctctccctcttgtccgactggtagctctgccaaatcttcttcttcaatctgaaaactaaagacatcctccctgccacctaccccacttgaactcgccatgagataattagaaaaaaaacacactcttgaactcactctttcaacagcaaaaaaacaagaaaacagaacaaaactctcacaccatgtcaatagacaggactttttccctacatttaccaactattgttaacttctttctctttagttggctgactctctcattttcttctctctccggtgactaatctttgctagctccagtgaccgatctagtccctcgtacgaccgctactagttccgacgaaactattttaccgttgacagacaagacggaccgagg

SEQ ID NO: 255492 - DNA, 1068 bp, Cannabis indica
ctaaatcttagagttatcacatttctattttttttttgtagcaaaatccatttgagtttactttggtttacaaatttgagactagatgactactgtgtaaaattttcaagttaatatagtaataatttagttgatatttaacggtaatatctaactgacactttaaatttgaaaaaaaaataaagataaaaatgttttgctaagcatgtatcattttcttaatggtatatttaaattattatttttttaaaaaataaagtttaatgacttggaccaatcagaaattgccacttggcaatttacttaacacttaacagccaggtacttataaaagttcaagaagtgccaaaaattaaatttagttatttatttgtaactattgtggacattgtcccatatagaataaatagtagagtattgagccatatataagaacatagactactccactcatcaccaattggttttgagatggaacctcatgattctcaacagtaactaggtatagttaaacttaggtattctatatctttatggctaagatatttttttttctagtttataatattcaataatatttgtatgtatttgtaaagtctttttttggcaagttagatgccaaaatattttttattttatggtaagatatttttgcattcacacccgattgtcttaccttgtatattcggtttttattgctcttttctatgttaggaaagatgcattttacagctgatcttttcttgtatagaaacttcttgtaagagaagcaattctcttatgggaagttggttttttaagtaaactttgattattgtctttttcttattgaatttgattgtgtcttgatacaatcagaatatataaactgtttatggcaggaatcaagacttaatagaagatcgaacttgattatagcaagtttcttttttctggtctgatttgttgcgtcagatcccgattctgatgctgcagatcgtgtttatcttaagaaaattttgtacagctgtagattcaatcttgtggttgtctctagggtttctatgttctataaatagagcctagaga

SEQ ID NO: 255493 - DNA, 652 bp, Cannabis indica
ttagaagagataaattttttgaaagaaaataagctgtctttccaacaaagatgatcacatagattcttttttcatatattatttattatactttgctttattattatttccaaaatgtaataaaccctttaatttttgattctgtgaaccattagcataaacattgcataaatcatccttcgaggcctggactaccttactttacccatccttgtcttagttggacttagaacaactagacgaagcccaacttaagttgggtccactgggccaggcccactggtgtattgccaaacattcccacgtgccagaaacagtagctgacacatcatatcatatgccaaagcaggagatggggtcaatctggttccagtgttttagggatgattgtcacgtgagaacacatggccttgtgtgtcagaagaatatgttacttcatattctcattcatatcaattatatgttttcagttatcaaaaaattatatgttttcattttatgtggttcactccaaagtgatgctattgtttaatgtatacaaagtaagtaatacttattgtcaaaagtagtaaataaaaaatagggatattggcggttaaattcacttgaattttactgtttgtaacacttaaccacaaaaattgaatttttg

SEQ ID NO: 255494 - DNA, 632 bp, Cannabis indica
ttagcatcctcatcattaaagttagcacggataaagctttcatcccactcaccattaggaagtgtcaaatccaccacacacaattgcgccgggagctcggacttgtcataaattttgaaactgcgaggccggggtagccacggatcttccactattcttacacgctgcccatttccaaccctccaccgagtacctttgtcaaccacttccttcccccaaaccaagctacgccatacaaaagacgcatgggatccacactttgcctccaacacccctttatttggaaaataactcgccttcaacaccctactacacagagaagacggttgacgaagacaccgccatatttgcttagccaaaagcgcttggttaaacaattccaaatctcggaaccccaacccaccctcttctttcggcttacacaagtgtttccatttacaccaatgagtttttcgttgtttttctgttgacccccaccaaaatctagcagccattttatggatactattaagagtactcttcgggagacgataacaactcatggtataagtcggaatggcttgaacaatagccttgatcagtacctccttgccgcccattgagaacatactagttttccacccacgcatctt

SEQ ID NO: 255495 - DNA, 3440 bp, Cannabis indica
atcaccatagaatctctccacagactaattaacaccaccctcgatcgaatttatgccaaagcaaacactcacacacacacatatatatatacacacacattatataacaacacattaattccacacagaatttttaaaaataaaatgggttggtttttaagagacggaagcagttcgtcatggaaagttgggtggacagaacgaaccgttgcctcgttaagctttcctccttcttccattaatggcagtagtcggaatcgttgtcgttttactctccatttcgtcgtacgccaattacagatcacacatgcaccaaaccgttatcggtttcaagatattcctcttgttcttgcctttgctgttgatttttttggctaagtttgttaccaatacggcagcgttttggtgattaggactccaaggacaaagcgtgagtatttttcttctttgtctttgtttgaaggtgcaaataataataataataataataattctccatggggtgtggctatggtgcttgttgtagttatggttttgatctcttataagtcttattttcattctaagtggtggcctccaatttggggatcctactattagttttctcatcatcatcttcgccactatatacaaatgttgtaataattctatatatagttagttacatcctcaccttattttgtttttgttatatatacatgataatttttcttgatgtagttatttatgattgtatgtatgtaaagtttcttaaaactccgaataatttatggaatattacttgcacgtttgattaattttttcatatatgaatgctaagcaaatgttttgtactttgcaaattaatatacgattttggagaaatctatattacatcctcaaaatactattttgatacactttcggtctattacagcatccatgctagtaaattttttagtaattagtgatagtttatagtccttttgacttggtttatcattgataaaaagaaaaaaatgtcaagatttgcgatataactaaaaggacgtttcaaatatcacacatgggttattgggcatgccaatttgatgtaacccatttaatatcttcgtattcgagaatcaacaaactcgaccccgcattgttcacaaaatttcgggtctaagaatttttatttctaggaaactctttattttttgttcattcttgatcttttctatctctcctttcctcctacactacctcctctagttatatcaattttttacccttaagtgctaacttaacaagacgttttgatatatgtacttcacttcctacaaggtatctttacatactttgataagtgtcttttattttatcttaggtgtccatattttatatctcttctattcataatgtgtaactttcttaattagaatatttaagtcttttgtcttgtattctatatcttgaatgtaagttacttttttgaatgtatcttccatcctagatgtatgtaattcattttatttatatttataagttacttttttgaatgtatcttccatcctagatgtatgtaattcattttattgtattctacatgtcatctgaacgattaataaactgagatatgagtcatttggactgatcgattgagatatgaaagtcatcccaaccgaacgattaagatacaagtcattcgaccaatcgcttgaaatacaagagtcatccagatcgattcgaattaaatataagtttgatttgttcgattcccgttcgacttttgatcttgattttcttaatcttttatgagctttatttgtattcatgtattgggtctttcctatgtttttaacatcatgggtctcttgttgaccattgatttttctcccaaacaataataaaaataatattttgtttgccatccgttaaacttgcaataaaatatttaagtgtttattttattattgtattccatatttaaaaaaaaataaaatattgacataaataattataacataagtatacataattagaataaaaaattcttaagataaaaactgtacatgccttttctctaacatgaagttcacacagatcaaattatgtgagatttttatttggaagaagaacaatgggttttaattgtctcaaacccaaattctaattttaataacaacctgctttttagaatttatttcaatttgaccaatctatcaaatcctcaaatctctgtcgtttctgataatcatctctctccttctccatacccaaattcctcaaatcaaatctcactttcagatcaaccaatctcctctcaccatccattttcctcatacaagatttcaattccctcaccacctcactccgttgaccacaacaatccccaccgttgaccacttccgaactactactcgacctcctctcctccatccgttgccgttgaaattctcgataactgttcttctcatccagccaaggcgtcgtcgtcaccaccgccatcgaatctctctcctcattaataccacctccaaacgacgtgtcgtttgattctgaactagacgaaaacgacgccgtttgttggacccgatgattcccggatttgatgagattgtaaacggtgcgatttggaactaaaaggaagactttgccaggtggcagaatcaaatcgggttttaacacgacccatgggtacttgaatatgtcgggtcgggttatgaggtgtctcgggtttcttctcatgacttcggctactgtgatcgggtcttttaacacctcaacgaaccgacccggatgaaccaacttcactttccctctctccccaagaatttcactcattctcatatgtatatatattttattaattagaattattatgaaaataaattaaaaaaaaaaaaatgaaaatatggaagattttcgaaagggaaaatgaaggtgtgttagtttagtacttatagaagtgaaaggttaacatattcgatgattatgatgaaagagtcttaggtaaatacgtaaattaatctttgtttatcttgttgtatagataatgattatcatgatttgttatgataaataggaaacgacattggttagaattaaatttaatgatcctcaagctgactcatcatctgaaagcataaaataaaataagtcattgtgtatgatacgatgtttaagtatttcttgtatatttctcaaaaaaaaaaagtatttcttgtatattatttttcagctaattatttgctgttataatatttgaaaatattaaatgaggtatgggtgtttactgatcgatttagtccaatatgctggttttttaaaattcgaaattgagttagatcaattaaatgctcaaacaaaacaaaaccacttacaaatagattggtttagttcgatttgtaatttgtaagtatttaaaagcatgtttggtattgttttatgttttttgttttaaaaaattgtttttagaa

SEQ ID NO: 255496 - DNA, 1265 bp, Cannabis indica
acaaaaaaatatgataaatatcttatattaaaagtattattcaatattgcacaataatactttttgtgtaatatttaatcatttacgtaagtttaaaatataattattgtattaatttttataatatatatttacacttataatgggagtgttatccacgttttcgaatggatgacacgtggcataataaggatgtaactgatatgcatcatcagcaacccaagccttccagcatgtgaaacccgagaccaaaccagaggcgggccccaacccttcatacttctaggagcctcagtaacggagaaaggatcctcctactcctggaaggccattatgccgaccagaagatgaagcgaacaatgccctctggacagttaaggaggcacatctagatagggaagcccaagagattcattggaagccctcctatggtgatgtggctatcttctgatgttggggcctaccctatcaaatgttgtctcctctaccagaacatggtaatgcgtgtactggaaggagatatacactcctttttgtaaaataatgaccctctgacattgtatggacgcctctgcccaaaaggtagcatctttctgttggccctaatgtcttgtattttatgtatttactctaatatgttggtaatcttttaccaggatctagatttactaacaagtatgttgattaacatcctaaatatgaatatatctaaaacaatgaaattaaacacataagagtttagaaaaccttacattgattgcaacgaaatataatgactccttctgctcaaatctctaacacttgttcttttctatcgcaaagtattatcaagatccgagcctggatctttttctctcaatcgggtttggttaccactgtcttattcactatgattgagtacttgacttgctatgtgtgggcatggcactctatcactaaagatctgttgaccttacttctagccaacgacagttagtcttgataataagcgataaaggatgtaattcagatatgatatgaaaatataaataaagaacacaaggttattaaagaggttcagccccgagcagttcggtaatagcctactccccttgatttgtattaacttaaaacaaagaatacaatgtttcctctcttaaagctttacaatgaaatctctgagtatgctctcttagatctctctcaagtaattttctcgacccctttaccagtgagaatggatcactatttatagggctacatgcttgagggaaggtttccttttt

SEQ ID NO: 255497 - DNA, 1287 bp, Cannabis indica
tacaatgataaaagtgacttttgtcggcacattacactattatgctagcaaaaataagtacttttatcagtgcacttttgcgatggcacgtaaaaagtatcaaggggaagggttttacacgacttaattgttatgtcagcgcaaattaatataagttgcactggtaaaaatacattttgtcaacgtaaatgtgtgctgctataaaattgtgacctttttaattcccaacacaatttaggagatgcactgataaaaatgactctttccacttccagcgcattaattaacgaattgagctgagaaaagtgatatttcttgtagtaatatcacactacaagaaatacgacttttgctagcatatttttatgttggtaaaagttgggttattatgttggcaaaatagttattatttttgccagtatatttttgcgctgacaaaagaaaggttgacaaatttatattagtattgaaacttttgccaacacaaaacaaaattcgctggcaaatccatatatattatgtataatgataatttgttattatatattaggaaaataaccacgtacattattattacaaactaatatataagaaaaagacaaggtacgtaggtacgtacttaagtttcatgcatgcatggagatatatacgtacttacacatacatatatatatctttaataattaatgatcatggattattggagttggagcatatatcgttgaagaggtggttttctctgataagtatcaactataaaagtcccaagaaactctttatagaagaaaggtctatagagtggatgattatcatcatcattggtaagagcttttgctggttcgactttgcaactgtgacaaggataaatgaagtttccaatggttgtccgtacaacatttttgtttgtcacaactctgtgttcagcactttttagcttcccattgctgataatctaacatatcaatatgtaaacaaactataataagatatatcataatgattttttggagaaatatattctgatgatttattatactgaaaataactaaataactagcatatttaattaattgtgtgtttgaatttttcagttgttttaaatttgatctaaattattacaattactaaattgtactcttttgtccaaaatcatcaagaaaacccaatttgatagatgtaatagttggaggacataataaatcgatatttgaagcgaaatttctttattaattagcttttgtaattgttacataatctttattagaaaaataacggtacaaatacttt

SEQ ID NO: 255498 - DNA, 1445 bp, Cannabis indica
attgtagataaggaattatatattgcaaagttaggttgaaagagtaattattaagaaatgaaaaagagaagtaaatgtatatacatactttgcttgtaacagtagctggtaactggcattcgtcaccaaaaagaactgcatgccttatccctggaagttgaagaggtatggttgactcacactctttcagttgtgcagcttcatcaatgaccagaacagccaatggctctattttcataaggtgcagttgaaaagaacccgatgcagtggaaaatatcaacgaagctctttgaaaacagaactctgttatttcttccttagatctaaaatttggaaatgtgagtttttcaagagaaccaagaagggttctcagtatagaaaggcactgccttccaaccgaaagcaaggaacagttattgacaaatgaatcagcagaatcagcaattacttcgggacaagataacatctgtcttatttcttcagaaatcactgtatctccaaatagaagtgtttcaaaacgatcaagtaattcagtaagggttaccatgttcagaaaattttgatccaaaatgaaactttgaggtaaatgtgtacataagatccaaatgtattttcttagctgcttgacaataaaaacaaatctttgtctcacataatcaagaaatggattgaacttctcagtgccttctacctctttaatgctagtttcacagcactgtttttgttgcgcttttatcaattcatttttcaggaaaacacagtactgagaaacccaacgttcaagtaagtttatcatagaaggaaagcaatggttccagccatccgcacctaaacactccgcaatcctttgaactcgatattccaaaaatatatctttaatatcagagccaattttgagtctctccatatcgccaaacagaagtatgtctcctaatgagaagaacatgggtttagatgctgcaactatcttcaggacttgagaagccacttcagttattgcaacatttgtgggtgcacaaacaagagttctgtagttcatctttaagagggaaacaagaagagtagcattggctttcgtctttcctgtcccaggcggaccccatataagctccaaagcatctctgctcttgcagtgcatcatgtgaagacaagcaagaactgcactagtctgagactcattcatattggaagatagactcttcactaacttctcctcaaatctgcaacaattctcctcaggacaggtaatacaatttcccttaacctgtttaaatgaaatgaaacagatgaagcatgtttatggaaaaatgtgtggaaatggaaaaaaaaaaagaatttattaacaataaatgaaacaaaataattttttgatgaaaaaattgatcactttacagaatcttttggttgataaatatgcagccaagggtcatagttaactattttta

SEQ ID NO: 255499 - DNA, 613 bp, Cannabis indica
atattgaaacgtaattattattttgaacttaaaaccatagttttgaaaaaaaatacaaatgtataattatttgttttctttttttcttttttttttcacacttgtctcccatgtttattttaaaattagtaaaaaagtgaattgttatttgtttattaacagaaaaaagaatacacattaaagtttaaaactatacgtttttggaatttgattaagtaaaaaaaaaagtaaaatctattttcccagttcgagtgaaaagtgagaaaatccactgtagtgttgggttggagatgtttttggtaaaaaattatagattataccaaatctttttttattaatttttaatatataaataataatatattagagatttatatggattataaaaatcatactaatattagtgaatcatatttgggaatagaaatttatctaaattatcaattttgtggaagataccaaactgaagaagatgaagaggggggaagaagcagagacaatattacgaagtaaaatatacattagtcttgtcatcttctcactcccacactctctttctattcaattttggcaattgtcatccatccatgtatcagattagaaattatcaaat

SEQ ID NO: 255500 - DNA, 1497 bp, Cannabis indica
ttattattatatatttttatttaatttaagttttttttttttctaaaagcaaataaataaaatagtcaagtccattcttaaaccaaacacaggattactttcagcataatccaatcttatccagtccagtccaatccttttcaatccaatccagtccaatcctgcgtaccaaacgggccctataagattaacaaaatattatcatttttaaataattgatgttattaaattaagtaatctattcgtatgaaattaagaattcatacgcaattacactaacgtttaggctatgtttggtgggagggagggagagtatgatggatggagagattagagaagatggagaggattattgatctcctttgtattgtttggtattagatgtgaggtatgaagggtgaagaaaaaattgattagtagaattacaaaattatccttttaaaaataaaattttattacttttttaaaggtagttattgtattttgcaaaatgcattttgtctttttctacaatccttccaaatttgaagggattaaattttgaagatttagagggagaatgtctccctctatctctcctctccctccttctctccctcttgtcaaacaagtgatttagtttctccttccatcactctccctcctccatccacctatctccacctcctaccaaacatagtgttaaacatatattatattttaaaataaagtgtaattattttataatgaatagttactaccttagtaattatatagtcacttccaaacaccctaaagataattaataggtcttaattacacttttcattttcacggcttaaaataagaatgaagtataaaagcatctctaatagtaaaaataaatttaggggatacttactgatatggatagatgaaatggcaaaatattaaaatgctataacattagagggaaaaaaatgtcattttaagaatctatgtgaatgctctgcagtagtattaatgctatcattatttctttaataaaaaattaaaactaaaaaattattgttactaaaaattaagaaacatgtaaaattttaataataattaaaaaagttatatatttaataacattgatatatataatttgttacgttttaaaatatatgtaatagtaaattaattaatttatttaatgagttattttgaaatagtttatcttaaatttatattagattgtttaattataattttgttattttaaaagttagtgtaatttttttggttaagaaatttaaattgtatgttatgcttatttatatgaatatataattatagtattttttgaagaatgttatactattagagtgcttttagaagtaaaagtgtcaaaaataatataaaagggagataaaataaaatattatatttttggataatgtggaaagatgttacattgaagatgctctaagtaatgctagagacacacttaaactatatacaatttttacacataataatgtgtatttaatttta

SEQ ID NO: 255501 - DNA, 848 bp, Cannabis indica
aaataaaaaaaaaaactaaaaagagatataaaagggatatgttagaatagaaaccctaaaatctctctttctctaccgatctctatctctctctcctccatttggtgcggctatactcctcaatctccaacctttttttttccttcttccagccatggcgatcaaatcctcaagctttaccccagtaaactacgaagcccttaaccgctttcccatccctcgttccctcttcattcgattggcggcgtgctaggtgaacgacgatggtccaaatggaccacatcacagtgttcgcaacgcctgaaatttcgagctacgggaagagcagaaatctcgacgtacggccagagtagtcactggtggtcgttcgagcctcgatgaacgacggccatccctttcgcacctcgggtttaatctttttggggtttgatattgggcagttctttgtagttttttttaatatagatttagagattttagttttgatttaaattgtatgctctttgtgtcatttttttttattgtttatagatatatcatttagtttcaaatgatgtataaactttttagtttactcattttgtttgttgattctagattttttattttgtaaggaagaaaatagagtttgtgtgtatagatttgttattattaattatgtacagatttttgatgaattgatttttgatgaattgatttttgattttgtataattgtgatattttgtaatattgatttattaataattttatatctaaaattaaaatatattaatgtataattgataaatatatagttgattaattttctcaaaaaaaaatatagttaattaaattatttttataaat

SEQ ID NO: 255502 - DNA, 3826 bp, Cannabis indica
ctttctaagtcaatatcaatggttgatcttagatcaaaagatcttaatcatgacatggttaggttcgatctcaagagtgttatttgtgttctttgagcttttagttaaagcctaccatttggttcgggtcaaacgtatagtttaggaacatgacaatacaattgagtgggagcactaaatatagatatggaatatatagcttctatttggacatagaagtgaaatgatgatttccttcgagcttgacttaatagagataaatggaagagttcttttttcaatgattatatttatattagtttactaaaatatcatttataggaagctaagtgttttaaggataaaatacattgaggggtaaaacgttaaatttgtccctactcggtgtaatcatactatagaggatctttgattattgggattagaacgatggttaatttttatagcatatctatatcgtggaacatatagagcgttctacataattgagagtgcaatttaaaatctatagtggtgcaaggaggaattaataagttagggaatgtacttggtaaattctagatctgcttattggaagctcggttatataggtccatggtccccatactagttgagacaatactgcttgtaagacccagttaattgattttaattaatcaattataattctaaaattagactatgtcttatttatgaattttcactaagctagggcttaattgtgaagaaaagaggtttgaggatttatttgttaattaagagacttttcactaagctagggcttatctaaggtgtaagtaaactacattgttgattatcatatcagtggaaatcttgtgtacttatacatcgtgtgactttatttaatcacataatcttggttactttccattatgttgacaacacagtaatcaagaatatcaatgtgataaggatttagatgaatttataaatcaaacaaatgataatgaaataaacatatgaaccaattaatacattaaacaagtaataaaataaatttaatttttattgataaatgaatattcaagattacactgaaatagaattttagttagggcacaaaatccaacaggttttttacagggtcgaaattagtttcgcatggttcacatgttcgaaactggttttggagattttgaaggttgtgtagtgtggttgctccaattttcgatgttattatatatttttattttaagtttcttttatattttgtttctaggttcgaaactggttttttacttatcttttatttttagattattgttgtgcattgtgtgttgttttaattatatttgtgagcatttttttagtgtactttttttttttcatttggttgagtgattatatattttttatgttttgttttcataatcttcattgctattgtgtgatgaaactggtttttatttggtttcataatgttcatttgttgttgtatgatgaaacttatttcgatttatttgttatgcttttattcaaatagaagctaattcctttagtaaaaatacaataaaagatgttgctaaaaattttaagtgttcactatgagaagaaacttcgtccaattaaaattaaaattcgtaagaaggttatcaagaagaaaataaaaagtaaatctgatctaagttgtaaggattcatttttggtatgttttttttatttctttttgaagtatgttaattttttttaaattatcctctcgtaaatttatatgtttatttgtagtttttgaaactgtttttttttaatgtaattaaggtttttttttttttttgctatcttaagaaactagtttcattgttcatatttttagttagctgataaatgttattggtttctgtaagttggcgtcgaactccggtgacgatgagaactccaacgacttttccagtgagtttttcggcgacaatgctgatttcagcaacttttccagcacctacaacaactccggttattttttcgacaccgattgtaactccagtaacttttcctgcaccgacaataactccggcgacttttccggcaccaatgacaacttcgacaatcactatagtttcatttgttttttaaaaaagaaatatgaggagaatttcaatattttttatggtaatacaaatagcatattccatatattttaagtttttttttttaaaaaaaaaaatttaaaataccatgtttgtcctattaagtttccttaccatatttatgtaaactaggtttctttttctcatatttatataaatagcctagcttaaattcaatccaatctacaaaagtacagattcgatcgattattttgaattggttactttttatattaaattatttaatatttatgaaaaaatatattttttatcacataactagaaacaaaataaaataaattattgtaattttatgtctcaaacaaaaaattaaagtaaataaaataacaaataacaaattcaaagaaagaaaaaaaaaaatgtatgtataaaaaaatatttaattttgttttaaattgtatgtaaaaaagaaaattatatataagaatggaatataaatttgatctattaagtttttaaatatatttgtgttatatgtattcaatttttaaattactatttttttttatatttaaatgttaattgtatatataattttttaatttttttttaataaatatgagtagattgaattggatcgattacttttacaggtaaatcaatatccaacccgcataagtgcatattttgaattttctaatccaatccaatccgcacaagtgtggatatccgcactttgtggattagattagattgaattagatcggctattttataaacactccttaaacaaactattgctaagcaatatatcaattcaattcacaagaagaatggatgatataaaaaaataaaaataaacgactgttttttgttgttttctgttttttttttttttttttgtaatcttttatgctttctttattgtttttgtttttttttttttattgtaatttagttttggtaaataaatttttgtacttactattgttattagcaccatgtcataccgatatgatacttataattagttaacaacttttttggtcttttgtgttaacataaatccttaatttatatttattgtttgataatttgaaaaaaaaaaatattgctattaagcactaatgaaatttaacaccactataaaatgacatcttaaaaattgttaacggtagaatttttatatattaaatcaatctaacgaaaaaaattattatataatttatattaaatcatgttgaattcgatatttcattgtatcaataataatatcacttcgagtgttgtctagtatagttagtctttctataaattttcaacaaccatactctttatttcctatgattaaagtatatatacttctagaaaaataccaataaataaataaagaccaatacataaaatcaatatgttacaatttttattagtgtgttggaagtcaaaacttttagttttgatattttcttttctgatattaaatttttattggttagttctcttaggtatctattctctacatgttcttagaatagataataaatttttataaataaaagaaaattcttcactgattatttaaccttgttacttttaggggtgttcataaaataatcgatccaatccaatttgcacgatccaatccaatgaaatctgcaaagtgcagatatccgcacacttgtgcgggttagattggttgtgtggattggatgttgattgacatgtaaaagtaaccgatccaattcaatctacacatattt

SEQ ID NO: 255503 - DNA, 531 bp, Cannabis indica
acggagcataaattgctacagccattatagtggcgtcctattaaatgtttaatggtttttgataatttttattaaaataaaataagtaattgaacttaatattaattttcaccctcccaagattcattcaagcgcggctagaataaaacttcaaaataatacaacatataaatgtaattatatatgtttatttagtatagacacctattttattttatataattaatttttttatacattaacaacaaaagatgagcatatgggagagcctcatcttgtttatcattatgtctgctactctgtttacaccaatagcaatattatatatctcgcaaaagtagtaagtcctataaatgctttttaccatttttttcacccataaaaattatcatttttgtcagtacaactcataatttcactggtaaaagttatttttctcaatgcatcttgtgaacagtgttgataaaagagatttacgttggcaaaatatattcaatcttatattttttcctgctcttctgaaattttgtt

SEQ ID NO: 255504 - DNA, 935 bp, Cannabis indica
ttgggttttgggtttttaggttcaggatttagggttttggggtttgaggtttggggtttggtgtttagggtctttagcttttgggattttttggtttgaggtttagggtttggggttttgtgactagggtctagagtttaggatcttggacctagtgtttggggtttgatgttttaagtctggggtttggtatttgggttttagggtttggggattaggggtttagggttttagggtttgaggtttggggtttggtgttttgtgtttggggttttgaggtttggtgttttggggattaaggtttgggatttagggtgtgatggttggagttttggggtttggagttttgaggttttggggtttagagtttgagatttagggtttagggtttggcagttttggcgtttggggtttggttatgggaatgggatggggaatgggaattcaaatgggaatgggcatgggtcaaggaatgggaatgggaatgggaatggaaatggggattggggattgggaatgggaatgggaataggccggggaatgggaatgggaacgagaatggaaatgggaatgagccggggaatggggatgggtcggggaatgtgaataggaatgggaatgggaatgggttggggaataaaaatgggaatgggaatgggaatgggaatgcaaatgggaatgggaatgggaatagggatgggaatggaaatagaaatgggtcggggaatgggaatgggagtggctcagagaatgggaatgggaatgggaatgggaattagaatgggaatgggaatgggcaagaggattggaatgggaatggaagtgggaaagagaattggaatggctcagggaatgggaattggaatgtgaatgagaatgggaatgggaatgggccagggaatgggaatgggggtgggaatgggaatgggaattgg

SEQ ID NO: 255505 - DNA, 1131 bp, Cannabis indica
acagaggtgggcctattagttaaatccttagccatttcctttccaatgcccatgttagagtccatcccaaaggactatagacctccaccactaccacgatcagttaatccctcaataaatgttccttcactccttagttctccccaaggctaattgttttttatcgaaattgtgttcaccaccatcggagttgcaatatcatggtcctccctacccaccatttcatcattgctctgttcgttgtcctcaccactggcatcaatttctcttgcattattaaggtttttttttcttctgtttcatcattactttcttgttgccttctttcctgcttgtatgtcataaaataatttggcattaggtcatcttctttcaaccaaggaccatactttagaaccaactgtcaattatctgctcttttcattttcacttcactattgcaatcttcttgttcatgtccccaaagtccacaaatgaaacagagcatatgtattctctcaaactttatttgaatccaatgttgcttccctctacttgggatatatctttcaataaaaatgttttttcacaacgaaaatctaattctcattcgaacatacccagtcagtaacattcattgttcattaccctattttaattcttcaatcatcccgaccatctctccaatgcacctaatattgtttcttgtgaaagttgtgatgtggatccccttcagtttcacccaacaagaaaccttgtccaacttcgcatcacgccattagccagagcccgaccactcttcaagcagaagtattcccccattgaagacccatggttgttttcccaagactgtattagcatcaattttagttttatacataatcccaacaacaaaactctccccttcttcttcaaaatactaacattccagtcaataattcccttccacattctcccaaaaattatcataaataatttttcattaatatctcgccgagaaataattctacccaccaatgacttctccccaaaagatgatgcacctacaatgttctcctcctaattctcttccagtgccatatcaagtttatcagttcttaaaacaatgttctctacagccccctgttagataaattaacaattaacccaaga

SEQ ID NO: 255506 - DNA, 3263 bp, Cannabis indica
ctctacataaatatcttcttcttcttttttttttatctattttatactattcctaataattttataacaaatgaatatattttgtttaaattttttaaaaataagtgagggtgattttataattgagaaatactaaaaagatattagtggtgtctaatactcttatcatatcagtattatattataattagtgtaattaaatattagatcagtattatatcgctattggtataattaagtatcgggtcgtatcgctaacccgtcgcaagaaaatacgtctagaaagagttaaatggtgccataatactctttataaaatgttggaatgtggattatataacagctcattgaaaaaatgacagctcgagttttgtttatcctttaggcaatgagttttgtttctccatttgtttctcacagctgtaaaatagtgttcttgctaaattaagctctagatttagtttatcatgagccggtagtactggtagactccattatcttagattggtttttttttttttttatgtcgtggatgtaatcattgtacatataatgagatatatataatatgggagatgattttgtccgtgatgtactttcatgaaatgtattccgtggtacattaaatgagtgtcacggtacgtttctactttttaaccctaattatctctagatcaatttcacccgtcagatcaaataactccctcatctgacagctgccgtacatcacggatttcaatccgtgaaagtacaataaccgataaaatcatatccctatacaatatatagttatgtaaattttccatttttatttttaaaaaaattaatttctccttagtaaattattgtttataatttcataattatttaatggattatggataccggggagctgacatgtttgacagagaccgtagcccaaacccaacaaaccttcattagttttagtactaaacccataaaacgacaacaaaccacgatataagcgtttttctttttcgaaggaaaagttggcactcggtggcactggcactcacctcctctctccctctcccactcaggtatgtttttctctctttcatttgtatttttctctggggttttctccggaatggtggtatttgttattcgtttggatttttagcaattgggttttgtttgatcttcaaataattttgatcgcattcaaaagattatatttttttacattaaaaatagtattttgaaagtgcataaacccccaattctacttagagaggtaagaacaagaatgtacatagtggattcttgcttctttgagaatcatataatagtttaacagaagaattctgggtttttgatttattattattctatggtcaattgattatgggttttgttcgccattgaaggacattaatgggggatgctttagtgcaagatttgataagtgatttgcctgaaagcattatagagagtattctaacccgtttgccaataagagatgctgtaagaactagcattttatcaagtaaatggaggtacaaatgggcttcgattactcaacttgtgtttgatgatagatgtgttaccctacgtagtgaccgagctttagttgagaaaagtctcatagactttataactaaggctctctttcttcacaaaggaccaattcacaagttccagctttctacatggtacttacagaactgctcagacatagatcaatggttactttttctttcaaggaatgacattaaggaattggttcttgtattagaagaagaggaaggagagggcgagttgtttagagtacctgctagtttatttcattgtaagaaattgacccgtttggacctatttcgttgtgagttagatccaccccttacttttaagggattctcgtatttaaacagtctcactcttcatcaagtgctggttgcccctgatgtaattgagagtctaatttctagctgccctctacttgaaaatcttgctatatcttactttgatagcttagctttaaacataaaagctccaaatctcaagtttttgttccttgagggtgaatttaaggacataaaacttgagaatactccacttttggttgctatgtctgttgatatgtatatgacagaggacaatgctgagcactttgaacaaagctcaagttgcaattttgtcaagtttcttggtggggtgcctcttcttgagaagcttattgggcgcgtgtactttaccaaggtgagagattatgattatctaattgtttcatttactgaattgatactctttttccctctatattcttagtccatgacaaggtgaatgctcaagttatttctgcatagtagacttgtttgtttgctgacccttttgtttttagtatttgagtataggttatgacttgggaaaacttttagttacctatgaacatttgaaggtcattgaattaaatcaagtgtgtttcgaagataggaaagagatatatgtggttcttcgcttgattatgagctctccaaatttaacagaacttcaaatctcagtaagctaccttaagaattgatttttcagtcttaagttacaatggcaattggtgttaagttttgtgacactgctgtcatggttattcaaccatttaattttaaaattcttctgattaataggggcccacaaatgctgtggatttcgtgattgcgttggaagcgtctgatttgaaattttgggagaaagaaggcctttcaaagtactctttcgaaaagctcaaattagtgagaatgacatgtatgtctggtgtgccacatgaaatggaattcatcaagtttttgctcagcagatctccagtgctcgagacaatgagtgttgccccttgttcattgtgtactatagctagacgattgaatatgctgaccgaaatggttaagtttcgacgagcatctcctcaagctgaaattgtattcacccatgaataagtattatgtatgacaatttcattatcttccatttctttatcaaacgagcttttagcagagttagtatccccagttgcatttatcttataaatcaataaaatctatagtaactgagaggatatactgcttttgtttgttgtcacaaaaatagtaaaaaaaaaaaatttccacccagtgattggttgccgtgctaatgagagcttgaatttcatgttcttcccttgatactgatagctagctgtagtgagagaaagttaaaaaaaaaaaaaaaaaactcaagacaccttaagaacaaggaggcctttatttttg

SEQ ID NO: 255507 - DNA, 729 bp, Cannabis indica
caaagcatgaatatcgtacataagagaaaaaaaaatgcaataataattgcttgatacaaaaatttggtttatgttcttgttgttcatcatatttagaaagtatatggttgtgtttattcaaattttatttttactaaaccgaattggaaatacaattggcagccataaatacctttttattgatctaaaatgtagctacttctaagagcatcatcagctcatttaaaatagctaatagctaaaaaaaatagctaaagtgcttaaattgaccatttacctcatctcattaagctctcataaatatttttttatatatattatttcaagttgtcataaatttcagtcaacacaagatagttatgtgacttatgctcccatcaagcaaggagagcttgaaccccgagcaaaaaagtgtatttttaatctcaactcagataataaatttgtttgaggtggagttgctagacaatggcgatgtttagtttatgcatttttaagttctgttttagtgcgtgtttttagtaattttgtgatttattgtttaaatttatgcttgatatttacttttatttgattctcaagtgaaagatgaagagttctttgtttttggtcagttatgttgttttttaagtcttttcatgatgaaatcgatcaattatcgaatgagagaattttgggattcaaagttatgattagttgcagttcacggtgcttaaaaattcagagttc

SEQ ID NO: 255508 - DNA, 632 bp, Cannabis indica
aaatctcatatgctacaaacttttcctagtttgtcaaaaacaataagggtgtatgacccataatgcaaccataagggtgtatgacctataatgcaaccattaaatgccattctaaatctttgtgttcttgcaaaaacccaaagaataaaaacaagttcaaaacgtttatggctctgataccataagggttcctactataagtaaagcatcatcaaatataaagataacttaagcaatattctcaaaagaatctatacgacttacagctctgtagcgtgacttacgattatgaatgatagattacttagttacctttatacttgagtgatacctaactcataatagtaatatcttcggtatgacccataatgcacactatcactatttcagaaatcgcttaaagaaaatttagaaaaatattttgagagaagaacactagaaattttatttagtagactgcttttctgatgcctcttataatgaaaaggatgggtctataaatagctatttacatggggtaagatacaaaataggaaacttcctaaaaatttcctacaaataaacaaacatacaaaaggacaaactgacaataaatggacaaactaacaaaatgacaaacagagaaaaagaca

SEQ ID NO: 255509 - DNA, 547 bp, Cannabis indica
ggagttcggaatcaaaagatatgcattttcaaagtttgaactcaaaactgcccaaaaactcgagggcgggccgcggcatgcccaagccatgtcgcgacacctggggcgaaatcccaggttccaccaacaggggcgggccgtcgcatgctcagaccatgtcgcagcacttgggttgaaaacccagaaatcagccaccttcaaacacgatttttaacaacaattcaacaccaaatcactccaaaacttgatcaaactttcaaattaccaaataaagttgctagcaaacattataggattaaaatatacaactcaagcattaaattccaatattaaactaccaaaatcagattgcacaaataacccaaaaatcaagcttcaactaagcaaacttcaagctcttgaacttgagcttcaacttactcaattcaaacaactttccagcagcaaacaccctaagaacacaaggtctcaagctagaaaatactatttacttttactccaagctcaacaacataaatccccaccaattcatgcaattccataatca

SEQ ID NO: 255510 - DNA, 631 bp, Cannabis indica
gttttagaaagattggactatgtttttcaaaatgatgagtgggatagattatttctttctgctactttgaagcatttggaattttttggttcagatcatagggttttatctatctatttgaatcttacggttacactggatacaacaaaaaaagaatgagatttatgtatgaagctttgtggaataatgatgatgaggtgacacagatcattgtatcaaattggaagggcaacgtccatggaagatttagacaacgtaatagataatatccaacaatgctcagagtatttatctcgatggcatcgaagcaagtatggtgattttcataaaaaattagaataaaagaaaagactctttcaaaagctcagtttcaacccacaagagtgtctaaagaatacattgataatctagaacgtaaagtggaatatttactcaaaagaagaaattttatggaggcagagaagtcgagtccagtggctacaggaaggggataacaatacaaaattttttcataaaagggcatctgttaggaaaaaggggaaccgaatattgggactttttgataaacaaaatgtatggcatactaaacaagaccaaatctctttcactgtttcagagtactatcaagagt

SEQ ID NO: 255511 - DNA, 1744 bp, Cannabis indica
ttttttattgtataaaaaagacatagcatcaatgccatggtgtggcattaatgcaaatttcaagaatagcattcttttatctctaatggtatagtatctttatatgttgccatataagctttccacctcataaaacattctccaaaatattaccattagagatgctctaactgtgcagaaattttgactaagcacgtgcgtccaaacactcacgcctataggatggtgctgcccccaataagaagtttgtacccccaacaaaaggagagagatgctatttttatttaattaaagaaaagtacattttatatattgtgttatcaaatattaaatttattttaaaatattttttgaataaaaataaaaagtattaagacctaataatatgttgacacgcatatatcttatgtaaaagaattaattgacttaagtacacttaacaactaaaatgtacaactgcaacaaaattgtaacaaatgtattattatcacaatttttgttgcggtcatgggtaacaaatcaaaaagtgaagggagcttcaccataatttaccttaacaatgttacactatcttgcatattttaggtggaccttgaaaaaacactccaaaaatcaacaaatatacttataagaaaacaacaaaagaattccaaatcatagaaaataatgaaagggaagagaacataattgtcgaagataaatatcaacgtatataagcagttataaactaaagaggattcaaatgagctaatgaatgaatgtggttaactaagctatctaaatatttataggaagtaccaccttgtttcaagcaacttattgccatgtccttcagttttgatactctgcatcttatctcctctccttctttctccctcatcaattttgtaatcattgcctctatatctcctctttccaaaatctcattctccaacttaactcccactttccatacatggctcacatatcttgaattcacattttgatcaatgaaacttggcttacagatcattggaaccccttcacaaatactctccatcgttgaattccacccactgtgagtccaaaatgctccaacggctaagtgagccagcacttgttgttgtggagcccatttcactatgtgcccacgtccccccaaactctctaaaaacccatttggtaatagttcgagccactccgagccatggatcgacctgggtctaaccacccacaagaagggcagattactattggctagaccccaagctatctccaagaactcagcctcactcaatactgcaacactcccaaagctcacatagatgactgaattcggtggctgagtgttgagccatgagatggagctttggtcttcgactaagaagctacttgaagaataggctaagttgtatttgtgaaatgggccgattgggaacattggaatcgagagctggttagctattgagtctagcgcagactgttcaagttcttcaaatgtgttccaaatgatccctgaggaggccttagtctcactcaccactctacttattagttcatagaatttttctgggtattgcgtttctatcaccggtaggtctttaactttaagaggtggaaattctaccactggctcctctagtcgggaatctaatataagtacaccaagattaaaccacagttgtcatccatcacataaaatgaagataaacagtaagcaaagtcattttctcttatatacgaactagggaattaagccgcgctt

SEQ ID NO: 255512 - DNA, 1297 bp, Cannabis indica
attttaaagtataaaaatgaaaagacatggtaattaccttattattattatttaaaacaatttaatctattacaatatatttttttaaaagaataaaagtgatgtgtaattttttcatttaaaaaaagtgtatttttttcaaaaacaataaaggttactgtatgggaaaaatcacaaagtttgaactttgaactaaccaattcaaaagaataaaaataattactattttttctttctaaacttctagcacaatcagattttgtccttatgtttgtttaaaaaaaaattctttaaaatattataattacataattatgattcttctgttaggttttgtttttttactgtcaaaaattaacatttttaccccttgaactttgatcaatacaaaattttccctcttttataaaaaaaattaattttgaaaattgtaattctattaattctgaaaaaaataagaaaaagtattaaaaaactttataaagatattaaaatttattacaaaatattaattttactttaaagaaacttaaattatttctaagaaaatatttttaaactttattttatttataaacacgtatcttaaaaaaatcaaaccaaaattattaagaatctaataaataatttaaataaacttaaattttttgaaggaatatcaaacttattaattaaaaatttaataaaaatacaaaattatttgaaaaaaaaattagaaattaaactaaaaaatattatgtttactctaacaaatctacatttttttgagaaaaacaaaatagacacaaatttattctcgtaaaatttagtttttacaaaaattaaaattttaatatattttctttaagatcaaaatgattttttaataaaaaataaataagtttttacatcacttaattagttttaaaattttaatttattttttaatttccttaatcatccaaaataattttattaagatctaaattaattttttaagatttactaaaaaaaataattgaatctttctcacttttatttttgaagtggtacgatttgataattatcaaagttcaggggataaagttgctaatttagaatgacacgtcaacatttaaacgaaataatgggacggaacataacagaaggactaaatttctgtaaacgtaaaagttcataaggtattcttgacaagccgtatattttaagaggtaaaatcaatattgttaaaaattcaacgagaaaaattcttaattattcaaaaaaaaaataaatggaatcttctgattttttattataagacaaaaaaaataaattt

SEQ ID NO: 255513 - DNA, 590 bp, Cannabis indica
aaacagttggatagaacatcctgtggtctcagcgcggaaccattatgaaacaccttatttctagcattccacaaggagtaacacaagtaggctgcaaactggggaaaagaagggccacccggggagcaaggagggacgttcgggggcgaatggatgatccaattaactaattccagcatgttcccgaacaccaacccctcactgcgtattccaaaagggctgctaaaccagcaggctctagcaaacgggcattggaaaaacagatgagggatggagtcttccccatctctacacatagtgcaatgcgactcattgccaaacacggttcggagacgagtgccacaagggagaatgtccttacaaactttccacagaaacaactttacacgttcatgaaccggggccttccagatctccttccaaacattagagcacctccccaaccggggtttgattagagaaagataggcttggctcaccgtgaaggacccatcagtggaatctcgccaaatgagattatccttgtcaccatttgaaagaagctctacacgcccaatctgactccccacccgaggattgaaccattcggc

SEQ ID NO: 255514 - DNA, 982 bp, Cannabis indica
tttttttagcaatttttttttctatatacactaacaaacaatcacttaaaaatatatcttttatttaattgcgaagtgtaatcttcgcaatattcatagcagaaaaagattgatctgtagaaactgaaagtgtagaataagagttactattttatacacaaatttaattttttttgcttttttttattttttactaactactgacataaataaatcagaaatggttgctaaaatcgtaaaatcaagaagttttccactttttttttaaaccaattttttgaaaaacattgtgaagtagtaatggtctaactagcaaataaaccaaataaatattattaaagaatataaataaatactttaaaagaaaaatgacacttattattctttttataaaagaaagtaataattgtatatgattttgttagtgctagtgtagacaaaatagatttatttgcttcaaattttactttgacttttttaaaggagccgccatgtaataattattaaaaaaattcaactacagtatattaaattttaagacttagaattacatatatataattacatatatgctaaggggccaattacaatatactaaagtttaagacttaaaattacatacacataattacatatatgctagggggcatggccaccataaataaccatgtatgtctgcccctgcatagaaggatgtgaaaccagtgtgtcaaaatgtaaagttaatttgtctgataaatctgacgtggcaatgacacgtgttcgagatcgtattgttcaaaccatatggatggcttataataatagaaattagttaattatattctaatatttgatgatacattcaagattaaatttatttttatgagaatatattgtagactaatagttattttatatcaatttttagaataaaaaatttatttaagaattttcatgaataaaatttttaagcagttataatattatacattaagataga

SEQ ID NO: 255515 - DNA, 1479 bp, Cannabis indica
ctgctggttttttacattgtaacggttttgtttattgcttgactgtgtaataactttggtctgtaaataaagaaatggttgccctgttttcgggtaagcctttgctatcattttcattcctctgttctttactttcttgctcttagcatctttctacaatttctggtttttaccttcttcatggtatcatcgtttttgacttgcgtccatggaatcttccacttccgatcctctggccacaatggctcccacagctccgactgcttccgctgttcactggaaccctttcgcaaactcgttgtcatcttccctcaccatcaaactcgacagactcaattacctctcatggaaatcccaaattgtacccattgttattgggcattatctagatcagatcttgttctctgaaatcaccccacctcacaccctcatcaatggagctcccaatcctgagttcttgcaatggaaaaagaaggaccaactcctcctttcttggattcggtcatcaatgtctgaaccaattcttgcttctgtggcaacctttacaacatcgttctcggtctggcgggcacttgaacaaaggttttctagccaaaccaaggcacgactcctgcaactcaaaggtaatttctcaagacttcaaaagggaacattatccattgttgaatatgtggagaaagctcaagccactgcagatgctttggcaattgctggttcacctgttacaacccaagacttggttctccaactcttgaatggattaggaccagattttgatcccgtggtctccggcatcagatctcggagtgataatctctcttttgaggaagtccaggccttgttactctctcatgaaacgagattagaacatcacagtagcatcactgatctctcactcaagatgcaagcgaatttgagtgtcaatcagtcaagatttgggggaaatcaaaattctggtatgtcttcttctcgccctcacaacagtgaaactggccgtcctacagggcgtttctttggccgtggaaatggctccaaactcatgtgtcaagtgtgccttcgatttggtcacacagcggctgtttgtcactaccgctttgacaagaacttcatcacccccaagtatggtaattcctcttcctcccaagcttttctcactgaaattgagtccatttatgatccataggccttctctaccactatgattcctgatatgggagatgatgatctctggtacatggacaccggtgctactaaccatgtcagccatggaaatgttaatcttgatcatgctactccatattaaggaaccgagactctagctgtgggcaatggtaagcaattactatttcccatattggtcagttatccataccctctagtcattcctcttccttacatttacaaaatattttacatgtccctgctattaagaaaatttggttagtgtctctcaactcaccaatgataatgatgtctttc

SEQ ID NO: 255516 - DNA, 659 bp, Cannabis indica
gcataggattgcattaaaaaatataatataggtaaaagttttgacttattttaattgtttataattattatataattttttttattggaagttcttttcaaagaaaattgtgagtaaattaggaaggaggtaagttatttcaattttaaagtaattttttaaaagtcatattaagagaagctacaaattctaactttttcttaacggatttctgaattagaaaatgagtttttatttcttatccaaacactctcagaattccattgtagaaaatagtgaatcgaattatgcgtgtatttgatagaatagtacatatttatatacaaagctaggagactaaatgggaaattactaaatacaaataagaaactattaaaatacaattttccctaatttctttacaattaatattctaacactctccctcaagctggagcatagatgttaattatgcctagcttgttacaaaaataatcaacccgcacccccattcaaagcctttgtaaaaatatctcttagttgttttctggtcttcacatatcttgtggagatcagaccttgttgaattttctcacgaacaaaatgacaatcaatctcaatgtgcttagttcgctcgtggaacacgggatttgaggcaatatgaagagcagcttgattat

SEQ ID NO: 255517 - DNA, 870 bp, Cannabis indica
gatcatgtcaacccaagcctccgcaaaccccatccgcaataaaatagctcgtaagaaagaccattccatcctatcgtatgccttactcatatcaagttttaaagtcatacaaccattcttcccttgttgcttatgtctaagataatgtaagatctcaaatgaaacaataacattatcagtaatgagcctcccaggaataaacgcactctgaaactccgagatgatcttcgataataagtgtttgagccgattagccatgactttcgaaatgattttatatgacgcattgcaaagagcaataggcctcagatcgcccataatagaaggagacttcttctttggaatgagaacaagattagtatcatttagaccccgaggcatgaccttagatcggaagaattcctgaaccatcttaacaacatccgtacccacaatatgccaacacttctgataaaaagcaggcgtcaaaccatcaggctcaggtgacttgtctggatgcatttggaagacagcatgccttacctcctcctccaaaactggctgtaaaagaacaacattatcctcatatgttatggatggttgtataacatcaagaacatctgcataattcgacccccgagaatgaaaaatattagtgtagtagtctaccataacctgagacatgcccgacccccactgaacccaagaactggtctcatcttttaacgcctgaatgaaattattttttcttttggagctagcagcagcgtgaaaatacctcgtattttggtcaccctccctaagccacaattgcttcgatctttgccgccaaaagatttctttttgatgatagatttcaacaagatgtttcctcgcctccttatattcaga

SEQ ID NO: 255518 - DNA, 797 bp, Cannabis indica
aaaaaaacaatatatgaagtaatttcccaatttaatattatctaattaataaataaatttctttaataaataattattttatttttatatataagtaatattaaataaatatatataaaaatatttttatttttattttttcaaataatatataagatttctgtactcaaccaaacagtttaatttaattaacaggaatataattacatattaccctacacaaccaaacacagtttacacatttctctataatcatattctccttcataatattctctataatcaaattatttgaaacacctcataccaaacgccccctatatgtatatttatcaaatgggaaacttgtaatcgttcatatatattccagaaaattgaatatggtaaaaggtattaccacaattaacaaccttatatgtgtaaaacaaaactttatatatataaacatatatatatatatatgtatatactaggtggtagagaacgtgccaaggcacgtaaaaaattaatggattaaacattttttttttaatttttagtaattatatttaaataagaactaataaattttttaattaaattagtaacttagatgtaaaaaaaaattaaaattataatcgaaattacgaaagagatgtacatattaatgacaaaaatattaagatagtatatcgtgattggtgtatttcaatatcagctcccataaattttaatttaataaatgatttagaaaaatactaactaattattatgtatggtattgagcaccttaagatgtcacatagcaataatagtac

SEQ ID NO: 255519 - DNA, 1111 bp, Cannabis indica
tgaaccaaatgacacattaaataagtgatgaaatttcttctctctctttattaatatttaaaagataaagattatattgaaatagagttttatttacggcataaagcccaacatcaacgccgaagttgacacttgggactaggtcgtgcatccaagttgacattttctcacctttgctgtttctcatttagtttagaaaaaattgctccaaagatcttcaccgtcttgaaaaataacgaagattcaagtaaacttggggagaaaaccacaaacccaagtccttggaaataaggcccaacgcccaggttgacaatcaattagggacgctgccttcaattgctcaaatgccaaatctgatgcaaccattgaacccagcatggtcaaaaataatagagaaacctcgtcctcaagtttagaagccttggaggccttggaagtatcaaaaatagaatctcaagagtttagtctcaaggccccagcgcccaggtcaagaaatggcctagttcgttgggttctgcttatccaaatctaatgccaattcaaccatccgtcaagtatttcacatgtgaaatgatccatgaagtcagatcaatcaaatatacaacttcaattttggttcatcccgaagccaaaagtttcgagtcttccattttcgcaaaacagcaacatctccgagaatgtgtagtgaccagcttcaccaaacatataaatggactaaaggttttcaaaccattacttaggcatctcaaaggacccccttggaagattctacactttcacaacgttcagattgacgtcagatgtcaacctgggcgctggatgttaacctgggcacttgggttgagctgccttcagtaaaacaatcataactcactcaattatcgtctaatttacacgattcaacttgaatttttgagatatttaagccctctatcatatcatacctcacacacagtcaaaattttgaagttatctttgtcaaaatttacccccaagggagttacaaaaataagctctaaataactcgtagcgggacccgccaaacataaaaaattagccatcactaccagaaagctaattttcatcgttagatcatcatcaatggtggaaa

SEQ ID NO: 255520 - DNA, 528 bp, Cannabis indica
cacaaatttgttctaacagacaaactgattttaatgaatattattatagactaatattcaaatcaacacatatttcataattttgaaaaaatgatatagtttacaatcattcaacaatttcaagaattcatggatttgagctttgaaagtacaaaatctgtttttaaaatggaagttttattaaatccctttatcctataatcttgaacattaatccatgaagaatcatcatatgaatgacattgattacaaagtgatcaaatactaaattaaaatagctcgacctagtgtagttttcttaaagtatatatgttactatgatgacacataattaaaacattaatgaaatcagagaattttcataaaaaaatcagagaactctaaaagtaaagaggccggatacctcaccaccattgatgcctgcttcagagcatggtctcaaagtaattgcatgctcaagataaggtgtacaatggccagtaatagtatattacttctaatcatctcaacacctccttaataatagta

SEQ ID NO: 255521 - DNA, 631 bp, Cannabis indica
ttttaagtataatattgaaaaaccgcctagatttttttaattatattattgtacaaatagtatttttaataatatgtatgaaattataataatgctaatatgtaatattttaaatgcttaaatttaaaaacacaattttttttatgtattcaaaagattaaattaatctaatttaaaaatttatcttttacttaaataaattctttttaatttttttaaagagtattgtgtttgtcattaaaaaaaaaaatgttcaactacatggaccccttcctttctgttgttgccagcgctgggccgagccataagtttttattataaagggcaagcaaagcccgaaggctgctatcccaataggtcagcaggcggaatgaggagagggcccctgcatggggaactactcttttgatgggtatcgcaatggctttatttgcggtatttcctatctattattttagagatttataatccttttattttactagacgtaatttcaatgaattaaattcacaaaaactattaacttacttttcactataatgtgaaccttttagttctatgattttatatacaaagaaagtgatataaaaaaaaaatatatggaaaatatgttatagagttaaatatttaa

SEQ ID NO: 255522 - DNA, 615 bp, Cannabis indica
ttatttcttctcagagccgcacagtagcccattccaaaaaaaaaaagaaaagaaaactattggatccagccaatgatttactcctgccaccttcttccccaaccacaattgcaagggaacgtcaaagagatcgacgttaaagatgagctcagtgttcgctcacggcaagggaacatcaaagctcttcaaggctctcttggtcgactacggcgaagagatcgacccaggcaatggctgggtattcggcgatcgacagcttcaacgaagctggaatccaagatctttgccccgaaaatattcaggtacccacttcctcttcttcatctttttttcttgattcctgctcaacttttatattttttttctcatctttctttttatttctgtgtatagatctctgctatatggtgttctctctctttctctcttgttgaatttctctacacacgatggcgaatctcgggatctgtatcgattgggctcaaaaatggccaggcttgagtcagttctacaattgcagtttgttagggacagagatcagaacttgaatcattgtgactaagttattttttctaattttttttattcaaacgctcatacccgtaattatgggtt

SEQ ID NO: 255523 - DNA, 804 bp, Cannabis indica
ttttcagcactcttgtccccacacttcagctcaaaatggaagagctgaaaggaagcatcgtcacatagttgagatgggtcttaccttgctagctcaagctagtatgcctctcaaattctgggttgatgctttccaaacttctgtttatctaataaacagacttcctacacctgtcttgcacaacaaaacaccctttgagacactgtatcataggaaaccagattataacaaactgaaaacttttggtgttgcttgttatccatgcataagaccctatcaaagccacaagtttcagtttcattcattaagatgtgtaaatcttggatacaatgattcctatagaggttacaagtgtctaagcacaacgggtagagtgtatatatctaggaatgttgtttttaatgagagggaatttccattccaatctggttttctaaacacctttgcaccagaaaagcaacttgtcatccataatgagtcttggtcacaacttcctaatctgcattttagacctttcagtacagtctcccaacacaatactggttcagcaccatctcgagcacatcctgacactacaccagtaacagcagcatcttcccaacatcaggtaactgaaacaaactcacctagctcaagttttgatacacttgaccatggaactgttctacctacagctatacctgatgcaccacatattgtgagcaagatgcagtcaaagacaactcagtacagatgctgcaacacaggaaaaacacagctgccaggacagaagaaacagccactgcaactgagactccatcctcc

SEQ ID NO: 255524 - DNA, 584 bp, Cannabis indica
tcatttactgttcaatagagaaagtttagctagatcagttaacagtccaaaaatattatgctgaaatagattcaatagcactatttacctggccaataagagaaaaatacagttgcgcaatatacagtttatcttcaggcttctggtatcgagcatcaaattcgtgcttgcacataaggaccaccagaattctagcagcctacacggacagaattatatgattacaggttacaaaagaaacaaaactatgttagtatacgtattcatcctcccacattatccattaaactgtctttacctttgctcgaagagacaagtcatcatgatcccaagttaggaaaagttcttgaattaggacagatgagaggtagttcctaaaacacaaacattgttatcaaaacattaaaaatcaacgattgcccagatatgactttgattgctacattaagacccaaaattatttggagttctggagtttggtgcaactgcaaggtagttgaggaggggtatatgaagtacctatgtgaagggtctctcccgggcattttaactaaaagatcatgactgcatatgatctgcaaaaa

SEQ ID NO: 255525 - DNA, 764 bp, Cannabis indica
ttgtcactatgagtagtcaaaataattgcaattcaaattgccaagaaacaccataaattagattttatttggagagaagtttctcaatttcaccaaacacttcattaacaccaaaatatcatcttaaacttaaaacacagtactgaaacaaaatatatgcagtaacaaataccatacaaatgggattcacatgaaagaaaaaaaaaaaaaaacagaactttttttatcgaacagaactcagaaaattatgagtttgtttggccctggcccttacgtttcaaacggaaaaagattgagaaccaagtctcggaacgatccccaaaaaaaatcttctatgattattaacgcattcaaattacagcattttaaataatagtatacacaattttttaatcttagaactaaacataataaactaattgtgacagacctaactattattaaaaaaaatagataatttgatcctcattagcagcctcaaaatcgaaagtagagtacctgttgtgagtgaaagggaattcctactccccgatctccgatgtaaggttgataatttaagtagagtaggtgttgtgagtgaagtaattgttaatccggcaatgagtgaaacggaattcctcgtgtccgatctccgatctccgatctgacgttgataatatttctagggtaaggtgatgaagaaagccaaatgggcttctcatattgggctaactcaatcactacaccatagaccattcccaaccttttttcttaaaaaaaaaaaa

SEQ ID NO: 255526 - DNA, 517 bp, Cannabis indica
aacctctcaattagaatataatttacttggtcttaagtatattcttggatagaaattctactctatttataagataaaatattagtgcaatcattgcatatgatcatataactaccacattcataataaaatggttcaaactaattcatgggtcaaacattataacaaaaataatcaagctgaaaaaaggaaaaaaaaaaaagacagataaagtagaacagtctccatacctcacaatacgccaatcccattagaagtatgatccattgaccttccctagatttaaatctaagcctccatactcgtataagagtgttgatgtataaatccaattgggagcccttttatatgaaaactagagagagacactcttatatgatgcaaactaaaaccgcaccaagaaaaataatagaactaaaaccattgttactttatatttatacatatactaggtgattgttacgtgccaagtcacgtagtgttaattttatttaatattttagttttttattttaat

SEQ ID NO: 255527 - DNA, 641 bp, Cannabis indica
ttcatgaaattcaatataatgagcatacgtatagaaagctatatatttgggttggaatttttggcataacacaacatcagcataagtatgacatgacataataaaaatatataaacttaagtttgatacgataagaaaaatatgaatttgggcacaattaggtaaaaatgtaagctttagcataaacaaacatacatgaaagcattgcaactacaaagagagagaagccattgtagtggcagcttgggccctgttacaaaaccgataaatgatgtgatgtggggcaaagataacctctttttgtattgtcggaagcaaaggccatacaatacatactactgggggactaccaaatatgaccgaagtaaatatacacaaaattttattaaatattttgttctttccccaacataaagacaaataagctcgtacaaaatttcctagtctatctcacgactttctgtgcggggcccattgggccagttcagctcagcatgagaaggccataaggccattgggccagttcagctcagcataccattgggtcgctcaccttcactttctcttttctctgttttaccatttgttaatctttcttggtttgtacccaaattatactggggtaggtccgtcaccttaga

SEQ ID NO: 255528 - DNA, 721 bp, Cannabis indica
tgccaaaatattttttatttttggtgcgattttttggcttttataaaactgattttctcacattaattaaatatttttattgctcttttctattataggaaagattctatattcagctgccgttttctttgtttggaaacttcttgtcagagaagaaattctccgatggaaagtttacgttttatggaaactttgactattcttatttctccttaatgagttcgattgtgtcttgataagatcatgccaaacacactatttttggcaggatatgaagtccaaatacatgatcggacacgtttttggcatgtttccttttttggtctagtttgctgcactagaacttgtctctgatcctgcaaaacaggattttcttttaggaaagtttgtacagctgtagaatcaattttgtggatgtttctagggattctatgttctataaatagaacctagagagcagcaattcgattcaactcttctagctttcattttttttatatattttcatttgtgaagagagagttctttttgtgagaacctagttgttcatctaggttttagtgtttatatatttattcttatactagtcttagggttggttagaacatcttgattgaactagagaaaggtcttcgagagaagacttgatcaagccttacttcgggaggaagtaagcaataacacttcaaagacgaagggagtttgctgtttgaaggtggtt

SEQ ID NO: 255529 - DNA, 1022 bp, Cannabis indica
gtcctgtccagagtcaaaatctaaatcctagtctagttctagctcatgtcttgggtcctggtttgggtctcaggtccagttttgggtcttgggtcctaagtcatgggtttggatccccaattcagatcagggtgctaggtctaagtttgggttagcgtcccacctgagtgcaggtcccgatccttgttcggtaccggtccttctctcgagtcatggcctagtttgggtctaggtcatggtttggttcttaggtcccaagtccaagtatcgggtcctggtctcgttccagttcccaattgcgatcccagtctgggttctagtcctagtccaagttcaggtctcggtttttgtccaggtttgggtcccagtcctaatcttcgttcgagtctgagtcccagtttcaagtcagagttttggtatgagtccgggtctgggtccaggtttcagttagtgtttgggttcgagtcttggtttgagtctgggtcttggtttgggtttgggttcttatacgggtctggcaactggtctaggtctcgagttagagtcctgggtcacaggtcctggcacaagtcttggtccgggttcgcgtctagagctagtttaaggtccaggtccaattcctgttctaaggtccttattccacttcttgttccgattttgagtctcgggtccgagtttgggtttgggtcctagtctagaaatggttctaggttagggtccttgtacgattccaagatctagacaccgactacgggttgggtccaaccctaggtcgtgggttaagatccgcatcccaatcttgggtctctgtctcgtttcgattcggatcctagtctgggtctgggtccaagtcgaggtctgattcctatatttagataccgactatgggtcaagtccaagcctcgtgtcttgggtcctgggtcccgggtccaaatctagatcctggtccaagtcaaggtctaggtccttagtttgggtcctggttcgggtctcaggtccaggtttgggtctaagtttgggtc

SEQ ID NO: 255530 - DNA, 876 bp, Cannabis indica
aaattattgaaaattgagttcagggtcttattttgaccattttgaaaaatatgggctctattttgtcatttataaaacagagagtccaattggtaatttttgcaaaacacatggtccaaaatagtatttatcccatatatattaacgactttattacacatattataatagtgaacaataaaataatacatacaataataataaaaaaatgagaatttatgattatataaaattgaataataaattttgtcaaaaaaaaaaatacataataaatggatgaaaaaaattgcactaaaaaaatttgaatagtctcatctaaatttgatagtatttgacaaatttaaataattatgaggtgatttaaatgtactaaacgatcgaattactactcttataaggacatgatttattttattttatttattttattttaacttttaaagtaataatttgatttttttaaaaaataataatatagggaacaattcctatactataaaaatttaaagtttgaaattatcgtggtgggaagttttacatttttcattgttattatacatattgatgattatattacataaagtataatagtgaacaataaaataaaaatatctataataaatatgtgaaaagtttggcactgaaaagatttgaatgatctcgattaccgttgatctatccaaatttgatctcaacctgagggcgaattatcgtctgatcggtaggagccaactacctgatagagaaacttgttggatacttatattgtaaagggattgggtatatgcttttaccagtatatatatttttaacaaaggtaaatagttcaaaagacagttttttctgtggtacaattagtttctttttttcattttt

SEQ ID NO: 255531 - DNA, 733 bp, Cannabis indica
gtagtgctctaaatacaagttatgttttgacaacgtgcatggcttggcattaaagaatatggacttagagaatgatataacacgaaaaataaagggaaatttgataaaatttccattcattaggtttaaatttttctctaaactaaagctaactaatattggccaacttttgtctattccttgaattactcctatttttcaacacactctcactaggggtgaaaatcggtcggttatggtcggtttttaaaattttataaccgaccggtcggttacggtttttattttacgaaaaccgtaaccgaccgtttagaaattataaccgtataaaaccgaccgtacggtttttggcggttttcggtttggcggttttaggcggtttttggcggttttgggcggtttttggcggtttttggcggttttgacggttttttggttaaactatttttttatttcaagaaccgaaaccgaccgccgtgtcaaaaaaaccgaaaccgaaaccgaccgccaaattcggtgatgacgtggaaccgaaaattcggttacggtctggtcggtttgatggtcggtttcggtttttcggtttttatgaacacccctaactctcacctctcttcctaatatctctctcgctctcttttgggaccaaaggactactactaatccgactcctaacatagtcctaatccaactcctaacatcaaacattttggactctctcaccaacccacga

SEQ ID NO: 255532 - DNA, 736 bp, Cannabis indica
acaatagaaaataaatagatatttcaaatatttttaagagttgtgatttaaaaaaatcataaatgaccatgtaacaacattagaggtgaaaagaaaattacttttgtcaaatatttatttaacaactagcgatcaaatacaaaatacacaaacagatctaattactataaactttaattatcatgattctataacaaggaggaagaataaaatgaaatacaatatgctaatatgacaattaagaaaattagcaccacaaataagagagtgaatcatagaagaggacttgacccctaaacttgaggccatggcatagctatgacgtcccccccagctcctaaaatctcccactaaaataaaatttaccaataaaaaatgaattgactaattattgtaatatgaatatataatgactcaactaatatataaactaaatagaactaaactaagtagtgtaccataacaaaaatgtattgattaataagcaaatttatgaataacatagttacctttttagtaataatatgctaggtgtgagggagagaataagaaacaaagagtcaccttcctttcattgtgcttgtggtgactatgcatgacttggttgagagagagattgaggactgaaagagatatagagacaaaattgatttgagttttgctttaaatgttaaaaataaaattgagattgcaaagagtgatggtggaaagaatgtgttagatatgtgcaattgta

SEQ ID NO: 255533 - DNA, 895 bp, Cannabis indica
attttaaaaatttttaaaaacacttttttcctcttttctcgcttctctctcgctctctagttctgcaatttcaatgatcttcaatggcttccattcaggtaatctcttcctctatgtatatcgctctcactctctctctctccccacctttctctctctgaaagatttttagtttaatgagatttagggtttaatctctgaaatgagactttagtattttactctgaattgggttctacattttttacctcacagtattctcgccgaattcgaagcttggggtgtcatttctgaagtactcgtttccggcgacaccgtcatagccgaaggtccaagtctttctggcattacgcacgcaagctctattaggcgatgtcggctgtatattcatggccttcctcaggtgacggactacaacaaggttggtatgtacttctcccatattattttttaataatttttttccaattataaatagctttctttgttgaatcattcattggatgagtcctttggtagatccacatactgaagccttgatattttcttgtccatgagtattttctttttcattccttttaatttgggataaacatatttgttctttaccatgattttggtttgatagcaaaaatagaaggatttgggaaaaaaaaactcaatactcattactggagactttactcttatatttaattgtgaccattctcttatatacacactttaaaatatgtttatggtttaggaaagaaatttagatggtggaaaattgaaaagaataatattttatgctactgatctcatgtgttgaataagagttgcatcgtggtcctatcctggtgtaagatgtttaatttattttgactttatttgagattgcaactattgtgtgttt

SEQ ID NO: 255534 - DNA, 558 bp, Cannabis indica
ggaagccatattttgtatgtacaatgtttttcgaggaggctatagtgtaggtatttcatctcgcttgcctactactttgtgattagtaaatttggcttatccttttggtctaaggcaagacttaaattttgaataatatgagtattatccgagacgcattaaaataatacattaattatcttaacatgcgagcctacttatttttgagttcctatacacatgttgcgatcatatttactgattgaaatatgggcacaacaacgtgctttgccactagtatatatatctaggtatgagcatgctggtaggagtgacaaaacgtgttatcgtgtagtgttcgtattatattttattttactcgcttttatatatttcgtgtcaggcgtgtcgacccgttttcaactcgcgtctaatcttctcaaccctgacctgacttgtaaaaaatcttatcgtgtttgtgttgattcattttaacccgttttgctaatattgaagctggaattatataaaaaatgattaattcaatttattagaaaacttaaatacatctatatatat

SEQ ID NO: 255535 - DNA, 2069 bp, Cannabis indica
attatatcttatcttataacaatgtatattgtaattatttacgtcttttcactaatttttataaaattttgaataatttagaaactaagtttcaagataatttatttcatacgcttataaacaagcttaaaaataattatttgttttgtattttttgttttttgcttgaaatttgttttttatttttgacaccgtaaattatttaaaaaattaagagacattattttttaaatactgaagcagataaaaagtattacagttagacttttttttccagatgtattatactaattttttttagattatatgtagtctaacattatatcttaaataaataatatttaggagtactgatatggatgaagagatggctaaaataataaattatctagttttcaaaaacaattgcaagactatctactttttattatttaaaaaatttcaattcatattattaaattgtctacctttcggccttaattagatagtgttaagcactaagtcactttaattatattatgatattacaataagctgtaaagatatttagaaaatacaaattaaaggtaaacaattcacttccaataacacctttatctacttcattaattatggataaatttataattaacattaacaaaatgctaattaaacaagtttcaagcttttggagaggaatctcttatttttgagagtttacttgaggagattcttttttgaagtagacacatagatcgatgtatgttgtgatagctatgtagaaattactctataattttctcagcaatgtctaaaacactactgattaaactcttaggacgcgggttaaaaactgcgcaattcttcctaatctcaccagcgcttccaacagtagcgattcttcccatcttagtcatagcatttccgaaatctcgagagaacgtacgtggattcgaagccaaagtggcaacataactagaggaggcaggatctgtagctagctcctgatcaatcttcagaactcctctcttcaaacgtatttgacgatagaactcgttatcgaaaatgttacttgtgttttgatctagaaaaacctttggatcactcccaactgcacataaagcttttaacttggtaaccaagttaggatccatggtggggtcaggtttgcctgtaccttgaaaatctgtaagtcggtttgaaaagaaattgcaatgagcaaatccaactgtgtgtgcaccaagaagagccaccatttcgtttagggtcatcccatggtctcggaaagtggcaaaggcagaagtgactgactggcttgggccaggcaagttgacttcatcagggttcgagataagtccatctcttctgccggttggaactgcgtagtctggaccacctgcaagaatgacagagtctcgagttgctagggttatgatgtctgcacatgagactttcgaagggcaagcagcttcgagccttcttttggcctcatcgatgagctcataccctcgtacagttagatttggtcctgctgttttttctgagggcttgttcgatgttgagttgattagtatggatgcatcacaaccctgttgacaataataaaaaaatatgagaaattacattgttatattattaatttgtaagagtgtgacactgtgacatatattataaatatatatgtatggatattggcttgatttgattaattataagatatcggttatctaagaaaatgtatacaataacaatacaataatataaaattagaagactttgttctctttctctctcctgacagaaactagggtatcttttttctataaaaacataaatatataaatgattgtactaaagaatcataataatgcaagttgagccctgaatttaatactacacataaaaattcttttaatacataattaatttatacctttcgatattagagaagggattcgaaattagaactttgtcgtataatattattactaagccactacaaaaacggactagttttagtgataattttttagttacaacataatttttttgtgactaaatgtgacttttaatcacaacaaaatattatt

SEQ ID NO: 255536 - DNA, 749 bp, Cannabis indica
atatattggagcacaaaattgatataaaaatatcacaaaagtacattttatacaaaatatagctcaacttttatatttcttatagaaaataatctagtagctaatttattttagtattaatacaaaaaattaatattttgttgcaattaaatacaaaatggcatcatatatttaatattttgtttatatataaatttgtcatgtcatcatttaactaccaattgtctaatatagtttgtgaaataagtatcaacaaaatttaacatattggtaatttgcacaatagtacaaccatcatatataagtgagaattatgaaactactatatatatgggcatcaatatccactttcacatgcttagttttttcattccaaccactaaattctgtattaatgggaagagagagagagagaagagaagaaaactttggttcattaaattacccaaagagtcaaaagaaagtcaagtggatttttttgctttggctcagattacataattcataacaagagtcaaaagaaaagaagcttagccttaagagtattttctttacaagcaagcttagccaaagacagaacactgaagttttctacattcaaaagtaaaatatacacataacaaaaggcgcattcgaaaacgacattacataacattgtcgtaccagaacaagcatcaagtcaaggcactactattacctctcttgcacagcttcttggatggaggaggcaatggtgtgaaaggagccat

SEQ ID NO: 255537 - DNA, 922 bp, Cannabis indica
caccgcgtcacggaggagacccaaacggtgaccaacaatgtccaaggttcagatctgtgatttggggaaattacagtttggggaagacgatggtctgatggggttcgatgcatgtgcaaaaaaatttagtttttgggtctgacgggtccgatgggggtccgatgcatgtactggaaaaacttttgagttcaacgggtctgatggggacctcgattagggtccaatgcatgtgctgtaaataggggttcgacgggtccgatggggaccctgattggggtctaataggtatgaagaaagagagaagaagagaggggataggggataatgtaaatgggggtattttaaagatattataaaatatgtcatatcccacaaatattacatgttatgtatttagggggaaaatattaaatatttgtaagcataaaaaattaaatttgtcaattaatgagtctataccatatagaatctataaatggtatatggcatatgagagtgcgtgaacaaaactccttaaaaagatttctatccaataaagaaaaagaaaaaaaaaaatccttgaaaagatacatacttataatattttattgttggattcggatttcggaccactctaaagtggaacccttagagttagagaaatattcttaccctttctattttggattttataggttattagaatcaaattgtgttgtggtcaatttccttcataatcattagttaagaatatgttatgattgcaatagcatctccacaatcgaaaagcacatgaaaccaatgactaaatatacttaattagatcataatgcaaagagacaaatcgtagcactattacaaatgataacgttaatcccccacaaactagcttcaccattaccattttagactaaattataaaaagtacttcgtgcttaacatc

SEQ ID NO: 255538 - DNA, 687 bp, Cannabis indica
aaattataaaatattattagaaatataaaataaaatactaaatggcccccgttaggacaggaagtgccatccccgtcctcgtctggtttaacattcagtgacaaaaataacttgcatccctgttttgtttcccatttacaagaaaaatccctgccccattagggaggcgaatcccaacgggtccatccccatggaaaaaaaatgtgcatcctttatggtcacccacactattgatgtcctattaaactttaggctaattaagatttttgctgacgtgtactaaattatgtccttgaacttttaaatctattaaaaaattcccctgaattattgaggttgttggatttaaaatttttttgtctaattttagtaaaaaaaagtctaaaatgaatgaaaggtcaagggtatgatttgatacatgttaaaattcgagggacataatttggtagatatcaaaatctagagagtatgatttaacacataaataatcatcgaattagtaaaattaaattaaatttaacaaaaatcctcaagtccaataatctcaatagttcaggaaaaaaattttaacagtcaaaaaaatttaagtataatttaatacatgttaagtttaatggacaaaaattataattaacattacacttgaggagtgctaattacaacttcttagtcaaccttcacgtccga

SEQ ID NO: 255539 - DNA, 848 bp, Cannabis indica
ttttttttgctaagaaaccacaaacactttattcaaaagacgaaaagatacgggtgagcacatggggactcacctcccaaaaattaagaaaacccttacacaagtgatctaatccccatttagtaagagcatgagccgaatggttcttagatctaggaatccaaaaaaacttagtagacaaactagtcagcaaacttaaaaccttagaaaacaaaaagcacacgttccaatgaggggcaacaacagagtaaagcgtaggaactaaactttggcaatttgaaagaatatctgcctcgttaattcccaaactgcgtagcacttctacacccttacagactgcaaccaattcgccaagaatcacagagaggaaggggatcttaacagcaaacaagaccaagataccaccagacgcatcccaaaccacctcaccaaccgcaccattactctctttagtggcaaaatccacattagcctaattctcccaggcctaggcaggatccaccgagtctcaagagagtgaccaccaacaaaactagcaagcctgctgcttaagatcatcttccaatagctctggaaattctcaaagattttctttttcatgtttgaaaacctccattgaccattgttataaaagttggaattcctaaaaaactacatgttatgatatatcacaattgcgaatagaaaaaactcttccctatcaaactgtgggttagggccttgagaaaacaagttgaaaatccacttcaccacctctgtcccggagattagagtgaaatcattgatacgaatactccacttgctagagaaccaaagcccttttgtgataggggagagagagagagaga

SEQ ID NO: 255540 - DNA, 2757 bp, Cannabis indica
aaacaaaaaacagaaaacaatatcaaacatgctcttagcgtttttttcgcttcacaagacaaaacgacatgtatttcaaagatagtctattttcaagtggggcagtttatacccgtacccctttttgaggccctcaacgtcccgtcccgacccgacccgttccaacacaatcctatcccaaaaactgaaaaagaaaagcgaaatggataaaaccgaaacgaaaaccagtgagtgaaatacagacacagcatttggccaaatcatccatccatggctgcctcatcccctctcagtaacttcttctccttcctcttacccacaaagccaccgccacagccaaaactaccaccattacaagtccctgtaaccacttctccaacccaatcccaaaaggccagagatggaagggtctcgcttgtggcacaagagtctcactctgcttcgtcttccttatcctccgtaatatgcccctctttggcttattcgaatacccttttcttcaaatcggcttacaatgtgcaggttgtagtggatgacaacgagtctgaggagagactccttaacaggtttcgcagagaggttatgagggctggtgttattcaagagtgtaagaggaggaggtaccatgagaacacccaggagaagaagaagcgcaagaatcgtgaggctgctaagcgtaatcgcaaaaggtctgtcctttttctttctgtttttgtttggttggtctgaaaatttagtgggaaatatgagtaaataagaaatacaattgttggttgttcttatttttttcttctttaatgtttgttatgtcagtgaaattcatagcatatttacatcaaaaatgaatagctttatactttttcgaattgagcttaatatcagctgaagtgaaatttatgtgttaaatgtgtgattttgctttagatgagaacaatagagtaaaaaaatggagtgcagaaggctaaaacacttttcaattctttaaaattagttttctttccaatgtttctcgtatgggattggttaatagtgctggaacacctgagctagcttattgtagtgagttctatgttagagagtctcacattgctaatatgtggaaagataatagattatataagatgaatgggttactcctcccattgtgaattagttttgagatgaaacctcattaccttatcccaaattctaaaattctacccaaataattgtctcaagtaatctcagtctgggccgactttgtgaaaagacaaacctgcagatttaagcccagatggcccccctgcagagtgggctgccgtggatgtcgactctaaagggaggtgtattgttaggattccaatttggctaattatgggattggttagtcgataactatttggacaccctcctctcttaagctagcttttaggagtgagttctaagtggttgtatcacttcttggtagttcaaatggtgtgctttgctctgtttgaggtttgaatccaggagggtgtctatgtagcaattgatatagcggaaatgtagttttttcaaatctatatttatgtatgtataaaggtacaagcacacataaatatagacatatagatacacacatacaaaaaatgtttgctctacattggtgatcactgataacaggtaataaaggtttgtacttgatatactatttcccttatgaattaatctgatcatagaagagtctttgagtagagaaattttgttggtgcctcttgaaaatgcttgttgatcttgttctattttgtgctttgttaataggcgaggtcccccaccgaggtttttagaaagaaataaaaccgaagcacctacaaacaagagggatgctgatgatgaagacaactgggatctacctgcaggagatattccctattgattgcatcttctccagagtttttcaacttgtagaaaagaaaattcatccttgattgactttaagaggcattttgtttgtgtaagttcagtttaagttaattatcttcttctttttgctaatttggtgcttaatttcatccatgcttgtctgaatagaaagataaaagtaataaatttcattcttaaatcaatttgagttcaccaatgcaatcatatcatgaaaattaattctgtgtctgaaatagcagtgcacctaatggtggtctcttttagaacaagggtagccattatgtaataaataaacaaaatcatatcttatgctatgcatttggttggtgctctccaagagggcaccatgtccactcctgacctgaaattagatggttgtgctgtgaagtttctccaaccatcaagaacaagtctgagatcatagaccttgttctccacacctttacaacaatttgcttgcatggtaaaaaccatgttcatgtccttactttctcctctgcaaaacccaccaaaataggatgcattgaggtaatctacctcgactccaatcatttgagtgtactcctggtgctctctcaaattttcacagagagactccacatgaaaagtgtcatatagagtcctcaaaaacttccaatatttaaatagctcgattgctcgctcagttgatttcacgtagaatagtcctctacccggtctgtttctttcactttcagatccacgagagagtaaattacatgggattgtgatttcatgcaacgggtttatctcgaaaactagagtcctaaaccacataacatctacttcctgcaatccagatcaatttgtcatcaacatacataataaaccaacatg

SEQ ID NO: 255541 - DNA, 537 bp, Cannabis indica
ttttttaatcactacaaaaaattgctacatttagtcacaacattaaattttttgtgactaaatatgattttagtcacaacaaaatattaattgtgactaaagcatagtatttagatacaaattgttactaatttatttttcgtcacaataaattgtaatttttgtgactaatacttttagacgactttttaatcataacataaaaataatgatttatagtcacaacattttcacttttagtcacaaattttattataactaaaagtaagatattttatagtgaatttgggttaatgtagctacaaaatggacttaattcaaacaaaatagaaagtataattagttcaaatttgatgtttataataaggtctcaaaaataaaattatttattgtgaattatttcagattcaaagattaataaattggcccatatggtttttaaagtcttttcaaattggcccatatggttttaaaaagaaagaaaaattaaatggattctcagaattttgaaaacttcttcatttttttttttttttt

SEQ ID NO: 255542 - DNA, 600 bp, Cannabis indica
taatgttgatgaaatgccagaaacgatagctaaggatgataggggctgccaaacagaaacaatagctgatggtgttcatgagaagcaggttagagttgggaacaactttgatgattcaaaatggattactcctcgtaaaacaggttctaaacaagctgttaggaatgggggagaggcagccactagtaatggttatgagattctagccgaatctggggatggagaattggtcacaaaaaatactgatatcccatggaagtctgcaacataatgggatggaatgttaggggtctgaataaaagggataagcagagatcggttttggatgttcttagagagaataaagtagggcttggtgctcttctagaaactaaaataaagcatgacaaggttaaagaggttgtgactactagttttcccaactgggagttctactcgagttctgttattagtaaaagaataattctggtttggcaagcgaaatttgttcatgttgagatcatagaggaggatttccaatttgtccacagcagagtgaaagtgataggcttggtggaggaattttacttcactgcagtctatggcagtaattcggctttg

SEQ ID NO: 255543 - DNA, 835 bp, Cannabis indica
gtaaaaatttgggaaaaaaaacacaaatttgaggttataaaaaagagaaatgacaaaatattaataattagtacaaataaattaaatgcataactctaaatatgaaaaaaaaaaatagacagataatccatgagacatgctcactaaagctttactaagagacaagtttcaatattgtctcaatctcttgcaaatcatagaatgatggtgtgttaaattcttagatacaattgaagtcaaggtggagatttgtaggttttatagttagttgacgagcattgttattgggcactagtggtgcttagcatttttaagacgtgtcgccttgcgattggctagcaatactccctaaaaactattatattaaactatatgggactcgatacttagttataccaatagcgatattaacacgtaggacggtacttggcaccactagtgtcttttaacatttctcttagttgactccatattctatgttatgcacaagtacttgcttactttgaacagtgacagttaagttagttatcctaactaacttaagtgccctttccttattgtcttaattagcctatgtctataaataggtttaaccttgtgcaatgcacataatctacacactttcaatcatcaacaaagaaagcattcattcattccttggttaagaactaatgctctgtttttatattctgtgtgtttactgccaattgttttgagtgccagcaattgagtaatttgatcatagcattaggattgcaaaatccaacaggatatgcggtaaaatcaatttatttgatctttggttgtatgtaaaagaaaagacttgcattattga

SEQ ID NO: 255544 - DNA, 900 bp, Cannabis indica
ttttggaacctccatgagttagtaggtttctctctctctctctccaaatggacacaaaaatagtagcaaaaccaccaagaaactaatcataggagagttgttttattaagaattctatttgcatcctcataaaaccaaagatggatctctccctcatcccactcttgctccttgatgaaatctttaaccaaactaataccatgtgtcacatccaataacaacatcaattgaagatagagataattacataaaacatcaatttttttttttacatttttacactattttataaaaatacaaaaataataataagaaaactacatgaaagtaacaaaaaaaaaaaataacattaaaacaacaacataataacacgaaaacaacataaaaaataatatacaaataataaaaaatgaacaacaaaatacaacgtaaaaggaccgtattttatgtaaaaaaatttgaaaaactgtaaaaatattaaaaattccgtacagaccgtatttttgtaatttgtttttgtattttttttaattaacccttaatgatagcatttggggtccaagaaagcagtggcggaaccagacgacgaaataaggaggggccaaataaaatatattttcatctaatttttttagtatgtagtattttataaattaatataagaagttaattagctttatacaatatatataaaataatgagaaataataaaggacaccttatagtaccaagtactataaaaagtggcatatcgttattggtgtaaaaataatatcgagttctaaatattttgatttaataaataatataagaaactgctaaccacttgtaaagtgtcatattaatatagtattggataccataaaaatacatatacataaagatacatataaatatata

SEQ ID NO: 255545 - DNA, 457 bp, Cannabis indica
tacataataattaataaatatacgttttaaattaaattataatattattattatttgttataatgttgtcattaactttttaatttataatattctttatcatgatagtttttttatttgattgcacctaaaaatatttctatacactataatagattaatttcttatatgatatgtacaagaatttaataaaaaataaaagtgacaatggtaagaatcaaatccaagaccccactcatcaatatacattttaagcttcaacgtaactacttgtgctacaacatttttatgcaatatattaaactaaattttatataatatattttatttctatatatatgatataaattttaattttttgacgccaccaaaattgtgaggtgtaacgttcccgcttcaagcctccattaggcccttacacccacagaatgaatggctcttatacacgagtacgtca

SEQ ID NO: 255546 - DNA, 704 bp, Cannabis indica
agaagctcttgctatatttgaggaagtgcttctattgattttaatctacaatccttactgaatttaaggttgaaaagcatgaaatgaattatagttgagcttatgttgtatgttgatgttcttggttgcatgagtgttaatcttaatagagtttgagtgtgattgcttggctttgttgttggattgtttttgttgggttttggtagtgatttcaaggaatttaagtgggtagaattcatgttttattgggtgttatgctgctggaaaatgtttggggttgaaggatttaaagctcaagtctttgagcttgaagacttgtgtgttgagcatgattttgattttgtgcaatttgaattttcagagtttttattaatgtttaatgcataaaatggtgttttagactctttttttaatgattgaaagcctatgtgatggttctaagttttggtttgggtttgaatatgttttgggcataatttttgtagctgagagttttctgggtttttaaacccaatggtcgcgactatcataggtcttgtcgcgaccatggtaatggcagtttattaatttttatgagttttgttttttccataacttttgactcgagactccgtttggaacgttctttatagcattggaaagctcctgccgagctctatgtgattatctgaattttatatgccatgtgaatattttatgaatgt

SEQ ID NO: 255547 - DNA, 523 bp, Cannabis indica
catagtcagcagattcatgaaagaaccagggatttagcactggaaagttgtaaaagggattgtaaaatacttaaaaggaactataaatgttggcctaatttatggacaagacaacaacagcaacaacacttatgtaatggggtttgtcgactcagattatgctggagacatttagtctagaagatctcaaaaagggtacatttttcagatgagaggctacaccataagttggaaggaaaatctccaatctgtagtagctttatcctcaacagaggttgagtatattgcacgtagtgaagcagtaaaggaggctttctagctctctttggcgggtttactttctccgggaaaggttaattaatcatcaattaaatatctttcatctgacgtgttttattgtcttttcatatttcctagaaatattcccaacagtttgatctgatttgaaatttgatcaatgcttctccatctttcaatataagaaaggtttttaccatggccttcttctttacctcatttgaaa

SEQ ID NO: 255548 - DNA, 1917 bp, Cannabis indica
gaagtgtgcacggcagtctagcaaccacggcgtccccaggataaaacagcctctgtataagtacgatacgttctgcaccgaactgtatcgctctgtaacaccctactgtttgctctcagaaaaatcgtaaagaaagaaaagaattttttaatgtagaaaagatgtattcttacgttgttctgatacgacttatatagaagtcgatccaagaaaaaacggtaagaaaacggtaatattatcgttcgtgggaggagttggatcgtgggaggaaaaggcggatcattgactgatcgcgttttacctcttctgatcacgtgttaaaattaattaattaataaataaataaaaataaatctttatttaattaaataatttttcttcaaaaaataaagtgacacctcacccgccaacccggatcggtcggcggcggcgcgcgcgtgtggtggtccagtgtgtgagtcctcacccatgcgcgcaaaactgggtaccccttggggcccaaacccatatctcaaacttgcactagatatacacttaaaatgtagtgtttctatcccatgtgggactcctactcacacacttcacttttctatttttacatatttcatacaaagttccaacataatacaaggacaattttccttacttgatgatgtttgtgttataatttttaaagttttttgtggttgaagaagttacgtttttgttcatggagatcggttaggagaaattcaattgaagaagacgaagtagagaaaattgatagaaaataacaaaactaggtaaaatattaccacattataaataaatatgatggagtttgaacaaacaataatttttataatatatactcatactcaaaacgattataggaaatttttaaagtaccaaaattttccctttactttttcttgtatttgagtacaaacaaactataattagtttgacttttgaccaattaatggtcacatgttaattgttagcatgttattattctatactttcaccacaaaataaaagaaataaaaaaaattgatatttaattacaaataaatataaagtataagtagtttagctgcaaattaagaataacgagtatttaacattataatcaaacacttagagagtgtttaacattcccatttaatatattaatattttacataacattcaaattaaacttttagcaacattatcaaaagttgacttttattgacaatgtggaaacattcctagctagaatggtctacaattttaggttgtgcatattaattcaagctcttcatcattgtgttgactatccttagcatctttattgatcattttgatcatttcaagttccattgcgacttctttcatggtaggtcgattccttccactcaaatgtaagcatctttgtgcaagattagcaacaattaagatctcatctttcgacacatttttgagaacttgatcgtcaataatgtcaaaaagactactactcttttgttccattgtcatgatgaaatatgtcgccaaacttcttccttcctctgaccttgttgtagatattgccttttgtcctgtcaagagctcgacaagaaccactccaaaactataaacatcgctcttatctgtaaattggctcgactgaaagtattctggatccaaatagccaaatgtgccataaactaaagtggtcaaatgagtttgctctaaggatatagttcttgatgtaccgaaatctgcaacttttgccctaaatttttcatctaggagtatgttcgtagactttacatctcgatgataaattggaaaagaagctgctgaatgtaagtatgaaagagctcttgcaatctcagttgcaattcgtaatcgcatattccaagtaaagaaaactctgcatttctctcatgaatatactcagaaagtgttcca

SEQ ID NO: 255549 - DNA, 1720 bp, Cannabis indica
taattgctttactaatccaatttactaaagcggtcattacattaatattattactttctcccttaatcatagggctgcacacgggtcgggttttcgggtagttaggttcgggtttttggatttcgggtgttggatatgcataaccgaacccgattttcggatggtcgggtatggcgggtttcgggtcgggtatatcgggtttcacgtggtcggattcgggtgttatttgaatgaccacgtttcctcggcaaaagaaatcatatattatataatatatatatatagttatagctaattaaaaaatatacgtatatataattgatagtatagtcaatatcaaatcaatagtcattacagtattatacaaattaattaaataatatatataaaatgaaaattataaaattatataatataaatattattaatacaagacagaaactatgaagtgtatattagaattattaaagttagccttttcaaagaaaaaaagaattattaaagtcaggcccaatactagtccattaggccttttcttattactatgtatatatacagaccttttgtaataaaccctacaagatatatcattttcagcagccatattattcattcggttgcacacactaaataaaatataccagagttattttcctttctaaactgaaacagaaagttcttctctaaactgaaatagaaagtctgaaacaaactcaagtggacacgggcggagaagactttttaactttggatgggaagaggctcgccggactgagccgaccgctcggatgcgaccccgtcggagaagaagaagtagtcgctgcagaagttcttggattttttttgggttttgtctcttggtcttcgaatagtttgaatgaatactagtgatgaaatgttataaaattaatattattaactttttatttaatgtaataaaaaatattttttttactgtgttcgggttacgagtttgaacccgactaataaataaccaacttttgatacctgaatccgaaatctgttttaggtattttcgggttggacccgacccgacttcacgggttttcaaattttcaggttttttggcagcgggtcggggcgggtggtcgggttttccgggtctgcgggtctaaatgttcagccctacttaatcatattgattgtactgtaaatatttctaatgatataaaatggcattttactggtcattatggttttccttatccttccaataaaaatgtcacttggactctacttcataggctctatgtactgctcctcttatgccatggttagttataggggattttaatgattatttttctctcagtgataaaaactctagtactaatcctccccctcatgctatgcacaatttccattcttttctgcataagtttaatcacttgcccctcattccgtcgggtaacaaattcacttggagacatggccaccttcttgagcacattgactggtgtactgcaaatcaatcttggaataacctgtttctctcgacatgtcttttccatttggaattttacgagtctgaccacagagcccttcaagttcaactggaagacaaattcaaaccttccccccaaaaacattctcgatttctttttgaaaaccactggttcactgatgtttctttttcttccactatctaatcttcctggggtctttccacttcaatctcttcctcctctcctcttcacag

SEQ ID NO: 255550 - DNA, 974 bp, Cannabis indica
aaaatccattcagctgaaactattttggatgatttgttggctaatgaggagcaatattggcaacaacgtttgagggttgattggctccaatcgggagatcgcaatacgaaattctttcactccaaagcttcagctagacattccaacaaccgaattaaagttcttatggatgatcatggacatacagtcacaacaaaagagggaatctcgcaacttgtaacagattattttcagcaactattcacggcttcaaatgaagatcattgggccttaactcatgtcctctctaccataccaacaaccatatcagatgagcaaaatgaatttttgtctaaggaatttactgcttcggatgtcactgccgctttgaagactattggttcggataaaagtccgggtttggatgggatgtccgctatgttctatcatcacaattgggatatagtggggaatttggtgactaaagtggtgttggatgtcttgaatcatggtgctaatcctgaagctttcaataagacactcatcactttgattcctaagatcaaaaaaccaagacaatgaaggattttcgtcccattagcctatgcaatgttacatacaaaatcatttctaagatgttggccttgcgatttaaggaagttctccattctgttatttctgagacacagagtgcctttctttcaaatcgcttaattacagcaatatccttgttgcttttgagatggttcataatttgaagcataggactcgtggctctaaggggttcgctgcattcaaactggatatgagcaaagcttttgatagggtcgaatggtcgttattgcagcggtcatgggaaagatgggttttaatgttaaatggatttcactcatcatgacatgtttacatacaaattcattctctttcctaattaatggcgaagtcttaggttcggttcaacctcagcgtggattgcgtcaaggagatcccctctc

SEQ ID NO: 255551 - DNA, 1761 bp, Cannabis indica
gttttgagttttctgtatttgtatttggtttatgaatgggagtgattgtttcttttgaaatactgcaatgttggagatttaattttgtatgaaagagtaattattatattttctttgtgaaaaggagcaatcctttaatctgtagacatcagagaatggtgggagtatgatcagaatacattttaatgcactgtttggttacaaagatcagaaacaaatttccacttttagcttggcatctttcttattagtttcaggattctaggaactactttatcttatagtagaacaatattaagaaactgatgaaagatttcgcttttatttgacaaatatttgataaaatatttgacatattatatttatttatttattttaattgttggaaacccacagacagagaaatgaagaagagggtttaagttcactcagtttaatcatcaatggacaccttaagacaattggccattggcttccctggtcctcggctatccccacaacctctctcgagaaaattccagaagatctacccttctagcaatggcgctagctctttctgtcctttgaccacctgctttgctaaccgatgggcggaccgcctccttgctgatttcaatttcatcggtgattcttcggatcagaaccaccaccagtactattcttctccctctgctactgctactcttgctcctccatccccactactctctccccctgagcgccacgtgtccattccattggaattctatcaggttctcggtgccgagacacattttcttggcgatggcataaggagggcttatgatgctaaagtttcgaagccacctcaatatggattcagtgaagatgcattgcttagtcggagacaaattcttcaggctgcctgtgaaaccctagtcgacccgagcttacggcgagagtataatgaaagccttattgaagatgaagagggtacattgctcacccaagtcccttgggacaaggtctgtttcttaaattttgttaatcttggctttggttttcggcaaaccatgggaaacatttggtttcaggaatttagaaaaatatggtagtgtaattctttgaaaattatatatttttggttgagttcacctttgttgatggtgtgttagtggttttgtaggttcctggggctttatgtgttttgcaagaagcgggaaaaaccgaactagttcttcaaatcggcgaaagtttgcttagagagaggctgccaaagtcgttcaaacaagatgtagttttggctatggcacttgcttatgttgatttgtctagggatgcaatggcactgtccccacccaatttcattcggggttgcgaagtgctcgaaagggctttgaagctcttacaggttagaattgtatcttaaccttttgaaatttgataaagtttttagaatattgagagatgtaaagggaaaacagttgagaattgtgcaactttggaagttgatttaccatcattgattatttggaagttgatcgctttgaattttaatcttacatgcttgataaatatccaatgtgtaggaagaaggggctagtagccttgcgccggatctacaatcacaaattgatgaaacattagaagagataacccctcgttgtgttttagagcttctagctttacccctgaatgatgaaaaccgatcaagaagagaagagggcctccgtggtgtacgcaacatcttgtgggcagttggaggagggggagcagctgcaattgcagggggattctcccgag

SEQ ID NO: 255552 - DNA, 1332 bp, Cannabis indica
ggtctcttttataggaatgctaagagaaatgctaattagcatgcctagtattattagatatattactattaatgcaattaatatcactaactaactatttacaagacgctaccttaacatatatgaaattttaaggactcaaacagagtcttggtgcaccagagtctagacgctataaaatgaatactagaaaataccaagatctaaagataagacgagatatactcaaccccaaacctaaatgccgaaaagaaatgaccattgtcaaaactccaccaactcaattgttatcccaaaatttgtacgaatgacgtgacacttggcaagctgacatgtggtaggaaatttaaccctggacagagtgttacactagaatataccaaccaggcatgacaatgctaaactaaattgaagtataaatgctcaaagtaattatcacctgagcgggctcaagatctcacctcgcgctgagcaaagcgggcaagccacgtaacgcgaatggcctacgtgaagaattcattgaaggtatttcaggatagttcccttaaccgtttccacaaaaataggaccaaaataaaacttcctattcgcatgggatttgacttaacagaataaaaaatttatgggatttacatataaatccccactacctcatctcttattattttgtaataaatgtattccctctcccctataaatagtgaggtcatttcactgtggaggggacagacttttttacacactttcaagagagaaaaacaatctgcaaaatacttgtaaccttttcaagagatattgagaaacttatttggtcagactttgtaatcttactattctttcataagttatcgaaattttcaaaaaactaataattcaacattagaactaaagaaaatactattaaaaaataaaatatgaagaatgcgctcagactttttacatggtatggcctttcattcctttattcattttaatcaagctttgctagcaaatcaagcttggaggctctataagaaacctaactctcttcttgatcagctgttagtagatacttttcaatagctcttttgttgaagcaactcttaaaatcagtgaagggagaaagttcaggtgtggtttgatccttgaatcccgggacacaacactttccgtctcatttggtatataggtcctttcgatggggttgtagccaatttgataattgaagaaagacaaaggaatgatacactgctacaacaaactttctctcctttagatgtagacaggattttgactttgcctctgagctttttcagcaatgaagatgcacttatatgccatcatcacaacttt

SEQ ID NO: 255553 - DNA, 504 bp, Cannabis indica
gagaatgaagttgtaaagctgagcaccgtggcccctccggggaatgaagatatggagtccaccaccgaccaccgtggctgagcaggaactagttttactgttttaatgtttgttttaattttagtttgttttttagtttctattgcattaatgtttctttttaaagttaatgtaatcagatagttttattgttttaatgtttgtttttttttaaaaaaaaattatggcttaattatgacttcacaatccaagtcataacacacatgacaacactaattagggggaattatgcacgattaactctaataataattgagggaaatttagcaagaaacaaaagaaaaatttagaaaattaataataataaaaaaacacactgatagaaaaataaccatattgtcacgtgcatataaaagtgggaataacagaaaaagggattattcagaattacaatgatattctcatcattacttctgcgaccacattgattccacctgatttcat

SEQ ID NO: 255554 - DNA, 818 bp, Cannabis indica
tgttgtgggggtaaaagtggcatacaaatatcacaccattatgataggaatttcctatcaattatctaaaagaacattaagagcaatagagtccaaaaaaaaaaacatagagaaaatattttgtattggatactttggaattggagagttaggttctcttccactttaggttgcaactcttaccaatttcttcacgtcattttcacacattcctatcccacataatctacacctaactactacactcaaatatccctccacttactaatcaactaacttgccatatactaatcacattaattagcacatttctattatagtaagattcttcatagtcactatcataaccacaaacagcacaacaaatatcagttactggtatgtgaaagatagtgagtttgtctcttgtgagcaggttaaagtgggatacctgccacaaaagatagatcctatatagatgtcaaatacttgtatagctagcaaaattaaaaaagatgtgaaatatagattgtatcttctcaagaataggaatggatccaaagtggagatagatctactaaagagattgatttgtaattaagtgaggggtgaggttggtctcctttggagagccgtgaggggtgtttgattttggtgtaattaatgcagttttcttcttgaataaaaaaaaaaagattcttcatagcctacctctggaaacttgtgtcaaatttgacaaatattaaaaattgtgtcaaaaattacacatcaataaatataactttttaattacaaatttcttatgaatcatcaattagctttaatacacaatattttta

SEQ ID NO: 255555 - DNA, 542 bp, Cannabis indica
ttctcacttcctgtgagaattttaggcactaaaactgctcctggattatctccattagagagaaaatacggattagacagatcattgaaatttgccgatctcgagttctcgccaagaattgaaaatcgatttgaaccattcgaattatcctcaggatcacgattacttcgagttcgcattcctcctcccctagccatgaacaccaaacagaagcggaagcaaaaggaagaagacaacacgaagaagaaagctcactcgaagaagagctcttataccatattatctggtataaaccagtaagaaacagagaaaaacagagagaaaatgaagaaggaaagaaatcctttattgctgagattgaaaaatgaatacaaccaatctaaggatacaaggaaaactaactctacatatagctgtcaaataacagaattgttacaaccataacaaccataaccgattctaactaactgacagctaagaccaaacaactaacttctaacaacttcttgataaaatacatatatgaataagaagaaaaatgt

SEQ ID NO: 255556 - DNA, 1401 bp, Cannabis indica
aaaacaaaaagttaggtctattctatgtttatgaaatagtgttaattacaattttttagttcgaaattacatgttcagaatatattttttataatggtatttattatagttacagtgttattccaataaatttttaaaaaatttacagtaccgagaacagagttcttgatattccatttttcctcacatgtttaaaaaatttcaaatgtattttcgatactgtaaattattcgaaatttttaaaaattacagaactgatgctgtaagcataacgaacatccccataattttttttttggaaaaaatattccaacatgtattttcaagtacaaaaattaattaaaatattgtaataagaaattcacagtaacactactttatggaataattattttttattttcttttcctaaaaagtaccttttctttcttcagaaactctaggtagaaaaaaaaaacccaaaactgaaaaaggaaagaaaaatcaaagatatataatggggaaaaaatgtgtataattaataattgagtgaccaaattatatatattgtgtagattaacacattttgaagttgaaaacaagaacccatttccaagaaagatcaaattttatcaatcagatctactttggtggagagaaaattttgtaaagattacatttttattaatttatttaaatctacaattattcccaattaacaaaaaatctattaattaacattattattgttttttaattaattaaaaaaaaaaccaattatttgccaactcctatctccacccatgacaacaaatgagaaaaagaaaaatgggcccacgtttttttttttttttgtattataaatatttttttagtaattaatttctcaccgtcagatctgatgaatgatcatggtctcatcaactgacatgttgtggaccaatttatgtatataattatccacaaaacctaaaatatatctataaatataaatttatgtttaaggcagctcactctatatttaggaccacttaatattgaattaatattttttatttttttattataattataagtgagtgagggacaactctggatattcccaagaaatttaagccccccaaatgcaaattagcataatattataataataataataggataattttatattacactctttaaaagggttactatgctacacttatttaaataattatttttagagtatcattataaaatatcagtggtatctaatattacgtagaggtggcattttgtgattaattagtgatattttatagaaattttattatattaaattatacgagactcgatacttaaattgtatcattttagcgatatgatactttagatagtattaagtattattggtgtcttttagcattttgcttattctta

SEQ ID NO: 255557 - DNA, 725 bp, Cannabis indica
ttcagtacaggaaacacacaaaattctactacaacctcaaattgaccccaaacctcaccaaaccttccagacctgcttaatataccataatgaacataaattaagaaacaaaacatctcaacatactcagaataaaaaactaccattaaagactaaagtttgagttctaaaactcaaactttgctaacaaccaaatcaagccacaaactaacctcaattcagctcaactaacacaattttaacctcggaataaagtctcaaacaacaagaaaaattacagaacccatctcataggaaaatcataaaacacctaacttgaaacttaagaaaaacaacatgagatgagctagaacattaccttgagtttgaaatcactaaagctttctagaaatccttgaattaagcagaaaaattccccaaccctagctggttctagggagcttgagagagtttatcttttcttgatttttcttacttttagataaaaaggaataaatctaatggttttctaatttaattaaaacaattttcatattattaaaacttaagtaaagctcactaaagaacaaatggccaaaaagacaattttacccctcactaaattcaaaaagcttctaagtcacataggggtattttggtcaattcaaaatctcgattaatctcgacattcccaaggtctaactatattgccccgctactaccaaataccaaaatatgattctatt

SEQ ID NO: 255558 - DNA, 1161 bp, Cannabis indica
gaatacacttattgcaaaactcatatcagaatcgaaaatagtcttgccagttgcaacttcaggcatagcatctttgttattgcctaatggcaggaccgctcattcaaggtttcatattcccttggaggtttcagctgagtcaacttgtgaaattcgacatggcaccctactatctgaactcttgatgaagacttcattgatcatttaggatgaagcacccatggcaaataagtactactttgaagctttagataagaccttaagagatattctaagaataaggtatgagaatagcactaccaaaccttttggaggacttacaataatatgcggaggagatttttggcaaatattgctagttgtgccaaaggatacaagagcatatattgttgacgcatctcttaatttatcctacctatggccattttttaaaatatatgagctgcaccaaaatatgaggctctataatggaagtgtcgatgaatatgaggttgctaaaatagcctctttcgacaaatggttgttgcagattggggatggttcattatatgatgacattgataaagaacttattaaaattccatctgatatccataaatacccatctgatgatcccatgaattctgttgcgaagctatctacccttcattattgcataattataatgacccaacctatttgaaagaaagagcaatactaacttcaaaaaatgaagtggtccatgagttgaatgagatgattatgaatatgatactaggagaagggaggacttatttaagctcagacggtatatgcaaagcaagcataaacacaaatgaagaggatcttttgtatccaactgagttttttgcatagtttgaaatttaatggcatctcaaatcattacataaacctaaaggaaggtgctccagtaatgctcctcagaaatctaaatcaaacaaaaggtttatgcaatgacacaagactgactgtcactcgtcttggtaaatggtcaattagaggtgatatcatctcaagaacaaacattggtcaaaatgtacaattccaagaataatcatgtcctcgaaggaatcgaagtggccattttaagcttaatagaagacaactcatgttggcaccatgctttgccatgactataaataaaagtcaaggacaatcgct

SEQ ID NO: 255559 - DNA, 625 bp, Cannabis indica
gatgtcaagataactttccttaacggaattattgacgagacaatctatgtggagcaaccaaaaggttataaagttccaggatgagaagagaaagttatgttaaataggtccatttatggacttaagcagacttctcgctcttggaacaaaagttttgatgaaataatcaaaatctacgactttcacaaaatgaagataaagcttgtatttaccaactcatggataattaagtggtattattcttggtcctttatgttgatgatattctagtcattggcaataatgtcaagaagatgattgacataaaggaatggcttaacacccaattctaaatgaaagacttgggtgaagctaattatgttcttaaaatccaaattattagatactagaagaacaaatcacttgctctctcataagcatcttacattgataaggtgctagagcgtttctcaatgaccaatgccaaagaggcaatcatgccttctagacatggcttgcgactatctaaggaacaatatctcacttatccctaagagataaaagatattagaaacagttggaagtctaatgtatgctatgctatgcattagaccagaaatttactatgcagtaggaattgtgagca

SEQ ID NO: 255560 - DNA, 1161 bp, Cannabis indica
tgataaagtacaaaggtcttatctcaaaaaaaaaaatattgaaccccgctatattcattccacagacttgtttaccaatccgcatccgccacgtggatcagggtagtcgggatactcggaatgaacggttttattgaataatatttgtataatattttctgtaaacttacaaacgtatgacaaagttcttgttcaataaaagagtatgtaattagttgcatgcaattacgatgatctttcacaatatttttggaaacttccattaataccaaaccatttacaaatacgttagggtgtgtttggaagtaactgtgtaattactaagtaagataattactagggtgttaattacactatattttaaattacaatgtgtgttttgatatgaggtggcaattacagatgaattcataatatcttgtttggcaaaatagttagtaattacatgggaaaataatatttttttagtagctaatgtttaataaatgaaaagtttttagtaattacacagtgtaattacatttaattctcatcgggggccatgagaattggagagtgtaattggaatccctcaattacttccaattacacagttacagtgtaattacatggtcagataaacatgccaaattgtgtaattacctccaattatatacacatccaattacattgtggctttcaactcacattaaactatacaagtatgtatcacaatttgaaaatatttaaattgaaaggaaaaaatgtaaactaatctttaaagatctttaagtagataataaataattagttaaaaaggtaataatataaacaataagaaatataaattaatatgagaaaatagtagttaagtcaaaaagattaaaacaaattgataatgtgaatataaaatattagttaagtagtttataatttgttgtaaaacatcaaaaattgtataagacattttgtatgctttaattttgaatataatttgttatatagaagaacatgttggactttagaaattggatgactaaactgtcagtggaatttggaaaaggtgtggatgaattcattactacagaaatgatatattaggatgcatttgttcataaatgacattcaacaatattgtatgatattatcatgggagactttcagtaagaacttgaaagacaa

SEQ ID NO: 255561 - DNA, 520 bp, Cannabis indica
ctgcctcagttgtattgacacaatcgataaggtcaataccattgatgttcctagacagaaagtcacagtatctcattgtagtgggagggtttcaaggaacccaccctgttattgcttggaagacacttgtgataaaattgcattgttagtttaaaagcaatgggtagtcttaataaggaactaagaatcaaagccaagagaactatggttaaaaccattcacgtggagtagccaaaagttttctattacaaggacaagaatggaaatttgataaaacatatattcagtggagttaagcaacttcctgatcttaatttcctaggtttgagattatttgaacaaacggcttgtggtgtacttagtaatttacttacccaacaatttcaaccattcataaaagataaaggccaaggaaagaattccttaagcatcaacaacgagaggtcccatgtatgctctggtatgcattagaccaaatacctggtgttaagtgggagttatgagtaggtatcagtataat

SEQ ID NO: 255562 - DNA, 957 bp, Cannabis indica
atatatatatatatatttatatttatgtaaggtgctcttcattttttattctttatttttgaacaaaggtgttcttcatgatctttgatgcaactgcatatacaactttaactttggaagctcagaatattcacttgttatatatatatatttgtatgcaagtgttagaaccgtgcggaacattttctttcattaatttctcttctatgctattaataattaaaatgcttatataatattctctatgtattatataatactttttataaatctttaattatttaagttctaaaagaaaaattataaatctttatttatatatgtatttttttatttaaataaatatagagattaatcatgacaatatcaatataaagaaccttaatcaataagattataatataggttggtatatacagattcttactggaccatgcagccgttataaattaacatgttcacgtccaataataatttgaaattatcatacatatatttaatatatatgagatttaaaattaaaaactcatatttttgatctgtttgaccaaattatcttagttagtgatttataaaagttttaaattcaaatttaattatttaattgaaagcagatttgctcaacattgagtcctattagtttagctgaaaaacacaaaataaagacctccatatcagctgtggagaattaattttagctcatgatcatctacaataataaatatcaattctacaccacatacagtgatgctgtagcattcttttatttctcttttctttttcttacacttccctctccactaatatatataaaaatatatatttattaataatacatataaatgtgtccaagtgttatataacctgtataggtcttttttttttttttatgtgtgttatatattagttgttttataaaaaaaattgtatatattaatatatattatttttaagaaa

SEQ ID NO: 255563 - DNA, 667 bp, Cannabis indica
tattttgaatttcatgctgatgtgtgttatgttaaggagaaagtgagtcataccactttgttgatggggagacacaggaatggcctatatacttttgatccttcccaaattggacctatctactcgacctctgaccaagctaagaccatcaactagtctcagctaaaccattctcaaaccagcaacattctcaatgattctcctaagtctaagtgtacttttgttgctactctgaataacacttctgtcactatgtccaattgttttaaatgtaataccaatgttcaaaacaattttactttgtggcataatagactaggacacccctcagagaaggttgttcaaactgttctcaaatcttgtaatgtccctactattaacaaagaatctcagttttctatttgttcagcttgttgccttgggaaaatcctcaagtttccttttcctaaagcctccactactgtgatttctgagccattgcagctggttgtctcagatttgtggggaccatcccacacaacatcgttcaatggatataaatattatattcattttgtggatgcctattcaagatttacctggttgtatctcttgaagaacaaatccgatgctttgaaaacctttcaacacttcaaagctgaagttgagttacaacttggcaagtcta

SEQ ID NO: 255564 - DNA, 1521 bp, Cannabis indica
actgacatgatgatcagcgataaagtttacttataccttggataagtgttatgtccattccagggtattgccaaagtatgctaggatcatatgtatggagtatatatcggactagaccgatattgacattggataagatatcataaacttactgttatatctatttaagtcaatatcacttagttgatcttaggtcaatagatcataatccttatatggttaggttcgatctcaactgtgttatttatgttcttagagttgttcgttaaagctgaccaattggatcgacccaatacttacatctttagaacatggtagtataattgagtggaagcgctaatcatagatatagaatctatagcttctatctggacattaggaaaccgttacggggggaataaaataatgacaaattgcattattgaagaaagacaagtttgtttcattaaaggaataaaataatgacaaaattctaactcatgggctttgctaggggttcgaccatgatgatgaattgtaagccattagatctttctaatcagcctattaagctctaaacctaaacctaatgaatccctataaatagaacattaagggttttgatttatagaagagtctagactctctctcttgtctgacaaactgtatcaaaggcaaacctcttattttctattataattttttaattcctcttaagttttcttcataaatttttgtgctcatggtgattgagagtatgcccactcatgttaaagcaatacctagcatagtttggaagattgtgtctaaccaaagtgaaggagagaagatttaggttcagatcttgataatattgtgctacagaaaggaatcaagaactagagatctgaacggaaagagtcattattattccactactatcaatataaggatttcttaatctattacgtttttattttatcatattaagaaattcatatttagggtgttagattacagatttataatcaacatacatgttattaaatctagatccttgtaaaataacttccaacaactggcctcagagccatggtaatgatttacttttatgaaatatgaatttaaaatgatgttcgtatgatgtgttcatgttagtttatgttcttaattgatgaatatttgtgaattacgaattttccatgaaaaataattttattttcattcttgaaataatttatttggacttcttgtgaaaattaagcaattttaatttttagggaactcgaatttcaactgtagatgctgttttttcttacagaaatattaaacttgattttttttatttaaactactatttttttttttgttaaacactaattatttcattaaaagcagcagaaaaaaatcagtttcatcaacatcatcctaaaaaaaaataacataaaaaactataatctacaaataatacaaactttaaaaacaagttttatcaatattgaaagaaactaataaatttcatttaaaaagaataaaaaaaaaataagtttacatcaacaagat

SEQ ID NO: 255565 - DNA, 1069 bp, Cannabis indica
cgacacttacatatgaattttcttatgctgagatattacaatattacgcatatattatataataacaaaaaaaaaaaaaaagaaaaaacaaaggattgtaggtaactatacttattcttttattggtacagaaattagataaattcatgtcagcaatatataggtgttgtaacttgtaacattttatatatagaacactgttcaagaaagagttataattagcatccaaaaaataagggcaatgataatgtctatattattcattttctcttttcaattttgtttctctctattctgtaaaagttattggcaaaattatatcattgtgtatttttaatgaaaaaagtccttcgtgggagtccagagacccctaagaccatgtctaataaatgctataaaaaattaaaaatagtgtaatttcatttttttagtccatgttaagaaaattaattttaaatagtgatgtataatataatttaaatttaacacatactagaaattgtgtcaaatttaataaaaaatttagtatggggctaaattttatacaacaataaatatcacttttatttatttttttgccactcaaaaatatgtttaacaactttttacatttttttttgaataaaatcggcgctttattaagaaatctcatccaagcttgaggatgaaacataaccaggaagaaatctcgtccatcaatgatctttaatcaaacttagcgcatccttgatgctcaaagcttgaacaaagagtggatgaaatataccctctctcttaccacactttcattccacaaccacaccaagagaatccccagcaacacaaccaaagccaaaacgcctgctatcaatgaaaacagctccatcaatattaactttgatatgaggatacatcggtgtcatccaatgctcaatctcaacctgctgagatgcaaggttggtaattattgaaatcttttgagcattactccaatcctcaaagcttagcttagctaacaaattacatcatcaatagttggctatttagcattccaaaccagctagttccggtgatgccatatcgaccaaca

SEQ ID NO: 255566 - DNA, 972 bp, Cannabis indica
attataattaaattataccaattaaattagaattttttacctcctaaacttttcttatactaaattatgttctctaaacttttctagccattaaaaattgttcctaaactattgagattgttggatttaaagacttttgtccaattttattcaatttgattaaatcatgctccccatatttgatatttactaaatcatattactcgaactttgacacgtactaagtcatgtcctctgaactttcattcatgttagacatttcttactaaaattggaacaaaaaatctaacaatctaaataatttaggggatttttaatgaccttaaaagttcaaggaatatatataatttggtatatatcaaagttcagatggcaaaaatttttaattagcctaatatttataactcccaaactcaaaattaaacaagtacaatactacccaacttttacttaaacttaattaaaatcttagttggaatcatttataagtcattaattaactaaagaagagtgctaccgtcaacctcctgttacaacctcttagtcaatctccatgccggaaaacacatgtcggaatattttttgtcaaaatttttttttcacgagagtattcgttatgcttacaacatcatcctgtaattttttaaaatttttgaatagtttatagtgccaaaattacgtttgaagttttttgaacgtgcgtggtaaactgaaatattaggaactctgttttcggtactgtaaactattcaaaaaaatttcaaaaatttacagggatgatactgtaactatagcgaatactactatgaaaaaaaatatttcgacatgtgatttcggacatagaagttgactagaagattgtaataaaaaattgtaattagcattactcttaactaaaatattcacgtcaaaaaagaaaattctaatgtcaactaaactaaaaagctcctttctttttatgtatatgtatgt

SEQ ID NO: 255567 - DNA, 751 bp, Cannabis indica
tttttgtccaccgtgtaagactttgtttctttcaccccaaatggcccacataatgcagattaataattcaaaatctggttttgaatattggtttgataagtggatgaggtaatctccattatacatatttcgggcattatgaaagtctattgaaaatcttgatttcttccaaaccgatcttgcactatggcatgtaaacagagcatggcctatagactcccaggcagtggtgcacatcgaacaggatgctgaatctattaccttctgcttatgcaacgcagctgccactggtaatgcattctgcattactttttatgcgaagatctttatcttgggtggcaaattgagttgccaaaagcttttccaccaagctgaatgtgaatttgatgcagaagtgttcatgctttcctcaatgttacaggcaagatggaaaccagaattgacagtataaattccagtggttgtatggtgccaaatcaatcgatcgggtgtgggaaaaaactcagaggaatggaaagtattttgtcaatgtcgatgggctgaaaatactggtgtagaagattgatattccattctcttgattcagtaatgagtgctgcaaccgtgagtgatgatggaccattaaaagaaatcggttgaaagttgtaatggccaggaatccatttatcaattctagcttgaacattgtggccatttccaatcttaaaccgaagccctcaatcaagagctctcttccccaatgtataccttg

SEQ ID NO: 255568 - DNA, 627 bp, Cannabis indica
ttaacactcccccgcaaactcagcattggatggatccaaaatggtgagttgggctctgaacttgcagaagctttgagttgatatagctttggtgagtccatcagctaattggtctgtagcaggaacatgcttgacatcaatttggtgactttgaactttctcacgcacaaaatagaggtccaactcaatgtgtttggtgcgagcatgaagcactggatttgcagtgagcaaaaccgtgcttaagttgtcacaccatacagttggtggatgagaaagatgaatgtgaagttctgaaaacagagattgaagccaggcaatttcagcaacaacattggcaaggcttcgatactcggcttcagtactggaccttgagatggtgtgttgcttctgagatttccatgtgattaagttctgtcctagaaatacagcaaaccctgatgttgatcttctgtcatcaatgtcagaagcccaatcagcatcacagtaggctgttaattccagtgaggaagatttggtgagatgcagaccatgttgtaaagttccagccacatatcgtaggattcttttgacagctaaccagtgagattgaagaggtttttgcatgaattggcaaactttattcacact

SEQ ID NO: 255569 - DNA, 581 bp, Cannabis indica
ttctcttctctttctcagctatcggtatcattattcaggtatctgttcgtatgttttcattaatctgtttatgcacatttgctcagctaagaaatttacaaatgctttcaaccttacatggattgaaatcctaatcaaccgaaaatagttgctggtttttctcaaaggaataatgagagttatgtattagggaatttgttattaaatgacaattctttggctgcttccgtttcaagctaatggataatcaatgtcactggaatcttcatagtttgccttctgtttggaatttaatttcattatcgatcttatgtgtgcacctagctagctatcatttctggataaaatcatattttagctattaattgctattatatgtagaggtgtacttacatatatttggagattggcaattgtgttattcatttttatgcattctaagtcatggttgatcacattaaccatattgatctttgttccagcaatcccttgatcttcatctctgtgcatgtttgttttttctagaattttgttaaacattgagtctatttaagtcaaaaaaagtcactggtgtaaatatt

SEQ ID NO: 255570 - DNA, 539 bp, Cannabis indica
aaaatttaaaaaaaattaaaggtgcaaaatcaggttggtcggtttattgggcgggttggacctattttcaacccgcccaattaacagattgggcggttcgtattttttttttgttatttcggtttgtaatttatcggttttttcggttcggtttgtaatttttatcggttttttcggttcggtttggacgggttattcggtttagacagtttacgaatttttttgtaaagccctagccctaataagtgttattgttattggaataaagaaaggaaattaataaagcaataaggttgtatttcctcgtacctacacacacgccaccgaaataatcatctttgtttcaaaaacatcttatgtagattctccctataaatatctgattaattaataatctatgcaccttcattaaacattgttttatactctgctacaatttgcctttgaaatttaattaagcttccaagagatttgaaatattgtctgcgtaagggatactatggctgatgatcgaggtaaaaactgatcgatcaaaagaa

SEQ ID NO: 255571 - DNA, 558 bp, Cannabis indica
aatgcatgattataagtttctcaaaacttttggagtggcctactacccatacataataccttactaaacacataaatttcagtatcattcccaaaatgtgttaatcaagactacagtgacagtcacaaaggatataggtgtctaagaagtattgggagattgtatatactaaaaaatatcatattcaatgagtcagagttccctttcaaaaatagtttcctcaaaacctatcaatatgaaaaactggtttaggttcaagttccctactagtctacctttatcaatgtggcataaatagcttcctaaactcaaactgaataccggactgctcctcaaactgatagagaacacacctcaagtacgcatgaagtgtctcctggcatagatgatcatgatcattctataaatgattagaatgatgagatcaatcaaaccctacagcttcagaagccctatggtgatcgaacttcattaggatataagatgctatataagcaagggaatgacctgtcagttgagcattccttaccctccaatgtcaattcatcaaagaatgaa

SEQ ID NO: 255572 - DNA, 536 bp, Cannabis indica
cccccacaactcaaattaatcccaaactttctaaaaacttccagaatacctgtatagactatatcaaaccaatcccaagcattaaagttcaacaattcccacaaatttccaatttaccattaaagagttaagtttgagttcataaactcaaactttgccttaacctcaaatcaacctttaattctagctgaaatcatctcacacaacaacaaataaactccagaacatccactcaaactcttataattcatacagcaacagaaactctaaattcattcacaaaacctaacttagactaaagaaaacctaaaaaaaaatagcaagaagaaataccttgatttggaacttcaaaactcaacaatatttcaaagattttagcaagaaaacccccctccttgctggcttgatggatcgaaagagagggaaagagagagatgaacatggagacttcaagcttaagcaaagcccttttttttttcttcttctattttaattaacctaacttattcacagccacatataaactaatataagac

SEQ ID NO: 255573 - DNA, 692 bp, Cannabis indica
acttttgtttaaacatcatattattaaatcaaagtttttaaatttaaaaaaattaacaaaaaaaaaaaaatctaacgtgctttgcacgtagttgccttctagtatatataaaaaaaaattatatacgtatagctcaaatattattattattattattattattattattattattattattattaattttctgtctttttttattattttttaaataactaaaagatcatctctacaaaaaaaaaaaaacaaaacaaaaaggtaatgacccttaatcgtataaaaaagaattaaatacgacaaatttaaatctatataaaattttttatatatatatatattttcaattgttatacatatatttttcttttaaatccaatgtaatttattcagtcagaatatgtatttagaaaactaatggtataataaatttattaattaaaattattatttattatgtttaaaataattaaaaaagttaacactttataatattaatttattttcttgtgtcattaagagaaaaaaaaattaagtgctcatattatgagcaaaaatacatgtaaaaagggagattatatttgtacctcaaaaattataaccacaccccatcattaaattgaccccaattaaatattgttttttataaccccaccacaccctatttagcaaaagagtataattttgtacac

SEQ ID NO: 255574 - DNA, 605 bp, Cannabis indica
ggaatattaatactctgtcaaaatgacagcatgggaaaaattgttgcaaaataagggtcaaattatttgttccatttaaattgattttatcaataaaatgataatgagtcatgactagcacttttcaacaaaggtagtcagtcctatgatatgaacttttgtaattattttattgatagtgctagtcatctctaataaagtgaaacctgcaatatattattattaaattataactaataattaatctgtttttactgatgataagaggatatatatattagcccagccatatatatccatctacatagtactatccataaaattatacatgtatcaaaatcaataataattagtgcatcgatcccactacaaataatgatttctaactgttaagcatcattgagcttagagacgaattatttaaatttcttatttcttatttttttttaaggattatattaatttcttattcactattgagtaataattcatattcttacgagttattattattaggatgaggctaaaatattagtggatttttttagttgttattaatcatgatatcatgagtggacctgatttttttttttcttgttcttctt

SEQ ID NO: 255575 - DNA, 548 bp, Cannabis indica
aagtgtataagcctaccctaaaaggagccttaccctatatttatcttcttagttacttgttcccactcataagaatcccaattgaagatgaaactaacatttatgaacccaaggattctgacactcttggtgagatcacattcaaattaatgcgctacaagtttaatgaagtggaaaagaagtggatttctaccaaacaaggttcacatgtccatgaggaagcaactttggtctcaagtgaaagtgaagaagaagaggaagaagcccaagctcaaagcgaagaggaagccaaagaagaagtgtcgctaatgccacaagtccctcactttaatatcgaaaaggcttttgctaaccttcacacctccattccttccaattttaacaccttgagaggtgaaatgaacactcaaatttcactctccaaaatgagatggctaccataagaagcggcattgccactatgtggagtgacatggagtacgaatttactgatgctcaagaagagatggcacaatgaagggcttgcatggatcgatttggacctccac

SEQ ID NO: 255576 - DNA, 564 bp, Cannabis indica
atcgctaaaccgtggacactatctagcggacccgaaacgaaaaaggtacataataatggtctggttgatgtttataagtgtatagacaatattcgctcctcttttgcagttcaccatgcttctttgttcccttgtgttccaccgcgtcggctggatgcctgaagtcctccccccaggtagggtgatctggccgagtgcatacttctaagctggattttgctgatgctttatgtggagaagcggcgacttgctatcttgctctggatgtcgcgaagcataatggagttaagtttattattgtcgagagtgagtcgagggtagtgatcaatgctctcaatagagaggttacccgttgggagattgagacctatgtctctttttgtcttagatcctctccttatttttgttagttgtatttttaagaatattagcagaaactataattttgttgtccataatgtggcttagtgggcgtttacctacaaaaggttcggttgtattccgatttcctctatcccagaacacctattttgtaatgaccgcaaggtctaactgcgtttgatt

SEQ ID NO: 255577 - DNA, 1940 bp, Cannabis indica
taaaataatttccaacaccacatgtatctattttatagatttaaataaaacctgtccccaaggacaattttcttttacctagcattgattaacttgttgatgccactgcaagtcatgaattgcttaactttatggatgcgtactcgggatataatcaaatcccaatgtacggactaaaaatgctcgacttgcgcactaagtttcacaaagcttctatatcccacttctcactattactttgagataaactccaagcatctatagaggcctaccattgatcaacttgttgatgtcaccacaggtcatgaactgcttaacttcatgaatgcgtacttgtaatataatcaaatctcaatgtacgaactaaaaatgcttgacttgcgcactaagtttcacaaagctttcatatcccacttctcactattactttgagataaacttcaagcatctatggagaggcttaggaatagatatttttgagagcaatcattagattgtgcaagctttgattctacccaaaaatgggtcatattctcttaacccttatctttgatttatatggattcttttatgattaatctcattattcttattgttattgatctttaacaagtttattgtcattctttatcatcattatttcattagcattaataagttatcatttatattaatgtatgcattgtttttttattatcaagattcatgttcatctcatatctcatgaatgtgaattttgatttcattatggttctttattcatagaatacattctctaattgttgtaaattgattatgtaagatcataattcctagcaacctttcgattataaatataatttgaaaattttaaaatatatttaaatgttgaattatttattaataatttatatataaatatcgaaaaaattattactcatacgtggggttatgatcttataatgtataagagaattaagatcatgagctatcaataaaatagtcatcaacatattaaagtttagaatctttaatcaatggttactagtacggtttactgatgcacgtcactcggtgctggcaattttaatttggattactaatgtagtttgacatcttgataaatgtactgtatataatagatattatatataacaagactaatatgtaattactctaagtttatcaaattaattgtttactattaaactagagattatatatgacaagactaatatgtgtttactctatgttatcaaacattgcggtgtaaatttgacccatcttatattttgtgccaaattttacttaatttttagcatttgttaaatttagcacactttttacactaccattagagcttcattttttaatgcactaaaaaatagcaatacaccaattttatagcccttcatttgagatgtttttagagtatctctaatagaatgctataaatgtggtgtctatgtatattttagtcaattttcataaaattaaactttgatggtagtgtataatgtgatttaaatttagcatatgctaaaatttgtgtcaaatttagcacaaaatacacgatggactaaattttacaccgaaataaatattactttttattttctcttttacgactcgttaatacaattaataacctttaataattttatttatatatttaatatgatttttatatattcataaaaataaaatataatttaatacttttgttgactatattatatatttaaaataaaataaagtgcattgcattccaacaatattattataaattaaaatcaaatgtaacatcgacttattttttaagctaaatttagtacaaaatttacactatttattgacgatggtctcaagagagaggtgaaaacgaaagaaaaagaacaatagttgggtttttttttagaactaatggtgaataggttataaaaagatatttgatgcaatac

SEQ ID NO: 255578 - DNA, 1021 bp, Cannabis indica
ggatttcctcgatatctgtgtgaatgtttttatcgacgacgtccttgtgtactctcaataagaagaggagcacgagtaacatctttgaattgttctataacggctacgagaacataagctatataccaaatttaagaagtttgagttttggctatctcaagtgtcttttcttgggcacattgtgagtaaagatggaatcaaagtgaatccagggaagattgagtccgtcacggattggccgagaccaaagacatttacagaagttagaagtttcctaagtttggctggttattatcatcagtgtgttgagggattttctaagatcctcaacacccttaacagaactcaccaaaagaatcagcaatttgtgtggacaaacaagtatgaaacaagctttcaggagctgaaacagagattgattatagctctggtattagccctatctgataaggaaaagttcatagattactgcgatgcatccaaaaagggtatgtggtgtgtactgatgcagaccaatcgattcatcgcttatgcctcctgttagttaaaggaatatgaacagcgatacccaactcacgatttagaacttaccgcagtagtgtttgctgtgaagatttggcagcattatctgtacgaaaagaaatgtgagatttataccgactataagagcctcaaatacttctttacatagaaagatttgaatatgaggcagaggcattggttggagttggctaaggattatgactataaaatcctttaccatcacatagaaagatttgaatatgtggtagaggcgttggttggagttggctaaggattatgactatgaaatcctttaccatccttgtaaggccaatgctatggctgatgcgctgagtaggaagggtcccgagtaggtaactaatatgattaagatttcacatcagctagcagaagacatgctcagatctggcattgattttattgtagcctaacttcataatttgacgctgcaatatgatttgttagaacgaattaaagt

SEQ ID NO: 255579 - DNA, 623 bp, Cannabis indica
ataatctgtcattcacatcaagaaaaggatagcaattaggcattaacaattgggtaaacaaacaacaggattctcttccctatcttctcatcttgattaatctttacttgtttctttaagtttattgaatttttattctgtttaaaatcttgaaaactatcgatttgccaaatagaatcacaagtctagtttagtggtattcaatccaattccctacggttcgacctcacctgtttaagtttactacttgattacgtacacttgcgtactgttttataattttcgtaacaagttatttagtcctcaatttaacagatatgttagttactccaaaatatcacgtgttgatattaaattacagtataagtctccaaaaagttcactttgatgtatataagtccctattctccaaaaagttcactttgatgtatataagtccctattctcgaaaaattacagtaaaagtctccatgctcaagattctcgttagttcataattacccaattgaacaatttcgtttacatttcttaaagttattatgtgtcaaaattttattggtacacatcataataaaattataaaaaaatttaataacttttttttttttatttttaattttctt

SEQ ID NO: 255580 - DNA, 596 bp, Cannabis indica
tgaaaaaaccggtccaaatattgtcacaagttgatgcatacttggacaattttcaaaattttaacaatgctgtcaaaccagtagctgttagtgcagcagctccagtagactgcattttgtggcaacctcctccagagaccaaattaaaaatgaatgttgatgcggctattgattcttcgaggagtaaaattagtattggtgtgattattaaggattcaaatggttgtgttgtggctgcaatgtccaaaccagtagtcggaaattacaagtcgcaggagatgaaaagccaaggccatgttctgtggtcttcaataggttgaacaattgcaactacaacttcactatatggaaacaggttgcttaatgcttgtcaatgtgttaaatggaaaatcgtgataatattctgttttttatgattcggttaaagatgtttcatatcatttatcctctttctctaatgcttgcctatctcatactagacgggatgctaatcaagccgcatatggcctggctaaacaagcattacagttggatagtgattgtatatatatggatagaagaaattccttctactattttctttgttattgtaaata

SEQ ID NO: 255581 - DNA, 465 bp, Cannabis indica
actcacagttggtggtaaatcatctcctggagaaatacacagcttgaggagaaatagtggtggcatatctcagtaagatccatgacctgctcgcatagtttgaggggtacaccatcaaacaaattccaagagaagaaaaggcaaaaactgatgcactagcacggttggcgagcaacacagtaacaaacaaagacagcttgattctaatccaacttctgaaagatcccagcatcacatgcacggaggaaatcgagatggtagacaacacactaaactggatgactcccataacaacctatcttaacactagagaacttccaagcaacaggaacaaggctcgaaaaatgatgagaaaggttgcacagtacataataatggatggtgtgatgtacaaaatgttggaaatttattttaccaggatcttagatctactcacaagtatgtcgtttaaacaccctaaatatg

SEQ ID NO: 255582 - DNA, 716 bp, Cannabis indica
ctacaaaaatgtcaccgaaaaaacttgcaaaccgggaaaaatggtttagtgtaggttattctcctcgagctgagtttagtggtgaaaatgtctcgtcaaacagacgccggaggtgaccgaaaaatccgttcaaagtttgaactcccaaactttgacttgcgatcccaagctaacggcggcgagagaagtggcgccgcttgggggtgaggtcgccgacacttgggcttcgatttgttcggtgtgtgaggtcgggcgatggccggaggtgggtcgccagagtgtggtggtgatggtggtttgtgggttttcttgttttgtgtttgaagagagagaaaaggagagatagatagagagaggggaacgacaggggcgtctgctttattgtatgtatttaatttttttttatatacatacatatatatattattatttaattattattttatatatatacatttgactcggtcaaaaccaagtctttatattctcccctcgttaaagaaatttcgtcccgaaattttaaagtacaacctcaagttgaaaattaaacaagtgaggatacttcatatacatctcagactctacctcttaagtagcctcgtcttccctatggttttttcataagacgttgaatactggaatctctctgttccttaacactttgaactctctcgccaagattttaacaggttgttcttcataagtcacatcttcct

SEQ ID NO: 255583 - DNA, 643 bp, Cannabis indica
taatactcttactcaacctttttcgattaagcttgataggaataattacactttgtggaggaatcttgtttccaccataatcagggggcatagactcgaagggtatgtcaatggtactaagccctgtccaaccgagtttgttggagcacctggtaatggagaaaatacaccaggtttcagacttcaactgaatcctgaatacgagcattgggttgtgtgtgaccaattgctcatgggatggctatacggatcgatgacagatagcatagcaacagaagtgatgggttgcacctcagcacgctctctgtgggttgcccttgaaaacctatatggagctcactctcgagctaagatggatgatacgcgaacaaagattcagactactagaaagggaggcacaactatggcagactatcttcgacagaaaaggaattgggctgacagtctagcacttgctggtgatccatatcaggaagcacatctaattgcaaatgtgctcagtggactcgatgctgagtatttaactattgtctgtcaacttgaggcacaggcaaaaattggtcttacttggcaagaaatgcaggagattttgctaagttttgatagcaaactggaacgattgaatattcttggtgcaactgga

SEQ ID NO: 255584 - DNA, 7814 bp, Cannabis indica
agtatgttaatgaatgagtttagtacttgtttgtattgtcagattttgctaccattttttcccaatcattgaagtgcttctgtagttgtcaaaagttgtttttccaaagtttgtagttgaattccttgatcatattacttgagattctcattaaaattttccaaccacaaaaggttggtgttgttgcttacatttagtatgtaagtatgcatatgtatgttaaggctattgacctgctttttattgaactgatattttttatgtataattttataaaatattgccaaatgggggaggttttgctattgtggctgattcatatttatattgagagttcttcgctgaagcagatagaaacagatagaaactttttctctgttcctgcgatatttatgtaaatatatatttgtaaatattgttattaacctctcactatgtaactcttgatttttcttataatactctactctttgcatagcaatggaattgatccaacttgttattagtttcaatttagagattagaaatttgaatttatcatgtttatatcatgcttgagtagattaaaactatcaatctcatgtattgtgtttgtgaccatgctgtaattgtattgttgttgagctatgcactgtgtgagtttgtgagatggggttttcataatttttatataattatgcttttttagaactctaattatatcaaatcatgtcaacttcatgttgtcacatgacatgtttacagtttcaggtttgccatagccaaaatctgaaagtcttttctcattctgtgtcttcgtatcaagtatggattcagacttatccccatctatggtaaatcacccagagcacacaagtatggtcacggacttatcattgtctccaaagaatgaagacaagaaggaaaagaagaagaagaagaaaaagcagaagaaggaagagaaggagaagagtcaagagttgtccgttcaagcaactgtggaaatggtcaaagaacagactgacaaattggcacctcttgtggggtatttcccttctggatttgatccgaataaggacccttcttctactattactagggtttttagaaacaaggataagcctaaaagactcgagcttgtggtcactccaaatgctacgtcaaaggtggattttgttggaaccaactattctggcgaagctgcagctggtcagcattgtagctatgcgcttggagttcttgacaaggaaactcaaacattgaagattgttcctattgcttccaataaggtattttatagaattttgtgtgggaaactatggaggttctgttatttgctctctttccctttttgagacactgaggatttatagttgcttgagctttagtagttggcagatttgtgctgtgttcgtatattgtttgtttgtatgattatcatcagtaattcatctgtgtgtatttgtacgtaggtgatgtttttttctaaattttttagcattttagactggcactgatgatgaaaaagttaaatattataaatgctcatgtctttttcgtttttccttatattctatgtccacgcaagttattgttgaacctcactcagtcacttgtatgtaaatgcttgcccagatatttagactagaacccaaaattcgagggctggttggacagaagtcagagcaaacagaaccttctaaattgaaatcagaacagatggaagagctaactaatcactatggtacaataaggtcaagaagagaggtaagttaccgcttttctttgtgtttgtaaacttttttaatgcggccacacttggtaatgtcactattgtatcttgttttgaaagtatctgagtttttctttttagcattagaatatttagttgaattttttgtgataattgcaggctgagaagttacgagttctgcataaagaacacgatcctagctctcaaagagatctgcttgggaccattaatcaaattgctgtgaagaaagaggacattggaagttctgaggttcatggctcccgcaataccccaccatataattcagctgctgctactcctcaggaggcttacccattggagaagatcatttttgaaggagaatgggatttcctacttgaagatatatatgaccttttgcaaacagaaacagaagtgacttgggatgcttatccaacctttgttgccaatagaatacataagttgcacgaaatcaaggtatgtgttctgtgcctaatgtttgagttttgtgaatggtgtacattaaatgctctaagatggaacttgtggtgtggctttgccatgtacatattcatttcccttttgatgctttattatattttctatcgtattctggattggaagacactttccatttatggaatgagaccttccagccttttctctgggtaataaaaaatcaagttcctcaaaagttgtactgaaagacaatatagtttctttactattaaagaacttcatatatggatttctaatgaaagggtaactacaacaaactaataaggctatatagctcgtacatccctgagactcaagactaatttttatcttgtgtaatgtcgtgtgtttgtaggatgaagaggagaagaagaggctgtcttgcgttttctcatacattacccatcttgtgaagtttaaagataagcactcaatggatcatttttcctccgcaaagaagcacaggttgccaagaattatactccagaagttttcatccatgtttgaagacccagactctcacaaactgtcaccagataaacacagtcttctcattagttatgtattggtactcacactacatgctgatggattccgagcaaatttgacagatatagcaaaggatttgaaactagatacaggaactttgagagagcattatgagcacttgggttgcaagcttgttcgtgacaagaaaacgttggttgcaacccttcctactcctctcaagtttccctcaatgaggcagaagcgccgacaatagtctaactttatgttttcggcttaggtttggtacacaaagtgttgatgtttttctttgtattcaatacaatagtgccatactcattgggaatagtttcgcttttgaaagtttaagtttgttgattcaggcttgcaccatttttgacaaagtcgtgttgtattaatgaattttatgaacgtattaaaattgacctcattcaacccaaaaaaagaaaatttagaagtttttccacacgagctgtactcatcttatttcgaataaatttcaatttatatgagatgaaagtttttcatgttctaaatatgtgtgtggtggtgtactactactaattccacattaacaaaaacagaaaacaaacgaaaaaccgctcgttatagctccaataaatgcacaagaggattttcttgaactaaataaggacaagcaaaatttacatatctaaggaactttaacatgacgctgacgcatataccaaaaacacatatggcattccacattacagttctttttgtttatagtacacagatttctttactcagaaatcaaatttgagcccaagagaggaaaaaaaaaaaccaaatggacattagcaatatatatgaattagattttcttatctaagagtagtatgctgggtgaacttttaatccattaggatttgctcttgaattttctttgagctttcaaatccaccacaatcacagagatgttgtccttgctgcccttttgaagggcaagcattgagaggtactcagctgctgcttgcgctgctagatccgcgcccaaacccctgtctgccaaagctgtgacaccgttcttcttgtgccagaggagtagccgccgtcgggctacttcacaaatttcttcattcgtcataacgtcccataaaccatcactggctaagataaggcactcgtcctctctggactcgagggacaaacataacttctggttctggaattatccacggttttaaatatctatctcctgtaacataaacagtaaagagtagtaattagaaatcatgcattagtggaggttaagatcaatgtcagactaagagggacagagataatacctatggaccttgacattgcaagaacaccaaaaactcggtgaccattccactgaatgacctttcctccggatgcctcaatcctagcatattcatcctctctattgggctgataaaatagacaaaatcaaagagaaaaagttggaagattaaattaggttctccaaaaataagttcaggcttgtctacagttagatacgaaagaccataaaaccgccttactttatgatctactgacaacgggacaggttctttcccacggcatagcactgctcttgagtctccacagtttgcaactatgatgtgtgatgaacagactaaggcaaccacagctgtagacccaacagtttctggggcaataggctcaattgtagcatcggaagcatctccattaatttttccaccaatctcatcatctaccttttgaaagcaagaagtaaaggctttctcccacagtacttgttgattttctccaacatctccattgcttaaatcatcattacacatttctatctcctcagccaaagccaaatggatacactcactgcaataactagcaacctacacaaggagacccctcccaataaagttaacaatatcagagttttccagagtaaaattactatcataaggaataccaaaagtggtgcaaatctaaaatattggccatatgttgttgagaagtaggcaaattactaacaaataaacatcacagaaaagagaaattacctgagaaccaccatggccatcataaacaccataaaaatgactgttcaggtgggtcaaattctggttggtttcattgagcatatgattgccgataagcattttgataggaatttttatacaccgaggtatagcagcaactgcatcttccatttccggtcttcttccacaaatagaaacagaaccccaaagggggatgcagtcctgttccaaaacacttcggctgctccctttaccgaagttcctctccccctgtgactgaataaccagtgtggaggccactaagtcagacttgctggaaatatccgaagcaggactcactgctgcaacaataacttcaccagaaggtaccttaccattgcttgattccaccaagataatagccttagcaacaatctgaccatcttcaacattttcaatctctacaacatctggtatgcttatttcaggtcccacccccaaagctaccaactcttccttgataattccattattattgtcacaaactgctaccatttcatcatcactgctaacttggaccataacatcactggtcacacaaatatttccattctcgggcaatatagtaaacaaatcggccccacctccattctctccttgagttgacatggtcaccatgctaactgtattctttgcagcattacaactaacattggcacatgaaatagactcagcagacaccaacttactaggatccaatggtaaatttccagcttcagttacgagcttgagctgagtgaacccaacgtgggttgtgattccagagttatcacacataggattatctacgctaaatgtcattgcaactgccgaaggcatctcttccatcaagtcccctctttctctaccattaagctcttacatttctttcttcattgcataaccttacaattcttaatgtgcttcattcttttcggcagtgagcccaggttagagttatctagcagaaacaacagaaatacataataaaatcaaatcaaacagaataaaataatcttagtatcatccaaagaaacataaaacaaaaaaggaaaataaactatgtggttcaagattcctagaatgatgaaggtgaagaccaccaaccgaatttctatcagacaaatccaaaggaaggccttgcccagcaaaagaaaagcacgtaaaagtcaaagttgatacatgagaaacaagctgaccatcagtcaatgctaacacataagctcataagtgtcagaaaagactcttaaaaccactgcaaaagtcataccaacatagatttctgccaccaattccctaaatcctattattgtatatataggagggctatcctaagtccttttcatcagagtcctagaaaaaagttatcacttttctttaaagtaaatccaaactgaaacatggtaaccatatcaagtgaggaattttacacatgttcaaatatactccacagatccaccaatactttgacaactaaagccaaattaaagtacaaattacaaatccaagattagaaattcatgataagtttcagctaatcctcaactaaacgaagcagatctgacgggcagaaacaaatctattcacctaatcatcgaagtatagtactttcacgtgtaaattgattttccatggactaaaaagttagtaaagtcttcttcttcctggtacaacaatcctatcctcaacacccaatccttattatataaataaaaaagatatatacatgttcatatgaaaatgactgcaatttaatctttttctacaaatccaggaagagaaagcaaaagggtcatgggaaagaacctagaaaataggaaaaactacccctaactatatcacaaggaaagcccaaaaagatgaaaccttttttcacataaaataaataggtttcctggatctgaggaaaaccatctatcttaacctctcttatcaaaagggtcctcctcctttcttcccttcttccaaccaacataaaattaccattaacccactacaaataatcaccaggagattaaattttgctacttggtgatcctggttggtaggtccctaaaaaagaaagaaaaaacaaaaaaacaaatccttacctgagaaaactgaatagagttatagagttgggccaaaaataaatggcaccttgaaggctcttcccctagattttttcttctttctgtgttgggattgaaatggagtcttcagactttgagagagagagagagagaaaaaaaaagaagagagagagagaaagagagagtctttttttctcttttcactaaggactcccttttaagacacgtatacatattatcttacatcatttatgggtgtgtgcgacagaaatgcttagcttaggactgttgttaccatgaagacaactactcccatggatttttcaagaggacaactttgagaaagccacgtgtctatattgtctcgataatgtctcttcaacagttcccatctctattattactcattacattaccattactactacttcacacaatcacaaccattaaagcaaaaaagaagaaaaaaaaaaagaaattctttctgtcaatgtaattttacggctccaatccaagtttttcccaaaaatatctcactttgttttcatagcactttcttttttcattagtcgtttttttttttcttccttttaattaatattagaataaatattagtttgtccgctagaagtagtgttttgtccttttgactttttttttgttgtaatttttttcaaaattatataaatcgttacaattacccccatcattaattcaattatattctacgattttttttataaaattaatttatctatatggccatgagtgattctagtgatgtaaaaaattaaaaatgtctatttagctacttttaattacttcaaatctaatttattaatattaaatatataaatattaactctattctcataattaatcattagtactatgaatatttgctacaacttttatagtaacagaaaaaaaaagtcctagacaaaatat

SEQ ID NO: 255585 - DNA, 422 bp, Cannabis indica
attaagtatcatatcccatataatttttaaaaattttaataacacacttataaaaaaaattttcggtagaactcttatcagtttcgacatttaagaaaactttttaatctattttttttttatgattgcgtacattgtagctatttaagatcacatatgaatttttgaaaaattcttagtagtttacaatactgaaaataaattcaatcaatttcttaccacacgtataataaaaaataatcatgcgtgtaataaaatatttaaattatattttcagtactgtaaactatttgaaattttcttaaaatttacaggctatttagcaatctcatgaaaaaagaaattagacaaaaaagcttccctaaataccgaatagagctaccaagagaaatgtagcaaaatctgttggattttgtgcccta

SEQ ID NO: 255586 - DNA, 578 bp, Cannabis indica
actgctgaaccgatacaatagttatgtcgcaatgatagcgccaatcaatacttctgggtgatatcctcttaatcaatacagtgcatgtaatgccgaactcacacaatggttgtaccgctatgaaatcacccaaaacacatacaatcacaaacacaacatgcatatataatacgttctagctagtgttatctcattttcgaattcaagtgagttagctgacctgtatatatgaatacataaatggtatttgaattattttggtgtaaataattttcttaataattataaaaaaagtatatcctttatattttattggctaatagtggttattgagttttgatagtgtgctaatggtataggtgattatagtgcttgtattggtttgttcactgatagggtttattattagaaattaattaaaatgcatagatgcattggtggagtggtccacttgtggttatacaaaaatttcaaaaattgataacaaatttatatgtaaccaaatagagaaaagataggattagttttttttttttttcaaatttgatttttgttaatatctaattaacttttctgat

SEQ ID NO: 255587 - DNA, 595 bp, Cannabis indica
cccacagaagcaagaagatccacatgctgttttactttcagtaagtaatcgttgaggcttaatgttcctttcttcaagttctgaagctttgtgcgaaattccaggatctttgaagaaacttgcagagtgaagtgtttctccaaagagttccagatctgatgagctgagttgcaccctaccatcctcgtgagaaggccttcagtcatcgatgacagcagccatgagaataagagctggtcctggacttcccagtcgatgaaggttcgactcactctgttttgattacgatcttcatccgtcgcgaactccggtggtggtggttccttgatgaacttcaagagacgatttcctctaatggctgcaagaacttgctgtttccacaacaagaaattgtagtcattgaggcgaatcgaaatgttatggttgaagtacaccggttcttgagagactctgttctatgtagcttgatgattattgacagctgcgccattgttggggatccctgctgttccaaccgtagccatgtttgcactgagcagaggccagcgttctgataccatgttaaacctttgtgccattagaaccagtaaccaga

SEQ ID NO: 255588 - DNA, 756 bp, Cannabis indica
gaaaaatatcagaaaactaattatgacattagaaagtttaaaaaacagtaactgtagcaaacaaatttagttatgcatctcacttacaagttcaaagcacagtaccgatcactaagtactaatgaggaagaccttgtaattaattgagcagcagtggataatagaaaaaagagtacagaaataataataataataataataataataaagacagcatatctacaatcatttcatatgaactaccttcacatgcactagtgcgtggtactgtaattgtcagtaccatgtatatctctagttagacttgctcacatacatttctaagctccaagtttcttttcactttttatatgagatcatgtatatccaatagatgataaaacaaacgtcaagtattataattactaattacaaaaaagttttctataataataaataatgaaaatgaaactagataactaacctttgtatcagacttttgaaagttcatttcattagtcacacgagcaaggtcttgtatcaggcaatgaaactcctgtgcttcggcaaataatacattagagaatgtgaaactaccaaccgtagcaatcaataacagacaactgctccaaacaaatatatgtaacactataggactccgacctaggacatgaaatgaatgagctttcatttacactactaacattttcatcattttgtaggttataaaaaaatggacagatacagaacaaaagaaaataataataaaaaaaatac

SEQ ID NO: 255589 - DNA, 654 bp, Cannabis indica
tgaaaatttacataaaaattgtgattgttgtatgaattctctatcgcgcctcgacaactgtcatgcttacattgcctgattggggccgattagaggacgaataatctgcatccgaagaatatgtgctattccaatatgctggcggtttgggttgaggcaacaacgtctcaccactcaacattagaatgacagaagacatatcaggcctatcaataggcatttgttgcacacacaaaaggccaatgtggatgcaacgcaacgcttcttccatgttgtcattcggatcttttagcaagcacttctcaataagcttaaattcattgccttccctcatcaaattccatgcctaacaaaatgttaaataaaacataaatataaatacaaatttcgctattaatgtgacattaattaagtatttttcgtatgtaaaacttaccaatccaatgagattgagactactatattcatcataaaaggatctactttttctcccacttacaatttctaggatcaacgcgccaaaactaaatacatcagattttattgagaataggccattaaaggcatattctggcgccatataaccactgcatttacataataaatttttttagattatgaatattaaagaaattgtgtttgttttttaaagat

SEQ ID NO: 255590 - DNA, 515 bp, Cannabis indica
aaataaattatatttttattttaatgattactaagtaataaattgtataaaaaagtagtttgatttatgattttttgttttttttattaatttggtttcttatgtttttaaagtttgaaaataaacactatgaaattaaaaacaaaagaaaatgaagagaaaataaatataaatttaaatttagagataaggttttattttgattgattagtatgtagtcgatatttgttattaattatatttatatatatactaggagaaagctacgtgcaaggctcgtatacttagttttatgatagttgttttataatataaatgagaatgattcaataaataatcatataatttaatttaggaggaggttcgaatgactacatgtttattgtaaccaccatgattacattttttttaagccatttcgatcactattaaatggttgtgattaatttggaaaattaaataaaaaaatgacatgtaacctaatattaacatgttaatttatttccttttaaaac

SEQ ID NO: 255591 - DNA, 743 bp, Cannabis indica
ataaatcttctccaacctctcttctgcatccttcaaaagcttctggtacgcttcatgcatctcatccaactggattatcgccttatacagctgtttttccttctccgactctttcctacactcattctccttatcagccagttgggaccgccattggagccggtcaaccacatccggtcgcggcgagaggaccaaatcctcgagctgcttcgccaggttggcttcgatatcagccagcttggccttagccacgtcaacggcctcatggtcaggccggtcgccgatggttttgagcacggatcgagtctgggccacatcagtcacagcacgggtcatgacctcgattagcttcgggtcggtcaaacagggcatctgctcgactaactcatactgacctgcccccaaacctaaaattctaggatgcggaggagtaatcgacgacgtagatgtggtcgacggagttgtggatggtggtgtctggaagggttagaagaaatggtagctctggtgtttgaaatggaaatgaaaatggaggagaagatttgggtttcttgtatttggtggtgttttagagttgatcgtagtagtagagaggttgtttcacctgttcttctacatagtgatgatggtgataatggaggtggaggtttaggctaggttttttttagcagagaagaagaagaaaaaggaggagggcgtgagggcgtgagggaattagggtttaggtttttttttttaaattt

SEQ ID NO: 255592 - DNA, 1889 bp, Cannabis indica
tatcaattaaagaaaaaaatatttaacttacagcatgaccaattgtacttcggatttgaaaaggcgtgcacaggttccactaacccaagcaaccacaggtttgttcaccttcccctgttttaaagcttctaccagagaatactcatctcgtccaccaagcctccccaagcacaaccatcatcttaatctgcaccagtcaatcagattagaattaattgaccatgaaacaaaacatgaagaaaagtctgtgaggaggagacaatcatttttattttcttttccaaatttttttagtcatgcaaaatgaccacagtctacacagatgtaatacatattcacccaaatagaagaagaagaagaagaagaaaaaattgcacttgtgtcaccagaacttaaggagcagatgatagcaataaagtacctgtggaatattgttaaaccgcagaacatgatcagaaagagtggaacctggaaaaacatctcctccaatagcaattcctgcaatggtccaacatttccaaattttattacatccttaccttagctagcatagtgtagggaagagaaactttacagagaagcaagcacacatgtctaccttcatagattccatctgttacacgggctatggtattgtacatttcgttagacattccaccctgtgatagaaaagtgaaattattttccaggacaatgtgtacaaacaactagttaccagtttgaaaatcaaaatattatcaatatatgtagatacagctggtcaacaaattcataatgaaaaacaaaagagataaagaggagtcggagtgtatactcacagatttggagacaaaaccaacagatccgggtctgtacagcttgcactgaattatgttatcgattgttccagctgtgtcaccaatcttaaaggctccagcttgaatgccaccaacagtagctgggccaataacaacctgcaaaaccattaacagttaattagttcatcttcataatcagttcattgcagatggcattgcagtagttctctcaccttattgttagaccgtgcataagcaatcaattgcttagcatctgactcaggtacaccttcagcaatgatagccacaactcgaatggttggctgcttcagtgcagacattgaagaagcagcagcactggaagaaataaataatacatgttcattaataagaacttatgtaagacttcaaaattttaattgttaatgagcataacaagtacccaccttctaaatgaagcaaagttgataaagacatcagcagtggggtgtgcggcacaagctgcttcaatgctacaaaaattaacaatattcaatatgaaggtaagccaatcttaaactcagaaaagaaaggccaactaatagtatagtccatttctaagatgttcactagccctaaagttccatcttcgaagtccatagtaatgttactacaatcgtgcatgcaaaagaagaaaaaacatgttttgtgtgtttttgtgcttgataaattaaaaggatatgtgaatctcttgaaaatcagtagacattaaaattaaaaataaaatatatagatttgtgtgaaaatatatagattcacatgtgctcgtgcccacatgagcatgcttgttaatttatgtacaggggaggctaattgaaataattaataggtgtaataagtctgtcataaacaaattttgagactaacattgaacaaaatcataaaaaataagtgtgcatcaaatgaaacttattgtataagttataaatttgtgtgcttgctatatggttgtgaacaagccatgttagaatgtaggacttagaagagcataacacaacagaacactcattttgcaattgacgttcatgagcatttatttatttatgactgtct

SEQ ID NO: 255593 - DNA, 886 bp, Cannabis indica
tgggctgagttaggtcggcggtcagtactcaaaacttgggtttcctttgctttaattctcttacaaaaatgccatttaatttaatatctttccgtccataattttattatatttcatttgtttgtccttttttttccaccattgttatttttacttcataccaaaaataaaaataattaaattcaaatataacacattaatataccattgttaaaatataccacattaaatttaaacaaaaaatttttaatatacaaatatattacattattttcaaattaatcaaaacaaactctccctattaacgtgagctctaaaacatactataaaaatttgggtatgttccaaacaatattcagtgtggtgccttgagatattgtaattgcttgttgttttcttacaatagtcctcatattttgaaaataataagaattcggcccacccaaataatattttagattttggccccttcttatcaaaatctttctccgtccgtcccctggatccgattttaatattatactaatattgaaagctttatattttcatttctggcaaagaaaacgaaaaacgaaagcagtagatttaaccagtgaatcagaaagaacgtagcgagtatatttatgatcacatcaaaaacagtaagtaatcatcactctttataaatctctttcatcattttcacaccaaattctatacatatgaaaccagaagagaaaacaaaaggaattagagcatagaagaaccttcagaaagatagggagagcatcacgaggtcccaaagggaaagagatgaagagtaaatctgagaaagaaagaagatgaggatacgagcagcaagatttatatatataatgatgttttttcagattgaaaactataaatg

SEQ ID NO: 255594 - DNA, 903 bp, Cannabis indica
taaaagagatatgctaaaaggcactaacggtacttagcatcctcctatgtgtcagtatcgctattaatctaactaaatatcaagtcccatatagtttaatataataatttttaaagagtatcgctagtcaatcgcaacgcaacatatcaaaaaggtgctagacagtagacactactggtgcctaatagcgctctaactaaaacaatggaatgagcaaaattcagcattggtaatagagtaattttttacaacaaaaaaaaaaaaaaatcaaaaatacaataataattcagggccgggccaaacattctatttggtgtattaattaaatttgaaattctattcaaaaatgtttatattaaatttgaagttatttccctttcaacaaaattatttatttatttttgtaggattccaaatctccaactttgaccatctcctttatagaagagattctacacattcacatacaacacaatatatactgtcaaccaaaataaaataataacaacacatacaatacgttgtaagccaatctataataatcacaacatacaataatatttaatattatgtacataaaaaaatatatacatatttataaaatgtggtcaaccaaatataatcccttgagacacagggctggactcacataataataaacggagccgccccagctgaaaaaaagaaaaaaaaattatacctgtatttcagtcaattattatatatatatatatatttcaaattaataaacttctaattatataataataaaatctttggccttattcatttcattagggctcaattagtataatgttgttatatattctttttaaatataagcaacttattttgaatatatatctattctatataaagtgtgcctatataactaaaattctt

SEQ ID NO: 255595 - DNA, 573 bp, Cannabis indica
tattaagttttttatttgaaattagaagtcatgcttaattttaagttttattaaatatttctgtttatttttattttataatataaatttaaattttaaaagagtaaactatatatcataaacatttaattattttattaaaaaatatttagtttattactttagttttattaaatattatttaacataattttctattaacaaataaaattaaaaatatattttattagaaaatacattacattccatttattatttttttataatgtctatgaattctcacaatatatatttttttaaaatattagtatatgaatataataaatttaattattaaaaaatataattatattataaaaaaaaaaaaaaaccaatctacactagatttagtcctatactacatcaaacacaatatagtactaaaatcatacaatccacccctaagcatgagtttgaaccaatgggtcaagtttgaacatgtaggataggactcttgtttgctttcaaggatgaactaccaacatgaatttgaataaatgggttaagttagtcttcaaaatttgacagtgaact

SEQ ID NO: 255596 - DNA, 930 bp, Cannabis indica
ccaaatcttttatttattaccatgaattgtaatgaacattcctcttttccttagtttccctttttcttagtttcttaatatctcactcttgtatttgtataaataggggttcaccccattggaataaacaactcagaaattctcattcactttctctttctctcttcatcttcttcttctttcttctcatctactttatattattttataacaaatacccatttttattagggtttttttacatccagcacttaattttatatctaaattttaaaaataacatatattctcattttaaatattattaacgtttttattagatgggaatgtttacctaacgtggccactattttatttttttatttataattgcctttggggctcatttaattatagtagaatttacgtagagtatgggttttttaaacattttatgataaatatggcataattgattatggacactttatatggtttttttaaagtttggccataatttatggcattttaaagcctatattgctagaatatatttgtcaaaagcccatattatacaataatatagcgacgactgccaccttgttcctggttcgctctccctccccatcttcctctctctttttcttctatcgatccagtgctcgtgtgccaccgccgctagctccgagggagctatttctgtcattgatggacaaggtaagcgacctaccaaaaccttgaacccgaggttctccatctcatacttatgagatttctgttaaaaattgtctattgttgaaattttatttcgttccgtcatattctaggtaaactttcttctaccttaattgtatttagttgtttcattacatattaaatttataaaatgtgggtttatttataagaatcgataaaacttagagtactatcctttgttggaaattattttac

SEQ ID NO: 255597 - DNA, 523 bp, Cannabis indica
acctcttatttggctagatatagtttttagagaggtgtggtctcataacatccttaattcttttacaacatgtggctccttcttcttacttttcttcttactctagtctaatctaaaaaaatcttaaagcaaattaacacaacactttacaacttcctccacgcccttcaaagcttcctatcataggtaacatactccaactttaatgtttgacataactccacaaaattagatagatgcagatttgggtcttcaaagggtagtctaccaaactagactgaagattgtatcatttagagtatgactgactttatctcgaaattattggcctctacgacaggtggtcttatacaagactgaacccttgttaatgttggaagaacatagtccctcagactacggtcgtgtaaagaccgcttagtttaatttagaaattagcagttaatcacgtttaattatgaaaattatttatagctatttaaataattattatactgttaattttgaattcagagatgcattt

SEQ ID NO: 255598 - DNA, 597 bp, Cannabis indica
gaatgttcatccaagtcttgcttcaggaagaagtaagcaccactatctttgggagaagatttctataagtcttgcttcaggaggaagcaagcaccactatcttcaggagaagatttctacaagtcttgctttgggaggacgtaagcaccgttatctttgagagaaaatttttacaagtcttgcatcgggaggaagcaagcacaactatctttgggagaagatttctataacagttctcatttctttgaactggtttggcaaagcattcaatatgatcacagcttgatcttcctccttgattgtttctcctatgttagttagagacaaaacaatcctattgagatcatccaagttctgctccaatggaacagtagcattcatcttgaatccatagaattttcccttcaagaaaatcttggtggttgttgactttgccatgtacagttgctctagtctttccaaatttccaaggttgttttctcccttataacttgtcttagaacattgtcagaaagattcattatgattgcttatctagcttgcttcattatggtttcagattcaccattctttcttgcatctccttctttctctaat

SEQ ID NO: 255599 - DNA, 730 bp, Cannabis indica
ccacataacagggggtgttttctgaagagtgatgccaaactcatttagtaaagagttgatccacactagttctgttacagcagaggtcagggctctacattcggattctattgatgatcgagctacagctatctattttcgagaactccaattgatcaagttacctctaagaaagatgtagaagccacttgttgattttctgtcatcaaggcttaaggcccaatctgcatcagagtatctttcaaggttgagaagagtggatggtctgaagtgaaaaccgagatgaggagtccctttgatgtatctgagtattcttttacatgcattccaatgatttacagtaggagacttgagatattgacttaatttgttgactgaataagcaatatcaggtctcataaatgtgagatattgtaaggctcctatagtgtttctatagatttctggtttgtcaaggctgggactgttatcttgggagagtttattggccaagatcattggtgtgttgcattctttggcaacttcaaagtttgttttgttgagaagatctgcagcatacttggattgagtgagataaatccctgaagcatttctgtaagcttcaaacccgaggaagtaactgacagatccaagggatttcagagaaaacttgtgtgcagatctatgatcaacttggagatggtatttgaattagcacatgtgattaagagatcattacatatacaagtac

SEQ ID NO: 255600 - DNA, 799 bp, Cannabis indica
tgatggaatggagtgcccttcttcctcattcttggaagtactaacatgattggcttttgctttttttccttttcttgtctttttttgtccccatagccaggaggaaacccatgtaaaaagtagcatttttcgactaaatgtccaggtttgccacaattggaacaagagggacggggtttcttagctctaggaggatgagtaggctgagaagaggtagcagcagccaaaggaattgtgtcagctgaaccaagagacctttgtcgttcctcttgtatgatcatggtaaaacccgagaaagattggggatgggtttgttgagcaagatttgtgctctaacggaagcaaaggattccttaaggccagtcaagaattgaagaacttaattctggttatagtaatctaaaaagatcttcattgcaccacaagtgcaagtagtgacaggttgaaattctttcaactcatcccaaagggatttcatctaagtaaaatagcaggaaaccgattattcaccctgttgcaatagggtgagctcagtttgtaattgaaagattctagggccattgccttcattgaatctttcagcaaggtcattccacatatcaatggctaaatcaaaatacatgatgctttaagcgatttcttgagaaacagaggttactaaccaagacattaccatgttattgcatctaagccaagagttgagagaaagattaccgaattctggccgagggagggagccatctgttggaaatattttaccaggatctagatttactaccaagtatgtttcattaacatc

SEQ ID NO: 255601 - DNA, 925 bp, Cannabis indica
gtatttacctactaagatttattatgtttatgaaaagcatgtataaagattgagaggtcttttctaattcactaattattactacaattttttcttagtatttgtttaatatcatttgttttgttattgttatttatttataatgtaaatattaactctgtttattatataattatattttaatttataacatatatgttaataagtcttattattattataaacaatttattatattatcatagaattactattattttttttttaaaatatgtttctttttaatgcattagtttatctaattttatttttctaggtaaaaggataggctagaacaaatagtaatttatttatttatttcctttttattgatgtgttattacttattaattttatttattttttaactgattcattttttcttttgtagtgttcaatcaatatcaagtttgcagctttctaatgtttcttatgttttttcaagtattgtatttgttctaaagttagaaatacttttttttatattgatgactttatttatataattaatgactcatatttagtttaataattagataaataatttttatttttctcattagttaaatttataaattagtttgattatatatgatatttatacacatcctatattatttacacttatatagtatatataattattaataattgtaatatatgtttatgttatactaggtaacaaaatcgtgctttgcgcgactttatcattttttttcattttgatttgtaaaaaatttatactgaattaatggtatatcatgtataatatattctcaaaattatatatttttttgaaagaaatatattgcgcgcgactttgaatttatatcacttaagacatgtattaaattcttctagaatttttagataaggcttatttcaa

SEQ ID NO: 255602 - DNA, 578 bp, Cannabis indica
aaaattgctaaataataaatagatcttttacagaagtaaaaaaataaaaaataatcaagaacaatatcataaaacgttagttattgatcattactatttttataatacaatattaatacaactttcaatattttaactaaaaaataaataaacaaatctttttctcaaaaaaaaacaaaagaaactaaaaaataaataaatccttaatgttttttattactacattcataaatcaatacaacgtaattcttttaattaatatatataattaatagtttttatgtattgaaaaaaatagtgggtatacatttaaaattatttctaaagacatcactagataaaaaaaaaataattagtatttttccctctgtactttcggtattatctgattttacttcctataatatacagcttgttaaaatgcttcttaaaatataacagttacataattatgttctttatgttaggttccgtttcttttaccgtcaaaatttagtatttttacccctcattttgaccaatacaaaattttacccctttttattaaggctaatgagtaattttccccccgaactttg

SEQ ID NO: 255603 - DNA, 503 bp, Cannabis indica
acaagtataggataacgaggagaatccattatatcacgaagatctgaaataactttaggcggaggatcctccaatatatcacgaagatctaaaataactttaggtggaggcgtattagaaatgtcaggttgcgaagttctagtatttataatttgggacatgtgagagtaatgaggaaaaggaactaaaggaacttgagaaacaagaggacttttatgctcagagaaagaattaatgtgaataagatatgatttggtcaaattatgagtagtacaggaataaagaagaaatgtatatgcttaagaaagacaacatgacgtgacacatgcaacttttctgaagttggatcaaaacaatggtatcccttttgtccttcaccataaccaaagaacacaaactatagaacaagacgataaatttgtatgctctacgctaggagaaagcatggagcatgctgaaccaaaaattctcaaggaagaatagtcaggtgtatgcccatatag

SEQ ID NO: 255604 - DNA, 587 bp, Cannabis indica
aaaaattaattttaaaaaattataatattctattagtcctgaaaaaattattaaaacctaataaaaatattaaattaattaaaaaaaataattacgtttactaaaaaacataaattattcttaaaaagatatttcaaattttattttatttataaagacgtattgtaaataataaaatcaaaattattgaaaattcaactaagatttttttttatttatgtttataaattcatatcttaaaaataaagaaaaaaataattaaaaattcaataaaaatatgaaattattatttttttttaaaaaaagaagaagtgaaaaattaaacttaaaaaatattatgtttacttaaataaatttaaatttttagagaaataaaaatagattcaaaattatttacgtaaggtttagtttttacaaaaattaattttttaatattttttttattttttaataagaaaataaatagttttttaaatcgctcaataataagaacaatgggctttttcatttttatacttaaaaacagtttttttttttttttttttgtcattttttatagaattctacatagaaatccctcttgcaac

SEQ ID NO: 255605 - DNA, 554 bp, Cannabis indica
cctgggtgggatatcttcccccttcctccatccctgggaaggtcttagatctggttggttccaccatatgccctttcagggaggattttttcatcattcagtctaatgggaggtggccttatttgggaaacggttgggcctactaggcacgaatttcgctcaaagtccctagggcgtttagtttcctccagggcataaggacctttttccctttgaattgggccacttccattagcaattcaaatgaagtttgttgattgaaaaaatagccaactgactcggagtcaaataatcactggttaatcaccaataaggagttaaaaataataaataaataaataagaacacccatcaattatagaggttcaactccctttttagttgtattgatcgtgagataataccgtgcaaatcactaaggaaggcaaaccatagttcatgggccctgccctcacatgggatcttccaggcacattcctacccaaaggtcccttattatgtaaagactagctagtttatgccacgtgtaattgccatgtcatatgtgcaaactt

SEQ ID NO: 255606 - DNA, 531 bp, Cannabis indica
ctcttctgattgagagtacacaaggatatcgtcgataaatagataacacagatatcaaagaaatacttgaataccctattcatcaaatccataaaagctacgggagcgttggttagtccaaaagacataacgagaaattcatagtgtccatacctagtgcagaaagtagtctttggaatattctcctctcggattctcaaatgatgatagcccaatcggagttcaatctttgagaagaccatcttcccctaaatttgattgaaaagatcatcgattctaggcaaaggataattattcttgatagtcaatttatataattctggtagtcaatacacatgcgtaaggatctgtctttctttttaacaaacaatacgggagctccctaacgtgacacactaggtcgggaaatacctaggtcaagcatcccctgaagttgaatcttcaattctttgagttctgccagagccattctgtaaggtgccttagaaactggttctgctcctggtgccatatcaataatgaaatctatct

SEQ ID NO: 255607 - DNA, 629 bp, Cannabis indica
ccttcttcaatagaagagagataagtggtctcaaaagattacttttgtaccataaagatcagcacgtcagacggatagtggtgcggcagttgtcgggtgtcagttggtactgcgaatgagataaatagtgtctccattacttgtacttgtcgtacaaccactacttcttcagaggtgtgcgtgctttagcaattttcatcttttgttgtgcgttcccttgacatctctctctttacgctcatgatgcgagtataacacttaggagaaatagctaagtgatgggtccatgagaggtgagtcttgttgtttaatcttggtagcaacttcctcccccatcctttttggtggtcactctgtgtaacatatatacactgaatgtgattactccattgtgtggagcaggtggtgttatgtgataattaagggagtaagggaacaagggagagtgggtgagggattagggagggagtgagtgagggagcggggagagtgactgagggagtagggagagagagctagggagcggggagagtgaaggagtgagtgattacttctttactttctttgtttgtgatgtttgtccacatgtaaccaaattagatcccaagtcattaaagtgtgtattcttt

SEQ ID NO: 255608 - DNA, 689 bp, Cannabis indica
gcctccatgcgagacctttaagattgtgctgtcaacaaccatgattggtttgcagtttggccaacctttcagagcagcattcaatgcaacaaattcatattggaaactatgattttcttgcttctctatttcaattattattcttgtattttaagcagttatgtatcactaacagtaatatttagaacctattattcaactattgagcaacataaaaacaatttttccagtttaattaaatatatttcaaaaaaattaatattattgtacctgggtttatttttttgtagcatttacaagtatatcttaggaagagattgtatgaatctttagtatttccatgtagccgactttgtgcttgttccctactacgccatgccttcatgtaattcatattttttctatatttatctttcatttctgtctttatatctgcaggactacattttttttcaagttcaagaactttaattttacgaaatctgctatcaactttgttgttgcttgtcgttgatcttcaaatcttatctgaactgtacatgtgtgttcttcttaatcactccttattatgaatatttttgctttttcatttttttgaagattttaaactccatttgccatttgagtccaaacaaacaacattgtattctttacagcaagatttcactaccttgtattgaaatattttc

SEQ ID NO: 255609 - DNA, 1282 bp, Cannabis indica
tttatttatttatctaccaaaaaataaatatatattaaattatttttgaaaaaatatttgaattatatttctttagcaatcttgagccgttgttgaatttttattgcataatttcttatcgatgtaataagattataggatcatgaatttataaaatttgtaaatttatatatttctaattatacatatttcttataaataaaataatttcttaagagaatgaaatttatatgaattacactgaatttaagttgtgcacaattcaccctcatcttgaggagaaacaagaaaggaaaaattcaaatcacaataattgtattgtctttagatgatgacagagaagaaatactcacacatcacaacaaatattaaatacgaaatattaaaataatatagtcaaggttgtaatccagattttatttggcttattatttaagcggaggggattgagaaagattctaaagtaaacattatttaaaaatagttggaaaaatgaaaggagtgccataaaccgtagtgatcattagtcatagtatatagacaaagagaaaaccatggacataataatctgtcactttaattatttttttgtatgtgatgaggtgtggttatggatggaaaagactacttcgtagtggaaacatacgagtaattaatatatagactaaaaaaaaatctccaataaacaaacatagtggaatttaactttcagtggatggtccactctggccaattatcgaacgcaaagacgaaaaagaggaagagattattcaataatgataatcacatagtattgtttctgtggtactcaaaacaaattggggtgtctaagtatgcttgccactttcaaattttaagtcaaattgattaaaatatataatagacataaacaatattagttataggttaattatatataattaactcataataacattttatgttactaatttccaatgaataaataataaattacacctttatcatttgacgatgtacatgtgggcggctcgtcctggtctaacttatattttagaaagcccatttctaaaaataaagacctagtttgatccgtataaacatatgggttctacctcgacgttagagactttaataccatataaaaaatacatcagctattcattttattataatagtgttatagttttattatattatactttcttcgctacattttcatattctaatatgatattaaaactaaaataaaactctaacgaatatctaatccaaaattattaaccagtcaaaaaaaaaaaaa

SEQ ID NO: 255610 - DNA, 842 bp, Cannabis indica
tcagtatttaaattaatttaccacttaacccaacgttcctcattacataataaacatatgaatcatagtaatagatcctcattatatgtcgagtattattttccatgtattacgatatattcattatataagaatgtacttaatgtggcaatgtacttaagcgaacaaaacctaaaccttatttttattctagttctcttatgataattttctcagatgaaattaaggtgcacataaatatgagaaaatattgaaattagagttttactaataattttagttgtacaactaaaaattgcataaggagaactgaatcccataattactttacgattcttgaattgtgttgtggcatgcttttagtcaaggatatgcaatcacccgattcagtattgcgtgcttaatgaccacttatcacacctctttatggctaactacttaatgtcaatatgctagcttcgaccagtacttttataattcttagccataaatattgtagatgaatttgtcgtaaaatttttttaatagcctaaaatataattctgaactctaggcttactatgaaactctataatataccatatgagatgtatcctcaaaacaataaatgaatttaacttctatagtagatataacaattaaggttctccacaatacaacttagtgacaatcataagaacgtaatcaaatatcggtttacgtaattcaattatagctagtgaattacgttaaaatctaattggggttaactatatttctagaatgtcaattcatctcaataaaatatgcatggatataatatttagtatctaaaagatacctcattactttgtatgaaaaat

SEQ ID NO: 255611 - DNA, 1104 bp, Cannabis indica
aaattaatttaataatttaaaatttttgttttaaacaataacgtatggaatatactttaatcattttaaggttgtaattataatagtgaacaataaaataatacatgcattaataaataatattcaaattgaaaagttatggctctttgtcaaagaaaattatgcataataaatagataaaaagttttgcaccaaaaaaaaatctaaatgatctcgattaccgttgatctcattcaaattagatagtatatgataactttgaataactatgagatttttcagatgtacagaatgatcgaattgctacccttatattttaagatcaacaattgcacaatataattgttatcccaaattttgggttgtatgacatgcaatcaaaattgtaacatgtagcaagacaggtcatcataaaattatacatcgtcgatacattaagattgtacagagaagtatttcccttaagggcaagttgtcgtctggtcggtagggagacaacaacttgatagagaaacttgttgcgtgcttatattgaagaatcaatatattcttgatcaatatgtatatatattgacaaagtaaattattttaaatttttatgatagtatattaattaaacttattattatggcaaactcttatatactttattttttaaaattttataatttttgtatacaataaaatataacaattgcacaatataattgttatcctaaattttggcttacatgacgtgcgaaccaaattgtaactattattcgcatttttggtattggatacgtggactccaagttagcactgcagacctatcagtgggaccctcagcaaaggagaagtgggccaatcccacctggatatgtccttccatgaacatatcttggttctacagtcgtaaagccttccgccttcagtaatttgtagccggaagacatgtctggtaccatgagatcggagagataaagtcgtgcgttcccaaaaggcccttccgatttccctttatattccaacacacaaataaggaaactacaattgttagatcacaatagagtatcgtatcaagattaaagagaaaacttcctataacaaatattagcaactagg

SEQ ID NO: 255612 - DNA, 489 bp, Cannabis indica
aggagacatattattctgctgcacccaatgtaaggtttgtttacttataatcattttagaagttcatatttaggatgttaatcaacatacttgtgagtaaatctaagatcctggtaaaataattccaacagtggcatctatcaatacatcatgtacacctttaactttaatggcagataatatcattcggaaaagattcaagaaagcattggaaatgaatgtcaagcagcttaatcgatttgagtacgaaattattggtaaaggcaacgatgccatagttgatttgggtcaaagcaatgctcttgtcgtgtttttgacattgattaacttccttgcgtgcatgcattagcaacatatgaacaaactagaatagaaatatatgatttgtgctccaattattataagttggaaacttgggcgttggcttatgttgatacaatttatctagtgcctcaattaaaagattgggatatcgatgaagttgaatta

SEQ ID NO: 255613 - DNA, 682 bp, Cannabis indica
aaaatattggcacgacacacgactcatatttttcaatggcacggcacaacacgacctattttttgaaaaacacggataaatacgggtcaggccagcacgatacgcgccaacttacaacactaatttaagctactatagctaggggtgtgaaaaaagtcattaaatacaattacaaccgaccgattcaatcacaaccaatcaaatagaatcagatatccaatcataattggatcgaaacatataaaaaaatctaaaaatctaattgaatcagattagttgttagattggacatctaatctaatagataatcttactgatagacatatttatgggtacgtttggaaaacattttatttttaaatttttcaaacataaaaattaaataaaatttaagagtaatttatttttatgttcaaaactttaaaaataaaaataaaaaaatgaaaatctctttaaataattgttactaaacacactttatttcatatttttttaaaagactttatttcatattttttagtttgtggttcccaaattttttgaaaaaatgttgcattaattataaaaaaatttatattttatttttgaataattgtataaaatactaatttttgtaaaattattatatttgtacatttaaagtttatttttaaatattttacaagaaaatcacataaaaata

SEQ ID NO: 255614 - DNA, 662 bp, Cannabis indica
gagtgggaatgagaaatgatcgttagattatgggaatgacagaaatgacagaaatcagactttcagcaaggaggccacgctcagaataagtggtgaaaggagcctgagagattatgtactccttactcttacggggttacaaaactatatcagaccaccattattggaagccaacaattttgagatcaagctagcaatttcgcaaatggtacagtccactcttcaatttagtggtttgccatctgaagatcctcacactcgcttgtctaattttctggaattgtgtggtactttcaaatacaatggagcgagtaatgatgcaatcaaactgaagcttttcccattatctctaagggaaagagaaaaacattggcttaactctccacaaccaaactctattgttacttggcaagatttagcttagaaattcttgtttaaaattttccctctatctaaagttgctaagttgagtggagaaattaataacatttgtcagaatgatggacaatctttgtatgaagcttggcagcattttaaagatctattgagtgagtgcccctaccattgtgttgagtagtggatgttggttcacaatttttataatagtttatgacctactactagaatcattgttgatgttgcatctggaggcacattcatga

SEQ ID NO: 255615 - DNA, 832 bp, Cannabis indica
gaatcctttgctatttaaaaatttggaaaaatccctaggtgtatgaccttttatgaaattttgagatttatgttcaataccagtttgcggtatcgacgactgcacttagtcttgagttgcctgcgtatccttttataggaatcaagtcaaacgcagttcgaagagaaaaaactttttgtaaaaagtgaattcatttataccaggtatatatcatgtgcttttgatataatttatttattttatattttttttattgaacatcaaatcatacacttatatatatataaatgtctttctcttgctcctttgtacgaatttcaagattttgacttagtgttgtaattttttttttctttttcttctttgtgtgtgattcatttaaatatatatatattcttttttttttctttgatctggtggcatacttttttcttgtcttcttcgaccatgtgagagcataaactctcatttaacatatatataaaataatagttaaagagatatatatatatatatatatataaacgcacgtatatatataaatattagacttatacatatattttcaaaagtgttaactaattcaatattacttactcatatatatactcaaaagtgttcatcgactcaaagattttactaagtatttatttttttttatatggaaatttatatatacatatatatatttaactggcacaataaggtatagataatatatttttttaatcaaaatatatttaactacaaataattttgacaatgaatttatggatgagggtatctattttttttgtggaatgagggcattccatggatgagagcatccttt

SEQ ID NO: 255616 - DNA, 681 bp, Cannabis indica
ctacactaattagtcttaaattttggtttgctttgtggtgtggaaaagagatgattcatacaaattgataattatggtatttttccaaaagtttacaaaatgtggtttatatgttcgaagataaagttaggggattgagcctccgaaaatttattgtttagtcctattcctaaatcataaataataaagtttctattataataattattaaaattaagataaagttgatattttaagatttaattaaattaaattatatatctatctaaaacattattttaaggagcaaaattaaaacattttaactactgctgttgtatttcttttttaacttgtataataatataagtagcaacttatgttttcttcattcaacttatttttcttagataaaactttctctgtgtttatcaaatgtcaaatttttagtatgtttaatactagatttaacttttttttaataaataaatactacaattaacttgaacacaatatcactttgctattccatatttttgcttttttatattttgctattacatatatttgctaatgtattagtgggtcttaccatttaaaatattattttagagatatttgtaacaaccactcaaattattatatttattacttaagtatctaagttatttttagccgcaaaaatatcaaaattattatatt

SEQ ID NO: 255617 - DNA, 912 bp, Cannabis indica
agaaagaaatataacgatcctagttaaattgtatatttatatagaaaaaagatagtaaatagtatatttatattagtattaaggcatgcaatattaatattcgtgttgtaaagggaaagtggaaatgcgaatgagtcattttattgactgatatgctaaattttaatattgttataccaactggttacacacgacaaaacttaattgtaaacaaaacgtacatataattaattaaatttgaaatttatttatttattttgataaaaatatattaaaaattcgaactttgaagaccacttccaatttgaaggacagattgtaactcaactacaaatttattaatacaatactatttatcaaccgaaatataatcaatcccttgattttgtcagaacaaaaaaataatatcccttgagattgattgcagatctgaaagacagatttaataacacaaattaaataagactgcacaagatcttatattgattgccttttaaattaaaagaaatatctgatttcaaaaaaaaaaaaaattaaaagaaatatcgtataaaatttctttttttattattttaaaaaaaatagtcatccttgtgcaaaatatttacaaaataaggctagacatatatatttttttaaaaaaatattaaaaagacactaatagtgcttagtattatataaaaaattgtacgattatttgtataattaattataatttaatttaataattattataaacattactaactattcacaaggccttaccttaaaatggtgttgtgtattaaataacaaattgtgatttacttaacttatctacttttataatatctcatcacttaaaataatgagaaatgttaagggccaagcaccttaagctaacatgcatcataattagtgacaattttaatt

SEQ ID NO: 255618 - DNA, 769 bp, Cannabis indica
tgtaacatgaacagtgagtgatctgatttagaggacacagatcccagagaagccggacacttttggagcttgtcaaaccaggctcgaggagcctgtttaagcccatacagagccttgttaagcttgcaaataagatgctcttgaccaggtacctcaaatcctgggggttctatcatgtatacttcttcatgcaaatctccattgagaaatacattattgacatccagctgccttacttcccatcctttagacaaggcaagagttagaacaactctaatagtgactggtttgacaattggactaaaagtttcagtgaaatcaaatcctgcttgctgatgaaatcctttagcaaccgggcttgctttgaatttatgaagtgaaccatcttgattttctttgactttgtatacccacttgtagcctatagcttatctatcaggaggaagcttgataagaacctaagttctatttctagaaagagcaaggatttcatcacccattgcattgttcaaatcctcttgagctagagcttccttgattgttgatggctctttggtgatgagaaagctttttgatatgaataccagatatgaatctggtgttcattctgtgcaagctgttctttccaggagcattaagacagccagcaaccaaaggtaaatcagctggggatgagattactgcagattgatgagtatccagcggcatagactgagtgagacggtgatggatgctacaactgagtgtcaatatcagagtgatcactgac

SEQ ID NO: 255619 - DNA, 658 bp, Cannabis indica
aacctcaaccgcaacaacaatccatactcaaactcctacaatccggcatggaagcatcatccaaacttttcatggggagagcaacgggcaagttcaagtggagcacaagcacaaggaaaacaatcatttccaccgggtttttctcaacaaccaggacctcaacaaccacaccaacctcaaggctctcaaactagttctttggagagcttaatgagagattatatggccaagaatgacgctgtaattcaaagccagccagcatctctttggaatcttgaaattcaattgggacaattaggtaatgatttgaagaataaaccacaaggcactttgcctagtgacactgaaaacccaagaagagatggcaaagaacattgcaaaacagtaaccttaagaagtggaaaaattcttgagtcaaatgtggttgaaataggtagtaaggagccctcttcaatccaaaagagggggaaatgaagaaaaaaccagcaatttcagttgttgaaattcccccagatgttacaacattaggccagcattctgctgcagaaaaatctttgcaaaagccacctccaccattttatcaacaatttaagaagcaacaagacgatggtcaattctggagagttcttgatgttttaaagcagctccacatcaatat

SEQ ID NO: 255620 - DNA, 840 bp, Cannabis indica
tatatatttaggtgtccataaaagttaataccacatatagttttacgtaaaaatattgcataaaatacaattcaatgtaatacaatacaatacaatacaatacgacctaatacggcgttccaaacgggcccgtattgtattaaataataaataatattatgtttggataaagtaatgtattgtgttaattattgcgacaaaattttttaatacattgtaagttgtattatttaatatataacaaatagtttgtatcaccttgtattgtaatatttacaaaagatgtgaggttaacccaatctccgacttgaacccaagacgcgacccagaaccggccagacccggatttggagctagacttgtgactcggacccagactaggacctggaccccggaccttagacccaaacccgaacctagacccggactcaaactaggacttggatctcggaccttggacccagacacaaacttagacccggacccagacttggattgggatcaagacccagacccggagccagacatagaccctgaactccgaactcagaccggactctgaacctagacccgacccagattcagacccgagtcagtgttgggattgagtttattgaatatagattataactttacacaaccttttaatacaagttaatatcaaacatagtattgtattaaataatattaatacaatataattcaatacaatccaacacaatacaatacataaattaacacaatataatacatcgtaccaaacgaaccctaacatttatataaaaatataatatataactctcatataacacctaactaaacaactcaactattctaaaa

SEQ ID NO: 255621 - DNA, 747 bp, Cannabis indica
tcttattttatatgttttatacagttattaatattattgtatcattttttattgacaaatttacggttactttctatttcttttgttttttcttttccatttgaaagtgggtcttataattatattaaacaattatatagagatagttaaaataaaataaaatatttttttctgtctcttatttttaattttaaaataaaaattttaaccacactactagttgtttggcctcacaaataatatcattgtgacctacttttcaatgtgatcatttcaagatatgggaagcatatattttttcaccttttcaaaatcaaagtaattatttagttatttaccatattaattatatacttattagttacatttcaaccatatataattattaaaatataaatattttaaacaattaactcattggtattgctttagtttactaattataagatcactaatcgccacaaaaaatccaacattacaacgctttttattggcatcgtaaacaattatgattattttttttcctgataaagaagtgcatatttataaataaatgaatcatttttgtgttgtgtgtgaaaaagtaacttcctagttactttacattttaagtatcataattaactaaatagttactttttactatgtaacaatagaaaaatttctataattacgtattcaaataataaccacaataaaaaaatagtttctttttctatttaattaaccaaattttataaataaaca

SEQ ID NO: 255622 - DNA, 1416 bp, Cannabis indica
gtatgtcaagaccgaccaaggtctgaataatcaagatttgctgcctccaccggtagatggacacttgcaagtcaattattggaggcccacacattgctagagatttgggcaaagctcgggagaggtatgcccgaacagtgcagcacgagcaagaagaagtcatcgtggccatggaagaaaggaagcccgaagttccacgagcaggagagctgaccaaaacttttaaggatgaagacgctgtcaagattagatttccggacaacgacccgctggtcgtggaagtccagatagccaataaaatggtggccagaaccatgatcgacaatggagcttcttcaaacatattgttcgagactgcgtacgaaaagatgggactccaactcaaggatctaactccattcctccagcttgtctatggtttctccggtcaaggagttgcacctctaggacaaatccggctactcctcactgtttgacaagctccgacgagcataactatcatggcacagttccaaatattggatgttccttcagcttttaatgtagtgcttggcggaccagccctgtatgacttaaaggctgtcacatcaatatttcactcgcgcctgaagttcccaacaaagaatggggtagggtgtctaagaggaaaccagaagtctcctcaagaatgttataaccttgaagtggccaaggctaagaaggatgtatcctccaaccagagcacagacaaggggaaaaacattctcaagtagggaacttcccaaggcgaggatgaagatgtggatcctcgaattggggacccaagcagcaatgttggacctatggaagaattagaagagatcgagatcgatccaactatcccgaccagaaagctaaagattggaaaaggtttgttgctcgaagtaaaatcggaatttataaaatttctgagagaaaacctagacatttttgcctggtcacatgcggatatggtcggaatcgatccttttattatttcacatgttctaaatatcgatcccaacttctggccggttcaacaaaaacgaaggttgttggacaaagaacgagcagtagccctgaaggatgaaggtgaaaagctgcacaacaacaacttcataattgaagctttttacctggcttgggtctcgaatcccgtactagttcccaagccgaacaagaaatggcgagtctgtattaatttcagagacctcaacaaagcatgccataaagactgttttccacttccaagaattgatcagctcgtagatgcaacaacacaacacgaaatattaagcttcatggacgcttactcaggctacaatcaaatcaaaatgcatctacctgaccaagaacataaaagtttccgaacagatttgggtctctattgctgcaaagttatgccgtttggtctaaaaa

SEQ ID NO: 255623 - DNA, 813 bp, Cannabis indica
tgtttggtattggctactaagaaattttgctactaaaatttggtagcaataagctacattttgctaccaataaaatttggtagctaaaagcatggtagctaaaagatatttttcttgtagtgtaaacggtctgggaaccaagcagttaattggttagctcgtttttctggttcatgtcctgactgtattttcagtaagaggtttgtccctattggtttggaagctattttaatagcttatttgcattgataaagttgcaatctttgattcaaaaaatatcagcatcaactttgacaacaaaaccctgagatctactcattccttaattagtcaatagagcaccatagaagaaggttcaaaatgatacaccttgttttcttgtgcttgacacctgttgagataatttgttcttagtaaagctaacccaaaaaaaaaaaaaacaaaaaaaatcagcacattagggtgctgtttggtaacatttttgttttctaagtttttaatcacaaaatgaaagtaaaatttttgtttttaaaaattttgtttttagaaaaacaaaaatgcgttctgtaaccacttttgtttttcaattttaaaaacagaaaacaaaagtgtgttctgtaaagttcatttttatttttattttttgattttatttaagtcgggtctaggtttgaggtcggatttgagttcgggtcagaggccggattcagcgccaggggccgtagggggaggattttggttcgggtctcgtcggagtctaaaatgttgattaagcaaaaaagttgttaaaaaatattgaaagtcacttttttt

SEQ ID NO: 255624 - DNA, 612 bp, Cannabis indica
ttagctcatttttcactgtcagaaaactacctacatggtcagagcttgtctatctagtttctctctctagaaattggagcttctgatacttagcctatttctgtaataccatcttgtgagaaataaaaactggaagtacacgtagttctattactgtcgcgttatagggagtgaactactataaatttattttgtctctcttacagttatttaacaactatttcattaccgccaatctaacgagcgggtgtggcttagaagtttagtcgagattttgagtcaacacacagtgttgtaaagtagtctttttgttaaatcttgtcacacatggatcactttacaaaagaaaatcactttataatattgtaaatagtttgagaattatttttaacggattggaaaatacagaagacacgttatagtttacgggacaaagtcatgaatagcctattctaaaattacttttataacaaggatttatggactgaaattagtctttgctattagttcaaatattaatcattaaaaaaacatagatgagaaattctatacaactaatatgtatggagcatgtttatgtttgggaaaatttgattttctatacttattaaa

SEQ ID NO: 255625 - DNA, 3670 bp, Cannabis indica
gagaggaagagtttctgtatgaaggttggatgtaagggtgatgagctttctgtattacttctcaatggtgcaatcaacctaataaacatgtgcaacattgagcaactggaaaaaattccaggaaatttgtctgagtctttcttggcctctctaaggaatctctgggaacaagttcatagccaaatgttttcctgcaaccctatgaaattcagacaattgggactctttagtaatagctacactaaagtagaagatctagtagaaagcatctttaggctatccattaaaaatgattgtcatttaatcaggcctctgccatgtgagatggttcaaagatatatttttgattcgaatgggtccaattttaatgattttgtcttaaaacaatgggaattatcacccatttttttacggactctttccaatgcttcagttgagaagggtgaaattttctctccgttcctacaatttctaaatgctaccaaaccatttccctctttcctttcttctatccttaaaaatatggtttcttgtatcccgattgcttcagatgagctagacattctaactttcttgaaggaggtgaaggataaattgggttgtcctataatataccagcaagacataagggttctgagaacaaacataggtttgcaaatcgaggagcatttcttcaattttgtttcaagctctccatgtgcagaggtcaatattttaaaatgcgaagaggcctttaaagagggttacacaattgctttacgtggcatggaatttcgctttaaaactatcgctgctattgcggatgaattagcatctatgtttggtcagccatcagtaggtgccaatatgtacttgacaccaccaaattctcagggcttggcatgtcactatgatgatcactgtgtttttgtatgccaacttgttgggagtaagcaatggaaggtattctctcagtcaaacaagcatttacctcgtttgtatgatcctcttgagaaagctgactgtccagtagctggatgtgaacttttttcattgagtgaaggtgatgttctgtatattcccagaggcttttttcacgaggcctgcactgaaactggttccgggactgctggatattccttgcacctgactcttggtattgaggtggagccaccttttgagtaagtaaaagtttagttatggtttccttttgatctctgctacctagtgccctgcttgtttttctttattctctttatcttactagttttaccttactcttatcttcttgaattttatataatgaaagaatgtggttatctgtgtctcaagatttcttttcatttttctctttttaataagatttgatccttttcatgccaaatatttttaaagtttcttcagcaaaaagagatgtatattggaattttaaagttttgctgcctaagatagagcaagggtgccagcctgtcttaatcttatgcaaagattttatatattaatgttttgttaatttttcttttgagagatctaccatgattttttagtgcattctcgaacatattgttaatatgataattttaaatgtcagttatcttctaaattgttcttcctgagcacttgtgtgtgtgttttctgcatttggttgacttacgtgatcaaaacagtgctgaagcacctgttgagccatgcatgactggtggggtagacattgcgttatcacattgtggaaatagtattctaaaaccaactattttaggaaaacaaatgcactgacgcttttcagcatggaaaacttttcctccaattatatagttccatgtgattgtgttggtgacatatatgatttcaatgttatgtggaacagtatgattggttttaaagtttaagtgtgctgggcacaattggtgaaaatagaatgggtgttgactagcagaacatgtacaatagtattgaagatctactgctgtttgcttcatcaagaattgagacttgattttatcttcctaggatcatctattatagaatgccattttaaaattctgtacaaatgtctatctatctatatagtagtgatggtagagaggcctattcaatctctttccacaaactagttaccagctcttctctttagtgaagtatattgtactaatgatttctctttcttagatttatatagagattggaagtttgttttgtaggtttgattcttgtattttgttggttttgttttgttttggtcgctactggttttagcataatttatgctaaatctcttgtaaccaaggtttttgatagaccaccattgacttacgtgtatgcgcataaaaggagcaagggtaagaagggaatagcaacaacatagtggccttggttttgcgtgtgaaagggttgttatatgagtttattttgtgtgtgggtgaggtgcaccgtactcggctagtctttagaataaaagggacttcagtattctattgtgtgtgaagtattttgtaaaggttttgtaacctgtttgggagagaatagggctctcgacctccctggtattcaatatcagatcaggccatttttcctaattcttctctttaattcttcttgctgctatagttatcaatttgacaggaaatacctatcaaattggtattagagcctcgtaccaagatgggaccaaagaaggacacttagatagaggtgttggaggagagaattgatgctgttcaggcagaatttcaacatgaactcaaagagttatggttgagcttcagaggttacccgaggaattagaggcaaggctggacaagaagattgatcagctgtttggccagcttacccagctgatacagggaccgaaaagagtagaggcaacgacgaacttgtcgatcgtaatcgaaagacagtagaagggaaagagtcgacccattcatccaatcggtctcccactgctcacgatagtgcaaacacccctccaattgccaacgtcatgtcgctgatggtttagatggtgcctccacctgcagcaaccgcgagttccgttcctcctgtcgcttcggcatcaaccaaattgcaatgctttagccacctgcacaagaacaattactgcccgccttgaatgaagcttctgctggtctcctgggacaatcccgacgaatggatctatcgctagatatttcctcttcacttaaatgaccgagccgatgatgttggaaatggctattgtagggcttgatggcgatgctctcacctaggtttaatgggagaatcggaggcgtccgattacgtcatgggcaactttgaagagtttgctcctgttgcgattttgtgcggcgccaatggggtccattgcctctgggtccatcacggatgagtttctctccattatgcagatcacttttgtcaaggagtatcgcataaggtgggagacaatggcttctcgggtactcgaacacatattggagggtagttttgttaaggggctcaagagagagaataaagacccactacatattcttcaacctcaaggtttggcccaaattatggaaatggccaaacgaattgaagaggggcaacagttatctgtcactggcccaccaccaaaggcagtaacgggcaagcccaatctcagcccaataaccccatagtcacaagcccatccctgctaatcgatttcatcgactctaaccatcaagttgac

SEQ ID NO: 255626 - DNA, 529 bp, Cannabis indica
acatggtatatccatggtcaatcagcatcttcgagagaagatcggtctctgctgcaatctggcaaccaacaaaaaatatatgatattaggcatcaaaaaggaaagaggcttgaaggaacttagcaaatagaaacttaccacagtaagggccgcactcacatcctggatttgataaatgggattggtagaggcacatgccgcatatctcttcatcgggagttgagtcaggccgccagcaaagtggctcatcaactctgaagcaaaaggagccagacattcttgtcgtattcactatgagtaaatttgtcttgggcatcattcagaatcttcttcagagcctccacctttgaattccccttggtatactcctccgtggcgtaattatgtttggcaatttggagctgagtcctctcctcatcggcagggatgggggttaagacgataccaggaggcacggtatactcgtccatttcggatggaatccttgagtcaaaactggaactggagtatccacacgcctcgacttttt

SEQ ID NO: 255627 - DNA, 682 bp, Cannabis indica
ggcccatcctttaaatgagggcccgatcccttttaatctccaaaagaatgtaaaggagtactgccatcaccttttcttctcttccgacttccaagccgtggatcgcccggagcttctcccaaagtgggttaggattccccctcttctccgcactgctcctacccgactgtttctccaacacgccaagaccttctccacttacgacaaaaatgacctcaacgtgggagacttggttacgacgaaaaccttccagatggccaaactgatctctgggagccagtcggtggatgacttcaatcgctcaaaggttctctgtcctaacatctgcaccccggccatagagaaagtgctccgggtggggattatagcctcgacagaggaccggtaccagaagtacctctttaggagggaacatgagctggcttatatcaaagctcaggcccccgccgggaggaccctttgcttggaagtaggcacggatcggatgccttccaagcctaagtcttttctcctagttcccaatactgggcctcccgatgcaagcacattcagctccagtaagtctcctttaacggtctatcatgttccttcagtccaagagtattcccggtatgggcctatagggttcgacgaacgtcttcttaagtttaggaagccccccactcggtggggggatcatgcc

SEQ ID NO: 255628 - DNA, 820 bp, Cannabis indica
tttttttttaaaataaaaataactatattttatatgtctttataacttttttttaaataaagttcatatagaaaataaagaatcgagctagctagattgtgtacctccagctattgatgcctgtgaattctcactagctatatgaatctttaaatctacaaaataataaagagaaaaaattagtggggaattaaatcttttaagctcttgagttttggtgtttttcaataaaaatgagtagttaacttggcttgattggtttgggatttgaaaacagttttatgtttttgaaaacttaaaaggtgaggatccgcgcataagaatacttgattggtttggtgttttcaaaaactaaatttgaatatgattttgagttttaagctaaaaaatgaaaacaacacttttatgttttctatgtcttcaaatactctcttattttttattttgagattcccaaccaatcacaaatccaactttttaaaactcaaaaacacacaatctatcacatttttaaaaataatttttcacatacaaaattcaaatttttgtttccaaaacactcttttagaaaacacatatttatataggtgactttctataatttttgtccattaataggatataaaaattgggtaattaaattaaatcaaattagtgatattttttatcagatagaaaatattatgtcaattagactaaatattgactttgaataaaattaagtagaattaatggtagagaaggcagattctgaaccaatttaatgacattgaaccaattaaatctaataatccattgaatcaatccaattacaaaaaat

SEQ ID NO: 255629 - DNA, 502 bp, Cannabis indica
tttacgtttaaagaattttttctatatttctacgatttttcatagaaataacatgaaaataacaaaaaaaactacataaaaataactaaaaataaaaacaaaaaaaaaatcaagaataaattaacaagagtacaacatataaacaccgtattttctataaataaaataaaaaaaatcgtaaaaatatttaaaattccatgaaaccgtatttttgttattattttttatttttgtgtatttgagaaatcatccctttttactttttctttttgatagaagtaagaagtgtgttaataagttgttttgatgtcatttatccaaatttgttaggtttttggctaaaaaatatataaattcaaaaattagcggcataaatacataaatctcactttaactagttgctcactaagatgccacaggtcaatctcccttcaatcctactcattcttttaatcaatataatttttaaataataaaaattaattaatcggataacaaaaaa

SEQ ID NO: 255630 - DNA, 645 bp, Cannabis indica
tagatgaatgccacgtcatcgtgtaaaaatttagataacatttacccttcaagtccgcgcgagatcttttgggtcgcacgtggacttactcgggcacgaagctaatcagatgactgaaaatccaataaataatttaaagattttgtgaagagaaaatcaagcttatttatatttacaaacacatatcttaataaataaataaataaataaatataaattcaataaaaatataaattatttaaaaaaaataaaaattaaattaaaaatgttatgtttacttaaacaaatttaattttttttttgagaaaaagtagattcaaacttgttatatactttttttttgtctaaatagatttttttaataaaaaataattaatttttaaattgcttaattagttttaaaattataaattatttttatcattcaaaataattttttttaagatctaaattaattttgtaagttttataaaaagaaaatattgaatctttctcatttttatttggtggggatatgatttgatagttataaaagtttaaatgacaaagttgtgaatttacaaaaatacatcaacatttaaatagaataatgtgacagaatctaatagaaaaactaaattcctgtaaatataaaaattcatttac

SEQ ID NO: 255631 - DNA, 593 bp, Cannabis indica
acccaacttcaattccatctccatttctagtatcagaaagacttattgctcctgttttatcaattgaaaccacatccgattttttgggccttccccatccgaaatcagtgttgtaaggctcaaacttaggtgaaccagctatgctgtataattcatcatgactacctttaccttctacaagcgactttaaaatcataggaaccaaattttctagtccatacaaaatagtctccttcgccgtctccaaacttcttatcgcatcactaatggcttttacagcgaggaaaagaccatcttccccagccaaatcttttgcatatgcatctgtaaactttcctacaacacagtttcccaagtatgtttcgggcaaaggaggctcaaagcgagacctagcatccacagcaaagccaaaaattattttttggccatctttgtgtaattcttttgccttaaccaaacatactaatatatatgaatatgtgaggcaaaatgtagataagtgaagaaggttattatgaacattcaacaattgtctcaatttgtttatgttctctcgtgtcaattggaaagtgcccctaactgcacctgttgga

SEQ ID NO: 255632 - DNA, 703 bp, Cannabis indica
caaagcattgatattgaatgtttatgtaacccaaaaaaaatggcggagataatggaggcaaacgatattgagttcgtaaagagttcatgcatgcacttttttttcgttttatgcttattttcttgttattcatttctaaataaaaaatgaaatgaatatgattatattccctgttggctgattatcaaaccatgtagctttagaagtaaaagctagtagaacgaacaacacttttatatacaaaacaaaattaagtgttgagctctgtactctctacagtacaagtggatcgatcagaagttactacataatatatatgctcatagaattagaattaattacatatgaataaaatggagttcaactatctaacatgacttcaactctaaagccttctcagtcaccaccaaacaatattatcttcaatataccataacatatttgtgatgtgtctctcttcttctcaatttacaatctctggcctacacttatcagtgccaaaaagaaaaaagttgggttcagactcctctgcattaatgttgctgaactatatacctgtttctccattcaaacattcatgttttcagtattactaaacaaagtcaaagccaatgattatcatcataaacgcagaaaagttataaaaaattaaagtaacatatattagaatatttttatttatggaaattattttctaattaag

SEQ ID NO: 255633 - DNA, 551 bp, Cannabis indica
tacttagtgcatgtggtacaaatatcatacttttgttaagaacgttcttgatcatctaaagccttgtaaataggtgtatgtgcgcctaaatacaagtcgatattatgttatatattttgtatttttcttaccaagtatgtcgactcacaaatattatttacatgtgtaggtaaaggaaagggaaagactgagaaccagtgagtccagggcttgaggatgagtgtacatatcaagatggttagacttggagagtttggtctcaggatgacttgggtctttatttttatagtcgcgaagcaacatgtttataaaatatattttgtagtttattgtaaacttttaatgcgggatcctgacttttatgtaccattatatatttataaaaatttaaagtttaaatttagtacgatttttgagaaattctttgattattaaaggtgtgcacaataattaaaaaatcactatagcgtgcataaacaagtagagcattacacagatggggattgacttccttcaagggaaagcgagacaacgattggccttcgaccttt

SEQ ID NO: 255634 - DNA, 600 bp, Cannabis indica
ccactattgaatcatctgatgcatggactacttggagagatgctttggcaacaaacatgtttaatgaatggagagaaagtagaggccgtagatattagtattttgttgtattaaatgttcttttcaatgttgttgattagtataattgaatttatatgactgtttgttttagacttttgtttgaattatgcaataaaagtacgtttatatttattagttgttatatataattttataacatgtttcttcaattagtagatgttgtatatcattggtttccaatattttgtattatataggaatggaaagtggagacaacatgcaacatacttccaactcaaagaaagggggtcgtcgtacttggacaattttggaggaggaagcgttattggtagtgttagagtcatgtgtgttgcgtggctatcgttgtgacggtggcttcaaagctggaacatacccattaattgaaaaagaattacgttttaagtgtcctaattctggattgaaagcaagcccccacattgagtcaaagataaaaatatggaagaaacaatatagtatagtatttgacatgctaaatgtgagtgggtttggttggaa

SEQ ID NO: 255635 - DNA, 682 bp, Cannabis indica
tcaatctatttataaacaactcgtgttcatattggcatctctataaagcccaccaaagatattcttagttggttaaggaaggttgtatactagtaatgagtggctattctaattaatggaattaattaataataaggaggaagtgaggttaagttgttgaatgggaagggtcgaagtagagaaggtgatcacgttgaatgagagagagaagagaggattgttttgtagtgttgttagtgtgggcccattgattgattaacctcggtagtaggacgtgccatgcatcaaattaacaactctttctttctttctctctttatatataaatatatatatatatgatctgatgttcccacgatctaatctatctatcagacatggcccaactctgcacatgcctccattttctatttattatataattagtgaaactaaatgaacactcatgactcatcacccttcatcttcatcgtatcaatcattcccattcccatttttcttacttattcattcaaatcaatgtttgtcatcgaagatatcgagaaccaaatattccatcttaattaatcatgaaaaacacttatttacattattatagactaacttcgtatacatttaggagaattttctactctattttcttttgtttacatagttatatgaatttatttgtaaatttttt

SEQ ID NO: 255636 - DNA, 1159 bp, Cannabis indica
tttgtactattttagaaaatacagggtccattttgtcatttaacaaaacacggggtccaattgataacttttgtaaaacagagagtctaaaatggtatttacccataaaaaaataatcttacataatatttttattaacaatcgcatgttgaaaataaaattttatacaatgagtattgattatttattattttttttttataaactatttgtagtgaagatcactcatatgtttatatattaaatgtaaaagattgaaactaaattaagacaaaaaactttgaaactcgaaaacctaaaactcaataaaactcacccgatgtatatttctactgcaaatcattactgttattttttaattactaaaatttagtaaatatattgacatttacaaaaagaaaataccatttttcaatttttattttatatatagattaataatagctatttttcaaaataaataatatgatttaatatagaactattttttgttaattatttatcaaagcccagcatgtgcttttgcatgtgcaagctatttctaattttataaaaattgttgtatttgtgtgatgtatgtgaagtagaaagaagttggattttttagtgattattttgaatgataaaatagactagctgttgagagtggtctactttagatattatcctacttaataaaataaaaattatctggcatgtttctcaaatgatcttaattaataagtattaaagacaaagagtgatgatgcataatgatatttcttattattattatttcattcatggtggaagagttgataagattgtgttacatattttggttccttctatgaaccaattgaaattaatctaaaaaataatcaaaacatgaaaatcagtactataattggatatgtattgattaaattatttcaagaaatgcatgtacaacattttgcttataaataaagacaaatctttggtcattttcaaaataaaaaaccaaagcatatattttgtgaagattatcatgaaatctacgtacatgtgctgtttttgctctcctctcactaattctagtgtggaatcttatttaaatctgttttattttatatttgctcatctacttttagtccttaattttcaatttcacattatatatatattatccattttgtct

SEQ ID NO: 255637 - DNA, 1154 bp, Cannabis indica
tgcttaggagcccttgaatcctgaagatgaggctgaggaagagcaggtgactcctctgaagaaggagaagaaactttcagccccgcccaggcatgttgaacatgccattcgtataagggagcccatttcacctgctcgatcgtccactctcgtgttcggtaaagggaaagctgtgatgtctgaaataagatcgatgtcaggtgatgatgaactttcgagtcttgtttgggccatcatcttgcatactattttgtcttgtttttttagcttcctgactttcatgccttatgtttgtgatgtttgtttctttctaaccatgttgtttttcattctgcacagacatgtctcggcagatgtttgagcctctaaagaagagaatgggcgaaagctctagtgcctctcctccagccaagaagtctaagggcggtaaggggtcctcttctatggaaaagaggcctcctaaggaggtcattgatcttttcgaggagctaactgctgcaaacccctctatccccaaagctgctaagtccaaggagtctcggggaggaagcttggacaagtctggaccaccaaaggttgggtctaagctggtcaggagtgaacctaaacgggtgcgggcacctactcaacctttggtggtgcttccagaggccaagaaaggcaaggagatgctggcccattacatgaaccgattggttcctgaggtcagtgagcaactagctggtgctgacaatgactcttctttggaattgctggtggacggagtcttgaagtagttcaccaggtcttgatacttccttttaatctttcatatttatctcaaatgctaaagtttttctttgttcaggccggtctgaagttggcctacacttagtcccgggctaagtctgctacttctaggaacgcggctctgtccgacaccatgacggcggaggcaaacttggccaggaaggatgttgaagacgccaaggcagaagtcagagttgttcggttggagttgggtgaagccaacaagaagctgtttgtcgcccaaaagaagataactgagctaactaaggatctcgaggtagctgaccgttttgaggagaccatcaagaccttatctgccaaagttaacattcttgaggatgggaggacttctcttcgagcagttc

SEQ ID NO: 255638 - DNA, 417 bp, Cannabis indica
gaagcaggaacatcaacatgcttcgtttggagatgcattcgagtaggtaagcattgagtgagagccttccacataaagtgcagaactttaggtggaatcttaattttccaaagttttttccacactaagtcctccatttcatgaccccagttgcctttattaagttgaataactttgtatgcgctctttactgtgtaaaatcctgagtgctcatgtttccaatagtaattatcactctttccaacattaatagcgaagtattcataataatagaagcatctctgtaatgccccgatattttgccttattttacaaaaaatactattttcatgcataatttgaaaagatgaaaaaaaataatttaaatacaacagtagattttaaaaatcaaaatgcaacagagaaggatccttcatt

SEQ ID NO: 255639 - DNA, 708 bp, Cannabis indica
tagaaacatgcatttacggcgaaacttctgatgttttgagtttttacacttaatcctcttatttttttgtggcaaaatctccctatgtttatttattttattttttttacaaatttgggatattaattggatatcaccattaaataccaactagattattagagcactcacatgagctcctttaaaatacctttatatgtaaaaattagctaaaaatggtcaaatggctcatacatcaatgagttactctaaaactattttaataatggtattgtattgtaacttctctaaatgtagctacaattactcatttgagatatatatacagaaactgatgtatgatgtaatataaaagtttgagttaaaatagaaaaatagagttttggtgagatattatatatgatcaagtagagaagttattgtgagtgctctttaaattattggcttgaaaattttacttttacatattcataagtatacacattggtcattcgattactatttaacagtgatatttaattaacatctcaaatttgtaaaaaaaaaaaataaaattaaagagatttgccataaaaaaaaaaataaggggttaaatgtataatgtgacagttagtagtcccgtgatccgtaagggaaaataccgggtaagctgtgcaatctcacaccgcctggggaaggtcaagtgggatgattctgagactgtgtagg

SEQ ID NO: 255640 - DNA, 1981 bp, Cannabis indica
ataaacaatcactgaaacaaaattgaatgaaataagacaaaagattttaaatctaacaatctcaattgttcagagggaattttaaacggcaaaaaaaattcaaggggcataatttaatacatgtcaaagttaattagcccacttttatatatatgttgttattatagcaaggatttagaaatgaaatatattctttttaattcattatcaatattgttggcactaaagaaaggccaattaattttaggaagataattaagcaacttaatttcaactttgtaattaaatgacttaaattaaattaaatgaatataaagtcttttttggaaaattttacaatgtatgcacccctaattaattattttatcatctgaaaaaaaaaattagttcatttttctatattcgtgtatattgtagtatttaagatattttgtaaaattttgagaaatttaaaaaaatttaacacgtcaaaaatagaattatttaaacatgttgcacatgtgactgtttattattttgtacgtgtgtgaaatagaatgtttgaatactgtttttatattttaaatttcttaaaattttacaggatgtattaaataagtaaaacatacgattgtgaaaaaaaaaattagactaaaatattttcttagatgtcaaaatagatttaagatgcatccgtatatattttgtaaggagtgcattatagaaataccttaaaactttcatagatgagaaagaagaacagattatctacttcacgaccttgaatgagtgttcgtgttggtagaaaaaatgtgttgttgtaatatacaaaatatataatttaagttaggtctaacaaaagtaatcatggaatcatgtttcgttatagctcgaactcagagttgccagtttttttgaagggcgctcgctgatgagttctctttcggccggtaactagtcttttgcgagtgccaaaaaaagtcatcaaatttagcacttgatcaagaaattaattggcatgagattaattgggtatttttattgaattttttattttttgagaataagatgaaattcatttactagtgcaaatggacatcaggtgtacaaattagacaatactcaaatagctgcacatatctcacaatttgattactcgtctgagattggtacatttgtttaagttattatttatttttattttttttgaaagagtttaaggtattattttattaatacttaaaaatgacaaaacatttacaaaaatacgaatttacaatatttatttatttttttattgattatgttttttatacaaaaatgcggaccgttattttatagttgtcttaaaaaaaacataattttcacgatactgctatattatattatgttttcacacgttgtgaaaataacaagaaaaaaaaaaataaaaaaatgatatcggtaaaaatgtaaaataaaaaatctgccaaaaaaaaaaccaatttatggtactttgtgtaaattttcatgtatatatgtttaattgatttagttttcttgtaattaaatttaataattaacagctcaaaaactttttttttttgaagaagaaattataaattttatgggtttttatacttttttttttctttcaaaaatatgactttttcttaaaaaattattttaagaaaaatattaaagaaaaaattgaaaaatatgagaaaatcaagtaagggtaagcatatacccttatggtaatcagagaggtaactagttactataagggagtaactagataccttatgctatttttccatattttcttaacttttcttctaaaattttcttataaaataactttttttgagaaaaaaataatatttttgcaaacttataaaactgaacacatatgatatgtccaattttgatgcaagttttcccaccattcaagaatttgggccttcttcctacaatgaattgggctttggtatggcccataaagttcaaaaaagacttcttt

SEQ ID NO: 255641 - DNA, 1099 bp, Cannabis indica
ttggatcgtgcggattggattggatcggctattttatgaacacccctagttctgaggtttgggcgagattttgacttggaaagaaagaagggaagtgaaggaagcaaaggtagttgtgaacatttttggtgacagaaaaaatggtaataaactcagggatacaaccacaatttttgaagtgtaagaacagtttatactcaaatattataactgtaaaatctctagctaaaaactcattaagaataattaaaatattcaagatcacaagttaaaattattcaaacaagaaactcaagaacaaaaatgtatgaaacacccaaatcacaggaggaaaaagaaaagcttattcaaagtgttctgacccatttattcatacaaattcagagataaaaaacctaaaatctaaacaaaaatttattgaaataataatacaatatctattcaaattgagaaaagcaaatttagagtccaaaaaaagtttcaaacacccaatattcacaaataatcctcaccttcagccaccgtcacagcgagctcaattacagcggctccaacaacatctccgtctgaccaatccctaagttcaaaccaaacaatgattagaatcctcaaccatttattcttattcaaacaaatgattggttttttagctttagaagtctatgaaaagaaaatatgatatttacctttcgtgttgaatttatattctttccaacaaattaggtaccacaatactgttcagcagtgaatgcaaacccccatgataagttttgaattcgtaaccatactcatctatagtacttggattgagtgtcattggcatttcaagaagatcatgaaattgtcccgttgttggattgtatgagcgaagaagacttttaccatttcctatgagtatgttcttgtccaaatcatatccaatcacttgaggttcccacaaaggtggttgtaaagtcacagtaaatggaacaccctatctgtttatcttcccttgattgtcatatgattctgacatgtaaatatcaactaattggtcttcttcttcttcttcttcttcttcttcttcttcttcttcatcatcatcatcctcttcttcttc

SEQ ID NO: 255642 - DNA, 658 bp, Cannabis indica
atatttaaataattactaaaaaaattatgtttaaagaatgacatagtgtgatataagtttacttattgaagctaagatcattcttcattttgtttaaatataaacacttgtaatttgctctaataatattcactcataaaataataattaacaaaaatttatttaaaaataacaataacaatacaaaaaagattaatatcatatgtatgtccgaataattttctacagtattatatatttactaataagaagaaagattaaaaaaatgacaaaaatattaatatttggtacaaataaaacaaaacacacaactccaaatatgagaaaaaaaatacaaattattaagataatcttaataagtttgaaaaaatacaaaagattaaagactatatgcgcaagaagtaaaaaaaaaagaaaaagcttacaaagttatgcatatttgaaaaaaaaatcaaaattctgattaaattgaataaggatgtgtacatataaaaaaacatctcaaatagagagctaaaagtatggtatatatgcatattttaactcatcttcataaaagtgagatcatctcaaatgaaaatttaaaatttacagacatttacactaaatattaatttttcttcaaactttatatttatactttaacaaggatattttt

SEQ ID NO: 255643 - DNA, 905 bp, Cannabis indica
cttacctcgattccgaattcaggtgtgccggtcaacctgactggaacgaactgcgcggtggtttacaagctctcacaattagagatcacaaaatcttgctaaaatgagcttgagatccaagaaaaatggccagcttctcgctgctccaagagggtcgaaaagagagagagagagagaggaaaaatggtttttgcttttcttctaatttttctaacttttgaaatctttgaataaatgagagtgaaatgcaaatattaaacctttatttcagccaacacaaacccacttaattcacatatttttccaattactaagtccactaaaggacaaaacaacaatggggcaaaatgaccaatttgcccctccatactaaaacaacataaaggcactaaagggtatttttgggaaattctaaattcccggccaatcccgacattcccaatgtctaaataaccgtcccacaatactaacatactaagttgtgattttattgagccatacaccgagttccatgttaccgggcaccggaaatgcaaaattatgaaattcactatatgacataaatgcatttcagaattcaataataacagtataaacaattatttaaatatctataaataatttccataattaataataattaactgctgatttccaaattaaactaagcggtctttacaattacccagcccagtcactccattatgagtactagttgttcaaatttctcgtgtgcctggagtgaaccatgcaagagagattgtcactccctatactaatgatgatggaactcgtggaggtagacgagtgctcagataaggcttttccactattggatcactcctattaataggagtttgcacattaggttcgataggaattagatcatttgttttaatggtttg

SEQ ID NO: 255644 - DNA, 326 bp, Cannabis indica
ggcataaaacccaacactatgatcccccggtaagctgatgtagctggtgtgttgataggaggtagattgcaccaattgttggagttaggtggatttagatccctgaagtgatcaatctcccttcccaaattattttaggcatttccacccattcttgaccctatccggttgaagattggcctttgggtagctcgctcctagatgcctcggggagggagatcattcccttggccatctagaggtgtatcggtaggtggttggacagccaaaggttggcaggtgggggctgttgttgagcttgagattcctggctggcccccaaactg

SEQ ID NO: 255645 - DNA, 793 bp, Cannabis indica
gccgacctcccactataatgccccccattatggcggctcacttgccatcgtcacttaggttctttaccttagtggattcatgcattaagcgttggatatagtcttttagtgactcattgggcctttacttaatggcaacgaagtcacccagctccgttgacagtttcgagtgaagataattgggtatagaataacccttcaaactcgtcctaggaagtgatcctccctagcggtagtttggtgaaccattattgtgaggatagcgaggaagatttgacacctgagattaatcctgatcccttgaaggtccttctggatcttaaagttctcaacatgggttagggggtctttcttacccgtgtacttgcaagtaggcacttcgaactttgttggaatggggaggtcattgatcgtttgtgagaaagaagaccccctcctcctctccagttcgaagtcagtaagttttggtacagtaaggtccttaactaatcgagttaactcatctaaccgagcctggaccaccgaatttgtggttgcttggggttggccagcattcatgcccacgttaacttggtttccatgaattggctcaggtagggctatgtgatttgaattatagttatccctatttttgtttaagggcatcttggaggtctccaccccctcgggggcctacacgctcaaaaactgacccaggtcttggcctttctcccgtattttggctatcatcccttctagcaactgagggaggtatctagccatctccacctctctaaggtagatttttaagttg

SEQ ID NO: 255646 - DNA, 781 bp, Cannabis indica
cggcggtggtgttgagggtggcgccgcctctctccggcaccagaacgttttctaaacctctcctgaaagcccttcctacgatgcacacgtggacaaagatcaacatagctattccgaaaaataagagtatgattgatattactattgccattaccataatctttccaactgccatacttggttcatcatcataattatgatcaaaactctaatctcaccattataaaattaaattaatgatcttttctctcatttaacataacccagatcaccaaacgagagaaagaggattataaggtggttttctctactatatatatttatataataatcttttattatgtataaagacaaggaagaagaagttgagtattattagtgaggacaaaataaatagctagtagatgacttaaaattaattaaaaaaactctgtatatgacataaaagcataaatatatattaattaaatgtgcattgggggttagtctctactgtctatgatggagttggtggtgggctgagaatcaaatacaaataaaataaatggagacaaaaaaataatttaaagaaagccaaacaagattgatagttggaactttatctgtttgtactattccatgcatggccttccttgttgtcttgtcctgtacactaatgtaccttttgttgtatttgttcttattataagaacccgttaataatatgttagtataatttcataaatttatatatagtatgtttttacagtgtccttgcgatgtaattttatttgttttgtta

SEQ ID NO: 255647 - DNA, 838 bp, Cannabis indica
ggtagagtcgaggtcgcacacttgtacttcctcagtgttctccataggttctacagttttttcggatcccacgcggggatccaactcatcttcttccatcaatcttggttcgtttccctcatggactacgagttttgacaagtgcgttgcaacattgtagcattgccttgcctcttcctagtttcccctcactgtctccactccggcttcctgagtagggaatataaggtataagtgccggatggaggtaattgcttcaaaatcgaccaaggccggccgacaaagaatggcattgtatgctgttgggtaatccaccaccacgaaggtgcagtatttaaaagtgctctgtggggtatctgggcacagggtgacagggagtcttactttccccattggaataagcgttgtcccattaaatcctgtgagttgggagccgctggacgatagatccctgtccgtgaggcctatagccgttaaggcttctttgaacataagttcacggaactcccattatctaccaatattctcgccacaatcttattggcgatgggagtctctatgaccagagggtcatggtgaggggaacacaccaatttggtgtcttcttccgtgaaggtaatgggctggtccatgagttggggcctttgcgttaggagttgggtgacttcccacacttcatcgtgttttatggccccaacataacgctttagctcgcttctaacggttccgccaatatggggtccaccggagatcatggccactctcccatttggtcttggtggcaatccagggacttgttgagggattgctcctctgggggtacaacgggtgctggttc

SEQ ID NO: 255648 - DNA, 688 bp, Cannabis indica
agatagcctgcttttactctgtcaaagaaatccctgcaaggaagaatgtcgtaggaggcttctactatcttgggacttatactggtgatcgcaagatcatagttaggttgccaaacaagacaaagtttaaagaagacttcttctggatgatgagcctctctcccataaacacaaccgcctttcgcattatacgtaagttcttttccttagaaacgtaactttaaaatgtattaatttgtacctttaaagtcacttacaaaacttttatctgtttgcagcggttcctcaaagaccagttcctactcctgagatagctaagcaccacaaaattgtacttagtcttccatatagactgcgagcaacaaatttcttattaaatgagaagaatctaaagaacacgagccttcttgcctcgaaaaaatttactcgcgattacaaaatacccaagtattcttcgtggcaaaatgttccggttccaactgaagaggaaagtgaaactttgtggctcgcacacactatctcgtgagagctgcccctcaggaagaaggagcatcccaaggtaatcaatgtggatggtcacccacagtgcttagggcagtatgtaataccttagtatttttttcgagatagtcgatataacttttaaacttggaatcccttcctcgtagattgcataactcataggttt

SEQ ID NO: 255649 - DNA, 615 bp, Cannabis indica
ctagctgacttgtcaacactcgggttcaaaaccaaaacaacagtgtattagttcactactacaatgtgggcttttagagattgttttttcaactaaatttattaaaagggaaactaaaaggtgtgaaaataccctgtttagttcgaaattgacatttaaaggtgatttttaaataaaaaccataggtatagaaattaataatacttatgtcggttgggggttcagaatttttcagcttacatacattattacacatatggcgtcagttattaggaaaataatcgacgccataggtacacacgtgtcagtaaaccgtgcacctatggctttagttatttcctaataactgacaccgtaggtgatatatatatactatcaaacttcatcttccccacttcgaccttcttcctcatacacgataaccgacagccatagcgacaccctaactcacaccaaaaccctcgccaccacccataaaaaaccatcaatctccttcatttctttaccattttactctatttttattttaactattttcaatacctaaacttatattgtaaaaagtttagtctttttctcctctatcactataaccgaatctattaaaaaaagttt

SEQ ID NO: 255650 - DNA, 1034 bp, Cannabis indica
agtcgaatcaaagatgatccatatgataagttgatggcactacggtatgaaggttctgtgacagagtttcgtaatcgatttgagacaacagcaaaccaactccctgatattccggtaacttttcttcgggatatattctttagtaatctgcctgttgagattgcaataggggtgcacgaatataggcctaaaacattgacagaggtcattgctaaagcgctcatagtggaagaacaaatgaagatggcaagaaatttcaataatggtggagtcaaccagcctggattttcggctgaggttgtgaagaccgtagacgaatcaactacgcccttcaagtcagaaggggatgtcccttcggacgtcaccgacgatgaaaatgacataaggtcagagaagaaaacgcagcggggaacgacaccgaggaaagaagagatggagacgacaccggtgctggagatgatgccggagtgctggagacgacactggttgtgctattgggagatgataccggtgttgtacaaggagaagccgagctagaatattcctccaaaaattcgtcaagcttggcaagggaaggcgacgcagcttgaacgccatcttttgcctatggcaatggaggctcacaagctctttgatcgtggaaaacacgaccaactagtcatcgacgccgttaaaaatgaagtaatgtcggtttcaaatctgagaagcgccttgcgaatgcttccagctaaacaccacgagatggctcttcgagatacgccgtcgaagacgaaccgcagctcttcggagctaaaggagatgataggcgctcaactaaaggatcctaacatcggtatcttcttttccttactcggtttatgttggtcggagattcttagttggaggggtgagacacgtcgcggcttaaaggtggagccgccagtgaagaagggcaatcggagaggcctaatcccatcagatctggttttcttggttttcttggtggagtcgcctgagaagatgaagagcggggtaagtttcctttcacgtgttat

SEQ ID NO: 255651 - DNA, 811 bp, Cannabis indica
aaatctcatttattacgactccctgtcggttgactaaaaattcagtcaacattttttttggcataaaaaaagatgaacaaaataaaagtaatatttctatttctttttataattattaacaaagaaataactgttataaagtaatataaaatatataagaagaaaagaagaagaagatgaagagagaaagagaaattaaatgaaaatttctcagttatttatttcaatggggtcatctctatttatacaaaagtattgactaaaggaataaaaaactaaattaatgtaataaaggaaaatacaatcaagcattaatggtgataattaatatggtgagttaaacatccataaaaaatattttataatactccccctcagatgtccgtaaaaattgtctcattaaaaaccttgctgaaaacttgattaaaagaaaaggagtgtagtgtaaactaatttcccctcatttaggcattcgtggtgatcttttaatcgatgaattttaatcttgtgagctatcttctcaaatattgatgttggtaatgattttgtgataagtttgtaatattgatatttgattgaatttgttgaacatcaatatagtcatcctccttaaagataatgagttaagaagaatttggtaaaaataccttattcattatatctttagttgagcaatgcatttcgcgttatcttcatagagaactgcttgtgttgagacttctttattaagtataatccttaaatatattatgtcaatgatctcactcccacacattctctacttgcttcataaagtgcaagtatgttaaca

SEQ ID NO: 255652 - DNA, 1417 bp, Cannabis indica
aaaaattagttttctaggtttttcgaacctgtgactgaatttttggtcatcccagcgaaaacttaggagagagacatcccatttttccaattttattttggctataacttttgacttgagactctattttggacgttctttacattgttgaaaagctcgtttcaagctctatatgttaatttgtaattagaatgcaaattatgtgatgatgtgaaattgaattttggggttaaccctatttgtgaaatctcaagaatgtgtaattaggattatcggcgcttgttcaggaatacccagagatttgaaaactccacatacttggaataccaggtgagacagtagttagcacgtagagttaagcattgtgacgctcatgtttgatattatacttgtgattaagtgagaaatcgggattaggattattaccttaaagtgagcaattatacgatctaggattattactctagtgtttaagtgattttgaatgcaatactgtgatgtatatatgttgagataaagaattatgcgggtaagacataattaggttagactcggtaatcagaatcgagacaaaccaatctaaggccttattgtaaatagacgtgtgagcgcaacacgtaggtctatgctaaatatacaatagaagcagtggcatcaatatttatttgaattgagaatatattgcatattgttatttatactgtcttgctaggtttggctcacaggtgctctactgtgtaggaaagggtaaactagtttgtgatcagccatgagtttgagggtttggcggtgtattgtacatgttcgagccacactagaccatgcgggttgggtctaccagttgatgtattttgtattctcaatttttttccctgaggtcggcatataaaaatgacttgtaatattttgtgaaaatttttatgggatcccgaaacatgtgtaagcttttggaatggtttgtgaattaaatagttacatgttatattttcactttgtacttgatttaaagttttaatttttgctcttatttctagtagtcccgatttagcaagattaggttatgtttaatggttgatggtagggtgcctttctttaggacgttacagtcaaagaacaatttcaagaacccagatttcacagaaagcagttcaaaaatagtagtgcatatatttaaagaaaataaaaaagaagaaagaggacttacccacggtttttaagctcccgaatgtacttggacgactcttactactcaaggcagactacaatgaccgaatacgtgtcacccatccgactagcttagtggttgaataagtccacatgtgaggaaaagaattcccacgtggacttggagggaaaatgttatcccgaaattcacacaaggtaacgtggcatccctctcagcgacacgtggggaata

SEQ ID NO: 255653 - DNA, 576 bp, Cannabis indica
acgtgtagattatatcccaaaagacatattcctaacaataacataaccacacaagcttagaatcaaaaaaacaccattaaagagccaagcttgagttctaaaactcaaagcttgctcaaacctactaacagccaccaaaagtagatcaattcaatatatttaacgagaatataactttagaattacaaatcatacaccaacaacaactacagtaacaaaatccacaaagcatgcataaagcattttcttaaaattcaagaaatcaagagtagaggtttaaaaggctttaccttggcttgagatcactaacaactagctgagaatcacaagaattactgaagaaatcaccaacactagcaaccctaggaatttcgagtgagagagagagtttctttttttttttcaatgaatttgtagtttttgtataaatgaataaaaaaaaaaagttttgttttattaaaatatcaacttataacatcaaataaaatcagattaatactttataaaaacttcttactaaacaacaaaactcaaataggtaaaatgatcattttgcccttcccacactaaaagtca

SEQ ID NO: 255654 - DNA, 828 bp, Cannabis indica
ttatcacttttaatgaaaaaaaaataaaaaatagataatataaaggggagcatgaaatttagggtttaaaaaccttaaaatatctcaattttaacatcttcaaatgtctacaaaatatcttagcattttttaatttatttttaatatttaaaatgcttaataagtcaaaaaaagattaaatatctagatatttctattatcatttttcttaacttataatttaaacattgaaaataagaattaaaaatgtcaatttcaaattgaaataattattgttatgatatctataaactatttagactaattttaaattttattaatatttaagtagcatataagttaattatcatataatattttttttaaaaaatataacaataaaaataataaaattaattttaaaactcttaattatacaaattagtaataatccattaaaaaattagatattattaatttataaaactatttatgttcaaattaaaaatcataattttcactaattattcaagattttcagcatttgaaataattaaaaaacaaatttttcaaagaaaaatccatgaaattcagaggaccatacgaccatctcgcatggaccatgcaaactccctgtgtgtgtgcatatatgggcattgcattgtccgagcttctcactcacgggcgttgcttgaccaagaaaatgtaggcgaataggggtgttcgcatggtcttcgagtgcggaaagaagcagtggctcccaaggatgtgcgcatgcgagatttctcagacacaatcgagaaatctcagtcaggtgtgagatttccacgtgcaaaacccctggtacac

SEQ ID NO: 255655 - DNA, 614 bp, Cannabis indica
aaatatccttcctgaaataatctctccttcacaaggaggttttattaaaggaaggtatataggacataacatcatgatttgtcaggacttggtgagacattataacaggaaagccaacaaaccaagttgtttgatcaagcttgatcttcagaaggcctatgataccattgagtgggtttttagaagaaatgttggagggtttgcattttcccaggaagttcattcaacttgtcatgaattgcatctcaactcctaagttctctcttatgttcaatggatccttacatggattttttgaagctaagagagggcttaggcaaggagaccccatgtcaccactgttgtttgtcttgggaatggaatacctttctcggcttatgaagaagataggtgagaagaaggatttcagatttcatgagcgttgcttggggctcaaattgaatcacctggcatttgcagatgatgtcttgctcttctgctatggagacaacaacagtgtttcctacttattaaaggcactcaagttgttttcacttacctcgggattgaatcctaatgcaaataaaacggctgtgtactgttgtaatatgcaggaggagagtgtgaaaaggctg

SEQ ID NO: 255656 - DNA, 800 bp, Cannabis indica
tttatacatatatattttagtttatacatatatatgtctaacaatacaatgaataaacattttaattaaaggcaaaaaaatttcaactatattcatgaatcattatttgtaaatccgtatagattttctatattagataaaataattgcaatacacacaatcactattaaaagttgttacttttacaattttttaatcacaatataatttttttttggactaaaatatagtatttagtcacaataaattataatttttggaactaatatatttaaccacagaccttttagtcagaacacagaataataatttataattagtcataattattttaattttaatcataaattttattatgactaaaaataaatatttaaataaatatttttatagtgagcttttgtatacacattgaactatgcttaactgtcagcttctcgacgcataaatatagagaaacttacaaaaatactggattttgagtaaaggtttacatttatactatcacacgataaatttacatttatactgtctttgccttgttttttttcttttatactgtaaatgccaaaaatcacataccaagcctttatcttccacacccacatacagaactaatccagcaatacgagaacacctaaaaacaaccattaattctagcaagatggaacaaaaatagagaaatccacttcaaatagataatcatgccaaaacaaaggtaaaacaacactaaaataaattaaaaaaaaaggataaaaaataaagctaaccatcttctgttcagcctcaatactagatat

SEQ ID NO: 255657 - DNA, 530 bp, Cannabis indica
attatttatattgtcttttactacataaaaaaataaataatttttttcatattttttctaaaacatgtggtatagttcctccaaatgaaaagatctctgcaaacgtcatttatagaaagttgttcactcacggttgccaatcccggaataagtcttgtggaatgatagtcgagtctagaagaaatttcccgaataactatcatgttctctccgggtctagtcttcaagataagcttgtcactcttcaggagaaagttctagttggctagttgtctttcttggaatgatagttttggatagtcgttccaccaggctcaatcctagctattcggaagcatcatcagcgagtgtccatagtccgtgagtttggaagcttatatatatttccagaggctctggtactgaagctagtgtgaagacttcgctctaagaagagttggttaagctggttattttctaactaacttacaactgttgcgaaaattataaatactacgcaggtgcacgcaatcaagtagtatactcacgca

SEQ ID NO: 255658 - DNA, 660 bp, Cannabis indica
attttcataatggacggtaggcctggataccaatacccaccaagcacgtgttttttgaaccagccccaacttggttcatagccacatcatcacctacttcattcggcccatatgtcaagcccaactccattcttcttctctttaattcagccaccaacaaacaatcatcttcctttggagtattattaatttcatgattcgtatcagtcaacgtatcactgtccacatttataggaatattcctatcaatcattgatctttctaactatccagctcgttgacccatgttttcctccacaatcatagggatctttattcctccacctggaaccaattctttccttgccagtgaacggtgatcgaatccgacagccgtgttagcatcatcaacaggatcatcttccatacctaccatgaattgcttcagccactttgctctaattgtatgattcttacaaattggcttgaccctcatccattccccatatggtttaattatcttaccatcaaggacatcaaatcgtcgagggaaaaatctatctgagtgccccattattccacatataaaacaaaatgtaggaagatgttcatacttgaagttcacctaaaattcgattgtgttccacagcttcatgcgtctcttaagtggccttgtaacat

SEQ ID NO: 255659 - DNA, 1949 bp, Cannabis indica
aaaattggtaactttgtaatatagtgtggtgcggtttaaactacttaaaatcgcaaaccggcgcattgtgcagtttgaaaaaaatacaaactacaaccgcaccacaaaagatttcaaactgtaatttttatacaatgtggtattgtgtgaacagtttacacaatatagacggtttgatgaacacccctaagaagatagtttatacaaaactctagatcatttctctcacaattgacttgccatgttataatattaagtatactgtttctattaatttttatgaaattctaaaaaacttacagtgcttaaaataaattttaagcaattagtttaacatattatttcttaaatacttgtgacacttattattctatttttgacatttgtaaatgaatatttgatgtctcttctaactacaatatacaatattatacaatagaaattgcattttaatttccttcaagtgctaaaaaaaattgtccaactataggggcaaccataatgcattcacctaaaatattccatatatacccataaatatttcctttgtaataataaaaatagaaaaatttgtggtataactatttattttgttgttaattaaaccaaaattttgaaaataacaacaaactacttaaatgaccaattttttattatttcccgtatatacctattttaacagcttcattattgctctaaaaatgtttggtctaataattcaaaataaataaaatattttaccctaatttcagaaaaaagtttaatgactcaatgaaagatattcaagtatagaagttgtgaggcacactctcaacaagtacccatcaaaaatactattaattaattatttgattaagttagctaaattaagagtgaattaatttagttaagtgattattaatttaattgttgaatataatttatcaaattatttaacattgattaaatggagtgccattatccaaggaaaactccacttatgcacctaggagtgctatgctacatccaacttcttcaagtatatgtatatattactgcatatattagttataaaaaaagtagatattaatattaatttttaacttttgaactttcacatgtaccaaattatatctattgaatttttttggccgttaaaaattctccctgaactattaagattattgaatttaatgacttttgtccaatttcattcaattttactaattcagtaattgtccatgtactaatcatgatcctcagactttgatatctaccaaattatacctatcgaacattagcatgtactaaatcatgttccttgaactcttatccatgttattatttccttactaaaattgaataaaagtacttaaattcacaatctcaatagttcagaggggattttcaccttaaaagttcagttgacatgatttgttacatgtcaaagtttggaagaaaaaaaaatcataaatattatgtatggtagggatatgcgaagaaatttcaagcgcatgatacaaatgtcccactactagtctactataggccaaaaacttcctttttataagttgttatatgcagatgtccttgacatgattgggagccgattttaggagccgaaatggaatgttgtttgcagagaaattcaagcacatgagtgaaccaaggggctcgggtataggagccacaaaaagataaagtgaattcctcaaaatggtataggtggctcagatttagagccttgagccaccaagactcaatgaaaatttaagccctaaagaacgggtgtagtgcttggattttggagacctgatcaaaataatttcaagccctaaaagaggctgaaatttgagggcaaaatgtaaaaattaatttggagccccataattaggaggaagggctccaacttagacaaagaattccctgcaccctggagccctagagtgatgtgcaatgttcggctacaa

SEQ ID NO: 255660 - DNA, 998 bp, Cannabis indica
ttaaaaattttaccaaacgaccctattaacaatatttatatcataaatatgtttgttttttaaacctaaaattagataatttaaatttaaactaaatgccctaataaagtaaggttcatattttgaagaaaaaaataaaaagttgttttagatattttaagcttaattttaatatttgaaacaatttgaaatgagatatttgtgcagtggttgttggtgacgagtatcagtataaatattaaataacatggctggctactcgttactttggatctaccagaaaatagtgagtcttaccaggggaaatagtgaacgtgtgaagaaagaaatcatcagtaatgggtggaggtagttcctattcttaatttgaaataataattttgtctattaagattgttatcttcttatgaattgatattaatattgaatttataaattgttttaacagaaccagagggggtcagatttgataagtttccgatatgggtgcaacttcataaccttcctttgggattttggcacccaaatattttaagaagaatcggaagatttattaatggggatgatgaaaaggctgaggagatatatatagactcaacaactgcgattggccaatttgctcgtattagggtggcttatgatatgaataagcctctgaagaaatctgtacgtgtttgggtaagagataaacaagttatcattatcttattatatgaaagattaggtgatttttgttatgcgtgtggacgcatgaatcatgtaatgaatgactgtacccataataatgataaacaaaatcccaagtatggacctcaccttagggcatgaagataagaaactagactacgagtactagtgagattatatcgtttggtttattagttacaatagtaattacttaatttattattatgattactatttattatttaattcactcttattagttaaattcacacttcccaataacaatcgataatttacgagtaaataccatt

SEQ ID NO: 255661 - DNA, 947 bp, Cannabis indica
ggcataaaacccaacagagagttcaaaggcgcacctccgaaatcttggacggaggacttacccacctggcgcccaaggtaccttgcctcctatgaggaactgccgaagcaagatcctcactaacgtagtctatgccctcaaccaggaggtctctgtcagcatcaactgggcagggtggcaagccgagccacttgaggatcagaggcatcgaccagacacgtggttttctttttacgagccatcatcctgtggttgggtacaaggtcagaagagtttccttcgctagaaggatgactagcacgaagacgaggatgatcttcgtgcagaggttgaagcagatcctggtcgatctgatgcccaagttcccaagactcacctgggttcatctacaaaagacaacacacaagatgagtgttagacggagtatcaagcgaaaaacaagcaaatatgccgacttggagtactcaacagattaaagaacggctatgtctgaagaaaagtcagaactcaaggagtcaaaaagttttcttgagttagggcacaaaagttcctaaagcttagaataagcaagatgaaagatagacgcaatgtggttcagagacaaggtctatgggtgtaaacccacatgaagacatgataatgaaaagttgtagaagtttctaaaccctagggtttcctaagcattttttctacagcatagttgcattcagcgtgtaaacatgcaaagaaaagcataaaggaaatcagaaacttactcaaagattcgaatatctgggttcgagcaacgtcaagcaagcgagcagttgtatgaaggcactacgacaactctgaagcaagaaaactgtcttttcgctctgaagtttacttaacaatgaagggtgataaaatgggttatgtgccagtactatgggtatttataggcaaggaggtaactatatcaaaaggaa

SEQ ID NO: 255662 - DNA, 627 bp, Cannabis indica
aaataaaaggaaactactaaaaaagagttttttttttcttttgcaaataaaataaaatatgtatatcaatatatgggcaatgcaataaaaattaaatggtgatcattttttttatgtgaattgatttgtgactatgagtgaatcaatagtgaaaaaaaattatgttatgtatgaatgaatatgaacatacaacaaacaaacaatatattattattatatataattcatacactatatcaattaataagtaaataacaacaagtaaacaatttttaatttaaatattatgtcaataatttttaatttaaattaatatagcaattgatcataaaaattaataaaacattaactttgaaaaattaaaagcttacaattacaatacaaggagatagaaattgaaaagattgcttttctcgtataatattgtatattgatggttgataagtgatgaggattgaggatgaggagcatagttggtaaattgtaaattgtacaggtaatttttttttttttttgagagagagattacatatttagagtcttgagaagagaaataattttagaaaaagagggaaggttggtggagcttggtgggaatggatggaatattgagagagagagagagag

SEQ ID NO: 255663 - DNA, 567 bp, Cannabis indica
gtagtatgggatctgtagtgggcgagaaaataacacatttgatcgagtatgctaccaatcaaaatttatggctcattcaagtgtatgctcccaaagaagcgcacactttggaagcgcacagtgcttatttatgtcatgatatgacataaaagttaagattcaacttatataataaagtggattccctacgttcatttcttaaaatatcccttatatgtaggcgggaacaaaggaatgggccaaatttatctcgtttaacaagcaactctattcaatgttagtcagatttatctcaaatatgtaggtgagaacagaggaaggggttaagagaacgaatcacacttttaccactaaattgtacccgctacaatcccattattatatataaagggactttttgtcgaacaagaaactcaagttaaaaatgcatcagtaggggagtgttctgcctagagggaagcacctgtgcaagtagtggtaggcgaagcggaagcgagaatgtcagcttgagtaatgcaaatattggtgagaatctaatgtctcgctacgtcaggataatccttcttt

SEQ ID NO: 255664 - DNA, 4514 bp, Cannabis indica
ctacacagtccttaaattacattctgttgggtcaaattagtgtaatcctaaaagctttattgcaagacttaatcctacctaaagtaatctttgaacatttctacggttcatctataactatgctaccccacaaaccattttgacctcattcccaattggcccagattacagaaaagaacaaacttgtagcccaaaaagtagagaaaaagcaagaaaaattactaaaacacaacgaaactaacaaagcaaaataagtaaaacccatctcataattttacgaacgaaagaaaacccaccattcattcaagaaaagaaagaaaagaaacattgaattacagatcgaattgaggtatcaaattgaagaaacagaagggttgaatttaagcttccttacttgcccattattgcaattcaatccacaaccacactgagggcattcgaaaaaattatcgatggagaaggaagccgaagctaatcccaccgagaactcgaggtcgttcccatctcgaacgacctcaacgatgttaagcaacaagaataagaccttaacgctaaccccagttagcttcgtgagcttgtccttggagatatagccgcttatggtggatttgtactttaactgatacgaaccctccaacgagaaactgcaggaaccgttgaaatgggcatagaatcttccgttgcttcggtctaattcgtagctatttactccctttgggagaatacccatgggaagatcaaagtcttggagaacctcgtatgcggatcgcttatcttcaacgtcgggtgatgacgtggccaattgagatagcataacgacggcgacggcgacggcgatcagaatggccgtgtgagacattgtttcgattcttgtttttcgatttttcgaactaaaattttgttattatatgagttttttttttttttttttggccaagttgacaaagttatttttagcttaagattgtggatctaagacgatccatccatccacagtgttaaacgacagcgttttaacgttttctaggagattaaggatctaagtggcacgtggtgcaaagaacagaacacgttgacaataaggtagagcgtagatttcaaagcacggttcatgaaatagaagtgatagagttactgtcggttttttatatttcgtcacccattgctgttttttaattatgtaaatttgtttgtattgtactcaaattttttagttcagtatagtaggagaaaagttccaaaagtgtaagacaaaatcaaaaatcaagaatcgtaatgatttttcctttttgttaaatgagtaatttccaattgcaatgcaaaaagaattctttatttttcattgacaattatgaaatacatgtgtgcatttatagatgtgatataatatttgtatgataatagataaattcttgttgtgcctaatccatttttaaggacttaaggcaggattagcatgttaaaaatatgtctctttgtaatttatggttatacagattcaccactggctatttcaaaatcacttaagaacacatagataaaagaaaaggaaagaacaaagcaaagccataattatggtaaaacaatgacacgagtacaagaaaaaatgaatcattacaaataacaacaagtaacaaaaggaaacataattgagactgatatttgatgataatataaaactatgatgagaatgagcaagagataactactcgtagtctaggttatacaatcacacaaactgcaattagtttgtaccaattatacaacaggttaccatcaaacaccttttatccaatttataattctaaacacagtaacatgttacaacatgatctttaatagcatatattaatttagataagaatacgacactaatttattcaaacacagccaaactagatagttcaaaccaatttattcaaattagtactcatgctaatcataaattagctgacaaactcagtcaatttagatacgaaaacgacactaaacggttactaagcttcgttgtacccttcattgctgcattgccatacccaacacaatcaaatccgcaaccacaagtagggctctcctcaaaattactaacatcaaagttggcactggcgaagccaactgagaattcaagctcatcattgttgcgtgtgacagagacaattttcagccagaaaaaagctatcttaacctcaataccagacaagtagtatagcttattgctggttatcttgcctgctatgatggggttatactttaactcatatgaatcaacagtgaaactacacgagccgtttaagtagcaaagaatgtacctgtgaaattgtccaacttgtatcccaataccccattgggaagaagaccaactgggaaatcatacccttctagtacttcataagccgttgaagtagaagacaatggggttgtaaacgacatcagaaagaagagaaccaagaattgacaatacgccattggagagattaagggttagttagtagtttagtaaagtggaaacttaggaaactcagatagtaaatagagatccctttatagagtgttgagagtctgactgtttggtcaatatatatacatgaacattagttgacctcagtgataggaaagtcagaatatggtagaaatctccacacatatacaatctacaatgaagagaaaatcgtactacatagtaaacttatcctataaaagagtgtaacagcaacaagaaaacttcaaaagaaagtaaaccattctcagtaaagctatcgttaaccataatatacatagaaacaagtctctccaaaatatgtgtcaggttaaattttcttatgctcatttccaccggtggaattggctatttgtaatcttcgagctacatacacacatacacataaatatatatgtaagagattacatgtatttggcattgcttcacatgtgtgtaatgtatccatatacattggaggttaggtataactatcaataatttccaagaaagtaccttttctaaattttaaaatatctcttggaatcttgcttatgttatcatagtaccatttttctgtgtttcccctttttctatgtaactctaattttcacataaaccagagagaattataaagagcatgtaattaactattaagtaataacaagaagttaacaaacataataatcttgtcctctgctctgttttagaatgcccttttctacacctaaaaatctagatcctaataattcctaagctttacccataaagacatttaatacattattatataatctatggtggaacttttttattcttcttacccatcactgaacctcaactgagttagaattacagttcaatccacagccacactggggagactcctcaaagttgtcaattggaaaattggccgaagcgattccaacagagaattgaagctcatcaccatcacgaaccacttccacaatgttgagccaaaagaagagaactttaacgctcacaccctttagattcttgagcctttctttcgatatgattccacttatggtggacttgtactcgagactatacgaaccttcgaggttgaatttacaagttccattccagtgggcagagaactctcctgtgtctctgttcagctcgtacccagttactcctttgggaagaaggccttgaggaaaaccgtactgctggagcacttggtatgctgagaggatgttgtaatcgtccgcggaggcaaacgacgtcgttgctgaggtgaagaagatgagaatcgcagagagaaatggaatcggagacatggggttctgttggatttgggaattgggaaatcaaagtagtgatgcaatttggtgtttgggtggaaagaaaatgggattttctagtgtttgctgtggttgtttgttgaattgttaaattgaatggttttaagaataataaatgattaaaagtgaccctttttgtcatgtttgccattaaatatagcaagtttgtaaagagtagttgtagagtagcatttgcatattagtatagggtaggcaccagtagtacttagtattttctcgacatgttatgttgcgatagattgatgatactccataaaaattgttatattaaactatatgaaacctgatacttaatttgactactagggatattaagacatgctagccactactagtgccctttaaaacacctaaacaaatatattatgaggttctactagtgccacgttttatttttcactctcatctgcattagatagatgactggtttcttatttattacttttcaaatgttggttcacattcaaaatgatatatttgaagatattgttgggaggtatgagaaagatggttggtttcaagcaaattaacttttgaagttttgggtagtttttattaagagatgaaaatatacattgttggtgaaaaatatcgttttggttcttcaaagacatacaaaaaggagagattaacaaccggtcttcaaataaaaattaactaccggtcttcagggggagtaagttaaaatg

SEQ ID NO: 255665 - DNA, 504 bp, Cannabis indica
ggactaaggggtgtcaaaacatctcttaggcatctcataggacttcccttggatgtttctacactactggattgtcaacctgggtgttgggacctgaactaccttcagtaaaatgaccataactcactcaatttttatcctattgacgcgattcaacttaagttttcaagatatttaagcgctcgatcaagtcatgtctcacaccctagtcaaaattctcaatctatcattatcaaaatccaccccaagggagttacgaaaataagcttcgggtaactcgcagcgggacatgccaggcaccaaaaattagccattaccaccagaagctaatttttacaattagatcatcatgaaaggtgaaaaacactatattttgatttttttttactatttttgtgggcctccttcatctataaaaggagagctcccttagctcatttttcacatttagaaaactacccgtaaggtcagagcttctctctctctctctcgactttctctctc

SEQ ID NO: 255666 - DNA, 996 bp, Cannabis indica
tataccaaatcatacattctcgtggttctaggtaggccaaccaaaaagtctattataacatcctctcactttcactcaggaagcattaatggttgtagtaaccatacctgtctctgatgttttgccttaatctgttgacatgttaaatacttgatcatatattcaactacgtctttcttcattctgcaccaccagtagtacagtttcaaatcttggtacattttgatggtacttgggtgcagggaataaggtgtagtatgagcctcatcaagcatttcttttttgagctcaccactactcggaacataaacccgagccttataaagtaacataccattattcgagattgagaaatccttagcccaactagctaatacttcctctcgaatcttgactaattcaaagtcttgcactattgtgattctttctaacaagtctggctaaagagtaaagttatgtagtttcccaaccaagaactcaatatgtaaagactgcttaattttaatatgagaattagcagataattagggtttaatttggaattagacttttattttatgatttatgaatttatggagatatatttgaattcaaggtgtttatttatgttatatatgaaatttcatatttgtcatattttatgtccggtaatattaaaacgcgatgtttggccgatagagttacatttacttataatttggcattttaagtaatagcaggacaatttagatagacattgaaaatgtcaagaatattcaaggtattaggtttgaccaaaatacccctaaatggcaagaatactttttgatgtaagcaagggcaaaatagtcatttgccatttgaattctttgtccttagtggaggaatattttgttttataacctgaatttaataaataaatgttagataaacactaaaatttttcatttattttaggtttgaaaaattagaaaaaaaaaaaaccaagccttccctcttcaaatctctctctctctc

SEQ ID NO: 255667 - DNA, 836 bp, Cannabis indica
gtgttccatgttttaatgcttcggaggtatgtctcatattcgtcccatatcttgagttatgaagcattggaactacaaccatatttatcatatgaggaacaaccggtgcatatacttgacaaaagggagaaagtcttgagaaacaagacgatcacactggtgaaagagttatggagaaacagtaaagtagaagaggcaaccagggaactcgagacggatatgcagtagaaatatccggtgttgtttaggaaaatttcgggacaaaatttctataaggagggggtaattgtaataccctggaattaagaaaatggattatcaaaaccctaactggttaattgactattattgtggaattatattagtatatgtgaattaatatgagatatgacatgttaagaccctgttggtgagccaggggtattttagtaattttgacccgagaagggtaaaatagtaaaattaatttattaacgtgcttatggactatattattatatagtatgcttgtgttgtcctttttgcaggtgtgttttgacaagtttgtgcggtatagtcacaaccgggtatttcggaccgaaccgggttcgcggccgaaatacaatgttgggtttaattattggttttttatttatgtggtaataatctgaaaattatctgagtttatttgtgtgtgcaagtggctattttacccttgaagtgcttatgtgggtgttttatggccttaagggcaattgagtaattttgccattttggagtaagattcataaaagggagtttaagcaaaataaagatttatttttctgcattttttcccagccctttggctgaacccc

SEQ ID NO: 255668 - DNA, 691 bp, Cannabis indica
attttgcgggaaactttagagctcaagacttttcttctttcttggataaactttatcacattcctttggggattccgcctcttcgaaccgatcaaagacacggtatgagttctacatatgaatgtaaagaattttatgagagtattgtgtatctatatttggcttcgaaactggctaactgatttttttatttctgtttcccagaggacttatctattgagtgttctagctctcgtagaagggtggcttcagttgaaaggttaatgaataatgaccccaagatcccaagctgggaccttcggcattttactggggattctgatgatgatggaacggaacttgttactggagatgaagaattcttcaactatgggaacgtagaggtttcaatttataacataaggtatcggcaatgttgtacgacgcggcgagctcgatgattgtagtgttgggagaagggcataggtcgatgacgtagaggcggctgttgccgaggattttgatgctttggatagctacggataagagattctcgtagaagggactgaatttgacggagtacgtaaccattgaattgaatagggatttatgaagattggcatcttatctttaatggctcaattctctttgactattctcagaagttttttttctcattttaatttgattatcatgcaattttctttgtata

SEQ ID NO: 255669 - DNA, 461 bp, Cannabis indica
attatttaaatctgaatatgtattaattttttatttagtatttaattatatattattttttttgaaacaattataaactaattataagaataaatagttctatgaaataaaaacattttaattatataacaaaattaagtacaaaaaacattctaattatattataacaaaattaaagtatacaatagacaatatgctaggtccctactaataaaaattgtacatgaaataagtattgcctaaaattaaaagtctaaagctaaacagtttgaatttttaaaaacaaaatagttttttattaagaaataaatgtttattattcattatattttgaataattaatttttgattgaaatatgatatcaaaattataaacatataaatttataaggtctgtttacatatattttgaaattttttaaaagtcacgtgcccctgcttttatttgggggcttaatctt

SEQ ID NO: 255670 - DNA, 691 bp, Cannabis indica
aaagccgtaaaaatgtaaaaaaaatctttacaagtaaaatgtagtttttttacaaaaaaaaaatagtacatttatgtaattattccataaacaaatacgcatgaaaaagtaaagatttgtatccatgtttaatacccaaattaattttttaaactaatacttataactattgaaaaaataggatcacttttccctaaaccctaaaatacccctctcattattctcaaccatctctctctcttcctcctttctctctcaaagcaatcccacccgaaacccaactaagaaagcaccaaatccaaccgatccacctccggcgttccacccaaaacgccgatcgaccaccacccacggtgaaccaccgcacccacggtagaccgcacccacccaccgacggtagaccgcacccacccaccctagatcgcacccacccactcttgactgaccgaaacgattgtgaccaccacggagatccacgaaggaactctatcttgaccaaaccaccgtgagcacgaggaaaaccaccacaacaatgtcgggcaaggtatttatcatttttaatggtatttttcatttgtttaattgttgattgagggtgaaaatgctttttcttgatagatttaggttctgtgattttgtgtgtgattttagggtgtgatttagtgtaatttcatcaaagaagatgaaggcc

SEQ ID NO: 255671 - DNA, 612 bp, Cannabis indica
tcaaaaatatcataatgaattgtactgcaataatatgaaatagggaataaaatctcaaactaaaattgaaactaaattgttcataaattaaaacaattaattcaaaaataaagaagattcaagcttcatcttcaacttggacaatctccacccttctgtccaatcatccgactcaactcgctaggatctagcaatccaaatttaagcagctggaactaaaataagaagaaaacaaatatggttagtagatccagaattaataattacccaaagagtaataattctcgaaaacacatgagtttataatagagatagaaaaaccttgtttatttgtcaaaaacttaggacactgggatttctagtggccattttcgttgcaataaaagcattttctttttttctttgacttggggttagcaatctttttcttattagctgtgttaatagctttaaaaggcttcttgctgtttttcattttgttgagtttcaaagtagaggcaatatttaatcattttgtattgttttccttaaaaaacaaaagaaagaatgaaagaaagagaaactaagggtgacaagtaggggtgttcacaaagtatccgatccaatccaatc

SEQ ID NO: 255672 - DNA, 546 bp, Cannabis indica
ctctggtatctttagtataaaaactgcttatcatcttgctgtgagctctagagattttccctcctcctcttcttttaatgataataagcaattttggtcaaagctttggtcttcttttgtgccccccctaaggtgaagtattttgtgtggcatgtgatttccgattccatacctgtagctgctaaactttttactagacacataattctttctccaatctgctttttctgccacacaaaattagaaacagttacaaatactttccttgaatgttctagagcaaaaattgcttggaagcacttaccattctataattattatgttgtaaataaattacttaatattattgtcacttgagcttttgaaacttttgataagtgtgttttggctacctttttatgtttcctttgaatgctttagaatcaaatatataatatttttcatcatataaagtgtttacctccaatgctactttatgatcatgcaaccacttacttacagggatttgacaaagctcaacaagtggccactaaaaatagacaacaa

SEQ ID NO: 255673 - DNA, 543 bp, Cannabis indica
aatgggttcatcgccggacaaagaaaatcccaaaatcccgactccttcgttctctctcttgtctccgatgtctgctccgccggtcaaagagtttggatgagcttctctagcatggaaacaagataagcttcttcaccatccatctctttaatcctctttctacatatctccatttctttatcatacaattttttttatttctgggtttttattgttggatttcagattgatattattaatgtaaggagtcagattagaagatgggtggcgattggtgtttgatattgacgttctgggtttgacgagctgggtattgttcgactggctttgggttcgacgggattggtgctgaaatttggccactaaggggttttatcaagaaacaatttgaaaatggtagaattaatattcttattatttgaagtaatcgatgtgatcattttatcgtaagctaaacaacttgtttacttgatcgataggtgcaggtgagtgaatcatatggattaaaatttccaagggattgcacttctcttaaagcagttg

SEQ ID NO: 255674 - DNA, 1008 bp, Cannabis indica
tccaatggatagaaccgatccaatccaacattcaatggatgttggatcgattggatgactgaaattaattagatctaatcggatggtaaaatctaacatccaatatatagcttgatcgaatctggataggtctaaaaatatttaatatggtccaatgaacacccctagtgaccgctactcacggggatgaagttgaagacaatgaggatgtcgagttgtctactgaggatgcaccattggacgaaccattttcctgcaaggatttggtctcgcgattaaggaaatctgacttgccaacatttcataattgaaactgatcaacaccagttgtacaaaaccagtgtcaatacaacacccacaccttccctttaccaactcagcgatcattccgacaaacatcacggtgaattctattcccattctttgctactgcatcgcagttccattccattcttttgtaaaagggatttttacatattatgacatcactcctttccaactcaccctcaacagctatcaaatcgtcctcgagttttatgcgatgtacatggagttcacgcaaggggaacccacaatcaagaatttgtgctatttttacaatattaagaatgttagccatgataattattaagattacagtttgtaccgttgatatagttataaggtgttaggtgttatagttatttttctgttattgttgtcacatgttgagtcctattattgaggataaagtcagttggtttacacctaactccaactattttctagcttgatattttgcccatatctatatatagggctctatttagtactctgtatcaattcatttactttcaataaaacaattcattcattttcttctgcaacatggtattagagcaggaaagtaatgctttcctctaatcctcagtcatcttccaccttcaccatcactgtatcgtcttctccggcgataactaaatctgcagtgaagattgattatcttcatcgacatcttagctatcccct

SEQ ID NO: 255675 - DNA, 1219 bp, Cannabis indica
cttaaatgatagctaaaatagattggatggattcaatcaaatccaatagaacaccagcaaatgcatccaatagttgaaaccgatccaatccaatacatccatcggatcagatcagatgggatgacttaattcgattggattgaatcaaatgacaaaatttaacattcaataaataattggattagatcggttgggtcaaattctataagatgtgatccaatgaatactcctacattagaccattactatatttgctacgatttttacaatatatatatttgttacaatttttatataatatttgaatattgagctgcacaaaaaaaaatatatctattacaatcactacaagaaatgtcaattttattagcatatttttgtactggaaaaagttggtattgcgctggtaaaaaagaatttacttgtgatgtgttggcaaaagggggttggcaaatcaatgttggtattagaacttttgctagcataaaatgaaaagtgatggcaaaaatgactttttccagcgcgtaaatgcggtggtaaaagttagattttagccactacaaatgtacataggtaaaactttgacctttttgccagcgcagtttacaaaatccactgataaaagttatttttaccagcacagtagcgaactgtgctagtaaaaatgacatttcttatagtgaatttttattattacgctcgaatgtataatagtatcgtaagcactcgtgtttgagaaaattgtaaaggaaaattgtaagtccaaacaaattacgatctaaaaaaattatatgacaaaacttaaattttagaatgttttcctcaagaaaaaaaaaataaaaaaaagttagtgttttagccaactactattataagtatatttatattctttatacatcacttgtgatctctatggtcttatctgggaggttcgaatactattgattaagttttgctaattaattttgatttatgttaggggtgggtattatctaatccaatccaattgaaccgaactaatcaatttttatccaattacaagaagttggatatccaattataattggattggcttggatgttaaaagttgaactctaattggattggatcggttattggatgtcaatctcaaaatccaattaaaaactgatccaatccaattatatttgtatatatgttaaaaaaattatttatataatattgaaaatataatatatat

SEQ ID NO: 255676 - DNA, 781 bp, Cannabis indica
gtgcaaaatcaggttggtcgggttggtcagtttaattgggcggttggacctattttcaacccgcccaattaacagattgggcggtttgtaattttttgagttatttcggtttgtaatttttatcggttttttcggttcggtttgagcgggttattcggtttaggcgatttacaaatttttttgtacagtcctagtattccgaggttttggtaagccgcatactatggcggtaacggtatagttattcaatctcctaggtttttttttttttctaaacttaatggctctacagctaacatagctatctccctctttttatttattttttcctttcttatgaagctatctttctttcttttttttttttttttttagaacaagctatctttctctttaaattataatgttactattttttttgttaaaaggaaattataatgttactattaaaaagataatttttacttctttcccaaaactttttagaaaaaaaattacagccattaagtttaatagtttttttgggtaaccaattttttgacacgtaagaaatatatattttctcgttgttattgaaggaaagactaaaatcaaaagtaacttttaatttttttttctaattaattaacaaatataatcaaaattttaacttaaataaaatttaatagatcaaaccaattttatagattcagagctcgtttggtatgtcgtattctatcgtattgtattgtgttgtattgcattagtattatttaatacaatacaatgtttggtattgact

SEQ ID NO: 255677 - DNA, 905 bp, Cannabis indica
tgttttacaagcaaagggacctcaatttttaccctgcatgggcctatgctcttttcacgtggattattaagatccctattgcatgcttagaagtcttgatttgggtttccattacatactacctaattggacttaatcctagtgttgcaaggtaatatgatttaatttgactttttatgtagaatcttagttttgaacctcttcaatagttgggcaaacttttgcagttttttcaagcaaggccttttgctcattttcgtaaaccaaatgggctctgcattattccaagctattgcagctacttctaggaatctaattgtagcggacacttttggctcatttgtattgctcatgcttttcgggctaggagggtttctgttatcaaagagtaaatggactttcttttatttcatttattcatttttatttatatatatttatatttctttctcattctgactgttatagtgtttcactacagatgatattaagaaatggtggatttggggttattggagttcacccctaatgtactatcagaatgcaatacaggtcaatgagttcctttcagaccaatggaatcatgtaagttattagactaaaaaacatttgaacatgtagccttcatatatatttgtctttttacttttgagtaatttttgataatgggtttgatttttgggtttcactcaaaattataacagcctggaccaaatggaacaagacatctaggaattgaagtgttagaatctcaaggattctttacaaaatcatattggtattggattgggcttggagcggtggttggttacaatatcattttcaatattctttatgcactttctcttactttcctcaaccgtgagtatttctaccttaccatctttgatacgagatgacatgat

SEQ ID NO: 255678 - DNA, 972 bp, Cannabis indica
aaaatattttcaaccaaaatgaaattatttaataaattttttgaaaatggcaatccaaaatattagctagaataaaaggtaataacaggatcaacccaaagcatcttaaatcccccaaatttaaaggacaggtcacaaaacactcccaatacacaacttgagaatccctgagatcttaatagaggaatagtcatgcctcccacaccaataatatgtattttgctatcatatgtgtttaaatgagactgtattgtatgattaattatgattaaatatattatactataatagctaattttttttaatatgttgtaaattattaattttttttatgaaaaataaatattttgtaaacttttccaaaatcttagtatcaattataagaaactcagactgcccacctaaaaatacatcttcaatgaagtgctatacaaatggtattttttagtacatcttgacaaaatataattatgttaaatttaacacaatatataatataaattacatttattttataataaatattacattttttatttactcttttcccactactaattaaagttgttctattaatttaagggctttttaaacttttttttttttctattcttaatttcaataaattaaattatttttgttactttttgaagttattttcgcatcaaatatattagagtacaattgtaaaaaatatgatcaactataaatcttgtacttttgaaaatacatcacttaaggttaaagtccccctcccattattatagatcttttgagtaaaatattaattgtgaaggtttcatttgtcttgtcgtaacaatatacttgttaacaaaattagctagttaataaaaatgaattgtcaaaaaaatgtattattgatgcttacttacatccttcttagtaaatcgaaacacaaatagtgctcaatagtaatgcgtttaaacaaaatagccatactttttttttttc

SEQ ID NO: 255679 - DNA, 599 bp, Cannabis indica
atttattaattacagaaatttatttggactatatggatataatgtaagttatttgtaaaataaaaatattttcaagttcggggaccttagagaccctttggagaccaaaaatgtcacaaaggttttagttagtaatattgataggattattgagataagttgattttagaaataccagagtattttggaatactagagttaaccaaataccctaaaattaaagatttcttaatggttgaaaaaaatagtaaaataattattattaataaaatttttatttataatataaatattataattaatatatattattattattttattattatatataaatacaactgacagttaagtgtttatatatatattatatatagagtatttgcagtataatttccttaagtggtcagatttttgtaactaacccccaattttaaaattttggtagtaaaattttctaaactcaagttctgttagcacttagtcatttccatccatttttgggtcttaagtatcaagttggaatgtctacatgtacacaatgtacacgtggcacaatttaattagtccacataataaatatttaaaattaattattt

SEQ ID NO: 255680 - DNA, 716 bp, Cannabis indica
taatttattaattatggagattatattagaatatgtaggtatcgtagataccataatttgaataaaataatttcgggcctggcaactgtggaacttgacggggaggtcagaaatgtcacgacaataaaagataaattgaattgaatttttataccggtctagtttagaatttttaagttatcggtttggtggattaattaaggaatgactaaaatacccctaggattttctaaagtttaagtgttaagggaagaggtagaatagtttttttgtaaggtgaagcttttgtcttttagtgcctttttctaggctgagatattactaataataggtttatagtttactttaagtcttatgtgttgataaatatagatacaacttagaaaacttaagaaaaagtcaacacaagttccttctcttctaccctcttgcacgagcctaggagaccagcttcactgaagggatttttataactttttcttcaatttcttggcagaattaacaagttctagggttttttcaagcttgaaggtaagtttttcacccttttctcctagttttattcaagttttaagttagatataagttagggttttggtgatttcgggattagggtattaaactgaagttagaatcagtttctaggcttgaattagagtttatttaagattgacttggttagaatcagctcacttagggttgagttagaggaattt

SEQ ID NO: 255681 - DNA, 1566 bp, Cannabis indica
caaccaataaaataataagagattaagagctgtaagacattaagagaaaggatttttatgtggttggggcgttaatgagccttagtccatgagtttgtatatttatgagtgtatttaatacagagaatgttcttggtgagtatttactcttcttgcacttatgcaacccaaaattctcgaccaccattaatgagctttgagggggtatttatagtgtttttgtggggtgattcccagaatcatagtacatgtatttctgtaactatcaataaagtggggtattcccaatgaatataccatgggtaaggcatggtcaaatccctaggtgttgtagggattttatgtggattgtccttattgccttttgactgatgtgattcttcacagagtagccgtcattagacttaagtgatcatagccttgtaggtgcagatcgggggttgtgtcgtcagactttattgcgtgtggcagttccaacacgcctcctcccatgcggcattaaatgcgagatgactgctcagaggaagcctgacatctcccggagatgctttgatgccaccttggcctccgggagcatagaggacttcgtatgccttctccgggaggcagatcccggataatgcctttctttataaagacttagctattaatttgagtgttaagacctttgtgtccacgtgtccttgtctggttggtccacgtatattgggcaaaatcaggggcaacaatctctattataatttttcttacattaacaagaatgaaaaaaaaaaaaattgaaagaaacatacatagtgttatttcaaatgcaatattatttcaaaaatttgttttttttattattttaaagtagtttaatctcaattttgctgaagtaaattccttttgaaattttcttgaaattgtatgattttattttaatatgtaactagaaaatataccgcgcttcacgtgtggttatattttatttaataataattgaattataaaattatattacattctaaatttttatatttcttataatttttttgctctaatatgaataataaatttactaaatttgtttttttctaatatttttatgcgtttgttttcttaattaattcattatagatatatattattatacagattaggattagtcttcaaaatatatattgtttaaataaattatatttaaatttaaaaaatatatataacaattgatataaattcaatatatatttatatgtttaaaaatataatgaaaaggaactaattaacatgcattcacacgagaaattttataatacttaattgaattatctctttaaataaagtatctctttttttaagagtgaatgaattatttcttatgaattattcaaaatataaaataaaaagtttgaatttgagaatggagtaatacattttttttaaaaaaaataattaacataatggcaaattaattattgttggattatattattcaagaaaatatagaaaactatagcatacagttttatgtaagctatttttcattaactttttttttagtactaatcatttttcatttatttcgaa

SEQ ID NO: 255682 - DNA, 922 bp, Cannabis indica
ttactcttaaatttttttattttattttaattttaattttgtaaaatattgccacataggataattttatagtgacatgttattgccgcgtggacaaaattaggacttaacgaggttggacagacgaccttacaaatgtaaacaaaacagtactttggagggttatcccaccaaaatacgaggttggatggttttttgcaagtaaattgatagttgagggagttttgccgcaaattactctatttattattagagggtgcctaaccaaaacaaaaattacaaaatttgaataacaattaccatatgaaaattataaagaaaaacgacacaaatgaaacgacactataggataaaaacgacaacaagcttaaaaatgtcctcaaacgacactgaaataaaaaaaaacaacaggacttgataaatgactattttgaataacgaaactaaacgacaccaatggagtaaaacgacaataatcgacaaaaatgacactaaagggaaaaacggcataaatggacaacaatgacgaaaaggacagaaattgatcttttttaaaaggaaaatagtttttttttttccaaactatagaaattttttcctcttaatattattttattttatttattaattttttaacccgaactataacaactattgcaaaatcttcccttttaaatgtaaacatttcattattttttttgaaacaatttgttgaaatagtatgctaatctaatgcaattcaaatgttgagaaagaaaataatatgcataaatagcaatttttgtattattagaactaaattttgtatgttaaacacttataaacttattagctaacatgcagtataattcacaatattctaacatgcacattcactctactatagtttttcttagggctgcacatgggttgggttgggcgg

SEQ ID NO: 255683 - DNA, 661 bp, Cannabis indica
aagtgaaaaaaaactttaaattccaataggattaaagtatgaaaaaattcatgcatgttcgaacgattgcattttatattgtaaggaatatgcagacatggattattgcctgacttgtggtttatcttgccataaagtaaacaagagtgaggagaataggaaacttatctgccaaaatcatagctaattttatttaatgatctgcaggttctttaccaaggcatataaactatttggcaggaagaaaagggaagtttctgatgctgtggctcagaaataaaaggaaaatgaaaaaacaaaaagctaaaatcaaatcccttaaacagaagaaaaagatttcccaacaagagaaagaaggagaggtggttgattaggcgtatgttccacaacaataagcttgtcaggatgagagtcgaccacaaatttatgccaaggatttagttatccttaacgagtcacctctcctatacaatttcggtgaatagagggcctttgatcagctagtatatctttgctctgacaatatcgacaacgttgtggcctgagcatatttgtacgaacatgagggtccaattcaaaagttcactacaaagactgtgatgattcacatgcccaggttctagtttcagaaatgctgcaagaggatgctgaaatcccaatc

SEQ ID NO: 255684 - DNA, 548 bp, Cannabis indica
gcaagaggttttggggtaggaaaaaaagctaagatctgatgcagttatgacgactaactcaggaagggtcgtcaggaataacgactctatccagctcaagactctggcactagtgttgacgcgagggctagatctattactgaggtctacttcccctgcctttgcactgggccgcatagttggttagaaattgatcatgtaatggtggcaactgagaagagaccatcaattctatcggcatctgctaggcctctaggcatgccatttttggaacagtttactcagaaggtttctatcgcctggtgtgactacaaccctagagttacatcaaagaaagtaacgcattccattaaaaaccggaatctctatcgaagtagcattcatcctactggggtctgagcctttacttcaaaagtcgttgactaccttgtaatccatcgtaagaaacagactgcccaagagatcttgggacacgtgcatgaatctcttagggcttcttggagctcgagagatgcatacgcatcactttttgtgtatgaaagatcact

SEQ ID NO: 255685 - DNA, 584 bp, Cannabis indica
tggtactggagtaagtaggtcagatggtctatcggctagcattaactcctgcattgtttggagtgtataatatgtttcatatctccatgttgagaaagtatgtatcaaatctgactcatattctgagttgtaacaattttgagcttcacacaaatttattatgtgaagaacagcaggttttagactgggaagagaaaatactttggaataagccaattccactagttaaagtattgtagagaaacatcaaggttgaagaagcaacttgagagttagagttgtgaatgcgggagtagtatcccgagttgttcaggtaaattttgaggacgaaattcttataaggaggggatggtgatggttgtaatatctcgaaaacctaattgtaaataattaggatttattatatattatgagattaattagatagtaatgagtatgattatgatcttgctaacttaattcagcataaattataaatattttccataagtggataaataagcgtaatttattaattacggagatttatttggaatatgtgaatatcatgtaagctatttatgagataaaaatattttcagatt

SEQ ID NO: 255686 - DNA, 1060 bp, Cannabis indica
ccaatccaattatttattggatattggattttatcttctgatacaatccaatcgaattgagtcatccgatctcatctaatccaatgaatatattagattggatcggtttcaaccattgagtgcattaactggttttttgttagattgatccaatccattttagctactatataagttgatttcattaaaaaaaatacatacatatattttttttatttaaaacctaataatctaacatacataataaacattagttgatattgtccaatctaattctcattatcacataataaaactgctaaaaaataaaaattatacaatatgcattgataattttattggtatttaggaagatatgaattaatattttatatctaaggtgtttttctttaatctcatgtgttaatagtatatattaaattaattaataatatatttttttcaataaaatatattaaatatattaaatatataaaattataaatgtgttttaaaaatatataaatataattagatgactattggatgattggatcggtttggttcggttatttattggatcagatgtctcatctaatagccgatctgatcccattaaattttcaaaatttacatctaatccaatccaaatatgatcagatatctaattatattagatcggttaggattgaatcaattgattataattaaattgaataactttttacacacctatacaaatgctttatcttttaaatatgatttcttcgaaatattctatatatatgtttgtcaatttttttttgaattattgatttgcgtgtgtgtttaaaataattcaccatataaaagagaaacatttactaaatttatactctatatatattatatgtagaataattattacatacgtgtatttatatatacatatataataatatataaaatgaatgtatacattaattatttgtttgttgaaaatatatctattctatataaagtgtgcctatataattgacttcttggtttatgataaattcatgggtgtaacttttaatttatatttaataaaataataaaa

SEQ ID NO: 255687 - DNA, 559 bp, Cannabis indica
tccatcatattccactcaactgtaggagcataaacatataatccattataggaagtataatacaacaacagttagaaattgataaaatgacaagaatatttcaaacaattaagattataattctgtagttgcaaagagaagaattaggctgaatttcgggaaacaaaaaaatacaaggaagaacaggtcgaaagtcgttggttatatttaattatttatatttaccttttaaggagaagggaatactttacaccgctaaaagaaagcttcagaactttgcacttcacctctcatcttttgtgtgaaatgctccaacgtatgtgcatactcgttcataatattattattttttaaataataaaaaaattatttttttactgcttgttcgggttacgggttagaacctaactaaaaaaacatccacttttaacacccgaacctgaaacccgtgtggagtatttttgggttagacccaacccgaccacacgagttttcaattttttggttttttggcagcgggttggggcgagtgatcaggtttttcaggtttgcgggtcta

SEQ ID NO: 255688 - DNA, 1632 bp, Cannabis indica
tatatatatatatatatgctaatgttgctctttattatctctactgtatgaacaccttgctagtggtgatattgtgtatatatttaaaaaaattgaatacatatgtatgtatgcatgtacatactagtacattgttaatgctaaattcgtattctcttgtcatttctattatggtatttaaatttgaaggaaaatatttatcctttatccaaaagttaagaaggaaaatatatatattttttttcgaacaagaggaaacttttattgaaaaaccaagcaaattacaaacaagaaaagtagcaacagctagtcgctgcctgcaccagcagcaactgcaaacaaaaaaccattaccagccttcaactacatttagaatatacctatcctttttggtaactttaaggtgcccaaggctcaaaactctacatttaacaatctttctaatctctaagctaatgcttctagctgagctacacacaaccaaagatacattgattcctattcttccaaataaagtacacagcagcagaaaaaaatagcattaatgacttgactcttcaaatctcttgtcgattgcaaacaccattgctgaagatccaagaaggaactcggccattgaatagtacccacccagcaactaatttccccatatattttccttgagaatatgcaattcaagaacagtgataatgctatgcagaatctgtctcacaaacaggacagagcagaaggataggcaagaaggaaaatatttgctttaatgtaagttttgaataaataagtaggtgggagatgaactatgaatatgataccatttcagagttatgatgggttggaaatggtctgaaattagaggtttactatatatatatatgatcaatcacacacgttttactaaatcctaattggtattggaatatgagtatatgagaaaggaaaatgaataagaatgaaatatagggatggcatttattgtattggaaaaatgttgtaacaagaagcaggaataagaattggttgtgcggttgtggttcgtgaccatcttggtatatgcttagcttctacggcaacacttcgatttcgggttcgttatcacctctgggggcggaagcaatagttgttcttcagttcttcagggcctcctctgttcgaggttggggttcagaatattgagtgaacgtgtatatgctcttttgaacaagaatttttatcttagtttagtactgtcttgatagattttttctctattaagagtgtctaatttcatttattgtaaatacaatatcgctaagttagttttaatctctagaatagatatggtgtggtagctgtctgtccctaactttttaatcaactttcatgctcgaaattatatgtctaaatattttttttatagaatgtttttgttatgattacaatatcttctttgtaaatttttaaatagtagacattagtttactatatatgttcaaaaaattttaaatttacttttggcacttcaaattattagaaaattttcaaaaagtttacaggaatgatgttgtaactataaaaaatattttgacatatattttcgagcacataggttgattgagagattgtaataggaagttaatagtagcactatgcgac

SEQ ID NO: 255689 - DNA, 502 bp, Cannabis indica
ctctctctctctctctctctctctctctctctctctctcttacttcccccaaaaaaaatatatgcctattcaaataaaaacaaagctgttttgttttactttttattttttttatttactttcatcaaaataaaaagaaaaaaatattattagttgtacttttcatatcagagtgaaatatgcatagaactatttgctttattttcttttacagtgctccagatataaatttaaactgtacacacataaaatttttttatgcaaatattaattcgggtgttaatctgaatccaaccacaacaaactcggcatacccaaccgcccaaaaattgggttcggttgcacatttttaatacccaaaatctaaaaacccgaacccaaccatccaaaaacccaaaaatccgactcgtgtgcaaccctaattgtcaaaaggaacgcatgcccacacacataagcaacaaggccgagtttaaaaaaaacatagacatgttgttgatgtagg

SEQ ID NO: 255690 - DNA, 2882 bp, Cannabis indica
agtgtttaaaatccctaattccgattttttctctcactctcactctcctcccaatcccaatcgataactctctctgcgattcaatctcctcaatcgatttctgtctctctcacagcgccgccatttttattagggtatgtgtttgtgtgatggtactagtaaggttgtaatgataacatttatgtttttaggcttaaaaaagacgctcttattattattattctcatttctcagattacacagaaccaaacaacaatggcggaggaggcgattctgggtttcctcaaccacaatactcaaatctccgactccggtcaattcgcagcccagctaggttttgatcacaacgaagttgtcaacgtcatcaagagtctccatggcttcagatatgtcgacgtccaggttcttctcttattcctttactccatttccctacctaatcaataatcctctgctcaaatgattgggttgaacttatatggaattgaattcaataaagaagaagaagcttacaatggtaatatgcaggacatcaaaaaagagacatgggtgcttactgacgagggaaaaacgtatgctgctactgcctcacctgaaatgctactcttcctcgccataccacctcagggtatcaccaaagatgaactacaggtccttacttacttccttgctcttcctcttaatttcaaaactaattcagaaccttgatgattccatgtttcatatagtttctatgcaatgattaaatttttgagtttttcttctctttttatgtgctgtgctgtgttgtgaacttttgttttcattcttgatgtgtggatgcagaaaaagcttgatccagcagtatacaaaataggttgttctcaggcagcgaagaataaatgggtcgagttgggaaagttagtgaccagaaaggtacatacatttccctgtaatcgtagttgtcaatattatgtgtgccgtgtttatgttctcatttggagagtatatttgcacttgttacttttgattgaggacttggggctttctttttcatcgcttttgtacaatgatctgctgaggcttttttatggtcttaatttagtttgattttgtaggtccatatatgataagatgttactttagaatatttcttacatgtatttcccatttacctgctgcaggtccaacaagtagaggacaaggttaaaaatttgctgcttcagatacaagacggaaaagtgcgtaaacttgagctctttgtcataaaatcatattacctgcataacatgttaatgatgtttggacgtttattaacaaatatgccttaaaagaataaatttaatccattataagggcctcccaactcttctgttttccttgcacccaaatttgagtagctaatctattactgttctctcccaccttgttcgtttagctcactaagtttgctcgttgcataaatttcacctatggtaattggtattatttctgtgcattttattccttgtttttagtttttctatgaattcaccttgttttgataagaataactaaaaattgccattagattttttctttattcaaattattactgatttttcatattgtgaatccaggttgtgagccaagatgacatcaaggctctcaaagcaagaaaacttattgctcaacagtaattttcatctcgatcttcttaaatgcataaaatttatttgctttggaaactcattagttgaaatttttcctcaattgatgcttgtcatgtttcggatataagatgtggatgcactagctgaaatcttgttcaattctgtttctttttgtgtgtgtgtgtgtgtgtttgtgtttagtgacaatttctcgttcagtttatgcgcatataacatatatggtagtaaacataattctcttctttaaagtcatgcaatagatatcatttgctcatgtagtaatatttatgtttttttactgtccattgtcaaggatatggaagggctactcagtgagtaagggccctaactatgctccagagagaaagaaggtggccacagatttgactcgagaaaacttacagaggtatgtgtctggctaccatatgtttataataccaaatcttgtttgttcatcattacgtattatataagcatccattctttaatgtctacatgatgacttttgacacactaatattattcttgtaaatgaaattatcttgctgacaggtttctgttttgttcgacaattttaggggggattggaaggaattagagtttaaagaatataatttcactgctaaaggtctacctattgatggtggtcatcttcatccattgcttaaggcaaggataaaagtttctttacttttactgtttttctttcccttaaatgttttaaaagtcatgatcctaaatgatccatagttgcattatggatctaggctaatacaatttagcattgagagttacaactacaacaaaggtagaaaatgttgtgctcttgttcaaacaattaattgcttttgattattttttgtttcaggtgagacagcaattgaaggatatctttcgacaaatggggtaattataattattttatgctactacattttacggtgtgtaaacatacaatacacacacataacattatttaacaatattcaagttttccacttaataatgtggctctttgtgctgcctgcaggtttgaggagatgcctacaaacaatttcgttgagagcaggtgatgatcttgcctttcatttcgagggactatgctttgattcttttaatgataaattggcagtttcttaaagtagattgacaacttatagctatagtggatattggtctcttttaagagttggaaatatttaatgcaatttaaggcttacatttgttttt

SEQ ID NO: 255691 - DNA, 2392 bp, Cannabis indica
aaaaggccatcaatgagcagactgtatgtacaaggagaaggggcgaaatcacgaccttcatgttcgtaatagaaatcgatagccttatctacactaatagatttcaccaaaccagaaatgactgtattatatgtgattgtgtcaggcatgacacctaaggatttcatatcactcaaaagttttagagcctcatccaatctacttgcttttattagtccctcaatcaaggtgttgtaagtactaagtactggagagacccctttttccttcatgaaatccagagtatcaaatgctttgtcaacattgcctgctttgcataaagcaccaataagaatgttgaatgttcgtacatcaggagcataaccatcagctttcatttcatcacaaatttctatcaaagtttccaactttccacaatcacttaacctgtccaacaaagtaatgtacgttacacgattgggtttgagactgctgttacctttcatctttacaaatagtgccatggcattatcaagtttacctgctttacaaagagcaccaacgagaacattataagtaataacatttggatcacatccctcttcttccattctcttgaatacatcataagcttcatcaatttttccagcctttccaagagctgtaatgcatatgttaaatgtataaatatcaggcctcaatcccaactgttctatctcttttaacaaacccattacagtttgagtatccccacgctttccaaaagctaccataagtgttgaaacagtcttcagggctggcttcgtcccttccatgaccattctattgtatacctccagagcctccctacaaaattctgactggacaagcaaatggatcaacccattatatgaacaagcattcaaaataaacccagcctttctcatcttctcaagagcaattggtgtttgtctaattccaccacttatgtaaagaccttgaaatatagctagataagtattcaaattccggtgaatgaatttcttttgcatgaaatcaaaaacagcagccatatccaccaccctcttatgagtcatcaagactttaagcatgtaattacacgtttcagtggtgtgaacaacatggggtaactcagcaacaaccataaaatatgaaaaagcagaacttgggtcagttgtagactcaagaaaccttgtaacctcttctgaaggtgtcaagattgtgtgcttttccttggtgagttcctccccttcatttgggattttcataacaaacccacacaaacccattggttttttcttcaatgtccacctgtttcccaagtacccatatgagcaaaccttcaaatttctaaagtgtcttcctttaaaagactctctatgactcgaaagagctgttacagtctctttaaaaatgcaagtatagctgaaactaatacagtacatactcgaacaagaacctattaatggacccatcaaaagaaattagcaagtgaacaaaaaaaatcagcaaaagatagcatttttcacacactaaagacaggtcttgatgatgttcgtcaaattgctcctgagtatataacaaattactatatgtatatattaggggtcaggcacttactgaaaaagttaaggagagaatgaagaaagaggggtgaaccgcaaagctagccgggtggacttcatttcacttggttatggctattggctagtactggaagagagggagagagagcttcgacttgatttatcgtctccaataaattagaattttcatatttatttatgaaaaagctaattagtaatttaaaaatttcttgttaaatttagggacatttgtttgcacccataaaattataaatacacccataattaaaaaatataaacttaaataatttttaaaattactcttgatattttcttaaaaaaaaattcctcacattatttaatgttaatttcaatacttattttgatttcattttcataatttttctaactcatgtatattttttttttatttttctaaaaaaattcataaaatttttactttaatttttttgtcataatatttaaaatataatttaattttatttgataggtatattttttaagaatataaattggaagaaaaagttaaaaaaaatttagtacaattaaagatataattttatattaaattaaaattattaaaatggggtgcttttataaatttttggggtgcaaataaaatttttttaaatttaaggacttttgtctaattatagtaaaaaattctaacatagatgaaagttcaaggagcatgatttagtacatatcaaagtttgaggggcatggtttggtagatatcaaagtctggggaggatggtttagtacataaacaatcactgagatagtaaaattgaatgaaattagac

SEQ ID NO: 255692 - DNA, 7165 bp, Cannabis indica
aataagcttccttgggttaagtaccatgaactagcaggtgctggacacatgtttccccttgccaaggaaacgagtgaagctatgatgaaacagttcctgattggggagaagtaggttgcttttggcatcacattgttctccatttaggactttgtagaaattacctttgacacgaggtaccattgctgacagtataataagcatgtctatgtttctagtcacagctcatctgtggttctcatttaacataattatccaagattgaaacatttcccatgaaaagcaattaagctgagctgttttctaatgattttgttggttgtgttttggtagttgttttgttttgtttgtttgttgtattgaagagggctaatagcagtaacatgcatgcatggtcattatttaaagaaatttcaacttgcagaaaagtattctataaaggaagaaagaaaatatatacaagaaaagatttaatttgaacataacatacaaataaaaagtttgcttaagcaatagttatcaaaacaatgttcattggatttgtttagtggtttgccaaatcgtttttcgtaattgaaaaaataatgcaaaagggtaattaaattgagacaggaaggaaaaaaaacactatggaacaatacaaaaattgttggtgacctaagttaccaaatattacccaaaaaaattagtgctttatctaatcacttcactttggataaattaaactaatgatgatgatgatgtataatgcgatgcaaattactcttggagtcactccactttaaagattgtagtgggcaaagtcttgctcaatcttactctccacaacaccatcaattcggtggtatatggttaggtgatcaaacaaaaaattaacataaatgatgtagtcatatatagacaacaaaatataaatttttcaatacatttaaaaattatctatttcaacgtaattcgctcactaatttcactcataactactcttggaaagtctatacaagtaccacatgtttcacctacaatatcttttatcaattcacctcaaaatcttctagaaaaattgtatggtttagtcactctcaaaccttgagaaaaaaaaaaatcaaagaacagaaaatcatactctgctcacttattttcttctctgaaagcacaaaagttctttttcaaaaataaaggtgtttgatgagcctataatatagaaatatttgatcataaagtggcccccattataagttggctgcattctttggtttgacttgttttccagcatctttatatcctttgcctaaacatgttaaactcactacagtaagagtatgtggactaccaatgaataactttcttttcggggtccacttgttttaattgtagtgaaccaactattctttgtagataacagaaaatgaagaccattagaccataaaggtcaaaaaatttggctttggagtttgaactaagcttacaatagactagttccttcaacttgtatggctttaatttttctttaaatttctatttctgtttttttatagcattgttttcgtttgtttcattatgggttatgtatttttcttaaaaggattagaaatgctgaagagaattggtctggttttggtgattgttttggtgtcatggggataccaggcaattcaccctccaccacctaaaatatgtggctcacctggaggaccacccatcactgctcccagaataaagcttagagatggaagacatttggcctataaggaatatggtgttccattaggagttgccaagtataagattatctttgttcatgcctttggttcttgcagacaccatacagtggttgcaaccaccctttctcaggtactctattatattgcatttgtgtgtgttgtgtgtgtactacatgtatgtaattatgtgcccttttatgatcatgatcttctcaggaagctattgaagaactaggtgtgtacatagtggggtttgacagaccaggctatggagaaagtgacccggatcctaaaaggacaatgaaaagtttggctttggatatagaagagcttgctgatcaacttggacttggatccaagttctatgtgattggattctccatggggggtcaggctatatggggctgccttaagtttatccccaataggtaagccatggcccattattccctttggttaacacccattgtggaaattaaaaactgagtaatatctccaagttttcatgatgatagttatagattagtaatgggaattgaaacattaacagcaaaacaaaaagggaatatttcttgcattagtctaaacatggaataaaaataataaaaaactcctttcccactatacttcagcgtataatctatacagagtcttcaaatatgaaatttgttcaaaattataagtttggaatgttgacaggcttgcaggagcaggactcattgctcctgtgatcaactactggtggccttcttttcctaaaaacttgtccactgaggcctactaccaacaaccaccacaggatcagtgggcactccgagttgctcactacctaccatggctaacctactggtggaacactcagaagttctttcccgcgtctagtgtcatagcgagtaatcctcagacactttcaccacaagatatggaaattatgaagaagttgttttcagcttctggtcctgatatgaaaacatacatggtacttgataaaactgaattatgaactacatctttattccttgcagcctagcctagtcttgaatgaaactagatcatgtagtaatgttgatttagctcatccatattgctcaatgattgtgtgtgcaacaggccaaacagcaaggagaatttgagtcattgcatagagatatgatgattggatttgggagttgggaatttgatccaatggatgatctgaagaacccttttcctaacaatgaaggctctgtccatatatggcagggtgatgaagataggcttgtcccggtagtgctgcagcgctatattgctagtaaaattccatggattcactaccatgaattatcaagtgctggacacttgtttcccttagccagtggaatgaatgaagctatgatgaaggttttccttactggagagaaatagctttgcttttgcagttaaatgttaatctctcttttaaggttgttagaatccaagtcaatccatctaaaccagatcagatctgatatacccaattggatgtagaatttcgaaaactgaatagaacatttcaatgataaagtgtattacaaatccattaataaaaaaaatagacaagttgattgaattttaatatatatttttagagtgtttgaaaagattacctataatttgaactgagtacacttgtttaaccacataattacacaattaaagagtctcaattacactctttaattttcataaccgcacaagtccataaaatatttttcattaccaacttatttgccaaataataaaataagtatttatatataattattgtttgacattcaaacacatctaaataattttagattttaaaaatctccaatactttagtattattttttgtatgcttttgaattttaattaagttaacctctttcctaattcttgtaaatttaaatgaggaacagctcaaacgggtagttaaagattggtcaaacatgaatgctgcagtaatcataacagggagtgagccaaattttagtagtaaaattaaacaaataagaattttatttgtcaaaagcatatgttttagtatcaatttacagcagtacattttattatgttgttgggaaaaagaccatttgatattaattttagaaacaagtcttttactaaagatcaccatcaaaaggtaatattttataatggaaccccatttgagatttctattcaccaaaggagcaataaataacttattcattgatgcatcaaagaagacaatagtacaaactgttttggacaaactcagataaaccattaaaggattatctacactacatgagctaaaactccatgatcgctaagacaacagcctcagcttgacgataagaagatcaagctcaaggaaatgatgttttatacttatttcggcaacccagtttccgggttaagaagagcgtggctttcatctgaaacatagactggacctttcccaggtctggtacagataaaataactcacatcgcctcttgatttctgagaaggaatgttatccttgatttctggtggtggtggcaaagcttcaacatcctttaacccctcaagcccagcatcttgtagaattgacttgtcaccaacaatgtaactgcagataaagaaaaccaggaagaagagattgttaaatagtgtctccaatatgcaaagtgaagggagaaaatgtcaagtggtgacaatagaatccaaatattaataacctgctcaaatctgcatcagtgtttggaggaaagtggtacaggagcctctgcagcaaaagaccagcaacttttctgttgtgtgcaatcataacagcattcggccccgcatcaaaagtataagccacctgaatattcagtaaacatcagttgagctcttcacattggtagcttaagatttaagacagaataagaattagtagagtgtagagccaaaagggaaaactggtttggagatgaaaatacataaatcccatgagaaattgacaagacaagtataaaatcaatgataaatcatgagattctatgagccaaataccagtttaaactttaaatatgagaatacagtgcttttccaagtacaatatgttcaagatgagtaaagaacactaaactgtcaaagggtaaatgtgctttctaatataacaaaaatttgataagagttacatttttataatttatgatttacttcgcaggtttcgattggcataattgtcattaggaacaaaaatcaatctacacttagctccaagattttaatttggaaagatatctcctttagaacataaaaaaattacataaaagagctgaaaaaattacagtgatgcgaagcactaaacccacagtcaagatacgttttattgagagagaaaacataaatttatacctggggtgttccttctgcacgattccacttttcaactaggctgattatcctgaaataagttattttctcagtatacaattcaagagtctaattttgcattcgataaacaaatatagagcaaagggacttgcctatgggatgtgtcattcatgtagaatatagggggacttgtgtctaggcacactgcgtgaaattggttgctatctgcacaagtcaattgtgcaaatgatgcaaaatcacgatttcttattgcttcttccattttcaatatacgttttggtactacttcctagaacaatgcagcagaaaagaagttaggattctcaacatctcagagtgtcaagaattttagcagactgtgattagtttgacaaagccttaactgtgtgaaggacaaagagaaaacgagatatacctttgccctatgctgtaaaagcaagcttgtttcaacagtctcgcgcattcctgatgtgctacttgtttccttttgccgtgaacttacctggatttaacatagtcaataaatggagtcacccaaaatgatactagaagaaccataggtcctaagacaaaattcaaccaaactttaaaatataattttgcctctgaaggacataatatacaagaatccctttctacagcagtctcaaattcaggatctgctttcatatcaggatttccaatcatcaacacaaatattccaggaaactaatgagatagtctaccctaacaactaatgtaagaaataattacttcacagtatcaaaaaccacaaaactataatatcatcacattaaaaccaaaactgggaaaacacacaagtctatcaactaatagaaacacttaaagggaagatgtataccacagcaacgattataactagttcatcccaatgtttctcatctgctagctgaactgcaacactgtcacttccattctcttccttaaatattcgaaaaaaaaaacagtatgaatattcaaaaagtatgaagtgttttacagtaatttagaattaaaggtaagtgtgagaaatcaaacatacttttcccatgatccacttcacaaatccaccatataaactacggcacgcactgcctgaaccttgcctgtgtgaataaaaaaaatcttaactattatcaaccagcatgcccaatatccttttacaaggagatattaaaccatttaagttgtatgcgtacaaacccacgaaattaacatcacaataatgataattagagaggagagataagaatccaaacacatataacatcaaaatgttataaggctaactcccatcatactatgtacatgagtgataccctaagtaaagatagaagtgggttacgtccttgcgaaattatccatgatgcaaacttccagaaatttaaatgcaacataaaattattagtgaagaaaggaatcagtaccttgcaatagctgaaagcttgctctgatcttcattcacgttcattagcttagcaagggaaaaaactgcagataaagaacagaaaattctttaatatttgataaataaggtttatttataatagttccagcaacaaaaacaaaaacatgttatcgagctgaatatataaataacgagtactccaaaaaacataaaattatgtcaaataataaaacaaaccatactcaaaatttgttgcataatgattaaagataaatcaaatattactttacattttaaaatcaagttgattgtactttagtactatatagtatagacaacacagtgaaaactatggttcttatagctatactatagatgaaaaacgaaaaaaagaaaaaaaaatacttaaaaaacaacattatatctgtatgaaaaatagaaagatttaaaattggtatttaccaaaacaagctaaaccagcagcagaggaagctaatccagcagcagtggggaaattgttgtatgaagcaatgtgtatatgcaattttccccagtcctcctttgaaattttgatacccttttccttgtcctcaacatcaccagcacgactgcgaagttcccttagacaactttggaacctgcctccggaaagggagatttcctacac

SEQ ID NO: 255693 - DNA, 661 bp, Cannabis indica
tttaccatattgagatctattccaatgcaaaagagcaaccctagtagcacccaccctcttaaaagcacgggcaggggcccaagagtggacgatcgagttccaggcctggtcaaccaccaagctacttcgctcatctctcgtccacccctcttcaaacttgaaatctcttttaacctttccttccattccattagtaagaaggcatagcggtctgtggtcggagtttcaagtttgcgaagaacaaaggacggctttggggaaaagattgagccaggcaccattaacaatacctttatctagagcggatttaacatggtttcgaccagccctgtgattatcccacgtcatctgatccccctgaatattcaggttaatcagaccgcgtgaatcaacgaggttggaaatgaacggaatgaattggtccgtcccagaggagtcttgacgtttcgaattactcaacacaaagtttgtatcccctaggatcaaccaaggaccgccaaacctatccccaatcttcatgagatccgtccaaaaccgtttctttgcatggaaatacgagggaccatacacacaagaaagaagccaagggtgggtcgggggatcggagtaaacaattccaaatatgtgattacgagagcaagagaggcattcaaagctaaag

SEQ ID NO: 255694 - DNA, 1615 bp, Cannabis indica
taatatgataatgtatatatatatatatatagtttttaaagtgataatgtgttctatacagtatttgattgcgctttctttttagtttttttattatttaattggtttagagaccttaacacaataaacaattaaaaacaataataagtattaataatctttcaaaacaacaacaacaataataataataataattctaaccaattttaactaggagtaggaacatagacatggaaatgagaagaataaaaaaatgctacgaataaacatgctttcttaaggatgtttggagagagtgtgagttgtgacctatttttcaaactaaataatatatacgatttttataattttttaaactataattatatggtgaaatcttaaaattacaaaaattatatccttaaaatatgtggtttaagaaatttaaactataattattatcaaatattataataaaaattcaaaaatcaatttaataaaattttaacactacaaagaaaaaaaaaaagaaaaagaaataattttttttacatcattacatatatactcatcttcaagatattatattgaattatctctaaaaaaatttataatatataacatatatttgcttatatatttagaaaaaaaaaattaattatgttaaaaaattacttactttataatatatatatactgcggtacggttttaacgataactattaaatttgaaatcgtaaattgcactgcaccatgtagtttggcgaaaatacaaatcacaaccgtatcacgaatgatttcattactatatttttatgcggtgcggactatttatacggtgtagacagtttaacgaacaaaacaattaattaccaacaattataatagaaattagactttattcctcaatcatttattaattttaatactaataattaaatggataagtttatacatcccctaaagacttattattgtaaatctcttatttgttttgacattcaaaataattttttatttcattttttttataattgtatacgtcatagttatttaggtccacttataaatttttaacttttttttgaataatttacaatgttaaaaataaggtttaaatattgggattatttcacaaatacacaaaaacaaaaaaaaattacaaaaatgcagttttacgaaattttaaatatttttatgattttttattttatttacagaaaatacggtccttttatattgtactcttgttaatttgttgttggtttttttgttatttgtatgttattttttgttattattttggtgttatttagatgttattttcatgttacttttatgtgtgacactggtgtgacactggtgttcgggtttgagattgggtgaagttcatttggagccttaatagacggggtatccgagtggaggatgtctttctttatgcctcgcttgtagtggacaatatatggagaatgcgcaacgacgtcatacacaataattgcactcctaatgttcttaaatgtattgaccatatttgttcttcttttgcagatgcacatacttctctcttgcctagtccttctccgcctatgaaggacagctggatgcctccacctctggactggataaaattaaa

SEQ ID NO: 255695 - DNA, 1847 bp, Cannabis indica
ctgacgtgacttgacttaacaattaatagtatagctagatgcatgatttaacaatatatggtgtgagttcactatcccaataattatatcgatatatataaaccattatcctatacactttttcttaactttattttttcgagcacagtaagaaagatcattagattgctattattattaataattaacttacaattgtaacggagtctctagcagtaatggccaatatatcagcacatgaaacgacaccaggacacacactctccactgcggatttgatgtcatcaacgacatcaaaacctcttgctgagtttcgattagcattagcagttttctcgcccacgaaattagatgtgtcgtccagaagcactgatccatcacatccctgttagatatgtatacgaataaaaacgacataagaattgtgaaaacgacatataatattacaatttacacgtatcaatcacatatgtatgagacatgcacacaagttacagtttttcttttaagagcaaatagtctttatataaatactattatatatttaattgatacttaatatttaattaaattaaattaaatatttaattgatactattatatatctttacagaattatcaattactatagaagtgaacgatgtgtgcataaaataaagagaaaacacaaataaatgtgccacctttgacacctcacatacatatatttataagttaccactacgagagttctaaaacactaatagtgtcaaataccgccaaagctataagtacaatttttttataatgacttgtatatatcgatatcttagtgtagtcataggtaggttaattaaataacaatgttgaatatatttatatatatatgcatggagaacaggagaagctattattacattgacaaagcaatcgtggaagaacaagcggaggagagaggcacccatccgggtctccttggcaatagccgactgcaccttggattttactgtggggaagagtttagggcaagtttttgagtaaaaatcaggggatgaaagttcagctctgctactcccaatgaagagtattacaagagccaaacacagtatggccatgaatagtgatgaggtggtagaagccatttagatatatatatatatatatatgaaatattactatatttatacttatatatatcaagtaaataattagctaatgaataatttcgaagagcttagtgaggtttatatatagacggccttctcaaggtgattggggctttgcacacggcaggtcacctaacacacagacgaatatatatggatatttttttacaagctagaattcacacgttcaaaaaacaatagattaactaacataaattataccaaaaaaagattaaatatagtgttttgattggattgcttgcttaaagagtaagaaggcaaaattatgtttggaaaagcatattgttcttatgttaaaataatagtgaacgtcataatgtggtgcacagccatttgtcgtcatatcataactttagtagctggtgaactatttttcaaaagtagggtcccgctgaagaaacttgtcttataatatgatctcttcgaaatattgggccaagtacatggttaaattaatgagaccaatatgaaaatgttaaacttttgacttttttcttaattaattagccgtagtgctaactaaaacgagagagagagagagccatagcaggtataataactttatttatattttttttaagggaaatttacatgtggagtcttaaaatccatctcaattacagaataacgttactttaaaacaatcaaacttctcttgtatttgtaacgttttcattaata

SEQ ID NO: 255696 - DNA, 585 bp, Cannabis indica
aatttttttttaaacaatttttttcttaattaatattttcggactccgaccccaacctggaccttaggacctggactctagccccggccccgatcccaatctcgaactcagaccacgacccccactccagacttagactagaacttaaaaaaatataaaaaaatataaatataaataaaattatagaacacatttttgttttatgtttttaaaaattaaaaaataaaagtggttatagaacacatttttgctttaaaagttttaccaaacaccttctatgttttttttttacttgaatgttcatggttcaaaaaataaagtggaataagggacttgtcatttccattgtaagttttctccttttgtggagattttccttttcctatgtaagtgtcctcctctcgtggtgagttagagcttgtttagttgtgttttcaattttcaatttttaaaattatatttttaaaagtgagaatagaaaatagttttttgtcattttaaaaatttaatggtgtttggcataagtttttttaagctatttttaattttttttcttactaaaaaaatcaatattttaacaccata

SEQ ID NO: 255697 - DNA, 558 bp, Cannabis indica
ttgcagataaaattagcacataaagcagtccagagggaacacaatgatgatgaaatcgctaaagaagcagatgatccaaaatcagaggatttagatattaataaaccgtatgcaagtccagaagaaatacagggtggaaaattaggccttgaggaattattatcacttccagtgtttaaggtaccaactttaaatcttggtatcgatttaagtgataactacgagaagtttaaagtcgatttcttttactcgtttctttcacttttgtccagagagtggcatgaaaccttgtcatggatttttttctctgtggtgtttgcttcataattagacataaaggaaatattattttgaaatttaacctgtattttgcagaattataaaactgggaaccctgctcctgtattgtatataaagaacttggcaaaggatgttgttgcagatgacttctactacatttttggtgagctctcattcattagcataggtgtttgaatcgaataaaaatgttcgtaaaaaatactatgaaagaacttattttgacccgatatataatgc

SEQ ID NO: 255698 - DNA, 535 bp, Cannabis indica
tagagcataaaacccaacaaatatgactctgtgttggtcataattgacatgtttataaatgcagcgcagttcttacctgttcggacaaacatctccattgattagtatgctaagttatatgttagagaaattgtttgtctccatggtgtcccaaactccattgtttctgattgggatccaaagttcacatcaagattctaggagagtctacatcgagctatgggtattcagtttaaattcagcacagcttctcatcctcagatggatggacagtctgagaggaccatttcgattttcgaggacatgctacgggcatgagtgttagactttgaggggtcatgggtaaagtaccttcctttgatcgagttctcgtacaacaataactatgaggcaataatcaggatggctccttacgaacttttatatggaagaaaatgcagatcacttgttcatttggacgaagtaggtgaaagaatgttcctaggtcccgaagctgttcaaagaacaagtgaggcagtggataaaatcagagcgc

SEQ ID NO: 255699 - DNA, 1684 bp, Cannabis indica
tttttttttttttataaattctattacaggaaactataacagaagtggcaagattacacttgagagagtgactagacaatttgaagtggtcatcccctaacaggtacatgtcattcttgagtatccttctgagtaggacaacacccgattgtttgtccttgacaaaacaacaagatttatgaaactcaagaaaaatatcattatctctagttaatttggaaacactaaccagatttttggtaatagatggaacatgtaaaacagattgaggttgtaaagggtttgaagttaaagaaagaagagtagttttaccaatgtgagagataagtaatttcttaccatctcctacaacaacagattcttgtccagtatagggagtggctgaatcaagactttccatagccaattcaacatgattagttgctccattgtccacataccagccaacatcatcaccaaagtttggaagagtttgagtgacatgtgcttgaggatcaaagccaccactttgttctatcagattgacttgtggttgggatgaggtttgctttggtgtcacctaataattacaaattggtgcagagtgcccatatttcatgcacaattgacacaaaggtctgttggttgaaggaggccgactatagtttcgaagaggtaatcttgatggattctcagtatcattagccctgccagagggaaaaggatgacgataaggtccatttcttgatccaaaggtgagattggcagccatcttaatggaaagatccatcatggatgtatgtcgttcaagttgagtctcatgagacatgagaagagcttaaacttcttcaagtgtgagagcatcacttcaagaggttataccaaaaacaatagggtcaaactccgatcctaggccattaagcaaatgaagaattagatcgagatcagtaacggagtgaccagcaatagctaaagaatcacaaatcaacttgatcttgttaacatagttagagatgctaaggttaccttcatgaatgttggataattggcctttgagttggagtaacctagctttggactaattggaaaacttttgctcgagggtcgtccaaacatcatgggaggagttgtagttcgagactgttccaagaatcgcttcagtcatcaaggatcgaagccaagaaagtagaaactgatctttcttttgccatcgaagatacatagtattggtatcaccattgacgagtttctatggaggactgatattgctgaacaatatctcatcgaggtcatatccaatgactgtggaaatgacttgggatttccaagcaaaaaaattagctcgatcgaacttgattgtaagagaagaaatcaaggaattcgagaaaagatttcattgaggaggagcagcagggggtgccgcctgaggtcgaggatcagtgacaccaactagagacgaatagtcattggaggaagccacggacgtgagccagaggtgcttagatactaggggtgttcgcggtgcgggtggtgcggtttttgactatttttttcaaaccaacccgcacatgcagttttttcaattttccaaactgcacccgcaccatgaaactaaaaaaccgcaaaacccgcaccgtaaaaaatagtgtggtgcagtttatgcggtttagactatgactaaataattaaaatatcacaaatacaa

SEQ ID NO: 255700 - DNA, 1715 bp, Cannabis indica
gatgttaatgaaacatacatggtagtaaatctagatcctggtaaaatatttcctacaggctgactgtaggcaggccaattgtaggaaggctgaccgtaggctggccagttgtagggagactaaccttaggcagatcagaggccacatggctggtcattagacctccaaagtttgtccgatatgtttgcatatcagtatgcttagattgctgatgatgagaacctcttccgacagaatgacttcctaacgttggagtcgatgtccctctaagtgtttgttgatcagagacttgggtctctgtgtgcttgctggagttgagtctagcaatgccattggtgtaattggaactcgaaaccgactttgagcaacaccaggagtcgtcatggtagccttcaatgactctaattgtaattttattgtggcatttttactcctaaatgttactttgtcctccttaaaggttgcattttctcgctcaagaactccagttccctcggccatctcgcgcatctaggccattattgtggcaagttgttcgttgacattggattgttcctgggcaacaaactctccttattctgccatctgaagtgtggtaatgatagatcgccttgctcacagtcaatttgtcaaggccccacggtgggcgccaaattgtagatgctaagatttacaatgatcagaatgaacgtttgtgggcaccgacaacctgcaaaacaaagataaaggatgaccgtgaaaccttgggacactggggtggtgtcagtcgaaggcacttcgacgatcaagtcagtaaacttatggttcaaagtaaaaataaaaataagaaatgcaaataaatactccctgtgccaatggttatgcgatgatcgacggtcaaaccttgctcaccaaaatgagaaagaatacatcagatcattgagaaatgataagtttagtcgtaaaactatagaaagagagtgaatattcgtatatcctccgatccccccccccagccccagtgagggtctatttattattttagaaaaacgactacctcttgaaatgttgtccatccctagagaaacggtcttcatccacttttccagagatgagcgtcatcttttaggttagttgtcggatgagcgtcttcacatcaacgtatcacttggagggttgatcttcttcctccgttatgctagggaagatcgctatttttatgggatagttgcgaaacttaacatccttcttcctccacgtgtcaaccctaatattacactttggggtcaaactttattgtgggctggacattcaaattgttgggctttgtgccctaaataaaaatctatttcaatgtaatattttctattcaattatcaataaagaaacagatttatttttattacttatttagtatgtcatttggttcatgtgatcatttatatgtttatttagggaccgatattgaacttgaaccagatatgataaacttaccataatatctatgcaattcaatatcacctagttgatcctagatcaaatgatctcaatcttgagatggttaggttctagttcagttgcattatttgtgttcttgcaatctgttcgttaaagtcgaccaaatagttcttctcgtgacatataggttaaggacatgatagtttaattgagtgggataaatacagaatctgtagcttctatccggatatagaagtcaaatgatgatttccttcgag

SEQ ID NO: 255701 - DNA, 1039 bp, Cannabis indica
tataagtttgtttcgtgaaaattgagatttgtattgtctccgactcccacactattatcggctatatatttaaagcactcattcctgaaaacatttataatttgcattgtctcccacactatatcatctccaggtgcttgttgtcggttcctttcgataacattatcactcgaagaacatagcttcatcaagaactttttatatttatgtattcctcgctattgatcatctccagagacttatttagtctgttattcaaagaaatgtatatgtgaacatatggatgtatgtacagtgacggacccaggatttttactttgtgggggcttatttatcataaaaaaatatttataactacattataatcactcttattaaatttatctaattttattggggctattatactattttggtttataattattaaattgaaaaatttacatttaattttttaaaaggcaatatttttgttagtgggggctatagcccccacattattgtgaatgggtctgtccctgtgtatgtatatacctcgctattgatcgacttgagggtgcataagggagcattgaagttagcttttgcaggggctctgtcttctatgttctccagatgaacttggcttccctgcaaaaccaatcaaataaataaaataaaataataaaaaaaaacatttaacttttcacataattagtttaatatataatatccagctttcttaccaatctaaccctgaaacccatttaatgtaccatggaatacattccgtgaaattatatcacaggacaaaatcgtgttcctacaaattataatatatatatatatatgaagtattttttttttttattttttacaattcaaaatagttatttttcctttttattatttttacgggaattttacataaaaatctcatatcaactaacggaacaattttaaatcgtaactaaaaatattcacatagcaactcacattaaatccactaaaatcgtaattaaccgtacgtgcaattttctcctagtatatatatatatat

SEQ ID NO: 255702 - DNA, 1335 bp, Cannabis indica
tatctaaagagagttgagagagggaggaagcccgattacccatagtattcaatttcctttgcagatcaaagcttgttgggtttgaagctcaaaaatttaatggctggaggtattttgatccttagttatagtgtatatatgttatattaattatgcactttatatatagtcatatatgtaaatgtctaatatttacatcataaattaccaaaaaaaatatgtattatattcatgtaaattaatattgagctttggtccccactctataacaaattaactaaaattaaaaggtctattttaactcaatataacgttgggtaatgctaactaactaataataccaattaacgttgctttcaatgttggattggatatatagactttgctttcaatgtttagtcacgttttacaaatttcttagatatttatgggccaattctcgacaactagttatcatttttgtgactcaataatatttatttgtgcttttcatttttcttttgaggagtgcaaagaaagaaagaaaaataatagagcattgctattgggcaccagtggtgcctagcaccttctagatgtgtcgacttgcaattggttagcgatactccataaaaattattatattaaactatatgggacccgatacttaattgcaccaatagcgatattgacacgtaggagggtgctaggcaccagtggtgccctttagcatttctcaaaataataatatacagaaataacagttttgcctttctatcttctcttgattataccacttttttattaagagaaatattaaaaggtaccacttaacactatttgtataaatatcattattgatctaactaagtatcgaattccatttaagttaatgtaataacttttaaagagtatcgctagctaatcacaatacgacatgtctagaggtgttagacactactggtacccaataacaatactcttttattaattgatgaaatgttcaagccacagagttaatttgcacgttttcaaaattaaatcaccccacatcactacataaaatcttatttttagtcataacaaaaatgactaaaagtaaaaaaaaatttgactaattataaatcatcattcttatgttgtgcttaaaaaatttgtggctaaaggtattagtcacaaaaattacaatttgttgcaactaaatatatttttagtcaaaatacttatttgtgactaaaactaaattagtaacaacttgtatctaaatactatgttttagtcacgagtaactttttgttgtaactaaaattacatttagtcacgaaaattaatattgtaactaaaagttgtcactaa

SEQ ID NO: 255703 - DNA, 700 bp, Cannabis indica
aggttgacgtcatccatgatgacatcttggccctgatgagtgtgttgtgcaacggtggtcttccttgtagccaccattgttgcgaacacaaggtagcttcagatcttccttcaactctcaatgaaagcaccaaaatattgtccgagatttttgaaaaccaattaaaataagagctacaaaattaaatagactaatagactaagaaattctaatatttggccgaatgggcttaatgtattgcaatgggattttacaagttcaagaaccctaacttcttgctatagtgttttgtcactctctggttttttaattccttagattccaatccttggcatgaaggtatgaggtgatatttataggctaagaaccgggtccgagtatgcccatgacccactagggtttcagtgtaaattaggcccactattagggtaaacatatgaaatacatgactttaggcctactagcagaagtccaactcgtggggtgaaggctttccgtacgcctgggaaccacacgatccttgacatgggtttgacgcacgccatgtatatgtattgtagtgtcaagtttgtgtcgttagacaaaatgaatgtttccttttggtagtgcgcacactcttatgctctaacacatgggacaaaccctgattcggtgagaccaggtgtcaaagggtagctacatcatcctatactaggcttct

SEQ ID NO: 255704 - DNA, 576 bp, Cannabis indica
taatatttttttttatataaattactgaagtaaaataaatttaaattttatttttagtttgtgcttcgcgacgaacccatgaaattttaccagtgttgatgcatgtaaacgctaagttttcaataatctatctttctctattaaggttgatttaatcttgatttaaacatgaaagttaagatctaaaatataacaatcaacacacaaaattacaagcttcatctgcactggaaattcattccaaccgactagtgcttgggttccccgaactagaaaaataaccttcactatatcaaagaatgtttgtatagtaactaatccaaagtacaccagaataacaaaccaatatttatagtagtgactttttaccctaaataacagaatcccttggttatgaatacaagatccctttgcttcttgtttgttgaaattcgttcaacaaagctctagatctgtaacgccaaaatcttagcttaaatcctttcagctctcactactttacttcagaacttactctgcaacttcaacccacaataatggagttcttgctagtacctgcaatgaaacacacaggcg

SEQ ID NO: 255705 - DNA, 1295 bp, Cannabis indica
aaaaaatttaaaaataagaatatattacttatggaatttttattaaataatttatttaatttaagattatgatatggtgacacgctacgcgtgtgagtaaatctatttacaaacgtgttatgcgcgtcactaaaacatggctttagtgatgcgcacaacgagtcggtaaacagatttgctcacacgcatgacacgtctctatatgccatggtttttttatttttataaaattataaattttgggctttagtatttagtgacactccatatttttagtgacccacattttgagtgataaacaccgaatatttagagactaatggtgtgtgtcactaaaacctactcctaattttttagtgacccacacttttatgcgtgtcactatatagtgtcactaaaagcctaatttgtagtagtgattggtacttagctacagtcctcgtgggaacgatctcacttacctaagtattacttgttaaaacgatacgtatgcttgcgtgttggatttatcataacaactcgtctgttaaccttttagccatattgcctccttgatggcttctatagcatccatgtattcaacttctgatgacgaaaaggctactacttttcgtaggttagatttgtagttgatgcagctcctaaagtgaacacaaaccttgttaggctctttctagtgtttaggtttgttgcaaaatctgagtctgcataaccagttatttcttccttgaattagttctctttactaaacacattgctagtgtttagagtaccttacaggtatctcatagtctatttcaatgcttcccagtgtttagtgacagggtctgaaatatatttgttgaccacattcatggcatgagctaggtcatgtcttgaacacaccatggattacattagacttccaacatagcttgcatagggaacgttgttcatcttgtccctttttgcttttatttttggtgattgagatgcagacaacttgaagtgttaagcaacaggtgttgcaaccggtttgcacttggccatgccaaatttattcaatactctctgtaggtatgcaacttgggaaagtattatcatgccagacttagagtaataacgagatagctttattttgagaattagcagataataatggcttattatcaaaatagcgaatgggtaaggcgaggtcatcatccttagttaaaataaacttatcccaataatcccatcgatatttctaactaaactgttgtaacatttttggcctccaatcgagtctccagggtcatcgaacatgaaaatatttt

SEQ ID NO: 255706 - DNA, 1361 bp, Cannabis indica
cataatttgccacacataccacaggaacttacaatctcccccttggcaaattatgctcaacgaatgcacacacaatttagacaaccagaagcacactaccattaatagaaatcccaagagtttatcaaaccacaactacaagacagcccaaaaggacacaacttacacaaaaaaattacacttataagattgtgtcaaacggctgcaaaatccaaaacaactccacaaggaagtaaaaaacatttacacaaaacaactccccctcggtgagcatgattagcctgtagggttcagagaagcatcaccaccagattgtgtctccccctggatttgtgcatctgtcgctgctggcattgggtcagagccaatctccccttggagtggtgcagtaggatcatctggctggactaaactggagaagcttcagagattggaccagagtccattgatcttagtacttcggacatagccgtgagcaccgtaacaattccttgctcaaaccttttctgacgctgttgatctaatgtataagcatgagccaagtttcgaacctctgacagtagtttgacttgccaatgagcagagggcaagcgagatctgggtgatgtgctaacttgaggaatttctgatgcagcaaggacagcagggtcaaatgtggtaaaggcaatcacagatggaggaatgggcttgccaaacactggttgaaatgccttaccaatggagggcacaggcactgcaacatcctgctcaaggatagctggattacctcttaagaccaacctctgaatcagactaggatatggaagagtgtgcttaacacctttagccttagcagaatccaacattcgggtgtagatcagtgatggtaaatcaatagagacaccagtaccaagggcatatagaaaacgagcagtgttatagttgatggtagatgtatgtgaattggcccaccaattggacaaagtaattttatgaagaacccgaaaaaactcagagaggatagtaacaggaaactcctttccattccacacaaaatcaggttgaccagtaagttcagcaccaacatccttaaacaatggtttatactcatcggtgtaagtggggtgagctagcctaggtattttcagtataaggctaatggtagacggagcacacctaaaccaagacccacaaatatacgcctgatatttgtgttgacttttttcattgacaatactttcatctagattagcataaaactcacggacaaggttgacattgggcgattgaaggtgagtgactgtgcactcccactttcgagactgaacaatctcacgaaccctagcaaaatgcttcaatttaaccctatactctggccacag

SEQ ID NO: 255707 - DNA, 1213 bp, Cannabis indica
ttggattcaaacaaaaaatggacgaactttaagataatttgagacaaaaatttttatttagttttatataatttagaacttacataaatacattcaaacgaaaatagcttagaaaaataatatgagaaatttttatttagttttataaaatttagaactcatataaatatattcaaacaaaaatagcttagaaaaagtctgctatagagttttcggaaaacattttcctccatcttctctttagtattttatcataaaatggcaatccttgagttccaaacaagtttagagattcagattttataaattctaacttcagatgatgttagatttttgagtgttgtgtgttgttgccttttgaaaacccggtggatatggacccattgttttagtatacttccattattattgtcacttgtgattagaaccatcatttgcagacattctattcccgttgctttattgtatatcctttttcgtgcaaccagatgggaaacaagcgttttccatgatgacatattgtttattatctattctccaggaaactgatgagggtggaaggggtaggttcaagtcgcattcaaatgctcctgctagaattctgtgacagagagaaaaaaggctcctttgaagacataattctgtgaagagttattgccatgctcagaggcttgttaacaagaagcagcatcaagatatccctacctgaaatatagttctttgaaaacgtataacaatatgctcagtgcaacatgattcagaagggtagaacttggtagtgaaatccccatcgggcttcaatcagcttcttttgtctctaagcatgtttgtcagaatgagtatactttttgggtccatatgttgtaatcttcattaaggattttgaaacatcgagatagatatgtagtcattttggttttggaaagtgattattatatattcatatatatacgtggtatttatctggaactttaatttaggaagttgcactgttgcaatgagaacatttgtaatttttcaggaaacgaattttagtctctaccccatgacagcattaccgctttggccatccaatgatatgttttacattttacaaaacgacatgtcatttgttgcatcaaaacggctctctcatgtcctgtcgtttctttattgcattttttgtcgtttgatattaaaacctactgtcgtcctaacgacgaatggctttgtc

SEQ ID NO: 255708 - DNA, 2239 bp, Cannabis indica
gtgatccgtgtttcctcttcaatccgtggttgggtatttggtttcctcccacaacatctgaggctccctttcctttggccaccctcatatcaactgtgatagtttcttggcctccaaatattaaaagtataataatcctcatgaagagagtttttctgtcaaaataatcctagatacattgattttttactttctttccttaactttttgtgcacttagtattggttattcatggtatataattgaaccccaacaggtaaacactagctatacagtgagatcattcttttgtaatagtaacctcaagtatcgattgctttcagacaaagtggttgcatataacctagaatttgatcgcttctaatagtatttggccaatattattaataattctaaaattgcattccaaatttgcagtttcattttattcttccatatgctcttgattttttagattcttatactggaaactttaaggaattttaggaaaatgtttgagaattttataataaataacgtaaatagggtaaccatattatagggattataccaaggatctgattataacagcagcttaaatttccaagacaacttaagcatgtattctaatacgactgtcttagtaaaattttgggtacaatcatttgattggttaggtaagtacttctgtatttgtatttaatatcctcggtgtgaagtttttttttctcgattaacttcagtgtgaagttaatgccatttgatttagctctaattattaactagtcaatagacaataatcatgctttgagatgttgatttataagcttccctttctttcgcttactcgtttagaggaaatgataacaatatatatatatgtatatataatttttcaggtgtgtgattttggcctatcccgttcaaaggaaaacacatttttatcatccaaaacagctgcaggaacagtgagtttgtgttttttttcaacccaaatgagtttaaatcatatatttgtcaagaatgtatgtgtatattttatagttaatcttactttcttatttcaatagcctgagtggatggctcctgaagttctccgcgctgatccatcgaatgagaaatctgatgtttatagctttggtgtaatcctgtgggaactaatgaccctgcagcagccatggagcaacttaaaacaacttgaggttgtctatctacttttaattgctgattttcatatgccctgcttgaaattagtgtgacgacataaactgctgaagtaataacgaacacagccttagtaataactacaaatggacccaagagacctatcactgagaaaagtaaaagttttaacaataataaataatataaatatgaatgaggttcaaataaattaaattcattgtgttttcagtacacattgaaagcaaaacggagttcaactttatatttgttgtattgacattttgttactttattaggtcagtgaatattatagtttatgcatgtattgttaaaaaaaatatccttgctatgatttcgtgatctttaggacgtagattctttgactggtttttttactataaatggaaaacagatgctagtcaggcactcaattttttcttttgacgagccacatgcacaaagttatatatctttgcttctctttcttcgcacttgcgtatacataaccttatgaatccttcccgtatcattgaagcctgaaggtgtttctgtttatgtttcaaagaaagaaaggtgtgatgttttatttgtattttatggtgactggtgaaatgtttgcatggcgctaccaactagcaagtgcgacaatacaattatttttccacgttcttacgctcccttttgcttttgagagtcttttttttcttcactatcaagtcaatcctggatttgagtacattcaaattttatcttcattgcatgtatgctgtttctgtttctgctttgaaagggaattgcagagcatacatttcagtcttgttgctatttgtcaactctatagctcaagaaatattaggcatatttgtttttcaggttgttggagaggttggattcaagaataaaagacttgagattccaagaaatgtacatccccaagtagctgccttgattgagatttgctgggccaagtaagatgattgaagcaattctttcactgtctagacgtaaaaattgcctatctttttctctattgattatactgatgttggtttaatgcagcgagttgtgtcaacgg

SEQ ID NO: 255709 - DNA, 1310 bp, Cannabis indica
accataaatagcaaagcaaggcataagttttaattacactcaacaaatgcaccctaattgttaaaatttcaagacatgtatgttaaagaaaactacagtgtgaataaatagaaagagctaaataacaacagctcaaatggcatttatgtggcataggtagtaacccaaaaaaaaaacactagcactaatggcagctaatattaaagaccttgttcatcagctgtctttctttttctttctcttttttttcttcgagataaatttcattgatagaatgaagcagtaaaacaaaggctatgcgcaactgtgatccttcagttacttattccattagtttctattaattaaataagaaaaaaaacaatggatgaaataaaatgtatagagcacaaaagaaaattgtaagttacctgcatacatttacctgtcatataaattagcaatgcatgagaatgagatcaatttgagaagagaatttacgacattagaaacaaattttcagtagcataacaattggttagcttaaggggattggcatcatcaaaaggagagaaaaaaaaataaacattgaagaaaaaagtcactgtatatcctacagttgaagactcaacaatccatggatgatactgtgatctgtacaaaacctcttccaaaattttgcggggaattcaaaacagctaaacaaatatttgtcaatctaaaaactatattcccctactgctgttacaagctaaatgatgtatatgcttagaccaaccagtaaccggcaaaaaatgctgccattaagcaagtggctaacatatgtttcttcaaagccacacaaccttctactactaagccctctataaaaagaagggtaaaaagaaacatcttattgtaaatgtccaagaaataaaagataattcaaattcaagcaaccctcacccccatattatgcatgcttttaataatagctgctgcttgccgtgctgctagaactgtgtcaaatgcttaaaaggctcttctttgagacatgattattccctggggatcagttgctccaacaaatttgtttggccttatcccattatcagaaactttacaccactctagattttctactgaaacatctcaacctaaaactggaaacgagttgcaagtattaccacctaagaaatcagtgtcgggacttgaaggacttcaaacagatgcacttacacatgcgacgggttctgcaaaatttctagtaccagcttcaaatagaaggagttgaggttgccaatgccctctttcacacgaatcaagaacattaacccagctaccaattacct

SEQ ID NO: 255710 - DNA, 2857 bp, Cannabis indica
ggggggcagatatgtttttaggaactggtttcatacacacacgtgtgtctttgattattaatactacatttttttatcctggatttccagtttaagatttatgtcatgataatgtgtgagctaatgagctacttaatgttcatgctttgctcaatttggctctatgtaggttcattcatgtgcctgcttgcatcatagccgggttgatggggttagtagttgaggttccgttgtatactgcaattgctgttgtaaagagtccatacatgttgttcaaaggatggtttaggcttatacatgatctcattagccgagaaggaccgtttcttgaaacagcatgcataccaattgccggtttgacaatcttggtgtggccgattgttgttgttggaagcgtcatattggctgttttctctagcatttttgttggactgcatgcatcggtcatagtctatcaggtttggatcatactttcatcttttgatgtatatatgtattggcttcttattcaagtgaagtaaacctttgatcttttgtggatgaaggaaagatctttcagaagaggtgtggcttatgtgattgctatggttgctgaattcgatgaatataccaatgattggctttatctccaggaggggactattttcccaaggtaattgctcgctgaacaaactattttatctttcaaagcttatctgtttcttttgacctttaatggtagttgtagcattgcttgcagccaggccccagtatcgaaagaaaaacttttcaagaacacagtcatctgttggacgcgtatccagttctgcttcgtcagaagcacctgcaatgtcgtgccaagcttagctcattcaagatcagtcagagagaccatacaagaagtgaaagtagtgcaggtgagtgtgcatttcactgcccattttatgaaacagagtatttaatcttgtaatgaaatcattctgttctttgaatattcatttatttgtgatttggtttggacaatgattatgccactgcattggtaatttgtgtacaaaattttcggctatcatgctattttctctcaatgaatgatttcttttaaatgtaacagatatggggaaacatgttgaaatcttgtgaaattagaggcaaggaattattggattctaatgtgataacaccagcagatctctatgagtggttgaaggcgaaaaacagcaacgaagcggctattattggtgtaggcttgccttgttactcattattgcagtttctgatacactccattgaatcaaattcaagtggtctattgttgcttgaaaattttgaggtaacccaattgaatagaccaaaggacaaactgttggattggttctttaatccagtaatgatcttaaaagaacagattaaggccatagcgttagtagaaggcgaggtgagattcttggagaaggtggttcttttcggaagcaatacacaacgcatggaagcttgggaaaatgggagtttagcacctgaagatgctttgagagctgctcaaatgcagggaatcagtagaaggtaactaattagtactacttttcatcataaaattctgatacttaaagcatagcaacttgaggattatgtatctgacatgatgggagaatcctatgcaggatgaccggaatggtgagaagtgtgtcgaagtttcctactcaccggagaagatttcgccaagttgtgaaggatttggtgggttattatttagagaaggagaattctaatagatcttgctctatgagatctactgcatccattgaaaatgtgtaaggtgacatactttaaaaatgtctaatgtgaaaatgttgaagcaccaagtgtgtcaatgaataaaaaaaaaaagctaattaagatttttgttactcaaacattgacaaatattaaattatgccttctaaattttgtaaggggttaaaaactccctcaaactattaagattgttggattaaatgatttttgtctaattttgctattgaatgtctaacacagatgaaagatgaaagtttaggtggtacaacttggtacatgttaaaattcgggggtataactaggtagatattaaagttcaggggcgcgatttagtatatggacaatcactatgttagtaaaaattgaacagaattggacgtaagtccttgagtttgataatatttaatagttcgggaaaaaatttagcagcttaaaaagtttatgagatatgatttgtcaaagttcggagttcaaagatgttaattagcttaaaaaataaaataaaaagttttagtataaataccctttaggattagcatgtgtcttgataatatatagtatccatgaaaattgggcatagttattagtgcaagacgagaaaatacatgtaaaaacaagtgtgtgtgcaaaatggtagctagagcactccaatccaatagctctcagtctcttaatactaaacatttatattttattatttcctttacttttatgctagtgcctaacgggtgaggtgtggaatttttatttatttattttttgagaaaaatagaattttatttaaatgataaaaattttattggcaccttgtgaaattacactctaatattaaaaaagaaaaataaacttaaattaatatttaaaaatcacttttaattttttttcttttaaaatcaatattatatatatatattttaaaagaggactagctatctcaaatggattatttctaaaacttactactgtcacgacattagagaactacttcgatattgattgggccaactgtattgatgacagaagatccgtgggaggttatgtggtttacttaggtgatagtctcatttcttggtctgcaaagaag

SEQ ID NO: 255711 - DNA, 754 bp, Cannabis indica
tattgatattcaaaaactataaaactacattaatcaataccaatgttattttttactcaccccctccaacacagctaaatcattcattttgttcaaatgatttcgaatacaccgattaagaacacaagtccaaatgggtatagttttcgacatgctatccggaaatctcttccctttacgggttgaatccactatgatacaccctcctttctctcctaccatattcaatataaaaaagaaaatcatatatacatgtaccctcactcctcagaattgccaaaaatgcttgtataagagcactaattataatcattcttttaatctcaataccactacgaattcaatattgattgaataaacaaaaggagggagggtgtaccaaatacgaattacgtaccagaaaggtgagcaacatggagattaaggcgagaagtgttgaaggaccagttgttgttgtggccatcggtggacttgaagtaacaggttgagtggaacttagagaagtaccagaggccacagcggaggttggcgaggagagggagttccggccatagctgggagatctcgcccacaaaggttgagtcttcgtaaatggacctcagtgcgttgtaaatggtgttgtccttacgctttatactccgtgcggctttgtatatgctcagcctggtcgtctcaggtgcttccatggaaatggaattcaatttaagaaaggtttttgcagactgtaaagtcggctcatttgggtgtaccgaac

SEQ ID NO: 255712 - DNA, 833 bp, Cannabis indica
tgtgtttattgtaagtactccaatccactaaaatatattttagaccaaaactattgtagattacagaaattaagggaattatgactcttttattctcttgtagtatggatgcttgtgtctcctgtaatatggaaggaatcaacataaattcaaagaaagccaagccatccaatgagtgagttggccttataatttggcttctccatccagttgtgaaaccaatctaagcaaatcagacaagaacatgaacacgcacgtatatatatgactcctcctcctcctcgactcggtctgtatcaactcgccatctgaagatttcaaagcttttgaggccgttaggaaggaataaaagaaaaagaatacagaaattactcatcaatcactctatgctgatgcatcttgtcattactcatcaattgagtacagcattgataaagcaaaatatattagattgattacataattactcaagttttagatgctattccttttttattttttctcttcatcacaattattacaagtgtagttttgttgctccattgaaatataattcacaatcttgtacagtacaaaatatttttggaatttttccctcgattagctaatgccatttgataaaaatagaattaaaagtcagatgtatgtgatcccatcaatttatttttccatcggactggatagtgttatgtcttttctaagtcattggtaaaataagcttggattggatgtattgttatacatcggactggaccgatattgaacctgaataagatatcataaaattaccgtaatatctttctaagttaatatcacttagttgatcttagatc

SEQ ID NO: 255713 - DNA, 1162 bp, Cannabis indica
tacgttaaaattaaacttttacttctatttagttgaataaaaattaagaaaggattaaaagtaaaaaataaaaacagtacaagaataagcaattatttaaaatagatttagataattttaaaaattatttttgaaactaataaattgtcatttaatataataaactactatttttatatactaattattttaaaagtatataccttaggttttgtttaccaaaacatttgttttttttaaagatgataatagatgggctcatacatgtgatcctagagttaaaaagtagtatgaatttaattaatttacctctgaaccacttgaggctagctcaagtagccataagagggtgtgtgttggaggtcctgggttcgagtctcaaattatgtataattgtaatatataaacacttaaataaaaaaataataattaatttacctctggggatcgaaattcatgggcaccgatgcaagcaagaaacttggtccatggagagtagtacttactggtactattaaaacttccattattctcaaccgttgtcttgctcggtggattagcttcattactattggagatgaccaaatccatatattatttctatagtttatcatctatatatatatatttataaaacaccatatagagaccaaacatatatatatacataaatattcagaagtacttggcatgtgataattaaagacaatatcatcaagtgtaggaatgcatttaagctacagcaaagatccaaaggcgttgaaaacgaaaaaacagacagattttaattttttatatggaagcatattcattttatatgcttattggttttgttgattatacaatgaacaatattttaatttctttttctatttggatataattttaactattaatattaactaaccaaagttattttccaatgcttataaattggtaacaaataaacaaactcacattttttcaatatttacagtttcacctctttaattattacttacaaatatgcaaatcaaaatatgttattgtccttttttatttggagcatataatttacacatacatttacttgttatatataaatttagtaccaatcagatcttatttacattattttgttctaaattttgattaatctatatatatatctataaaagagaag

SEQ ID NO: 255714 - DNA, 619 bp, Cannabis indica
aagtataagatcatcatcagtaaaaacttgtcctgcagagttaagaccgtcagccaaggttttcattttaagaatataatcatgaatggtcaaggaccccttctttagagactgaagttggaacctcagttgaagtgtacgtgcacgagattgagtggtgaaaagagtttcaagaagggaccataactcattagagatgcgacaacgaagaacatggccaagcatggcttctgaaatcgagtttagaagccagcttaatatggcctgatcagtacgaacccaaacggtaaaaagaggatttacctgctgtagcatgttggggttttgttcatcaggagcatcaagaaattggggaggacatggcctggttccgaagagaaaaccatcgaggtcatgagcgcgcacagctgggacaacttgggaacgccaataagggtagttgtctctgtccaggcgaatggtaatgggggcaagaggttgcaacaaaggtgcaggaagcactggagcagctggcgccggagctagagctggaggagaagcgtcgacagcttgtgatctggcgttgttgactgaggagtcaccaggagaagccattagctctgataccaagctaaattag

SEQ ID NO: 255715 - DNA, 648 bp, Cannabis indica
gaataaaaaaaatatttttcaacttatcaagaaaatatatctaattgccaaagcataagatgggcagaagagaagaaagcccaaagaaatcctagtcaaccccaacccatttgagttttgagaattttatatagggaaatttacatggtatactaacttttgttatttttttacaaaaatactgcaaggcagtatttttttacttttctactgtattttttttataagtttcatactgcagtatactgtgttaagttttcactggtgttctactggtgttttactagtgttctactgctgttttgagttgtcctgctttgtgttttactggtgttttataaaaacacagtatttttgaaaaaaattccgtgtgacagtatttttgtaaaaattaactcaaattccagtatttttgtaagtttcccttttatatatgcattttaggaattttgcactctataccttatttttatttaattgtcaaaaataattttgtcaagtatcaataacattttaatttattttgtatatgtttcaatacgcttatttatatatttatctctctcttattatgaaaaattactatttttaatgacaatttaatttttagtcacaacataaattttttgtgattaaatgtaactttta

SEQ ID NO: 255716 - DNA, 1291 bp, Cannabis indica
cacccataaatttctcaaaaaacaagaattttagttatataggcacactttatatagaatagatatatatatatatataataatatattattattaattacttgtgtgttttttatgaagtaatgagctttcttaagcattgaagtgtattcgtcctccaaatgggttgccatgatggcttgaacagccaaagcacaatcccaaagctgagacccattaaaatactgaaatatatacataaaaagactccagtcacaaacattaattatattctttatataaagcaaatatatcttgatagaaaatgatccaatctaataaataattaggttagacttaatcattaagtcaaattaatgggcttcttataactacataagaaattattattagtaagtaataaacataatcgatcaaataaagaatatttgttaaagttaccataattcatgaagcattcgacattactaggtaggcttataaaataaagagaatgacctgcattttcaaaccatcttcagcaagccaaagataatctttaattggggaaagatgaaacatgtaagcatcagaatttggattctcaacccaacaacaaatcatgttgagtacctgcgcacattatcgtatttgttattgatacaatttaatattaaattttataaatttatttagctaaataaaatatataatatttaatattattaatttgcgcctgtcaccttattgacagggccagcacagacatagttggtgtcttcgtcttcgtggtggatatgttgcatgagagtatgaagagccctttgtgttagcttagacaatggccaactcttcaaaagaggttctcctaccttatttaggaaaccccatagcatgtcttgtatttttggatgtggataatacaaatcctcctaataaaaatcacaatcacatattgtgagtatattatttaattaattaaaattattagaaatagaattggaatttgtgtctaaataaatcctctctaattatacaaactattgcaaatgtcctccttacactataaaacataattatatttaattagtgacatctttttaaattggtgtaattggtgctggtgatcaattcactttattatctcttgttattgctaagttttttggtttatttagttttgttattactggttttaattctagttatgtttgtttgaattgcttgtgttcttgctcactgaattgagtttaacaatgaggattaagcggtgacagtccactacaataattagtgctacattaataaatta

SEQ ID NO: 255717 - DNA, 3637 bp, Cannabis indica
actagactagattattttggctcagagttctttgtggctggcggcggaggtattgggtctcccctggccgtaggtgtttgacatcttagtggagggtttcttgcagttgagagtggtgtctctctccctttggtgtttggttgtggcatacattttgaaatttttttccatcatcgagttttggaaagtggtataccatttgattcgtgtttgctaatattgagcatttcttgagattgcgattgaaaaggggaggatgttcgtggtgcaccctcatgttctttggtctcttgtattggtggttgtcgtttgttggtgtgctctttcttgatcattttgtctcgatattgactttagatcgtttgtaaccacttgaggctagctcaagtagctataaggagggtgtgtgttcgagtattttggattcgaatcctaaattatatatgattgtaatatataaacgtttaaattaaaaaaaaaatagatcatttgtaatatacttgatttagtctttatttagtcattttcttgtgaaatttgtgtaattttatttttacttcgttagaatttgtccatttaaattgacggatgaatttgtctttgaattttttttttttaattaaacagatatccaatcatatttagtgtagttaactacacaatgtaatcaatgtatacaaagatttaacaaaatatatctatgaatttgatagtcaacaattttttttttgcacctatacattataaaagcacctatacttttcccttttttacattttagaaaaatacatataaaaggttaaatcagtaaaatcctacaaaatatgaagacaagaaaaataaaacataaatatatttattattagaataaaaataaaaatttattacttttaataaatagataaaaacattattgaatttaacacaaaaccataccaaataaatatacataaaaagatattatgaataaattttatattatttgctaggtttcgcttcctaatactgaagtcgatgaggttattcttttctctggcaaaacttgctagccctctttgggtttaggcgtggtttggttggagtctgaaattttactaatatgattagtcttgtctctgttatagttttgagtgccttttgtttaagttagtgtgattagtcttttgtgatatagttttgttttgttttatttcgttgttggttctttttttgttcttcgatagctcaccatcaaattgttgttagtggttaagaacaacaagttctttaagctgaatgagttgttagtggtgtagttacgtactttgcacgaatgaatttactgcaacagatctatcattgtgtcagcggtggagtaaattgaatataagtgtttttaaagttaaactgtgatgttgcaatctttttcatctaaagttattttaattttataaaacgattcggaaatcagacaactgattagttaactcatttttctaattctaattctttatttaagtttctacgagagagatgttaacattgaattgaagattgctattaataaaattgtataatttcttaaaaaaaatatataatcaagtagtccaccaaagcaaaaggtacgcgtacatgtcaaaccaaacaacattcaagttactcaagagttttacaaagacattggctttctttatccttgtgttccagttctagtgccgaaagtattgcatttcttcataaattgcttttaatttccagatagcttcgtaatcgttgtttaattattttttaaggaaaaaaaaaggcaaaatgaagcacaggttgatgattttagtgtcttgtataatacatttgttgtattattgttttatagacaaagtaaggtggcctgttttctcaagcataatccatatcatatatatccagcattaccttcaaaaccaattattccaaaaccaaatcggcaaacttttggaattattatgccaatgattccctcccgaaaaaccagctaagcaaatttataaattatagcctcttcttcagtcttgactctttcaattccacagtgataaaagtaattatattttattgtaatataataataataagttggtaataaaacttttcctttaaaatagacaagttaaacaaaagctgtggttaatttgtttaaaacttggccaataaaataatttacactgtcctctcctcttgttgagggggtccacttttcatcatagtaacttcttaaaagacgaaacaaccttaaaattaaaaccctctcttcttctttaatacctcaaaaactcatatagcggagaaacaaggttatcgttcttgtttgtatctccaaggaagaaaagaaaatgtccgaaacacccaaatcttgtctcaccccgatcctccatcttcttcttttgattctagtttttcattctctgacggccacttcttcactccataacctgctccgaagccagggcttgcccgctgggctcttcccggacaccgtaaaatcatacgatctggaccacttgggtcgcctagaagtgcacctcgaatggccttgcctctcaaaattcgagacaagggtatactatgaaagcgtcgtcagagccaaccttaccttcggagggcttcaagggcttgagggtctttctcaggaggagctatttctatggctgcccgtcaagggcatatctgtaaatgacccttcctctggtctaattttgttcgatattggtgttgcccataagcgactttctctttctctctttgaagatcctcctgtctgtaaacctcagggtactactctcttcttctgatctctcttattattattattattattattattattattttaaggatttttaaatttgaaagtttggtttttttttttcttcctgggtttgttcttggaaacttctcttcaatagaatcaatactaaaattcaagttaaagttttgtttttgtattgctaacaaaaaaaaatcgaggatattttagatactgccaaaacaggggttttgggtaaaaagtagtgtttgttgggctcttttgctatatagtagaattaaaatatgaattttggaattgcagggataaggaagagtatgggatttcaagttcagagatgaaaaggagagaacatttcatatcatgatatccaccttcagatattttttccagtgctattgtatgtttttgatttttgatttcttgacaggtacatatgttttttcatgttgattgaagctataaggagttaaggatagttagaatatatgtaaatgtgtataaggtttggactttggaatcgaacgaaatttggaattttctattttcttaacattgcttttttttggctaacctgagaatccagtactttgattttattgaaaaacctcttacatcttggggaaaatcatattttctgggaggattctataccaaatatgggggctgagatcacaaaatcaatctgtacatggtttcattaatttgctggctacgatggatttggtaaaacttcattcatttcttcattattgtgaaatggtatggatcaaaatagactaatggagtttagattcttcaccaaataaataatattctttctataacccattcattataattatatatgtttaa

SEQ ID NO: 255718 - DNA, 930 bp, Cannabis indica
tatatatatattaaagtatcaagttcttctataatagattttttcgctttaaagttattagtaattcttcgtactttaaaaatttatattaattaatttttaattatttaactttctaaaaaagtattaatttaagaagtttcttttattattgataaacttaattttgaattattaatatttaattttaagttgttttctaatttatctatttatctttatatttttatatttacgtataaatctaaataaaaaataggtgtggtgacttaacctccttttaattttctactttatctaagttgcggtttgttttttataatttttttcatttaataatattaaagaaaaaaatataacaacccaattaaatatatactcagatcttactacttcttcatttatacaattaactaaatcaatatcactcatacatattcaacttctacctaaatcaatcaaaaatttatttacaatttttttgtccattaaattcctacagtttttttttttctcctaattatttattttctaattaattgatataattaataaatacttttcaatttttaatccttaaaaatagtatgtatataaagaacaaaacaaactaattttatattaaaagtaagtatttttaaccactagtttttatctattatatatatatgacttatttatatatataaataattctctcttatatattgtttaaatacatttttattctatttgaaaggcttctaaaaaaatacacatggagattcatgaaaaaaaaaaaaaaatacacattgaggaaataaggactaaattctctattaggagcaaaggttaactaaattgtggtgctcctttaataaggcaataatataaatatatatatatatgaaaaattagtgatttttttttttgctatttatatgtactttt

SEQ ID NO: 255719 - DNA, 1594 bp, Cannabis indica
atcaataagatttatcctttattcaaaaaaaaaaaaaagtgatggggtatttattaaaattatttttttaatattatttcaatttattataagataattaaattcattgtcatgcatttttcttgagttctaaatattttattggaaaaattactttaagaaaataattttacaagagaatattaaaaatatatatttttactaataacttttttttaactaaaaactcactataatattaatttgaatttaatagtaattaacaaaaaaaaataataagaatattttagtaatttattgtaagaagcccaaaacaacattctctctttttatatttttatatagttatagataaaagaaacaaagttatactagtaaacaaatcaccataatcatttaatatttagaagctctcatgaataagaaattagaaatagaactaagactagccaaaaagtactcaaataccaccagaaattacactaattaaattcaacttagaaaatggttagtatttaactcattattatcagatcaattaaaaaaaacacagatgaatatatatattcatgtttgtatgaacaaaatgtattattataatgaaaaaacaataatagaaaaactagaattcaattagcttgttattgtaagaatataaaaccagccaagtaaactaagaaactttcaaaagaataaaaaaaattacacacaaaattactagtgacactcataaaagcatagcaatgacaaatgtatgtcaataaagtaataggtcaataaaaaaaaacacaacaaaaagagagaccaataggtaaaactgttaaatcaaacactaaaatgattataaaaatccccaaacataatttcagaaccaaaaactgtccacatatcaatgttattgttagtactagtaaaaacaaataacattaatttgccaaatttaatggcaatgagcaggatcaaagattatatgccaataaatattttaatttcactattacaaagcaatattaaaatagagctagattcagaaaatataaatagaaatttactttttctcctagccttacaagcttcaactcaactacttgagcaaaaatattagcactagcaacaacatctgttcttcctattactggacctttgtgaagaacaaggtatgtgctaccacaacaataaattaatctttatggcagcccatattattgcaacagtagaaatcccattaatctcttcattcaatatctgtaagaaaaaaaattacaaagaaaatctaaccatgagcaatataaactctctctaatatatgaatctattttcgaagaaaaatcacattcttagctttcggtttgcattcgaataacactagctagagcctccataaatgcaaaattaaaaacttactaactatacattgttttaaataaaagtacaactaaaattattatgaaaaaaataactaacatgtggatttggaggattggatctcgattagttgtgtgccttagtggagttagaggaacagtggctgtgggctgaacaagaacaaaaatagagaaaaataaagagtgtttacaattaagtttggggtgtg

SEQ ID NO: 255720 - DNA, 2049 bp, Cannabis indica
aaaattgtttggactaggcaggtcgggttgaacctggtcatgatgcacgagcgcgttcgagtgcattgttcgggggtgcattgtagtcttatcttaggagttcggttggtaagggttcataggtgttgggtgtttatttttgaaattcattatttcgttccctctttctttctcactctcatttgtgttttacattgatacttaactcttgctcggcaaaacctcaaagaggaaaaggcgaaacaaaagggttagggttcaagtttacccggttacactaacaggcggattcgggtattgaatttaagcaacgatcgagttccataccttgttggagactcaaaattagtaagataaaacaatcatttatttttattacatatcatatactataaagtttaattttttacttttatattttcaatttcacacaatacaaacacttaaaatgatgttatctctcataaagcttataaagataaactatgtcgactatggattggcattttagtaccacacctacactttatgagatatcaaagttaattttgagaagagtacatgagattcaaagatagttatgaagaaatacaatgttaatagtaatagaaaattactagtgaacttaattaaacaaacttttcgatgcttcgtgaaaatatattgcattaaattgaagaaaaagaggcgaattgtattgctcataatcttgttaaaaactcgctcgctctttttcttgatgaggcaagagtatgatggcctgagttacttgagtttatgtaagtctttggactttggtagtgattaaataattgaaaaaagagatgaaactaaaatgtcactatttacaagtaaactatctattttgttaattaatataggttttatgctaaaaataattatagtagtaggtgttagaatatgttgtttatgtttacccatatttaagtatatgttagaatatatgttctagattcccttttttagattctttgttgtttagtaaacttacaccacaattagggcaaagaacaaaatgaatggcatatactatttgactcggtcatagtacatggtatgagttattgagttgaataaacgaggcaagttgtccaataagacatcaaataagtttatgaaatgaattgagataaaattaaaaagaatatagtatacaaagacaagtgatccactaatctcaatcattacattattaaattattctagaatacacaaaattgttggctaactagaaattccctttaaattggttttggaaaatatcaatatctaatttctatacataatttatattgagatacttaaattgctcgagtctcgacattcttttttatactctcgaaaggtgaagaacacttaaaaaagccaaaccatagtgatttttgtcgtaaaagtttgttcaagatagctacaaagttcactttaatggatcattaaagagtttggaagacattgaagaggagatttgatggggtcggatcttcaagattgtttgaatgatttattcaaagtagttacaggcttgttttaattttgtaagaataatttggaagaatgaaatttggttttagtaaaaagaagttgaaaacaaaattaagtgtttgtaaaagaatgaggtagttacactataattacaagtactaagttgatgctacaaaagtataataataataataataataataataataaaaagtattaagatatcaactaaattcaaaagtactttcactaagtatgttaactaaattattgttccaactttaaaattattctatatatgtgcaaaaaaaaaatttgattttgtagttagaaactgtaatgatcttaaagacagagaaaaaattgcaatgataacattgccactcttcttatcctaaaagtatgttttatattaatttaagccacaaataattctcctaccatataacccaaagaaccaatcaaacaccactccactacacataaatcttttttatactacaatcaattataaactaaagtaactttgtcaatattttctttcat

SEQ ID NO: 255721 - DNA, 794 bp, Cannabis indica
aaatcctaggggctgctagggttagctcttttgttcctcaaattctgtaagttttcatcaattctaagtgtagtccaagctaaggtaacccttgtgtaactttcttgttagttttcttgagttttaaggaagaaaatttatgcatgcctatggttttgttgctgcagctattgtgtgtgtttattgttgttttcttaggcttaattatgttcagatgaatggattagaacaggtttcagtggttgttagttgattttattcaagtttggtgttttaaactcaaactttggttttaatggtgaaaggtgatttagcttgctgttcttgctgctgtgattagattatgttttctgtagttattttatgtttatttaaggtgacttaagtaggttttaagggctaattagttggatgagaaagctttgagtttttgaactcaagcttggctcatcaatggtggtttttgtatttgtgcatgaagctttgttttgttgctttagaaatgttcattggggtctaactagcaggtctggaaagtttaaattggtttggagttgatttggtcgagatatgaattttttggtgtttcttgcactgaaccggaattccagttcaaagaggcatgtaggaaccggaattccggttggcttccaggaatttttcccaaaactggaattcccggtctaccggttgtagggatggaaattatacccacgggttcgggtacccgcccctaatggggcaggtacggggtagactttcgggggcggggcgggtatgggtttaaagattca

SEQ ID NO: 255722 - DNA, 839 bp, Cannabis indica
agcagaggctattcgtgaaggatacttagtcacagataaggagtttcttagtcaggtaataaattaatgaaactgttatccatagtctagctagctggctagtaccatctactactgatctgtattccttatgacttggtctctctacaaataaataatatatatatatatatatatatatatatcttttatttattattattattattattaatattagtgcaacaacaaaattaactatatgacaaaaaatgtgaaaaataaaaatataattacacaattttatacaattttataaatatttacaaataatcattatttttatattatataatatagaaataaacataaatatttataattttttaacatgttaattattttaattaatttcctaaattaaaaaaaaataacataaaactaaatataaaaatataaatcattatttatattttgatatattattaatgtatttactaaaattaaatacaaaattaataatatatatgcgatatttataaatttagtttatattttattaaacaatgtatataaatatttattaatggtgtctttagtaatattttttttattaaaaaagtaaaaataatttccatataacatattttataaaactagttttgacttttttaatttttatttacgtagaattcaaaattttaaaaaattttgtaaaacaaaacaaaaaacactttcaaaacttttttctaaacaacttttttaggtaactacggtctccggcctcggctacaggcctggactcaaccacgtcccccgacccccacgaccccggacccgtacaccccggacgttaaacg

SEQ ID NO: 255723 - DNA, 1756 bp, Cannabis indica
taccaaacggcacctaagttaaaatgaaaaataaaattatgagatattttaaaaaaaataaagtacactgatgaaagtacttaaaagcaactattactcccaagtcaattgggtgtatatggcagagatagtttacaagtccattaactgtgtccttgaagatgccttcatttggaggatttttcaaataaaaatcaattgctttattttggagattacaattacaacactataactccacgcccatttcttatgaacgagttttccaaattggaatatttttgtgatggaagagtgaacaaatattatatcccaagttttagatcaaaaatattagtggtcttaacatttttgaaggtgttaatattgttgtttgtgaaatttagtattggatccttaataatttttattaactatcgctacctagtaactaatcacaaaaaattatctccaagttatgctaggtatcaaataacaataaactattataactaagttgagtgtatggatggtatagcaagaagaaataactaatctactgaccgactacaattggagatcatggccgggtaccatacaaacaaagtaataaaagaaaaataaatcatgaattaaagtgaaaaaagtgttgtcgtgatgatgatgatgatgagttaagaagtatagaagaagaagataaaaagggaatctaattgtgagtgtccataatgttggtctcaagtacaagtctctttaaattctgactgcaccatctcaacccatatatctattactcatatgaatcccatccacaatttagtgaaatttatctcaattattcattcaaaagcaagaataatgtgagtcatatttgctcgcatttgcttttcattataaaaatcagctctccaactttaaatttttttggataattaagatttttacttcttgaattttaacatatataaaattacatcttttaaatttttatagctgttaaaaattcttcatgtatttagacttaggatcagctttgtactcttaagttttagttagttaaaaaccgttagaggtggttggctggttgtaacaattttgttaacttattgtgttgtattttcaagctatatataactttttcattatattttatttttgaatgaataatagattcattctttttcccttatcttcttctttcctgtttctctttccgcactaatatagtaacagagccacttgtaatctgttgtgagctcaaattgtcaccggtctaaatagtcgtttgtgatccgttgtgagccaaagtgttgctggtgcaaacagatacttccgctgtctcccctttaacctccattgtgtgccaatttttagtgttggggtctttcacctatttcaaaattcacaaatttctcgacgtgtacacccacaaatttctcaatatttggccttgtgggattctttcaaatgtcatgttcggtcatgtggtccgttaaaaagtcgttcgttaaacctacactttccaggcccaaacgtaaggagggtgtattaagagttagtcccacattgctaatgtgtggaaataaattgtgatatataagatgaatgaactactcctcccatagtcaattagttttgagatggaacctcattcatcttatccataaattctaacatcatgaacagattgttgaatttaaagacatttataaagtttcgtttaatttattaattctgtgattgtctatatactaaattacactccctaaattttaat

SEQ ID NO: 255724 - DNA, 507 bp, Cannabis indica
gtggaatgtctccatgttgcaacaggttttttgtccgcttgatgttgtaaagatcctcactataccgttgagctacttcaaccccaatgataaacttatctgacatcatcacaattcaggaatataacagtacaaagtggttatcttcttgcaacttcccttgaagacaaagaccctggctctagctcctcgtcatccttgtcatggtggaaattcttttggtccctacaaaaagtcaagatctttgcctggcgtgtcattcatgatgctctacctgtggctacttcacttgttcaaagaaagatcattactgattccgcttgctccatttgtagacaagcttgggaatcaacgagacatgctcattttagctgcaaatatgccaaggctgtttggagagctcaaaactatatgttcaattggaacgcgtgtacatcaatgcgtaatggagactactgttacatctttcaacaacctacaccaaattggagatggtaacaaattttt

SEQ ID NO: 255725 - DNA, 705 bp, Cannabis indica
gggggtaaaaatcctaattaatcaataattaaagtatttttgatggagttttaaatttttgatatattgtaatatttttgtattttcgtaataattattttttcctcacaataaatttgatacattataaaaattatactaaatttcacataataaatatatattttgatttacaatcatcctaaacattccattgtaataaaaatcttaatttattaagaattattatttttagcttaaaaaaagatatatttttgtttaacaatttgcggtttgatttttttcttttaagaaattgtgcaattttattcataataattggctaaattaataacatgaaattaaattaagatatctttagaaacataattaggattagggtaaaaaaataattcaaccaatcgagcctgatttgtagatcaaatgaaaaaaaattgaatcaaatgaaaaaatattacagcatcacagttaataaccttaagaatacttatatttagttttctctaccattcataaaataccaatattattatagtgtattgaaaattaattataaaaattatagtcaagtataacatttgtatatttactctattttcaaataattttttttagtagtagaataccaattacaatctcttattataattttttagttgaattttctcgatccaaatcacatgtaggaacgttttttttttttac

SEQ ID NO: 255726 - DNA, 455 bp, Cannabis indica
ccaagggaggaaaagaaaaaaagatagatttgactaagtccatactaagtatggcgtcccatacttaggaggagttaagccactgaaagcataccacaaatggggcaacgtcccactcccagagagttttcttcaatcaattagaaaatctctaatagatgcaacatcctgcttccaaagagctttctataattgatgatgcttttcttttattttttatttttgtgatccgaggcggaacacttgcgctatcactttagatttataaactcggacgttatattcttgtgtgacctcaggtatttatatcataatatagtacttaactctagcttgcaaataatctgtatgtgtggtttgttcaacttaatgaatttaccagcacttgcactttaggattaagaaactcagttactagggataacgtcaacgtttcattaaaccaaagaaatact

SEQ ID NO: 255727 - DNA, 1359 bp, Cannabis indica
agatcgagaaaactcatttacatccgccaccaccattgtgttttgttactttaaaataaagttcttcacttccattgtgttttaatcccactacaaaaatacaatttttacatgccaaaaaggacactttaaatctaaataattatgagaaaaaaaataagagtgttaattacaacctcctattacctcttagtcaacctccacattcgaaatcatatgccgaaatatttttttttcaattttttttatagcggtattcattatatttacaatatcattcctataaacttcaaacgtattttcgatactgtaaactattcgaaattttttaaaatttatatgttgtaagcataacgaacaccgccgtgaaaaaaaaacttgaaaaaaaatattaccgacatgttttcggacatgaaggttgacagtaacacttctcaaaaagtaataaagtaagtactttactaccattaatatgatgttacaaatatagcagccaatgttgaaagaatagccttaggagcaaaaataataccccacataaaaaaagattctatcgaattcaatacctccaacaattcaaaatgattgttgattgaatactacatgtgatggacccctatatgtgacatcaatagggtaaatgaagttaatcaatcccaaaccagatgcatcacacaagctgatattgaccaaacaatcaaaggaaaataaatgaatgtaaatgtcatttggaccagtcatctaatatagcactgcactattgttttgcagagaagagtgggaaaaaatggctgaactaattgctgctgatgtagccatatttctcttagagaagcttggtaccactgcttacaaacaaatatgcttagctagaggcttgaaaggcaatatagaaaagcttagagaagacattcgtaagatcgaaggcttcctcatagatgccatagagaatcaagtgaagaaggatgatgtaattgactggctcacacggcttaaaaatgtgtttcttgatgctgaggatgtattagatgaattcgaatgcgaaaaacagcgaagaaagtttgtggaagagcatggcagtcctagtagaaaggtacggcgttttgtttcgcgctctaatcctcttttcttcagtctttaccttggtcatagtattgagtacataaccaagagtttagataaactttatgctgatcgtcaaaagttgggtcttaatgaaaaagtagaaggaatatatagaagtgtgaaggagtggaaagatgctggctcgtttgtgtttcttcgaaagttattggtagagatgatgaacagagaaaagatagtgattgtttgattgatcatgttcatgttcatgatcac

SEQ ID NO: 255728 - DNA, 709 bp, Cannabis indica
aaaatgaaagtggttacagaacgcatttttgtttttacaaaaataaaactttttaaaaacaaaaattttacttttattttgtgattaaaaattaaaaacaaaagtgttaccaaacgacacctttaacttttaaaaaataaattatcactttaactgtcaccaactcaaaaaggaagagaagaaaataaaaagtttaaaagtaagaaattgtaacaacaaatttcatgaaaaaaaaaatgtaatagtacaaaaaataatgtatagttgtttttattttgtatgttaagttgttcttaggaatagcaatgggtaaaatataattagagtacgttattccatgaccctaccctacgaaaaaagttctacccatactctccctattaccctattaatttcttgcgggtaggggtacccacgagtaaaccctactctaataaattttaagaaaaataatgttacacaatcaataataaggaatacctcttttttatattcattaattaaaaatacatcatattatattttattaacatctacccacttttatgaatgaattgcttaatataccttgccctctacttaagtgtagtagatgatttacattaacctaaggggtataatgggaatatcatctatgaaaatatgaaaatgaaggtaaaaattaaaataaataaaataaaatagatatacaatataattttttctttta

SEQ ID NO: 255729 - DNA, 665 bp, Cannabis indica
ttggagcaattagatgtcaaaatagctttctcacatggtgatcttgaagaacaaatcttcatgaaacaaccaaaagactttgaagaaaagggcaaggaggatcatgtatgtcttcttaagagatctctctatggtctgaaacaatcacccatgcagtggtataaaaggttcgatgactttttacttagaaatggtttcaagagaagctcttatgaaagttgtgtctatgtgaagaatacacattttgtcagtgtctatttgctcttgtatgttgatggtatgcttatagcaagcaagagtatgagtgagatagacaatgtgaagaaaactttgagcaaggaatttgtgatgaaggatcttgactcagcaaagagaatttcgggcatagaaatctataggaatagaaaacaaagggtgttgaagttgtcccagggaagctacaccactaaaattcttaagaagtttgggttttatgatgtaaaaccaatctccacaccttcatctcaacacattaaactttcttgctcacaatctccatcaactgaagaagaatctagtttcatggagaagattccttacactagcatagttagaagcatcatgtatcttatggtttgtacaaaaccagacctatgctatagtgtaagtagagtaagcaaattcat

SEQ ID NO: 255730 - DNA, 803 bp, Cannabis indica
attttaagaaattcagaaaagtttaacatgccgaaaactgcgttcaaacagtgcgttgcacgggtgattattttattttatacgcgtgtaaaatagattgtttgaacattattttctatattgtaaattatttcgaatttctcaaaattttgtaggatatcttaaatagatataacttacatgaatatgaaaaaaaaaaattagactaaaaaatttttctggatgccgaaacaagttaagggtgcaccagtacatcccttttaaaggggtacattgtagaatcacccttattttttttattaaatgataattttatattttttaaaataatataaaatagattataaatttaattttattgaattaaaatttaataataatttaatttggagatattatgaccaatctaattatatttttttatcaatttatactagaaacgacttttttcgaattggttatatcaaaataaaattgacaaaaattaattttaggatttattttgtattattttgaaaaatactagatttgagttgtcgtttaataaaataaaaagtttaatcggtaatttttattagacagtttatttgttagggttttttcatcgttacgaaaattcacatagaaatacttatagcaactaatagagcaatttacattgcaactaaaatccacataacaacttccatagaaactactagagaaatcactaaagtaatctaaactataaattcaaaaaaaaaaaatagtatatagaatatttttttttaatttatttgagtatttataagaatattttagtc

SEQ ID NO: 255731 - DNA, 854 bp, Cannabis indica
cccatctcatcctttgtcccatgctctaaactgactcttaaaatatataatttttttattttaatttttataacagtatttatcgaatagaaattaattttaaaaaaaaaaaaaccaaaaaagtgactaaattattcgtgtaaatcattttttttgcatgcatatttatatttttgacacattaattaacttaatttatctttaaatattaactacttttgttgacttttaattaaagattaaattttttaataaataaaaaattaattaacttgttaaatatagattagtttaacatattattggacactatttttgaaccgacttgatttctgtaattttatgtataaattaaatgactatttacactctattatgactaccataaatacggtattatataagcaatattatgaaaataaatagtagaaataataattcaagaccatactctatcttaaagattatacatgtcccacgttggaattataatcgtagctcttctctaacctatataaaatagtgtgttgctatccaagtctccaaagtctcccatcgattatatgacacaaatctgatccccaatccaaagcccaacgataacttcaataactattcttttgttttaatatacaacatcaatacctattcttaaatgaattgaatggacatatttataaataagcattgctatttgatattagtagtatatctagcattacttaaaagtaagtaatgatgaaaattttacccatctagatgagtatccatgggtatccacctcgaatgaggcggaaattatctgccttaatagataaaagagtgggaataggatgcaattttatatactggaa

SEQ ID NO: 255732 - DNA, 782 bp, Cannabis indica
acaaaataatataatatatttttctaagatatttctattatcgatcatgtagaacattcacgattctctctaatagcaaaaatagctatacaaaattgaagaataaaagcacagtcaatatatatagggtaaatagtggtataagtactcaaaattttatgtttgtaagcggtataaatccaatgtttatttttagcagcataagtactcaatatttgtaaaactgtaatttttctctaattttgtcagtaccgactctgatattgtcttaaacagggcacatataaggcctaaatttttgattatcggatctagatagaaatatatagtatcagttacttccaaattttcttttaataaattcaaaatagagtttgtactgacaaaattggaagaaaattacagttttacaaacattgggtacttatgccactaaaaataaacatcgggtttatgccgcttacaaacataaaactttgagtacttatgccgctatctacccatatatatatatgttgaagaatcacagtcaaaatgatctgacaattgatcaatattgtgtcattattaattatgctttcgggtgaccaataaagctaagaaaataataattcaataatatttgtagaatgaaattcttaatgggaccttctagcagctagctctatcttttctatgtcaaagtcaaccaacttgatagattttcaatttttatttgtcactaaactcacacacaactccaatttgcatgtgaatatgtgtcgtctacaatgcacttaaag

SEQ ID NO: 255733 - DNA, 1215 bp, Cannabis indica
gggtttacaggtacaatgtgtttatggattttccactcactctagacgcaatgagatttttctgtggaggctcgagagtgtatctttaataaaaatattattaatccatatatttcaataccataatatatatagagttggttatacatataatattattttcgattgtgtagattaataaagttcgataagaatgagtatgcaaggattggtgtcatgccacgctatggaaattcagattcaattatatggtttgatgttgaaccaaattgcacgtttcaccttttcaattgttttgaagatggagaagacgaggtattaattatcctaattattataattgaattattgaataataatgttctaatatgtatgaggattaatgaacaggttgtagtgtggggttgtagaaccctcgaatcagtgatagcaactggctcaaataaagaaaattttgatacctcaattagtgatggattgttatatgaccggccttacgagtggcgattaaacttgcgaaccaaacaagttaaagaaagaaatctcacctccaatacagaattttccatggattttcctaccattaatccaaatttttatggtgttaggaatagatttggttacgcccaagttgtggattctcctgccagctttgcagcaggtataatgatcatatagcaaaatgtaaaactttgataattcattaaatgcccctgtttaatgtgtaatcattatgattaacatgccacagataacaatgctaaatttggaggtctagcaaagttgcattttgagccagagaatgattcaagattttcttctacaaaagtagaatacaaaatgtttgagaagaacacatttggcagtggagctactttcattcctaaaataggaagtgatgaagaagatgatggttggattatcacttttgttcacaatgaagacactgacatatcccaagtaactttgttttcttttttgtttcatgctataattttaattaagaattctggcaaggtagccaaggttggcaattttggtgctaattctacttatttattattaattaaccgaaattgcaggctcttgtgattgacacaaagaagttttctggtgatccagttgccaaaattacattgcccagcagagttccgtatggatttcatggggcttttataccatcgtagcctaagagtacgtgttataaatatatat

SEQ ID NO: 255734 - DNA, 1526 bp, Cannabis indica
taacagaatattcttttatttttaaagtatattctgttaaaccaagaaatgccgttagataggcacttttaatatataaagatatgtgtacatcgatatcgatcaattcaatatgtctccatcgttaattatgaagataaatacatatttgttatttttaaaatcttagtcaaatatagtatgaaaagtgatcaaatgggcactagaatacacttcattccacacttcatctctctctcaaaaaaaaaaacacaaaaaagaattaggcctttttcatagtgtagggtatcttccgaccccaataatcttgcagtaatctttatgagcattagtatttgtcactcagtttcgttggatcctaaaaacattattagtgacagtaggaccttatagatatacatgaaaatcataccatagatattatactccaacttgtgcaaataataagctcaaacttaattttcacaagttggaaattgatatcattttttatcagtacacaatatgatactctgttctgagcaaatatggtatatatataacccattgattaaatcttgaaagaaagaaaaaaaagtagtagaagtaatagtaaaaatgaagggaactatgtatatgctcagtatatagtataacgaagtaacgtatttaattaacattaatacactatgaaaaaaacaatggaattaagtaacaaaacattacgtatttaattaatcttaagaataataaacaaatgagaatattgaaagtacagagacattttccatatcatcagctgacctgacaaccggtgatcatatatgaaaatcaaggtttaatttaaccctaaacgttcgatcgatctcaaatgtgatctctcattaatttttcttttctttttttttttcctctctactctctctcataatatcctatatttttaccattattgaactctgaacaaataatgtacaacttttacagagccgtccagaccatcaattagtcctcattgttattttctacccaatcatacagaattactcatgcatacacatatatttaatttatatataatttttttaattcattttttgttttttttttcttcattttgaaaatgagaataattattctcagcaagcgtaaaactcaacaagttcatccaatgactcaggctgtggatcagcgttctcgagcatccaaagcaagtgttcgaacaagacgacttcgcaggccacgttgacggtatcgacgtcgtcggaatcatcagctgccgccgctgacctccctacgagttcacggaagagcgggtggtcgatgacctccgagccgacgaggtagcgtcgccgcgattttccgacgtaaactgggtggagatctctggagatggtactcgtgcaggaatcgtcagcaactgagttcacgctgctcgtacggctctgcttattgccgctgaacgagttcaatttcttcaggacagacttgatcttcgtcaactttccctttgccatctctgaacaggagtatttaaacaaacaacc

SEQ ID NO: 255735 - DNA, 501 bp, Cannabis indica
ttaaaagattaatttagttcaatgtgaagaaatactaattaattaaaaaaaaagcttaattgataaatcattaaatataaaatgtaataagagaaacacaagtaccatcattcaaaacaattagaaacacaagcgattctgtgattgaatacaaacaactaaatcagaataacaaaaattaaaatattgggaaatagtgtcgacaaataatcgagaacctgcaacacaacaatcaataatcattaaaaataataattagtcaatcatcgagaaacagtcgagaacatgtaggaagttataaaatacaactatacacaccatcaaaaaactattgacaaacaatcaagaatacaaagataacatgtcaagaatagttagaaatgcaaaatcattcaatattttcgacaaataatcgagaatctatcaaagagccttcgagaaaggtcttccctaaccttgggatattcgagtcgagaatctttcgagaacgtatcgataacc

SEQ ID NO: 255736 - DNA, 620 bp, Cannabis indica
ctatactgcagcattttcgtggtgtgatttttgcggtttgaaaaattataaaaactgtatatgcggtttgatttaaaaaaaagactacaacccgcaccacttatactgcaaacactcttattacgcaccttataaatcgcatataaaaattatgtaagtttatttaggtcatttaaaatgatgaaaacttatagagaaatattataaatttgaaattaattattgtaataagttgcactgactttttgtagagagagagagtaattatttggggaataatataacatgagattaatgatgaccaatacaaaagattaatatcatgattactaattttaataactaaccggatttggattggaaactacacctaatattaataattctccatgtaaaaggggccctcccttgtgtcaaaataaaaaacaatatgaggttaattgatagacagatagagacactaatatacagtggtaacaattaattgtggctatcaatttggtaaatcttttgctatatatcgacttataacaatataagggtgtaaataaaaaaggaaggacagcaaaaacaataatgaaatgccctttggcttaataatatcaagttaattatgataa

SEQ ID NO: 255737 - DNA, 1303 bp, Cannabis indica
aactggttttttagactggtgtcgtaatgtgttgcagcaggctacctctgttcagttatgtactatggcaacaatttgttgggcagtttggggcgcccgaagcgacctggtttggaaaggtaaatcggttcagcacgagaacattgttgggtttgcaaaaaagtatcttgatcaatggaaaaatgctcgtcagtcagatttcgatacgtctttatctgcttttcaagcaggggacgaaagtgagcattgttttcctccacatggtgatagcatcaagattaatgtagatgcagcgttgttcgaagggggtcgatcctatggctttggttgcgtggctagggactcaaacagattgctaattgaggggcgtacatttctggtttatggcgtggttgaaccggtcttagcggaggtgctagaaattaaggaggcccttagttaagtcaaagaagcaaagtggcaaaacgttatgctagagtctgattgtctttgtgcggttcaggccattcgaagctctttagatatgaattctacttttggtttgattgtaaaagactgtaaaagtttgcttgcttttcttacaaatgtttctattttttttgttaaacgatctgctaattttgtggcccataactttgctaagactgctattttatttcctgattatcgttttagtttggagcatgttccaactaatttgttactttgtttggtaacagaagtttctcgttaataagatttcttctattcaaaaaaagaagtttaggacgagcccttcacatgaacaatgtgagataatcacacatagacgtttatattttttttatcttattaagtgaggattattattatcggtagatacttataatggttagcgattttttataataattattaaactaaaaatatatgatacttgattactagaatatgacatcttctaacaataattatttgcatttttatttctctaattgatcaatctaaattaacatgcattaagtctaagctaaataaacatcatcattattgcgatagtctcttttgaaaagaatattcaactacttccctctagcttatatgatttatgtgtggtttggaaatggtcatcaattgatgtcacattattcattcatttattttgttgttgattatagttttgaaagggacaatgctccttcatttctccatctattgacaattcactttattattattattattattattattattattattattattattattattattattatatatctctacatatatatttccagatataattccttca

SEQ ID NO: 255738 - DNA, 1253 bp, Cannabis indica
tgggtattcaaagggcctattacggatatcaactgcccaagagtgtcacagacgtctaccttcagagtaattcggattgcccgatgacaattatactttttcaaacacaagatcagatcttgtccccagtgtctaggcatggtaatgcacgcacctcatccacctattttgctagacagttatatcagacctctaattttcaaggtgaaacctttatgtgacacatgccctttacttttaaagattaaacatttgggagacgtgtccatgacgtacaattatccacaattattgagctgcagtacacacgcgcataattatttctgtgggacccaatagtcaactctcttttgtatataatttatctcattagtgggcttttagcaaaaaccctaggtgggtcatggacatgtccatactcgcctttagccaatgaatacccttctatttccatatgaagggggatcataacttaaatagtcgtagctctcctaatattgctttaagtcttcttctttaagagaaactaaaagtatagagttagggtttcctagaaaaaattaaaaacacatcgaacacgcccttagaggctaatagactaactcatggagtaaggttaattaacacctaaccacataaaaatctccatctagttaatttctgtattttattatttttcaagtccttcaatatttagtttctaaaatgctcggtaaatattatgtatgataatttaaattttagttaaataaagaattcatttattattggataaacttcaaaaaaaaaaaaaaaaacaacaacaacaacaaaaaccaaacttcatcctctctctccttaagggtcagccaagagaaactaaggaaaactaagaaattttccctccattttaaaccagaaatgaagagtatattagcaagaatttttgtgcctttcttgttgagaaccaaggtaagctccattccttttttctctttgaatatttttattgtgaaagcttggtttgaacatgcaatactaggtttggtttttgtttggctttagattgtttggagtcaattttcggtgattagattcgagttgttggagctagtttaattgcttctcgagtgtcttggtgttggttagctaagtttgagtttaaagggtttaaacttaggtcatcaatggaaaaacttgattcagttccttaatgatgctatttctggttgggtttggtcctttatatgttaattaggtgttctgaaaacttc

SEQ ID NO: 255739 - DNA, 1062 bp, Cannabis indica
tgcttttaaagcttaatgtattgcttcatattctcctactctctcatcatccttttgctaatgctatgcaaccttcttgtcatgagaaagagaggaatgctttgatccatttcaatgaaagctatgaaatagattgtcggcttagacctgatcactatcatctccatccaacgacatcaacatggggatcaaatggtaccgattgttgtttatgggatggtgttgaatgtgacatggtgactggtcatgtcattagcctttacctcgatggttcttgtctctacggctctatcaattccaacagcactctctttcaccttgttcatctccaaatgcttgatcttggttataataacttcactttctctccgattcctactgccataggcacactttcgaagttgctatatcttcacttgggttcttcttacttccaaggtgagattccttctgaaatttcacttttgtctaagttaatttatcttgacttgtcatataatgttggtggaaaagatccagtgcttgtgtatcttttgaaaatcaatcccaattctaaaagcatattccaaaacttaactgatttggattctcttttcctaacaactgtccacattgcctatgaattaggtgagtctttaacaaatttgacctctttgacacatcttagtctagggggttgtggattgtatgggcctattccaccttcacttggtaaattaacccaactcaatttgttaaacctcaaagagaatgatttcacaggttacatcccatcttctttccaaaatctcacacaactttcctttataaaaataacaagcaatcgaatttctgggccaatcccttcttggtttggaaatcttagtgaattatcgtatatgggattttcttcaaacagtttgagtggttcagttccaccatcattgtccaaactcagtgatcttgagagtctctctctgggggaaaacattttaagtggtccattgcagctagattcttttcttaaactgagaaaactcagtgaccttgatctaggcaacaatatgatttccttactcattg

SEQ ID NO: 255740 - DNA, 2343 bp, Cannabis indica
atttaaaaacaaattagacattagtatttagttaaaaaaaaaacgtaatagaattctgatagttatttcattgcaaatatatttttttaatatttctaaaatgctctagttgtattagttaataaagtttgaaggttttgatagtctctggtcatcgctccaatattgagttacatttgaaagagacaaacatgttcgttgatgttggctacaatatagttaagcattaacaaacattttattcttaagggtaattgtattttgattggcaatttttgatgcggttagacatgtgatgagtacacatttgttgacttattcttaattaattattaaatgaattaatattgatttcttaaaatttgtatagtttgatgtgttttctctaagtgtgtaggtttgtgtttaaaagataattttgtgatggactgagatctttaagccaatttttgacaatattatcattttctcaaagagcttatgaaactcaaaatgatagaactcgttcccagtttttgaaaacatgttaagttatctcatttggagtccggatgcgaaagttatgcatgatttaatgagcaaggtcgaagcagtaaaagagcgacgaaaaatgacatgtggcactatagcgtcgctcctgaaaaaaagataaaccaaagaaaaaaaaaagataattttagcacgtgggtgatatcgggaaatcatgtatggcgctatagcgttgtgtctttggcactatagcgtcatacgtatatttttgaatttaaatcctaattctaaatggattctgtttagtgagatttctgaaaactaaataaatatagcttcaaaaatagataaaatagtgcagaatagacaagagatttttgtgtgatttgggcgttaataatctctagtccacgagtcagttgtattggtcctttgagcaagtatttgaataataaagtatgtgtttacagtataaaccctagctctacactcctttttgtttctcttgaagaagaagaaagctcgtaggagtttttgcagaaattaagctagtattcatttattcaccccttgtaaataaaaatagaagtatttattggctcacgtgtgggtaagggcattccttttattctcttagagtttcgtaccacagcccattgtaagggcaaataaatacaacttcagagctgaccgttcggccttgaagaacgttcttgattgtgcagtgcccaaggatggtgaatagtaccgtctggatcagggacacgtgtttcctaaaggtttctcctttataaattactctctagacaacccatcaggcaaaaagatatgtctaaaggtgcgtacgtgcactaccatggcctggcataggggacaagatcttattctgtgttagaaaaaggtgtaaccttctgtaggtcaatttccatataaacctgagctagcctctcgcatttacattggtgtagttgtccacgatcagttcagagagtccctatttgggtattaagtaatcaaatcgtcgttctggacttcttggagttcagggataagtatgatccttccgcatctcagagacgctaactaggccaacgatagatctccgcattaaacattcattatgccctttccaggattaacggacatctccgcgaggagttatggtggtcactattattaatccgggaaattaacaaatcttcccctctgcttgtgccatgtgtctcctgcttaacaacacacaaaacacttacccccaaactttttgggactctgtgagtgctaggaccttacaacctctccctgagtcctctaggactgacctttgacatgtgctgactgttagggtcgtggacgcttctttttggtgagctataatctgttagaggcaaatggatcgttgaggcctgctgacatggtgatcgtatgacatattaaatgcccttgttggttcattacgcacatgctatggtgaatctgtcagaaaaaggtacagccaacgacagggtgatttaaaaaggccctcctttatttcttggtggactcaaggaaaatcatgggaaataaatatttcagccctttcgactccccaaacgttggatctaatgatacttaaggaaggagaattagaccgttgatttcaaaaatacttgatttcttctcaaagtataaattggccttaatagttcttttttttactttttccacacttctaccaaactccaaattccctctgtagacttttcctttgccagtggatgcaagaagattatgagcctttaatccaactgtttctgaatcttcatctgaggctatttccagatatcgaaccccttcaaatcgacctactaaacc

SEQ ID NO: 255741 - DNA, 650 bp, Cannabis indica
gaccaaaataaatatctttaattatttttcttttatttattattttatttcttaataagtacactccacccacaacttcttaaaaaatgatttgttattctttcaataaaaataaactattggttaaaaagtttgaaaccttaaaatcatccatcaataaaataaaattttgagactttatcaatgaaggaataaatacaaaagtaaatatattatatatatactagtattttatgagattttgtttgtatttggactttattttgtgatgttgaatgaatgtgtatacatttatacagttgatacattaatttatatgcaataaaataactgaaaatgagaagttttggggtgtacaaaattatactcttttggtaaatagggtggggtggggttataaaaaacaatatttaattgggatcaatttagtatggggtatgatgataatttttgtgggacaaatataatctccctttttatataatatgagcactaattttttttactcttaatgacacaagaaaataaattaatattataaagtgttaactttcttaattattttcaacttaataaataataattttaattaataaatttattatacgattagttttctaaatacacattctgactgaataaattacatt

SEQ ID NO: 255742 - DNA, 516 bp, Cannabis indica
gattcccaattacgtattgtgacgacttcctttttttttttatctggggtttcataggctttagttagtggttattggttacctttaactaatatgacaaccgtgttagggagggcgtagccaactaccatgcaagattgaagtggatgatttacgcctaactaatatgcaagattggatcattttactttttaatatttatagtgtgattttaatttaatcaatgaagatattacaaagagaaatataaagaactatataggtggtgtttggttggaggcaataaaaataatagaataagaataagaatggtaatgaaatggaataagaataggattaggattaagttgtttggttagatttatggaatcaataatttaatacatattcttatgtttggttgactatataatgcaatggaataaattaattttgaacaaaaatactattatttttaaaacatgattaattaattaaattaaatatattcaacttatatatattttttttaaaaaa

SEQ ID NO: 255743 - DNA, 785 bp, Cannabis indica
aacacttatccaaggtgtaagaatacctatcgctgattatatcatgcaagtctaaatccagtgaactgacaaatcagggactccacacaaactctagcgccatctcaatgcttgcgctcggtcttctcaaccctgctggctactttgatgcattcattccacaactccgcatctctatggttgcctttgtgtgacttacgccctctggcgatttgacaagccaacacattccactcaactgcctcggcgcttcgatatggatcaaataaaaatcacatgcgaacacctcctagtacaaccatcctctgacgattgcggcacctacccgccttagtctccatgtgcgtccctctggacacacaatgtagcaactgaagcattccatgtctatccccatttgaacaaactcggttatcaactcttgacctctgtcgggactaacaagaatctgaaggtcccagcactacttccacacacatactaacaagcttccttttcaacaaaactgccttctacggcttacgatgtcacttaggcaaacttggcctagtgtaccgagcatatagtatggtttcaaacatctgtcgcacctctccacaattgcatgtggtagttgtctttctagaatccttcctcacgcctacatcctctctaggataggccaaccaggttcacctcccactgagatgaacttggctctgataccaactgtcaccggctcaccttttcagacagcgaaacagccgtgcggcaccttgacttctctaagccaaggtcagccttcc

SEQ ID NO: 255744 - DNA, 2184 bp, Cannabis indica
ataaaatagattacattgaaatggagttttatttagggcataaaacctaacatcctgcacccgagccatgcttgttatgcttcatctacgtaaaacttccaagtatcccgtctcgctgaacaagcgagtttcttctagagttattccttctatcaggaaataagccaaagcttggcccttaatggatgttcgtgggtgataagttatgtcaaactgccccaattcaattgactattttatcaatcttcctgaagcatacggtttttataaaacttgtctcaggggttgatcagtaaacaccttaatcggatgtgcctggaagtaaggccataacttgcgagatgcatggatcaggcataaagcaagttttcaagagggggatacctcgattctgccccgagtaacctctaactaacatagtaaataggttgctggtgctttccctcttctcacactattgctgcactaatcgcattgtctgagacaaccaagtagaggagtaaagtttctccagttatgggttttacccaaactgaaggtgttcacaaatgactcttgatgcttttaaaggcctcctctcattcttctgtctattcaaactttttgttgcctcacaatacataaaaaaatggcaggcacttatcagttgattttgaaatgaatctgttaagtgtcgccattcttcctgttaatgcatggacttgctttggtttagttgtttagttgcttcaatgcctgtcgcgttgattatgaaccccagaaattttcctaaggaaactccaaaggaacattttttcgggttaatcttcatattgtactttttaaatattttaaagcactcttcgaggtctgttgtatgatctccactctttatcgacttcaccaacatatcatcgacgtagacttccatgttttttcctatttctctcgcaaagatttcattcacaaatcgctaatatgttacccaagcatttttcaaaccaaacggcatgactttataacaataaagtccaatgttggttacgaagcttgtctgctctttgttagggacatgcatttttatttagttatatccagagaatacatccatcaacgacataagctcgtgtcccgcatttgcatccactaacttgtcacttcttggtagtgggaagcaatcctttggacacgccttatttaagtccgagaagtcaatacaagttctccaagttccattcagtttacggacgagaataggattggatatccacgagggataaaacgcctcgcgtataaagtcgttaactaacaacttatccacttcctgcttgagtgccccttatctctcagaatccaagggtcgtctcttctgtgtctttgctgggtaagttgggtcgacgttcaagtggtggcagataatattagggtcaatccctattatatatgagtggctccaagcaaactgatcctggtttgccctcaaaaaacttattagctgctattttagtttttcatctaggtttttctcaatgaatacacactttgtgggattcgctagatctaaaacaacaaccactaattcttcaattggtttcaacaaattttgctcatcttaaatccgacgatcaagatcttcatcctacttctcgccttctttagtcattactgccattagctggtgaccagcccttcatttcgcaaccctatgcgatagcaatcgcgagccagcatttgatcacttcgcaccactcctacaccgcagttgtttggaacttgaaggataggtacttaattgaacttactgcacctagtccaattaaggctactcggcctaaaagtatgttgtaagctgatggcagatcgacgacaagaaattcttgcattatggtggtggatcaaggcgcttcgcctacagttaatgggagctcgattattccttatacacataggtttacaaggcaaggttttagctttgcttttttaagtcccattttctttagtgtatccttataaaggatatttactacacttccattatccaccaacacccgctttattctttttattggcgagatggattgtgatcacgagtgggtcaacatgaggatatctcacgtgttttgtgtgttctctcgaaaacataattggttgttcattagctttagctctcttagatgattttggaacaaaagctgactactagtt

SEQ ID NO: 255745 - DNA, 784 bp, Cannabis indica
aaacattgacagcagcatgtattcaatttgagtctacccgatggtggagctagccatttaggcttagttggaggcaccaaattatgctgcaaagttgctgaaacctgagagcttgaactagttgttccaacaataatctaagagtgtgaacattttgcagcagcagtatctcgaaagtttgaacatcctgaggcactctggtgggtttgatgatttctggtctgagcttgcttgtaatctgataaatagttgccagcaaattgtaagatacgagatgcagactttggagttttagcatgtgtttctgcattcctttccgtccaaatgcgccaaagaagtgtaatgaagagttcaaccttatcagtttgaagttgagaggagacatagattaaaaaaatcagagaaggagcaggacttagacaattgccaattgattgctgaatcccaatttttccagacttgtttagcacgagtacaccagaaaagtgcatggttaatggtctccaaacttagctgacatagaggacattgaggagatgctgaaatgtgtcgatgttgcagagttgcagcagtaggtagagcttcatggaaagcacgccaagcaaaaatttcgaattttgaattttaccaaaaacatcgtgtttaaaattcgaggggcctgtgatccaaggttgtgaattgcagaaaacaacagcacccgaacctattctccattttaatcctttaagatgcaattcctttccccaaacaatcgatctccaagtgagagatggttgtgtaccaa

SEQ ID NO: 255746 - DNA, 589 bp, Cannabis indica
catgaactattgagattattagatttaaagacttccatccaattctgtttaattttagtaaaagatgactaacgaggatagaagttcgagaggcacgatttggttcatgtcaaaattcgggacaaaatttgatacatggacaattgccacgttagacctctagtaaaattgaataaaatttagcaaaaatcctttaatccaacaatctcaattattaacgatacaattccgaaaaaattctaattagccttatttttataaggagaactagtccacacacaatacatacaacatacaatatcaatgtcattagacattgaattagaaaaaagttattgatagaataattatcatatgcttttacctccggagctgatgcttcacagtcatgttacatatataaggcgaattcttgggaggagtaggcgttggaggagacgtattagcacccctcttgtcaaaactaacttctactgttcccgccaattcctcttcttcttcatcatcatcatcttcttgctgtttttctttctgaaaaacccaacgagggttacagcatgaggcattagagaccttctttccatcaagt

SEQ ID NO: 255747 - DNA, 563 bp, Cannabis indica
gccacgaggtctgcctcgtggtcttcttacccaaggatcaggttgatttggtgcattattctccagtgatgccctgggtgcggttgcctcattttccaactcagcgttccgtcaatttgcctccttcaggcaacatctgagatgacaattttctaactctacgattggcacgtatcttgtaggatcgtaggctccatcctcaccagtcagccttggttcagcaccaccaacattcatttcaggttcttcataccttgtttctggatgctgaatcctccttgaacgtgtggtctgtgtacttggaccaccgtcaggtttggtcttcctagaatgagtggtctgtgtagtgggaccaacttcaggttgggtcctccttgaacgagtggtccatgtagatcgtgagatgggaggcctccggaagcccatatattggctcttttccaagacaatgagtggtttctttaggatgagtatcaacgttttctccgttgttagccatggagaaagtttttttttatatcaggagggttttttctgagcttttttcatgaaggctctcaatg

SEQ ID NO: 255748 - DNA, 1907 bp, Cannabis indica
tttttttttttttttttgactttgtttttatctatcgttctgtctgctaaggacagaaatcgttggagatcagagaaaaaccgattgctctacttttcttattgcggcaatgtggaccagacataaccttgggcccaattgtatcgagaactttacaaaaatataataaagaaagggataattttacaaatacacaaatacaataaaaaaaattacaaaaatacggttttgcagaattttaaatatttttacgaattttttaattttatttacacaaaatacagtctttttatgttgtattcatgttaatatgttgttgattttttgttatatgtatgttattttttattgttgttttaatattatttagatgttattttcatcttacttttatgtagtttacttgttgttttcgtgttgtttttatggaaaaccgtaaaaatgtaaaaaaaaaaaacattaaacgtaaaaatgtaatttttttacaaaaacagtgttttatgtaattatcccataaagaaaaggattgagatgcaaaataaatgcaaaatgatttttaatttagaaattaacttagtaaatatttatttaaaaaaattaagtaaaataatcaaatataataaattaatttctcattttttgccaaagtaaacttatcctcaatacaagaaagttcagttaaatggcatctgtccaatgttgttcggaatgcaagtatttgattatcatgttgaagaggtcctccattcttgtgtgtatgtgaacaaatttcattcaagtcaccaattaacatctaaggattaagggaagaaacatcagctaggcaattaatcaaaacccatgtatgtttcttattattgaattttggaaagccataaacaaccgagaagtgccaacgagggccctcttcaaaagacacataacaatcaaaatgatttgtattcattgaaagtaaagacacatggacattgtcttttcataacaacataaccctccttttaaaccaacacgagaaacttttaaactgttactaaaatgtaaagactgtttgaacctaacaagagcaccagcaggagctttagtttccataaggaacagaagttgaggattttgctcacgaacaagcaaacagagacaaccgaatgcactcgaattctccaaacccggtgcattctagcttaaaatattcatggttgtgagcgggattactgatcaacaacacccgttagagaagatggcattaactcagtagaatccataagaaaattagaaacttcctaagatatagaacaatcagtagatgaagattgttgcttgttgctgcgacaccttttcaagatgcttctaagattatcagtattcacttatcttttgaaagccttgttatgcagaacatagtcttgatcatcttcacatgtaatgatagttttgcctttagcctctgtagaagtaataataacatcacaactcttaacagtataagcattatccatttgagtagtcggattcttgaggagaaaatcagtagggggatatgtggcatcattagctatgggaggtaaattgatcttagaaaaaaggttatggttagtgttaagtcccaccgtggcattagctaaaatcccttcatcaatggagggaattcgagaatgatagtaagaaggaaaaggagaaggaaactcaggtaaaatctccctagtaagagtaaccaaggattgtttagaggaagattcagcaatggtgagtggaattggatgaggaatggttctaatagctaagtgtttattggaatttatagcagggatagacggagtaatggcctttcaagcgagacgggtcaaaaaagtagggttgtacatcggtcagtttgggcggtttatcctatatattttctagcccaatctaaa

SEQ ID NO: 255749 - DNA, 567 bp, Cannabis indica
ttccatcgattctataacccactccgtatctcaaaacttaacccttagtgaaaatgaatcggtcatccgtgagttttttgagcataacccgattgttcaccaggataataaagcttggtgtattgtctttcatattcttacccctggaccatcaagctggaatggattgaggattatatatgaggaatgcctggattgttagagctccaccttttcgtattatggctcaaggatgtttatggtttagtttggccatgagggttatatgagatgtgttcttgaaggccagccttagcatttcgatcactgtcttactgcaagtgctgaccttgaggggcttcacactctccttcctgattagttgcattcttccccttttgggattcaagcccactctatacactttgggaagaaatcctacaaacttgctaagcttattaagcatgaggtaattagggatttacttgaagttaccatcctccaagtctttcagatgttcattagagtcagaattttattgacgtctctaagactattaggaggaaaattactactaactttaagagc

SEQ ID NO: 255750 - DNA, 1093 bp, Cannabis indica
atttctgcattggatcgcacttttacaccagtattatcaagtagatatttgatttggttattagatttttgaccattagattttgcgtggaagaatttagtatttctgtctccgcaagcaagccaatccacccgggaacgctgctgccaataaatttcttcatgttttagtaactcatctagaatggtttcagcttgtttcaattcatcaagatggctgctagtttgagccgagacattattaagttttccaccttagcctggcattctttaatgtcttttttcatgctttcatactttctatcatgccaaacttgaagattttcagcacaagatctcaagttattagcaacagctgctatcgaatcattggatgaagaagatgaccaagtggctgcaataatatcattgcattcaggatcagccagccacattttcttcaaaccgaaattgactccttcttttatttcgactgatcggggctgaaaggatggtaaaagtagctgtgatagcacgttggtctgcttgaaaaaagtcaagatgattaacttgaggtgtactgaaaaaagtttcccaatggttgttgacaaaacaccaatcaagacgctctttaatcatatgtaaggcaattcggctcttggaccaaagcacgcctgaaagcttccatttgtgattcatttcggagtgcaccacctgatttttgggagttagacaaaatttcattgaagttcccaatgactaaccatggtagaagaggatccacatccgcaaaacgttagaaacgggtccatgatgatgattggttgcaagcttcaggagcgccatagaaacatgtaaggtgaaaatatgggatgtcttccatcttcatgtaacaataaaaaaaactagtgccaaagtttaaaagagatatatccacatcatccttccaaaggagcattaggccaccactaaggcctattcaaggtgattctaaaccgttaccatagtgtaaagactgacgtacacgagtaatagagttgacaggtagtttggtttccataagaaacaaaacttagggtgattgttgttgaacaaatgtctgaacgcactcgggt

SEQ ID NO: 255751 - DNA, 4203 bp, Cannabis indica
tttttttttttttttcttttgatctcaattaaattcataccttaaatctttaaggctaactttattgggtggttgtcaaaaaaaattgtggggcattgtgactaagagtatgatgtgtcactcagagagtgaaaacaacgttgcccatttcgcatcggccccaacttacgaaaaaaacaagttttattttgtttgaaaaagttatagctaaaaattaaagtgggttaggtggggttttggggaacattttttgttgatgccctttgctcacacttgtaaattgtaatatggcataccaattataggtgcttattcactggggcagctcattgattatatttgtacgagttcttcgtgtggtacgtgattagtagtgttgaaagctgttttgtctacccgcttaccaaaacaccattgatgcagagtttgaagtgctcagctcaacaacaatactactatccttggagggtacaaatacccctataacatgttccaaatatttttgtagatttttaaggttcagataggtaagcatactgctaaagacagattaagcattgtgaaaataaattaaataatcatgaaatcaaacatgctcatctacaaaattcacagcaagcagcacttacgcagcatcaaaatactacaagtatctaacaccaatggagtatccaaaaacatttgccaggagtctccacagaacatcaccgggcagtaattacagaaaaatctctaataggtgtagcatcaccactcaccagtgttgtaaggaaaaaaaaaaacttctactaaattatgaatatcagttgagactagagctaaaggtgaaacacatatggccgattagactgtatttcataaccactgttggaagatgctggcctgtcattgtaagtaactgcccgtagaggaggatccccagggtaataagccagagaactatgtgggcttacattggaagtgatgccagcagttacttgaactgctcctgtagatccgaactgctcagtcctcctcccacttgcgcctacactaattccataaatgtctgccggcaagttcatatgtgcagaactagctccagagcctgctaatccataatgagcagagctcatatgatgagtctcagggttagaactcatcaaactataggctccaccagccaagtttgtctgctgctgggtcacagggggtgagttcgtcaaaccatgggatccagatggtatgtttgtatgtaaatcaaggatggaacgggccaaattgtaataccgggaagagtattcagtcccctggcccgtgtatgaagctcctgcctgatagcgagatgcttcagcggagtaaatgtttgaagcagcaccaaaagatggatttgcagcaggagcagcagcccctgatgaaggcattctagctggtaaatagtattctgagccttccccctcaaacaagccttctgcgctgtgatgcattgcttggactgcagctgctctagcagagacattagatgctacagccattctgtccgattgtatcaagtaatctgctctttcaccttcatacaagccagctgaatggtgatgcaactgaactatggttggtgctctagcaggatagcttagagcaccagtagcaggaactgatcgtggatgcttttttctgttctcctgccttttcatttgggttttagaatcatggaaattgcgtttctgtccgctctgctgctgctgctgctgctgagctttggcagcaagagcagaatgtgttggtggtgctctctctctctttagctttcgcagactctcaatttgttctttaagattttcaggagataattcggattctagcttataatcttcaatgcatcttattacacttctcattgcagctatttctttatttgcggcatcatcctgcatgtatgacaaattggcaattagatgaaatcaaagatgtttgatgaaatgaggaagagatgaatgagaaaacatttataccttcagtttgagagagttatgactgtttcccaaaatagagttagcaaccttcttggcctcttgcaaatgggccttaagaaggggaactggtgggaacttgtcaaccaattcaaatgtataaatgaatctcacagcctcaatcatcttatcttgagaaatgagattttggataaaatctgataccaataaaagaaaaaaaaaatgaaagccagcacaagaagaaactccagtttgaaaactagagaacaaacataaatgcagccgtactagtgaaaacaaatatgaaagagaataattaagtcaaatgtatgaacaaatatttacaggaaaaattttcaatattgaacaacaaagacacactattttaaattatcactgaattctaacgttgtttcacaaactcagacaattctagtacaagtaacagtattatttaaatattctaacaaataatgtgacaggaacaatcgacccaagtagcaattgttgagaactttcattacaattggttaatttttgattgaataggatgctaatgccaggtaacttcttataacacaagtaaaaaatcacaacaaagaaagaattgactattagttaaaatggttctccaaaaactcaccagaggccttatcagagaaaccaagagatcgaaacatctcaggagcctgcttacgctgcacaacagtgccaacaagattcaaaatctcatccttattatactccccagccaacccataggcattcaaaagcagcagaaacccccaaatctccatagaattcaccatttcaagattcattttcgtcttccaaagagtggaaagtttggaagcctcttctttaactggaccatttatcaaaggtctaacatttatcaactcctccaacaaaagcacactacttctcctcatagcactgagctcaggatcaacaactcccgttttcattcccggtggataaaaccctttaatggcatccaaaactagtttcccagaatcttttaaacccttgagcgcgtgtctaacatcatcacgtatcgattcatgctctttcaaattcttcttcagataaaccatcaacgatttcccatcactcaccggaatcgcattgccatccactttcgcaggcgtcgattgatcggatttaacttgttttttcggagcattcaacttggtttttttggaatcaattaggggttgaagggttgagctcaaatgttctttgtgtgaactaggttggaattcctcgactttgggcaattgggtattttgggggttttgcaattgttgaaattcgtcaaatttggattggattgaattgtttatggattggagatgatcctcgaggtcttgccattggagggtgaaactggcaacagcggaggcgtgggccttaagaaagttgaaagctttgcggatttgtggtttgttagggtccggcgacgattgatgctccggcgaggttttgtcaatggtggttgacatggttgggtttggcggtgaagggaggattgattttcaaaaattaattgggactgggattggttcacttcagctggttaaggttaacctccaatccaatccaatccaatctccatgcattggaaatttgattattgatttatgagtcaactctctcaaacatagtcggtcctcttttgcttttctcttctcactaaacgttatcaaaacggcaagtcgtttcgttatttcactatatatacaagtttttgtgatgtgccaatggaacccattcatttttgaatattctacaaattaggaaatctatatcaaattttaaattgtgatagttttttatataaattcttttaataatatgagtaattattatagtgaactttttttttttactataaacaaaataaattaacattatagaattgtactatttttttaattatatttagggtgcgtttggaaagccataatgtaattagatttgtgtgtaattagaagtaattacacaatttgacatgtttgtctgaccatgtaattacactgtaactgtgtaattggaagtaattgaagggttccaattacactctccaattctcatggcccccatgagaattgaatgtaattacacttgtaattactaaaatctttccatattaaacattaggtactaaaaaaatattattttcccatgtaatttttaactattttgccaaacaaaatattaggaattcata

SEQ ID NO: 255752 - DNA, 831 bp, Cannabis indica
tagagacacacaatgcgggggatctgatccaagcttcaacttcttctcttttaatcccttcgactctccatcttaagatcgaaggcgagttctttgtaaacacattattataattctattattaactctagaatattcctactaagcttcctcttctttaagaggaacacagtggatcggagtaaagtctatcccttttgtatttgtatcaacattcactggccaaagagcctaataaaatggactcgtgaactaaggataattaacgcctgaaccacataaaaatctcctatctattattttatcatctacaccttcattactttcttaagctctatagttatcggtgcgagaccgcctagaaaaaggtccctgtgagaaaagaaggaaagcctcctaaccgtataacgaggtctgagcgaaggccacaaatgtgcatcgccaaggtgttgcccacaaaggaacttgatgcctcagtctactcaagaaaggtgacgaagatggacacaggcagtctcaaaacacctgaggcactgatacccgtcctcaaaagcttagatctggccagccaactctctaggggtaagatctaccatcgatgtccttgggctcatatcaaccattgtatcactgtgtgtagacagagcagcacaaaaggtgctcgggccatatgaaggagcgatgagtcgatgcggttacgatgactaactcagctagatgttgcatttacaatatttatcttttgagatctaacactattatgtttgtctaatgttgacaatccattagggatttatcgcattagaacaacaaaccaagttagaccaacaa

SEQ ID NO: 255753 - DNA, 973 bp, Cannabis indica
agatcctggtaaaataaattccaacacttagtgcttcttccccctttttttttccgtccgttgagcttctactcaggccagatggccctacttcggtgaccggccacccaaatccaccaaagatttggaatccccgctctcaaaaatctcaggtaccctctatgtgtgttttttttttttgaaaatatcctctgtgttttttgtctcactttctgagatttatttgttgatggcagctaggatatagttgttgttagcgatgtgtttgatgctgaacttggagcagtgcatattaggatattagttctatgattgtgttttaagttattgatacttactctttcgttaaatatctaaaatatatgtgtatatatacatatatattgtatcctgtatattaggaataatggtatctttattagtcttgaaattgcaatgaacataatgtgaatttgggctttattaatttgcttgaaaatatcaggagcatccaaagatgcagggtgtttcaaataaaattcaagaacatgatgttgccattgttggagggggaatggttgagttggcccttgcttgttccttggttgagtagtctttcatgtagattttagttatagcttcattgggatcatttctgtgtacttccttttttgtttgggataaatctagcttcagttacaatttttatatgagatatggctaatttctcgttgatagcttaggcatattggttatctcaatcatttgtttgttccatcaatggtttaagtgttttaagtaggttgtcaagacatttaggccaccccaacctgatttttttgtggattaactttgatctcatgatggtgcccccttgcaattcaaagagatgacttttggatgaaatgcaatagcttctatactgaatatgcattcatgtgttttaattttatctagattccctttggttcgatcagcattggaagaattttgt

SEQ ID NO: 255754 - DNA, 842 bp, Cannabis indica
ttagagaagacactcataaaatcataatcctacaatctattcatctcgccatctatcaatgatttatttgtttttctttcgttcttttcgtcaaacaccgctcatgattttcatcaacataggattgagatcatcatcaccatactgtaagagtacaaattttaatgttagggccttggccggtgtcttattataggtagtagtgacgggataacaagtcttaagcaacggggtttgaggtaaggaaattaggtagttttgtatgttttgaactgcgtaatttatactatttgtgtattgaaatatgatttgtgatgcattattatgaatgtgtatatgtaactgagaatgtgtggtatatgattttgtgaatcgatatatattatggttgatatgatttgtatatgttgtatattgtatgttgcatgctaacgtctcaggtacaaatgaggggccatggtagggtatgatacggagtaaggccgttgaatatagagataccctaccctacatttgtctgattggtgtataaaattgtaatggtaaggtatgatacagtgatagttaagttgaatgtaaagataccttattccatggcaatggtagggttaaatgtgcccaggttattgtacggtcaggttaggcccatgttgtgtatgtagtggctatgattgtgctatgagtatgatgttagggttatgatccctacatatatgtaatggtttcgtttagcacaaatatatatggtatatgatataactttccatatctggagttatttaaattatggttatgagctaaggtatgttgctgaaatttattaattactacgcaagtgcacg

SEQ ID NO: 255755 - DNA, 1538 bp, Cannabis indica
ttactttttttttaattaaaaaaaaaaaactacaccgatacccacactaaataacaatcatcaatataaaatttaaactctatacaaaaaaatcgtttataacataaaacatttgaataacaatgtgtatattaaaggtttatatacacaattatgacattcttaacaattagttttataaaacatatcgtttataacataatttacaatcagtctataaattcttaaacaaaaaccccaagaacttggtccacttataactcgcatctagtataaagaaaagtttctatttaattaagaataactaataaatataaaataaataaaaaaggaaaataaaaacaaaaataaagaaaaaggaattccaatagtcgaaggattccatagtcgttcttcgaacttcgaatgagtgactggagaggagagagagtctggtcgagagagataccaccgccaagagagagtgcatcgccgaccactgactgtagagagagtcaatacctctgaccgtcgagagggagcaccgacggtttagagatttttcaacctcttttttcggcgtactgaaatgaggaagaaacgaaccgctccggcgaggaagaacgaaataccagagaaccgtggccttgaaattccattttatgaaaaaccaataaaatctgatattagtaaaagtacactataaactatgatataagaaccatggtttcaccatttttctttggtcaaatatttaagaaatcacttataagaaaaagaaaacaaatcctaaaaaattggcgaagttaaaggaaatctttttaaaaaaaagcagatcagattgtaactgtaatttgacattatcattcagttaaaagaggcaccaatgaaaagttagaagcaatcttgaaaatcaaattgcatattacttctccagccacaaaacagataaaattacatcgaaaccatatctttatatagtctgctgattgcacacattttaactacttgattaaaataacaaccatacggaacaactgtgtagatgaaaatcttcaaaaacttgttaaatcttccaactttaagtatagattcttcaactttaatatggagggtctatccatagtaagtaatgacaaccatcttcaacctctctctgtacaaaaaaaaaaaaaaccaaaaaatgtttcaaaattataaaatcttaaaaaacacatgaaattttaaccaaaccttatatcttggataacaaaaaaaatcttcacctcttatttacttatgttcacaccctcattggtggtttccatttcactctttcagcatattttctttcacttttactacccaaatttacaaaataaagacattttttgaaaggattagagaaaaaatttccatgaagatagctgactggaacaattgttgaatatgattgaagaaagatgaagaaattagtaggattttttaagaagacgatgaacagtggagccctatttttttattactaaaattgtatctcttattatattagaaatcttttttaatctaattatttattt

SEQ ID NO: 255756 - DNA, 546 bp, Cannabis indica
tttaaaaaatacagggttcattttttcatttaacaaaacacagggtccaatctgtaacttttacaaaatacagggtccaaaatagtatttacccgaattgataatatatctttttgaccataagaactaatgggagatagaaagaattgtgatttctttttttcttataggcatgacattgtttaatttctttatttttttttttacatttttaaaaatttttcaagtcatcttaaaaaactttaacatcttggattatatacatatatgaaaaaaataaaataaaattagactataaaattcaaattctcctcaatgataaaacaaataaataattttaagaaggtatggtgtacattttttcattaataaatgggataattacataaagaaagattttttttttgtaaaatttttatatttttttacattttaaagatttttttttatatttttacaattttcatcaaaaataatacgaaaacaacaaaaaactacataaaaataacattcaaacaacatacaaaaaaaaaaaactaataacag

SEQ ID NO: 255757 - DNA, 2845 bp, Cannabis indica
gagacggtacatatcacacttccaactctgttttcaagacgtttgtctctaacaaagtgtacatccaattctatatgtttggttctaacatagtgtactcagtcttcttctaaaacatgtttataaaaaatcctctttaagtgctaaagaaacttttgtgaaggttgtcaatttagcaaatctcatgcgttatcctttgccactaatcacattcgtgccaaacacccattagatgtcatacagactgatgtttaggacccaactcccgtgatgtccaatgccaatttttgtttttacatttactttgtggctgattatagtaggtatatatgagtgtatcctttaaaaatcaaagatgaggctatcaaggactttattcagttcaagacatttgttaaaaaccaatttaataggcataaaaaatgtcttagaactgactgtgggagaattttaggcatttactcagtatgcatgtcattgacaataggatcgattttcagcactcatgtccacatctattagcttaaaatgggtgctgaaaaaaaatttcgacatatagtcgaaatagggctaactttcttagcacaagcctccatgcctctcaaatattggtgggatgcttttcaaaatttcgtataacttataaatagactacataatcctgtagttacaaaaccaatctcgtttttgaggttctcttttgtaaaaaacctgattacaaattccttggagttttcggaagtgcttgttacccatgccttagacatataaatcccacaaattctaataccacactagaaaatgtaccaacctcgactacaatggctacaatgatgcacataagggatataaaggcctaggcagattatgtatatctaggcatgttatatttaatgaaagtgactttttttttaaaaatggctttctcaacacacatagaagagagcaacaatatctatttgtgtaccatcttggtcagttttcattccatctcagcaaacaccaacttcccaaaacagatcaaactctcaaactgacacactgtaattctcatgaagatcagtcccttggataaagctcattcacaagacatcaggtatctcatcttacccccttacgttcacagcatagcctatccaaaacacctgtaatacattcagaaaaggatgaaagagaaggacctcaaccaagaacacctgaacctgagatacaatctgtaccagtagaacctcttactttcacaccatagcctatccaaaatacttgtaattcattcagaacaggatgaaaaaggacctcaaccaagagcacctgaacttgagatacaatctgtaccagtagcacctcttgcaccatcacacccaatgactacaagagccaaggcagacatattcaaacccaaagtctataagtcaaaggctgagattgaaaatgatagtaatgaaccgaacactgttgaagaggctctaaatgttggaataatactatgaaaagtgatatagtagccttatggaaaaacagaacatggatacttgtaccaagacagcctgagatgaacattgtgggtaataagtgggtattcaaagagaaaagaaactcagacggttttattaaaagattgaaagcacggctagtggctaaagggttcaaccaacgaccagacattaatttcatcaaaacattcaaccccataatcaaagctttaattgttagaactatccttactagtactgtacctagatcatgggatatcaaacaattggatatcaataacactttccttaatgggaagatagaagaagaagttttcatgagtcaacctcaagggttcgttagcaaacacaaacccaattatgtgtgcgaattcaataaatctttgtatggcctaagacaagcttcacaaacttggtatgataagcccaagaccacacttacaagccgaaactttaaaaactcaaaagctaaatctttcttttttttttttttttttacgaaatgccaggtttaatcaacatggcacttgtgtacatggatgatataatagttactggcaataactctgagaaattaaaggatttcacgacaaggcttaatgatatatttgtcttaaaggatcaagacccacttcattacttccttagaatagaggtttacagagatgaaatagggttttatataaaccagtctaaatatatcaaggagctacatctcaaaccttattcaacggtaatgatcgttggcaaagctctatcgaaaacagatggtgaacctttaaagaatcctactgcatataaaagtgtgattggggggctgcaatatcttacacacacaaggcctgatttgtcctttgcagtcaataaactaagttagtattttcaagctcccacaactatacattggcgtgcaactaaaaagattttaagatacttaaaaggcaaaattcatcataatctgcacataaaatactttgagttgttgcctataattggttattctgatgccaactgggcgtgttgctcaaatgacaggaagagtgtggctaattattgtgtctacctaggtgattttcgtggtcctcatacaagcaatcggtggtatctcgctctagcaatattgaatcagaatcataaagttttagctcatgtggcaaccgagatatcatgaatacaagctttactaaatgagttcaagttctcaatacagagaactccaataagctggtgtaataatatggaagcaagtgcgtcaatcgagtctatcatgatagtgatctctttaccaatttctgtgaaaggtactgaatcattaagagtttttcaaaatcgcttacccacaagcaaatgag

SEQ ID NO: 255758 - DNA, 520 bp, Cannabis indica
tctttaggttgtatataataaagtcttcttcttttatcacctaaaatagacttgggtttcttttgtttctactgagaattgtcaaatttataattgtttaggggcttagataaaacataagtttaaattatataatggttgtcaaagaatcttggtttttacttggagggattttagattatattacggtgatgagttataaattacagcaaaatatgatgacatggctgttataatctttgttttcttttgctaataatatatacgtgtagtacatgttttgtctttcttcatggtttttaataatattataactgtcttattaatgatcagttttaacaaaagtaactacaacagtatttaattcaacatatacttttggttctgaaaatgttatcttttttaagggatggactcaaagttattctggtaagtttttggtttaactaaactataaataaatatgtaccgaaactgccatattctaaaactagctcttatccttttctcaaaaaaaaaa

SEQ ID NO: 255759 - DNA, 4725 bp, Cannabis indica
agcttgaattcataacattgatagtgttcctaaatgctatttcaactgtgttccgattatctctttataactggaaaatctttatgcattcagggccacggatcgcttgaacgcggagatgacgaggtatgagactttttttatttgctttttattgggaatctactcttgtgtaatatataaggtattttttggcgctgataaatactcgattgagccatgtattttatacaagttaaagttgctatacagaagtcaatgctgatctaaatagttgttctatgtactgattgaggttactatatgtatgtcttctcaaacatgcaccactttgcttcacctcgcaactataaatcttggaccctataagctgcattgctttatcttcctgtattactagcaggatctgtagcctgttattttattttctgttgctaatattcaatctcatttttttttttttgctgcatggatggtttgccataaaatctgtagaacttgtattagggtgcttgacaatatatacaaatgtagcagttgatcattcttttctctaaatagtaattataataagcaaaaaactttttgtgattgtgagccatagacagaatataaagagtcttagaggcgtgtttactaactttagcttgagcatcagttttttcttgcgcgtgtatatttgaagtagagaattttgtggtaatgagaagttttttgcatgacacttggacaggatgtctatttcgatgacgaatctgctgaagttgtcatatcttcgctgcggttgggagatgaccaggataggtaggtcgattttattttgcctccatcctgtctattgagcctgtctcaaaggtttcttaatgtgatacttttgttcttgcagtggttctctctttacaaattccaactggtttgctttcgaagaagacaacagtgatcccaatgagcgttcaactgggccacttgcttccccatcacctaatgctgaaggaaccagtgctctcagtggtggtgaggatgtcgtaaatgttggtaaagacattacagttgaagtcgaaactgtttcagaacacgataaagctaatgaggatgatgaattgatcgacactgcaacaccttctgttgaaccagaagcaaaatcagaagataatgtgttgcaggaatctaacactttaagagaagcggaatcaaaggaaaccgataaacctcctgagtgggttgaatggagggagacttcggactctggtgacccatctagtatcctgccaaatggtgagcttcctttggaatccccagatgctgcaaaacctttggaatcttctgatgctgctgaaccttctccatcgtctcctgataaagtagtagacaaagaagctgccagtggacctccagcagcatcagaggacaagaacccaccatcaaaatcggatgatgagattgcagtctcagaccctgccactactggcattgctgagacagcagttgacaaagatgccagcgcttccatagccactactgaagataaaaaagaaaacgaagtagaagggaactgatgtaaattctcaaattcagttttaactggggctaactcggaatttaagcaacacattgatgatgatgatgatcatcatcaggtgggaaagttggattttagacatttcggatggttggctaggcaactgtattatatagaagccttgtgtgtgcattggtgcagtgtattaaaaagcaaggctgctgattttttgtcctatacctgagaatttgctctccctttcttcgcctcaacttcaagaaaaagcaaattttaaggaaaagaaaaaacaaaaaccaattgtggggaggttctgatttgcgaacaactctctagccattagttgtagtagtatttagtagtacaatgttttttatcaactattttggtattttctctcacgtgttgcatacattttttttttatcaaggatctgtcaatacataatttcctttctcttcattattcttaagtacatccatgtatgtccaaatgatttcagaagctaatctgaatatatattgattgctattattgttattctttcttgaaacgatattgttgacattttccttttctatttatttgtaaatctatctttatttatgatttcaacacattaatttattacagtagtaatgtaataatttatttattatttttgctggaaaactattaagtaatgtaattattcaagtttaacagctctgtctggggatataatatgcttgctcattttgagctcactcagttaaaaaggaagaggaagaagataactgataatgagcagaatcatatatattaaggttaaccaggaaaagaaaaatgttttcatttatattatcaactcactgtataataaaaattgggaagctacaaaattgttttttgtttttgccatcttaagaaagcaacttgagtggatgaattgctactccattttgagctgccgggacgcgtccccaccttcccaatcgaggttcctgtaaaatcaaggatctcgtaagaaaccagaaatcaggacggaccaagaatcattcggtatgacggagaatcatttgggactttttaaacatattctcaaacatgaccccctaagagtagcatctcaagtcaattctttcttcacatcttatctaccccacccttttcaaatgttgtcaaatgatgaaataactaaacatgcttaatgctagcggctagcctctactaattcactatgccaaagttgtgtactatatgcttccactgactatttttatgattccacttcactaaaaccaaatataagttaaattttccttcgacacgtgcaaatacaagaaaaagaacacataaaggaaaacataaatcataaagagggatgttaacaagggaaagaaaattgcctgccccactccagcaacaatgaactttccagattttgcaaaagccaaggaattcacaaacccaacctgcaatttgcacaaaagataaaaagaatgattcaaaatttggtgatgaaaggtaatatcattcctctttcatctcccacctctcctcattcatatctttttccatccttttggagtaataaaagaaattttttacttctttttcacttaccacaggtagattgtataagggtttaatgtctttggtttcactcccaatactccacaaacgaacagaaccattaccggctcctgatgcagcaaggtcactacttctacagacggccacagaactgacccaggaatatacagatgaagaatcatatttttcagaagtgtggtgaccattttctgcattttaggatccaacgaaaatagaggtaaacaagccagcacaagaaattgtaaataaattgcaagaacatccaaagttggtatctttcatctttcatggtaagtagaatgaaaataaacatacaaaagcaatgtggtgaaagaagcttcaggtttcaacaaaggcaagaaaaaagaggggcaaaaagggaaataaatcactatccttacctatatggccattaggaatcattgggcaatccttctgttctatgttcttgtttgcagccaacaaagagtgtgcattcttgacaatgtaagccggcttctttcgcagtaggctccacagctcaacacttccatcatcggttccagataagaattcatcattactaataaagcaacaacattctagagaggaagcaggggcacggaacactaatcgagactcctcaggtacctaattaggcaagagactgatatcagaaccaaatgtgctagagtggataatagacaactctctcactcgtgtgaaaaaaaattctgttgaaagaagtcattttaccctaccttaaataactgcatactcctatcacgcccaaccgtcaaaaccctctcttttcgtaggcaatcaatggtcaacacttcactttgatgaccaaataaagagcttatgtaggctctgtcctctgcattccatatcttgacagttcgatcataagaaccagaaaaaagttcagaagtcccttgcctaaatgttaagcatgaaacaggtcctctgtgtcctggaaaagcctgtcaaacacatacattgacttcacatgagcgaaatacgacccgcattctcaattaggaatttctctcagattataatttacaataatatatatcagcatattcgcccaaataagagttatctagacagaaaatattgtcaggcaatcatgaaaacatatatctaaccctcatctcttaacccatttaaaggaagtttcataattttagagttcagcaggactttgttaatagatccctctagaaagtttaaattgctcaaaggaatcctccatgtttaggaatggtgatttcattccaactccattcaagtctaagaaacatgttgttaattatattcaatgacaatcttagtagctgaaaaacgaaaaaatatttacctgaatatgttctcttgtacgagtatcccacaaatgaacatgacggtcagaacctccacttgccaaataccgtccatctgagctaacagccaacgagaaaacaagtttactgtgcttactagcccggccttgtggatccttggcaccatgggactttagtactgcatcactaggccatctatatttttcacccctcccactttctacatcccaatgcaaaatagtaccgtctttagccgcggaaaag

SEQ ID NO: 255760 - DNA, 976 bp, Cannabis indica
tttaaacgtagaaatgtaaattttttacaaaaattaatatttcatataattatcccaaaaataattaccaacggggctacgacccaaaagtccagttaacacatcgttagaaaggccttaataaatttccttttccttctaatcaccatgtcaaaaactcccttatttttgtaagacaccatttttttttttttttggagttttttcatatatatatgggaaaatatagaaaattttacttttatatgacataaataaataatacaaaaaaatatgggattaaaaaataattaaagtttaaaatgtgaaataaaataatcaataaattgtttgtctcttgccttcagctttactcaagttaacttccgctatttcaagagtttgctgagcttcttgtgtggaggggtccgatataatagaaaccggcgcacaatcgtccgttttttgactttttcataaacattgtaataataagtttcactggaaaagtcaccggcatcggaaaaattgtctgcgccaaaaaagtcaccgaaaaagtcactatcgccgaaaaagtcaccgtcgccgaaaaaatcactggaaaagtcaccagaaatagatgtcttagatataactaaaaatagaactggttctataacataatgaataaaaacaaataactcaaacgggttataattgaaatataaccggttttgtaacataatgaataaaaataaataacataaaataactcaagagttataattaaaatagaaccggttctataaatgtgttataatgaataaaaataaataacacgaaatagctcaaaccggttatataatataatgcatgcaaacacgtaacacgtaataactcaaactgctttcaatcaaaaaacaaagacgaaatcaattcctaaaacactgaaacataaattaaaaataaactagttccacaacaaaatacctcataatacataatacctcataaaaac

SEQ ID NO: 255761 - DNA, 2107 bp, Cannabis indica
tctaatttttattaaccattacataaatgcatcatatgtcatttttttacaaagatactttttttttatgaataccttaaattttttattagacatctagatttttgacattcgttcatgcttactattttttgaggtaaaaaataattaaaaaagaaaaccaatacataatatatatatatatatattccgcatccgagtctttttttttcttccaataatactgcattgagcattctagaatttttattttaatgctttgacaattttttttaccatcaatgctttaggttcaatttgactataagggggctgtgtactaacaaataaatatataattacctatataactaaaaattataaaaaaataatatgtacatgtatttggattggagggccaaggccaccttagagttgaatgttctttcccacctttccaaaaataacacaaagcctttcaccataagggagaatgttctttcccaccttccacagaaagagtttcacacgcttctgaacggggcagtccaattcctcttccacaaactatccaaaccacaaagccttggcttaatcaaagaaccataagcctgcctaactgaaaacgaaccatccgtagagtcgcacaagaaaatcatatccagaccccactatagttagcctcaagatcatggagtttagaaccaactgaaagagtgaaccagtcaccaaaaagactcacattgagatcacctcccacagtaataaaattgttaagtagatcaaattttggttgttaaattcttggattgaaggcagttgtatactcatcccaactaagccaggagttccaaagagagtgccatacatcgatacgtttcccatcagcaaagagccaataaatttctgatcgaataaaatttttggaagtcataatgccccgagaaattttagaggctgaaataggaagagacaaactccaaaaagaatcttctcttttgcgatatttagcctgaaaaacacgacaccaaagatgatcatcacctccaaaatatactaaattattgaactatatacaacctgacttttttaaaaacactaacattataatttatacatgcaatacaatgtataattttgatatatgtaattcttatcaaaagaaattttgatatattttaaagtgattagactatttgaattgaatattgtattctattttgtaatttatttaaaaattttcaaattttataaactgtcttaaatatctacaatatacataattataaagaaaaaataaaaaattcttttgaatgtcgaaacaataaaagtgtattgatacaccctttttagagggtccactatagaaacttactattaaattcttaaacttgtaatcattttaaagaaacaaataaaaaaatagagaaaattcattaagctaattttataaatgtaagatatcacctccattaagctacatcaacaaggtgcatcttgttttctcgtagtccatcacgaaagaactccacagtcaagcgtgcttgacctggggtaattttaggataggtaacctcttcgaaatttttcccaagaagcatgtgagtgaggataaatcacattggaaatactcgtgttagtttgtagggtcagtcctcattctaggaagtagccagtgtgacatacttatatataagagtcatcattccatgagtgtaaggacctaatggaggcttgaatttaagtaggggcattacaaatggtatcagagccttgccctaactgaaagtgtggtcgacgaggacgtcggaccccgtgagggggtaattatgatagtcagtagtcctgtaaagagaaatactgggtaagttgtgcaatcccacattgcttgggaaatatcaagtttgataattctaagattgtgtaagtataggactacacaattaaaaaagacttaaatggattaatttttactacctacatcaataaggtgcatcttcttttctggtagcccatctcaaaagaactacatagttaagtgtgcttgaacaggggtaatgtaataccctggaattatgaaatggattatcaaaaccctaattatgaataaattgaggaactatattat

SEQ ID NO: 255762 - DNA, 665 bp, Cannabis indica
ctcatcttttattatcttcttcttctttaatttagcaaaggttctatagctttatgatttagggttttctatattaaagcacttttaggaatatgcttagatctgtgatttatatatttcttaagtgttttataaatcctaacacattcatcatcaacgacatggataaatatatttgttgaggtatttatcttttatattttaaggatattttagatttaatgtttatgttttgaaatataaagataaaaaaaatttattatataattatttatcatcaattaactaggttaaaaatttattgtttatgtgtgtttataaaatggttttgagtttgtcccatataatggtagtctcaggctaatttaatataacattaaaatgtcaaatttaataagattttacactaaatttattccaatcacactttataaaaagtttttttttaaacaatgaacaaacatttcattgaaaaactatacaagaatagtatatcatgaaaaaaagatgaagaatccatccaaactagttcaccatccagggccagcccagaaatttagtgggccataggaaaaaaattattttcggcccttatttaaaaagaaaaaaagtagtatttttcaaaatcaacaaaaaaaaattgtataattttaaaaggaaaagat

SEQ ID NO: 255763 - DNA, 1285 bp, Cannabis indica
ataccttttttgtctactaataattcttttcaagataatgtgccattttcatcagcaaacatagttcattccagcacaaagaagtaattatattctgttctatttgttatttattctatattttgtttatcaaacttattttaaaataattatttcaataataattatatttaaaaatattaattgcaggttatatcatacacttataattttgatgattatgaagatatgaatgagacaacgagtatgaactattacgacaggtatgtaattatatatatccatatggcctatttatatatagtgtttatttttaattttattaaactttaaaatttatttagtataatcttatttttgcaggctatatcaactcctatcacatttaaaagatttactagcaactatttataatattatgctatgggcaatcattttcaaaagccacagtggtgaagtctttgcattttgagacattaaatttctaaattattaaattatgaaatttttagcataaataaattttgttgcttcatagtcaccatttttttttattgaattcacaactcttttttcatcaaattttgtggctgtggaaacaagtaatataatgaaagtataatctcgttccttgtaactttttgactaaggtacatggtatagattaggaatattgtactcaatagtggtaaggtcaaactcatggcatagaggtgaactatctttttatgatagtttaatgcagctagtaggattgtatctatgtagatataagagagattgacggatatatttaacagtatagttaataggattgtaaagtctgttaagtgcttatgtggaaaattaaatgagttgtcataatataattggttgagacatatattgggagagggatatggaacaggaaatttggctccgaaacttgctgaaaaaaaaatatatatatataagtaatttatatttgataaaatattatttaaaacaaaaaaaaatatacttcactaaacattatatttaacaaagtcatggttaaaatatcataaatcataaaataaaaaaatttataaatttgatctagtaaatatatgtacgattaaaaaaatactttactaaacactatataattaataattaataaaaaaatatatataaacatatataaataaagtactataactacattcatccatccatataattaattcaagagcttcgcatagagtttaaagtctaaatatatatttatatatataatatgaatcaatatatataaaaatatact

SEQ ID NO: 255764 - DNA, 2110 bp, Cannabis indica
ggtaaaataattccaacagttataacccgggttagttgtatgtttatgttatgcttttcttactaagtctgtcgactcacattgccatttctatgtgtaggtaagggcaaggctaaagttaaggaatcgtgaggacgagcagatgaagattgtacatgtcggtgcggttaggcttggagtgtacgatcctcaggacatcagggcttttgttgtttagtcgccgggcgaaaaatattttgtaaatgaatagcaaacttttgtaaagtattttgtaaacgggatcccgaaatattatatatgtaatactttaagtttttaattaaaccagcaaattttaattaatcacgattttcgataacctcgttgattagcaacgagctgcacagtatgtttaaaatcacgttaacacgcctatgctagttagggtgttacatcggcacataggccgatagggttgatatgtacattcactggagaagaccgtcgcctcatggttggtctaacttcaccttgcccttatctgtaccctaaagcacccgtgagtcacgaaaattcaacaaaaaaagtaataaagaaaatcaaccattaggcaatgactttctaagatttacgtaatataatcaaccatatatataaaaatgagaaataaatatcttcattaaatcacattgcctaatcaggaaagtcgatgtattacttcgataaccatatatataggaatgagaaataactatcttcatcatatcacattgtctaatcaagcaagtcgatactttgtttgggtactcacacatcacatcacctaaataggtgagcccgtgccataacctggtactcacatatcgcatcccctaaacaggtgagcccatgccacaacttgacactcacatatcgcatcacctaaacaggtgagaccatatctcatatttccatggcctaatcaagcaatcgacggtcaagtaacctgccatgccatatggcacgatatagttttcttacctcaagtttcaatttaggtatgtcggttggcatgcttggagacaatcgacgatactgggcattatgtcataacaaaacgatagttaaccaagaaatctaacctcgttgtaggtccaaaagttcactcccaagggtcctctatagggcactagggtatccccacttcaaatttcggtataatacaaaaaaataggctttaaaaacaccaacagaaatggtctgccattttctacaggggtaaaaatcttgagtttcgcactcaccgaaacctatccaaattattccaaacttaacaaaacacatatataccataaatacaataatccttataacaaaaattaaaatgagtccttaaatagaaaacgccattaaagttcagacttaagctttaaaaagtttaaactcgatttctaactcaaaagcacctcaaattcaacaagtaaacatcaaaactagtcccatagcgacccataaatagtttcatgaagacaaaatcctcataactactctaaatcacaaattcaatatataaaaccaatcatttaaaacttaaaaaaaaaatcgatccttttattaagccttttctcttcaatgatttactatcccgctactacaggagcttgtgtttttatcttttcttagccactaagaaatctctactttgagggcactaggtacactcctaagtactttttgttgatgtggtttttcgtcaacggatctaagaagatcgtaaaatgagcaagatgaacacaagcaatagttaatcaaaataaaccggtttgaaaaagtaaattcaccaaagattaacacaagaattttatagtggttcaccccctttcagcggtaataggccagtctacttggagtgttattgatatcaatgcttgaggagagttctccaaagttatgttctgcaagagttcactcctcgagtgagtttttagaatttgagagtgggagctcaagagtatgatctcgtgagtatcaatttcaggttccctttacaagtgatttcacccccttatatagatattcatataggatttaaaaccccttaaacaaaggtataccttcccgtaattattgttgggttaggttcaagatacaa

SEQ ID NO: 255765 - DNA, 1415 bp, Cannabis indica
aatcaagtctacaaaagaagaagaagaatagtgctacttttgggagaaggttctacaagatttcgggaaatagcttttcaagtcttgccacgggaggaagcaagcagttttcaaggagagcgaaaggagtttgagcacttgaaggtggaatacatcaagcttgcggcatacaataagagtgaatctatttatgtataagtcaattacttcatatttttgagacctatctatctaatgaatcttatctctaggtatggccctgtggactactaacaatctgcaaggattatttataccatgtataaaagccttatgtgtttttatttttctactctatttatttttttagtttattctgcagttacagagttgtgttatgtagctacagaataattgtttggtttacaccaaaagtatccttgatgatatggaatacattatttgatgcgtgacaagaaagatgacatctcgaagttgcgtagtcccgagacatagcaagtcgacctgggatgggtccctagccctgtgcctaggttgacttcgggagctccgggatggaatgttcaaacttcaataacttgaatctaactcactaaatttcagttgtttgtaccatgaaggcatgtactttaaaaacttccaatggatgtactttaagatacctaagtgatattttggcattacttagtttgtttctatgttctggcaaagctggtcaccacttatcgaaaatgttgttgttttatagaaatgagatactcgaaactctttatttttcagtgagtttaccatattgaaaatgagaaatgaaaagttgtgaatttgacttctctgactccatggatcttggttattgtgaaaaattaaacagacggtcaaaatggaatcggaatcggattagcagaacccaatgcaccaagccattgtcaacctgggcgatgggtacctcgatcctgagctctcaggttatcgttttgatacttttaaggttcttaaactcgagagtgaggtctctaaccctatttttgaccagtctagatttaatggtcaaatgagatttaatttttgagtggtcgaaaccaacgaaccaggttgatactgttatttttgagtgttccgtttagtgttttacggttgttttataaaaagaatatttttgtaaaacatttcaagtaacagtacaattataaatttttgttcaaaatttaatattttgtaaaaacaaaagacaacactcttggaagaaaaaaaacataccaatcttttttttttaaaaagacaaaaaaaaaaaaaggaacaaaaagtccatataccagtcgagccaccgttttacttgccgcgttgaattatacaataccaagttttttacactaccccggatttagaattcctagcaaataacaataataagaaaa

SEQ ID NO: 255766 - DNA, 1026 bp, Cannabis indica
ttttcatttcaaaactaacttccaaccattaccctttcgaaacccacatccaaaactcacaaaaactacctctcagccataatttttgccatcttttctttttttttttccaattacctcctttattagtttttttttatatctttcatttcgtatatataatggttatttcctgtggctttgcttctccatctttataaccaaaaaaagcttcaaaaatagatcataaatcagttgctaataaggctaaagggaaacgcccagtcattgacgatgatgacttcgattttcgcttcccccgtggctaaaggtggtcatcgtccaatgaagaaaaagttaaaggtgtctttgcctgaaaaaaaaatgtcaactctgacgcccgaaagagaaagaaaaagtcaacttcaagtcaactatgataaaactgtaatgcaacagttaaatctgttgcgagccaactaacataaaaatacaaaacaactaataatttcacatatttaatacaaacgaatggaagccaacaaatgaaattggaaatactgtaccagctaaggtcacctatgaatggaagccgatcctgtgtaagaattgcaaaggtatggggcatgagacagctgattgcaggaagagagaaggtaagccacaagaatgggtgattaaaaaggactccaaaaaaacaaaagggacgactggtgaaaaagcgcctgagaaagaattcattcaagtcagaaattgttggaaactaaaagagaaagagcctcctatacaaacagaaacggctaacactttcacagtccttgaacaagctgatgctactgttatggcagcagggggaatttgtagaaggcagtcaagagcaaaacacaagagaggggggaggaccctctcttgttcatggataaagtcattagttggaacgtccggggaatcaatagccagcaaaaacaactgaatgtcaagcaatttattgctctacaaaaggctggtttagttggtctcctccagacgagggttaagccttcaaaa

SEQ ID NO: 255767 - DNA, 537 bp, Cannabis indica
tttttcatcattttccaaccttttatttgctctcatggccgacccctcatgtgaattttccttatcctttccctacacatagtccttattgatttgatcactttgaattcatcaatttttcacaccaaaaacatgtctcaaaagaaattataaggaaattaaaataagactaatttggatttttactctctgaattttgacatatactaaatcatatttccttaacttttgaggtcgttaaaaattccctctaaactattaagattgttagatttaaggactattttctaattttcattcaattttgctaatttgtagattgtccatatactaaattgtgccctcaaactttaatatttacaaaatcatgccccctgacctttaacatgtacagaattataccccctaaatttttatccatgttagactttctttaataaaattggacaaaaatcctaaaatttaacaatctctatagttcgaggaaaattttttacgacttcaaaagtttaggggacatgatttgatacatatcaa

SEQ ID NO: 255768 - DNA, 518 bp, Cannabis indica
cttttaattactaaactaaaaaaaaaaaaaaaaaaattcattgcttatttaaaggaatgcttagcctcaacattaaagttggtattgatatctcaggaaaactagataattaaactaataacagaaaagataacccccaattcgtttagatatattatctggccctctaaaactaagactaaagatagcgaatttgagtagatccttttaaatggtagtcccacatcttgattcgaacgtataatcggggtaagttgaaatatactttttttttttcatcatttaaccaaaaatagtcttattttaaattcaattgaaatgtactcttttataagtccattattgattataccctctcacataagggtactgttcaaggaggtgagaatttttttatttttttttcattacataagagtataatcgggatataacaaataaaacaacttataaattaaatatatagaaaagaaaagtaaaatgaaatggaattaaaaaaaaagtatagggtgcaattt

SEQ ID NO: 255769 - DNA, 861 bp, Cannabis indica
tttttttttttttataaatcagccatttcattacaaacaaacacctttacaacctataagcaccttcaaaaaataaaggtcttaatcatatttatacaattttatttacaatctttacaacctttcaaaccaatctctatctttgtgcttaactttctttggcattacaagtgctattctattcttcacataccatttcacttgctgaaaaatttcagcagtagtcacctgttttgcattccaaaccagctcattccgagctatccaaatgccgtgaactagagcagccacaccagctgctaatacctgctttttgaagcttgagcatcttgcctttcggatccatttcagcagatcagtaagttcagttgttgttgtgtgccaaccgaaccatcccttcacctgtttaagacattctgcagcaacaaagcattcaaagaaaagatggtttgttgtttctgcagcattgttgcagaatatacaatcggcaccagcaatataaccatggtggaagagcctatcccttgttttgagtctatttagcatagctaaccatagtaggaagctatgctttggaatattcaatcttgaccatacttccttggaccaaggaaccttctcccatgtcggattaaaccagttcagcccctctgctattttataatcagcagcagagaaattgttatgctgcacacaccctctaattctttctttgagttccaccaatttcctccaataccaacttccactcataggggctttgtattcccaccaaacttgttgttgtatgtatacattgtgtacccatttcacccacaagttatccttctttttttcaatttcccatacatgtttgaccat

SEQ ID NO: 255770 - DNA, 711 bp, Cannabis indica
aagttcaggggagaaaattactaattagccctaattaaattataccatgtccttttcttgtttttatttgattcgaggttatatatttacggataattaagatttttatcgcttgaattttgatacgtaccaattgataaaaaaatttcctgaactattgataatattagattcaaaattttttgtccacgtttactaatggaaatctaatgtggatgaaaggtcacgagacacaattttgtacgtgtcaagaaaccatgtaaggctgtagatatagtgatcatgttttcttatttatctaagttattgttatatctgaaatttggctttgtaccattagctgacacatgtcttatagaaggaatgtgaatcaactcaaaatataataatgatgttgtatcattaaatgcaattaaataactcgttacaattaaatataagtttgatagaaaatattcaaactcgttgattgtttaagtcttacgcgagacaagaataataactattaaactggtattgacaagacatatatctgcctcgggataaacttattaaatacagaagaagaggatattctcccacccgagcagaataaaagtagcaacactgaactgtctcgcgttacacatagcatgatgtgttagagattttattacaatggaagaaaatcaagatattacaactctattgtaatacaatacaaggaccaac

SEQ ID NO: 255771 - DNA, 1057 bp, Cannabis indica
atgtgctaaaattaacctaaattaaatactaaaaatatcctaacaatccttctgctgctactcctacaaatcctgcctggaatccattttcaaattctcttacttcttcgctgactctcaaacttgatcgattcaattttatctcatggaaatccaagtcgttccaactgtgattggacacgatcttgacgaaatcttgttcaccggagttctaccactctagaaccttgttacaggcgcaccaaatctccaatacgatcaatggagaaggaaagatcagcttttcctttcttggctcagatcttccatgacagaaagtgttcttgcttcagtcgccaattaccaaagttcctttgctgtgtggcaagccttggaacagaaatttgccagccaaaccagggcccgtcgtcttcaactcaaagggcaattctcaaacattcacaagggaagtctttctatctttgaatatgttgataaaattcagtctattactgatgctctaattgttgttggttcacctgttagtgatcaagacttaattttacaactgctcaatggtctaggaccagaattcgattctgttgtctcagggataacgtcgaggagtgacaatctaaccattgaagaagttcaagctctccttctctctcatgaaagtcggcttgaacatcatcaatccatgactgatttgacttgagaactaaattttgaatcccttagtaatgagaagatgacttctatttataaagagagccattaaatagtcctaaaaaccaattaaccatgaaacatacaattataaaatagtaatacagggttgtaagtttaatttctctacactaagcccacatagcaggcctaactgagtggtaagtagagaagagttaacttgttcaatattgtgacaggtgatgttgtgagccaactatgaacacatggaaaaatatggtgtgtaaatctatctcaatgtttattatgttttatgagaaactcatttgccattggtatggaagagacaggtgggggccacgacagttagtgttcctcctagtgtcca

SEQ ID NO: 255772 - DNA, 2074 bp, Cannabis indica
tctttagaaaattggtaaaactactctaacaataatctcaactcactaacaatacaaataaatgagataattatccttgcacaatttatatcccaagaaaaagaattttaaatactatttcaatctggatattacatatatagatgttgtataatatatattttattttttttcctatatttttaaagattctattttttacaggtttttaatttctatttattaagaaaaaaaaatgttattttcaccttattttcctgtagccactgccacttgatgagagctcttcattttttactaaaaggattagagcttttaattttaattaagaataattagcaattttgtctcatgaactttagataatgcttattttgccccttaaaatatacggcttgttaaaaattctccctcaacttttacatttacaaaaatttagtcattcttttaggttccatcctattattcagtttaaatattgacgtatctttgtaaattatcaactttgccccataaactttaacaactatcgaatcgtgttaagctatttttagtctaaatttgtgtcactttttatagttatttttcttcttaattattatttttggaatagaatttttttttggtttcaggtttcgatacttggaatacataaattggtcgaattttgaaaaacagtgatctataaaatagagaaaaagtcaaaacataaaagttttagatctctttttcagctttcgaatgcattttgaatcagctcatttggggtttgtatgtgaaagttatgcatattttattgagagaggtcgaagcaaaaaaaaaaaaaaacgggtctaatggccgcaacgatggactccaaaaacaccgtttttttacttttctatagctgccccagcgagactattggtggccgcggcggtgactccgtacaggtcaaggataatttaatcttttctcatttttgggctgaaaaatgctatttaatgaaaggggttcgcgaattatagaaggagagacagaatggaaccctagaaacacaagaagaaagctcttggagcgagtgtgggcgatccgtgacaaccctccatctggtttcatctcttctcttgatttctcttgatttcttgttattttttttttttgataaatcaggacattatattgctcaaaacagtatttacaacctattagcacccaatccgggcctaagcaatctatacatcattcttttctataatttttacattatagctcattaaaccactctttatctacagccttggtcttccttggtgtaaacattgcaactctcattttaatgctccagttagtatcttccacaattgggttagaagctagggaagccccctcccatattacactatttctcagtttccatatgttatacaccagactagcaattgtagcaatatataccatttttttgaaacttcgaaagcttggctctgtcaatccatcaaagcaatatgggaaggctcgatgataccgcattccacttcagccagtttttaatttcctgcaaacagtccacagcagtaatacattcaaaaaataaatgctgagttgtttcagcatgagcttcacaaaggcagcagctctctttaacttgcattccaaacttgagcaagctgtccttagttttcaatcggtttaacattgctaaccacaaaatcatactgtgtttgggggtgtttaatctactccaaaccactttgcaccatctcggcccatcagcagtaggggaaaacatgttgtgtcctgctgcaatagtgtattttatttgtgcttaatttaattatagatttgattatgagctaaactctctatttagggatttgatggatattgactgagattattctatgaattaatgttatttgattgttctttctttctctattattgtgatttatacatatttgtgcttattacatgtgttggattggccaccttatgcaggatctataatctcaaaacaaaatctgaaaaaaagagtattgagaatgctctaaatgaaaaaacataagttttgatgtgaaacgagagtattcac

SEQ ID NO: 255773 - DNA, 2180 bp, Cannabis indica
ctaatgcataaagattacaagggaatgggtcgtcgcaagccacccattaacaatcatgagccatcccattgactcacattttcattgattatattaggtagactcacaattttgccaaaccaaatatatatataaatatatatatataggtgaatatacaagggaatcataattaataaatatcaagtatagtctcccccttaagtaacctatatctatacatatttatatcaccatatataggatatgtataataatgggttttgtttcttttcctttattttttttttcttttttgtgaacttataaattattaattagcttagaggtgctagctagcactgtttttgttcttaatgtttcttatatattctcaatgacataggttagataaaaagtagtataattaaacacatgtatacattaagtctctacttcataagcttttttgttgttttttttttctttctttttttcgctataataattaatatgatgtttttcttctatattgctatctctctctcatatattggcatatatactatatatctattacttgttctaataacctttgagctctttccttttttttttttgctataataatatgatgctttttctttaatattattatctctcgtattggcatatatactactattagctctaataacctttcacctttcttttagaaggtaattaaaaccactaataaatttattgaccttttacctctttgaaagagctcaataaaaaaaaataaatcattattcaacatttcaatcatgtcctatatatatatattataaatatgataataataataaagataaattcattatattatatattattagttataatcgtaaaaggtgtttaatgaatggatgagttatgaaaacatagagttgatacggttgaagtacaaacagtagtctcagtgagattaattaaaaacatcccaaaaatagtgaatacttctgtctttttcactttttttgaaaggaataatgcaccaaggtgttgcattaatatgaatcgctttattacaaaaatactcttttaatacataactttaaacgattcaaaactatttgaaatacaacagtaaattttaactagaaatctaaataagacatggaatgattctttatttttaaaaatatatgtatatatagtaagtgtgtgattttaaatattatgtgtagaattattaactgctaaaataaaattaagacactaccgatattttagatcgtttgtctatacttgacagtgtacatatcagaattaactttgcttacatactagcactttcctatctaatacctgtagagggaagtaaggggtgagctaaaatgccaataaaaaaatacttaacacatattagtattcaatgcatcataaatatataaatgttttaaattcacaattatttagtttcatacaaatatcatcatatcattaacgtattaagggtaggaacatcatactttaacttattacaataattaaaattacgtggtttactaaaattttatcatgtgtacattgtgacatgtcttttagacagaaaaaataaatagctaacagaaaggggatttgggtagttttgtcactaaaattttagtttttatggttaaatgttaaacaatataaaattcaggtagttttattaccgacaattacccttttgaataaatgaataattatttatattaagtattaagtttttaattaaacacattttatatagtttaaaattgggcttaattatcataataagtttgtgacatctaaatttagttgaaagtgaaaaaaataagataaataagttaggttcaataattaaggtactgactacaaattttattgatagaagttaaaaaaaaataaagtttaaatattaaaaaataaaaatacttttgttggaatggatttgaacctcaatattatatgtgtaaaataacttagccaacacatgtatggatctcctttgaatggcaattcagacagataacagtgatcaaatacttgcagaaagttctccatgtaaagcaccatcttgtttaaccaatcatgataatattggccacatcatccatattttgaatttaaataattaaattcaaacctagctagctattatatatatagggacacgattttgtctcata

SEQ ID NO: 255774 - DNA, 2996 bp, Cannabis indica
aattttttttcttaatcaatatttcagactccgaccaagtcgaacccagatccccccacagtcctggcactgaacctggcctcaaacccgaactcgaatttgacctcggatctagacccagtttaaataaaatcaaaaaataaaaataaaaatgaatttcacaggacacacttttattttctgtttttaaaattgaaaaacaaaagtagttacagaacgcgtttttgtttttcaaaaacaaaaattttactttcattttgtgattaaaaaattaaaaaacaaaagtgttaccaaacgacacctaagttttatcaatagtattggtgaatctctacaaaattgatgcaaaaaagtgtctctagtcgtttttattgtagtcttggttttgtgtacaattcaaatttaatgttgtgagataattttacataaattgcctaagatgatttttttgtcacatttttacggactataatttatttttttgcgggtataaataatatagaagaataaaatctacgtatgataaacaaaaaatttgccctaaggactgtgctaggtttctccttttccctctgaaattgtcagtgcttttttttttctcctaccaaggctcgccagccatttttggcctttggtgtggttctggccaggcatcttcaagagtgccctagcttaaggaatgggtttttcttcttcttcttttgtttaggttttgggttttcagggtctatttcttagggcaagggttggggtttcgtggtttgccggtgttggccatctggtctttgcggtgggtgtccgtggtgcttgatcgggcttcgtgggtgtggatatggtggcctctggtagtgggtgagggttagatctatatcttttgggtctggtttaggcattctggcgttcttgccgcgtggtgttggtggttaacgattggagttttgctttggtcggagaggaggttgatggctggagtgggggtttatttccaaaaattgaagctgaggaaatgagattgtgggggttttcagactgttgtgtggcatctgctatgattataatgttttcaatttattattgcttttttgttttaaagcttattttcaataatggtattgatacaccatcttgctattgttttggtagtagggctttgttcattcatggcatagttttttgtcttgcttccttttggaacgtgggagattctcaattgactcaaagaattattctagtgtaagtagcatgattatctttttccatgttcagatctaaaggattctcaaatttttattggccccataatttatggtgcaattatttgttacgattgttattactatgtttggtcatttgttattgctagagttgttattacccaatttttattggaggatctttagatgatagtcattgataggtgtgatttgtcacatgtatatttataattagtgcggtcccatgcttaagaaagagagagtgagaacttatgatcagttagatcaagggttgggcttgttggtggaggggcagcgctgatccgttggtgattcgaaagagagaagagacagggagagagaagaggagagtcttggggtgttggtcctttggggtttgacaataggtgcgacggggatggtgttggttcgacgatgggtgcgacgaggtgggcaaggtctgacgattggtgcgacggggtggcgtgtggtccgacaatggggtagagagagagagaatgttaagtttttatattattaggtttagttaataaatgggcttggcccatatcatattgtaatttttttttcaaaaaagtaagcctttttatcatcggttgtgcacaaacgaattttactgtcggtttaacaacccatgggaaagacctatgcattagttataagccgatgctagcatgcattggttacaaaaaaatcttacttttagtcacatgattgaaagtaaaaaggttgtgactaattataaatcatcattcttatattgtgactaaaaaatccatagctaaagatattagtcataaaaatgacagtttgttgtgactaaatgtatttttagtcataatacttattgtgactgaaaataaattagtgacaacttatatttaaatattatattttaatcattagtaactttttgttgtgactaaaaatcacatttattcacaaacaatttatgttgtcactaaaaatggtttgtttgttttttttttcttctgtagtggcacaatcaacaagaaattaatttctccactaactttttatgtcggtttcgagttttaatcgccgtgttgaccgacaaaaaagcttattttatagtaatgtaaatatagaataattttaacaatttattaacaaatcaatatcaaatataacattctactatataatattatattatagaatacaatattacttaacacaatattatacaatataatatatcacaacacagtatatatactaaaggaacccaatataaactagagtatataagtacgtaacgatcacaatggaagtaattaaatggaaaagacatgcatggaaacaaaacaagtagctagaaaccctagagtctagacgtatacaaaataaattcatcatacgtatacaatatatatacacatatatgcatttccataaacaaatcatatatatatatatatatatatcaataattcacatcacattatttggtcgaaaagcattatttacttgactaataagttattggacaagaaaatataactgttatatgatatttatataattatatacatatcaatttcgtgtgcagtggattatcgatcaagtggaatattgttcactttcctatggaaaaatgaggtgaatagtattagcacttattgagctttacatgaaaaggtgatcagatggggtaggtagaagtcatcactcacatatatatatatatatatatataatatatatctgcaagtgggattatatatatatatataattt

SEQ ID NO: 255775 - DNA, 858 bp, Cannabis indica
attaatttttctttaaaaaattattaaaatcgcgcgaagcgtaagtaaattttcatcagtatactttaaggtataaatttcatatctacataatttattaaagttcatctttttaagtaaacatttcatataaaaaatttgactaacatttttatataaatcttttattttcagtttataaaaatagataatattttgcgacccattttacagttgttatctagctatattgacatttatagagaagaaattcaaacgaaaccacaaaacaaactgaaaaaaaattcataaacagtagataaaatatttcttttattgaaaaaataatctaaatattctttgaaaaataattgcatcatcaattacaagtccagtttatatattaaagcaaaaattgttatcttttattttattttaaaaacatattgcaattatttctttattaagtctaccattttttatatttatcacaatatcattatttttctatatattttaatatcaaattatgtttctagtttagggttttcaataatattactttatttattacatgcacattaaagtattatattttaaattttattactcaataaagaaaaaaatatatataaaaagattatataaattggcatttaattctttagttatattgatgtatattgatattggacaacagtgatgctttatactttctagacgtatcttcttgcaattgactagggatattctttaaaagtcattatattaaattatatagtacacaatacttgttggacacaataacaatactgtaggaaatagctggcagccgaaatgcctaaactacccccactccaacaccccaacgttcataaa

SEQ ID NO: 255776 - DNA, 948 bp, Cannabis indica
tctccacaaagttattgaagatacaaaatcttttaacactctcggaactacgtttgacttgattcctataaaaggatacgtaggcaacttagttactaagactaagtgcagtcatcgataccgccaaatggtataaaaataaaaatcttaaaattccatgaaaggtcatctacctaggaattcttctaaattttcaaatagcaaagaattcttgaaagtggtcatctaccagaattcttatattcaaattcaaaaatatcgcattccgaactacaagtggcttgatccttcacaaagaaggtatgtaggcagctcggttaatttaattgactgagttcagccgcaattccaaatttacccaaatttccctaaattatttcaaatctttaatatcattgtaattggaatcaaagggtatttcatttaaacaaaaggattgtaattaagatattattttttataatcttgatgggtcgaacttaaattaataaactcttatgctataaatttagcataaatgaaattgtgttttgcatttatttttatataaaatttttgcttaaaaccttcaactattgtttagcgaggcattgaatacaaaagtttttgtgtctcatttttgtcagttggaagttttccgtcgagtagatagttgattataggagtcatccatgtaggtgagctatctatcatcttgatgtctttcttttcacatatacttggctcgtttagaatctccactagaaccaagtttagttcattgaagtcgttctgcgaggcaagttttgctaaggcatcaacattagagttttgttctcttgggatttgctcaatatcaaaataattgaatctttccaatttcttccgaaccctctctagatacttagcaattttcaggccattagcctagtattccctgaggacctaatttacaatcagttgcgaatc

SEQ ID NO: 255777 - DNA, 1268 bp, Cannabis indica
tggaatcccctttaatccaattaactttggatttttgttgcagaaaagaaattagtacttcatgcttctcagcatactgctcgcgtacttctttctcttgctgcattagagaaacatttaatggatcctggttcagcctttgttggcactcattcataagctccttcaccctcatttcttctccttggacatcagcaaaaccttgcttgttgattgctgtcaaaaccggtttgagcctcttcagtttggtgactatttgatacattttagttcccacaaccggtaccttccaacttttagcaactttatgttgatgatgaggggaactcgaccacattcgaaaatatttaaatggttttctaccacttggaagtgagggataaactgtcaatattacgggggtgtgatcaaagagaccctcctgcaagaaaattgcttcagcaaccgggtacatattcagccaactagtatttgccataactctatcaatcttggagtatattctatcatctccttgttgtctattattccaagtaaaataactccctccatatttcacatcttctaattggcacttgattgtacactcacggaaagctgttggattaaagtgtgctctcttcccaattctttctcccttctcaagaatatcattaaaatccccaagcactacccatggttcatttgttctcaaaccctctaattctttccaaagaagcctcctatcctcttccttgttaaaaccataaataaaagaaactaggaacttattcctattatccatggttgtaatcgaaagatgaataatttggcttgagcaaaatagtatgtctactatgtaactcaaaggattccatgctactaaaattcttctccctttatgccaagcattatttgccgtaaaacaccaattggaaaacattctaacatataaggctccaagatttgaagccttaactctcgtctcgaggagaccaaccaaaccaacattatttttagcaataaattgcttaacatccatttgcttgtgttggttgttgattccccggacgttccaacttagaatcttatccattgtttaaaggaggttctccccctcctctagttaatatctcttcatgcaccccatctgtcacccgatcctctttcttctgcaattcataatcttccccagtctgtaagacagtatactgattcgaagtagaagcttcagcaggagcatgctgatttttaggcctccaacccttcaccacccggttgaaacccct

SEQ ID NO: 255778 - DNA, 1231 bp, Cannabis indica
gtgtccataaaagttaataccacatatagttttatgtaaaaatattgcataaaatataattcaatataatacaatacaatacgacctaatacggcgtaccaaacgagaccaaatagtttaggactaattaaccaagacaaaatggtatatattagtttattgaccacgatgatgtgccatttttatttaaatcaattaatagcgcataacatgggtcatgaattttgaaaatttaagttttatgacaatattaataaatattagggattatttcacaaatacacaaaacaacaaaaaaaaaaaatataaaaatataattttatggaattttaaatatttttacgatttctttttacaaaaaatacagtatttttatgttgtactcttgtttattgttttgatattatttagatgttactttcatgtcatttttatgtaattttcttgttattttcatgttatttttataaaaaatcgtaaaaaatgtaagaaaaaatctttgaacgtaaaaatgtaatatttttttataaaaatagtgttttatgtaattatccctaaatattatacgagaaccaaattatagtaaagataatgaaaatttataaagatcgagtaatagtattaaccaaatggtcaattgaagttcaataataccaattttttgagctttcactattaattttcttactttttctaataaaaaacatttgtttttttgttgtcttttttcttttctggcttttaataataataataataatccataattgttttgtgtttttttagagaaaaaacctcataaagaaagacttcaacaaaagggcggaaaataaaaaagatcattatagaataacaccagtcataatttttttttttttttttacagtttaaataaaatagtcatacttgacttgtcaaccagaatattttagttatttacataaatattaaagtctttttttcatggagtattgttcaatcatttttattaaataaatagcaatttgtttttggttataaattttggtgataaaataaacaaaaatacacgaaataaatacaaaaggtggtgggtacaaccgtagacccaataacaattaagtgataaagtgtgaccaagtagtagtacaacccaacccactctttcttttcattttcagctaaattaaatttatatatttcattaaaaatcacttatgacttaatattaattttaaggctaattagtaat

SEQ ID NO: 255779 - DNA, 1432 bp, Cannabis indica
aggatccaattggtaacttttgcaaaacacaggtccaaaatgttatttacccaaaatataattaatattatccagtaagattttggtgaggttcatcgaagcaaactaagaaaatatattagctagtgtaaatgtgagagtgttggaggtaggtttgggggtaagaagatcattttggatggttgtcaaggcttcgcgctttaaaagaaattatagaccaattattcttgaacaattttatgttataagcagcagaatggaatgtgggatgattattgtgttatttttagtgttgaggatactcaaataatattgcaaataccaagtacaagatgggagctcaaagataagattctttggtattatagtaaaaatagagaatatatattcagttaattaatactacaataataaaggtagatcaatttgacgatcatcatgtgttggcatggtggaaaagtcgtggaagctaaaaataccactaaaggtaaagcactttgttttgtatggaagatgactcatttttggtttcatacctatttggcccttgctaattaaggtgttcaagttgaacagagttgtgctcaactggcccttgctaatagaaaatgtgtttcatgcattgtggggttgcaaggcaaactgagctgtatggaagctatgtggattaaagaaacaagtacaacatgtggaggagaagatgtactattttttctaatgagattatcaaagtcatgggatcaaactatgtttgagtattttttttggttctatcatggaatatttggtttgttagtaataatactaaataaggggttacccaccacaggcagaggagatgattgattgggcttaaagaaagggagcatcaaagggttgctgcggtttggattccactagcttttgaggcattgaaaagatgttaatgtgaggtgaggtatgagctgatctggtgtgacttctgttattcgaaattgagaggggcagatagtgtttgcttcatctactctagcatgaatatcaaccattgtaattggagctgttggtgattcatgatagtttacaagcaagaattcaacgagcattaccaaggtttaacattgaatttgattgcctaaaagctgtccaattaatccaaaataagacggttgtagggaagttgatggtgtgctacgccatttagaaactgttagagttttacgctataaataaatttaatttcaatataatcttatttatgatcaagatcaaaaaattatattttgacccggtccggccccgcctactttctccatcttagtgggtcaggcctgacccaaaataatcggaccgggtaggcccgatctatttttttttaaaaaaaaaaaaaaaaaaaataaaaaatacagcaaaacatattataaattctctcagggaaacttacaaaaatact

SEQ ID NO: 255780 - DNA, 594 bp, Cannabis indica
cgaatttttgggcagaggaccttcgagaggtttaagtcgtccaccgattggctccctgaaatgagtttggccttccagcagttctcctttgtaaccaggtcccccacgttaagaccatttctatcaaaagtggagaaaaccttagcatgctggaggaaaagctgggtaggagcagtgcgatgcagtggggtgatcctgacctacttcgtgagaagctatgggtgatccacgaccaagaagccggaagagaagaagaaacggttgtggtactccttaacatttttttgaaaaattataaggaaccgcatcctcattagtaggatgggcccggagagtgaaaaagctgtctttaaacttatcccccttcttggggacagatacaagttcataaaaatacaaaatttcagccgggctaggtgaagcccagccttgggctacataaaaaataaataagcctgagagtaggcggcactactacaaaaagtacaatttttgtcattttttaagtgtcatttaaagaatttgcgtcggtttaaaaaaccgacgtatataccgtagtcgcaaatagttttttattagcgtcgttttttaaat

SEQ ID NO: 255781 - DNA, 7299 bp, Cannabis indica
aaaatttattaataacctaaccatgttattccaagatgaatttcaaaacagaccaaataaaaactttctcaattgaaattcacacctaaggtgttgtctggtttgaagtatgacaacaagggaatgtgggatggaaatgagagtacaataaaatttaatgagtaaaaaaaattattgtgcattgacctttttattctatcaatgtagttttaaatgtcttaaattggaccaaacacaatgaaatggaaatgaatctactgcacaatactgcttttttcaattaattttttttattcaagtaaaattttattccatgtctatgactattctcgttgccctctatgtccttatttttattactcttaatggaaaaacacctaggtgggttttgaaattttatacacgggctgccttggttagttaaggctcgggtttcaagcaattaggccaatgtaggttttgatatgttcttgtctaccatttttgtctttcttatctctctgcaccataggaaagaaaaggatgtcataatagggtactacaggcacatactaccataaaataatctatccttataaatcttcataaaatgaaaaagaaaatataaattaataataatctagcaaatgaagatgcatgagtaatcaagtggttggaccctaggttgagaaaataataatgattagactatgctagcttgaaaattattctattattaagtttgaattgactgtatagttttttttttttaatttttaattttggaaaaaataatattgtatgtttttagtggaattattaacttattatatcacaaaaaagattgtgttttttgattttatctttcaagtaaaattccctgttttaacctaatattttccctttccatatatattatttaaaaattagggatagagtgaaaatgtttcatgaatcactattcaaattggataagtacaaagaagcattaacctcgaagaagcggcaaagaagcgaacttttatcgagtgagaggtccagcggaataaatttgataaagggtgggagccagattcatcgaacttctcacgacaccattgtgcaaagaatggaagacagaacaaagaatggcatgttgaataaacgcattcggacatcggttgcagatcaacgggtgagtactcaaagtacatgttgttcttgaaattatcatgtttaaatctttagggctttctattcactctcaaaatgttatcaggcagaaaatcggccaagtattaactcaaggcagcaaatgttcgctgataaggatggggctacccttcagcctgccagtgggagctctggaagaattgaagaaaagactcgcagattgcttgccgggggtgaaggtttggatcaaaagataaaaaagaaacgctctgtgggatctgtaggtagcagacttatcaatgctgatcgggatataaaacgggctgctcattcaaagctgactgctgaggctaaattacgatcttgcgatactcatggtttcaggtattgctatttttacatatctaactgattcattattgaaagaaataaaatgattaattattgatttctcacatttttcaaagttaaaggctttggtcgattatctttcctagatcttgtcaaagattggggaatttttttgcattgaaaatgttgtttttttttttttgttcctttgttcttgtctgttgtttttaggtttggttattgtaatttatttgtttttttttttttaaattctgacatatctttacaatcagaggacttaaatttctattatacagcttctcaaatgggaggagagaaaatctgatgctagagacattgttgttgatttttttctttttctggtagatataatttaattattgagaaagctgttggttttggaaaactcaaaatgatagctgttaagtggaattgtgtgatgacagctaccgagtgtgggttatttgtctggaaagagatagtcggatctttagaaggaaaagaattggatgcagctctccctgagaaaatgtcaaaattttggcttctcttcgggcttctgcagggaaggaaaggatattccccttcctaagacttcgttaaaataaggaaaacattgtcataaaaaaaagtgaaaaaaagatagcggaaaatatttctcaaatattgtaatttaaatttttttcttctcattttaaataaatttataaaaaaaatctaaaaattttataacatgacaccaaattgaactctcatatcttcaaaaagagaaagctttttttcttttttctgttggagaatccaaacaagataaataaaattctttcgacttcattttttttccttcccaaggttagcggatccatctagattgagtttttgtttttgttaggtgatctgttatagttttctttggaaagatatcttatctttcttgctgtaatctcattttcaatcaataaaatctttgatttctataaattacatcttataaaagatgtcgatttcaatttgtgaacatataaagtctgcataccttctgcctacttttttatgccttccaatagtttacattttcgaacttaattatttgtatggagtaaatgaaggaaaacctcattaagttctgtaaatttcagattaaaatcttcagctggagttggtggaatcaacaagttagatagctcatacgagccgagtaattcagattccagtacagttcacaagagtgagcacgagagtcccacactttcaagggatcgaatgcccgttttagagcagcagaacagttttaaaggaagcaataagtaagccatccttgtcattactcactattatcattataacaatagatgggctgtgtttaattgaattgaaccatttgttgttgaaacttgaaggctgtcgaataatgcttgtgttctatgttacaatttgtttttcctagtaattgcaattgggtttataaattgtttgctgttctgtttttcaggcccaacatgcaacaaaataactctgtagccagtcctggtccagttccgaaaggaaaggtttccaaggtacaacggattagttctgttatggctctagattcagctcctggtgctcgtccatctgtacctttccaaggatgcgaacagccaactgttttaggtaaagctgcagtgtcgggtattgctgttaatcagaaacgccaagtatctgtaggctcacctatacatcctatgactcagtgggttggtcagagacctcataaaaactcacgtgcaaggcgaacaaacttagtttctcctgtttcaaaccatgttgaaactcagatttcatctcaaggatttggtacttctgaatttagtacaagagcttcctcgattggaaccactggatctgtgctggttagtgatgtagataacattagcccaaaatttaaaggcgaaactgagaatgctacatcattatatgggttttctgaaagtgaagaatcaggagctggggaaaatatgttgaaagagaggaaaattaacagcggggaagcttcaatgaacacctctcataaagttggaggttttgtaatgcctatgaagaagaataaacttctagctaatgaaggtggatatggtttgcaaagacctggaagaaatggaagaggaccgtctttgtcaagaccaggaattcctccagtgaaagagaagtcaaagaagctgctagcaacagaggctattcaagatggggttctctctcctgagaaaagtagaaggtatttcctccctccaactaattgaattgctatggataattatggctcatatacttactgtaactttcctgtttgtttcttggtctttcagtaaaactggtcgtccaccgtcaaaaaagctgaaagagcgcaagagtctgactcgtcttcgaccaatgctatctaatggcagctcagattgcacaggtaggaaagaactatcatgtggcaaagcacaaaaaaaatagctgcaacgagacttatttttgcactattgttgactgaagtattctattttatagcttaaaatcgagctgccctttcatttgtggcataagggactcatgtaaaactgttagttcagtgatcattggtcaagaatgtggcatgttcttttgatttgctcattttaatgaacaccttttttttatataaaaaaaaagtattttgtaattttctctggcacatctggtgaactgcattttgtgtagatttgatattttcctggttgttagaatgactgcttaatatgtttatgtacattgttttccaggtgaatctgacgatgatcacgaagaactttattcagctgccaagtttgctcgtaatgctagcagtacgcctctgaactatctatatgcataatatgtttattcaggaaagcaacatatctgatgcagtcctttttacactttcataatttttttttgtaggtcatgcctgttctagtgcattttggaagaacatggaatgcatttttgcatctataagctcagaggatgcatcctacttgaaacaacaggtattaactgtcatgtgataatcccaagtccccacgtatttcttgttttggaaaagtgttcagtttgagaataatttgttctttctcgatattttgtcagctaaatgttgcagaggagcttgagaagagtttgtctcccatgtttgtcgacgaattcaaagttttggtattgattacacttaaatacatgtgctttctttcttttcttctttcccatttatttgattttctgctgtactataatataatttaaacaagtataatttgacatgaatggatgtttctatactttaatcatcactaccattttttctttcttaacgaaatggttttagtggaagttgtatgagctgggtaatgctgactatctgttcatattttgcagggtgtttcagatgagggatttgaaaatttctctgggaacagatttgatgctgtgtgtggaaaatctgagaggagaagatttgataaggtcactccattgtaccaaagagttctttctgctttgatagaagaagacgaaggtgatgatttttttcaccagagtgaaggaaaaatcacctatttgcaatacgctagtgacgattctcattgtggctcgtgtaaccaaattgacatggaatccaaagataaggacagaatcgaaagtgaagtagagtcaaatcttggttttcagtcgcagagaaacggctttatggaccgactttcttgtgatagtagtgctgcaactaacacattgaggaaccgaggctattcgagttctttacatagcaatgaacagtatcacggagactatgaccttttacattctgatgtggttcatgttagtgaaataagttcgaacaatttcagtcaactacaatctcgagatatggaagcttctggctttcctccatctgactgccagtatcagtcaatgtccatcaatgacaagatcctcttggagcttcagagtattggtctatatccagagataatggtaccctttcactttcttccatagatttatttgttatttttaatttatggcaatttatatttctaatcatgtttctgtatcacttgccttgttgcagcccgatttggcagagggagaggaagttattaatgatgatataatggaactcaaggaacaacttcatgaacaggttgatttttcgaactttataatttatgatattttagttcagtgtgattgatttcttttgttcattagccatatgtcacttatcgtatactgtcttattatgttgttgactaataggttgctagaaagaagagaaacattgggataatagataaagctgttcagaaagggagagatgttgaaagacggtagaattcacaatgcttttgatgtttcattaatacttaaatattcccactcatgcttccgtttacacgcatttcttttctttttattctgttttaaaatagccagtaacatgattgtatcatatgcaggaaaatcgaacaagttgcaatggacaaactgatcgaaatggcctacagaaaacgaacggtaattgctttaatcctctacttattagtccttttgtttatgctatgtgttgtgaggtttggtttcgataatgttgtcagttgtttggctgattccttagtggcacaagttgggttctcggttagcccatcttgtatctaatatctgtgcgttatgctctgcattttatgttaataatatccgagatgtgtttgtccttgaccactgtttctgcattttcgaattgattttcaggcgtcccgtggcaatagtgcttcaaagaatgctgtccgcaaagttccaaaacatgttgcatcggcttttgtcaagcgtacacttaaccgatgtatgaattttgaggaaactggcaaaagctgctttagtgatcctgcacttcagagcgtattgtattcttccaacaacgatacgaaatctgtcgaatgcattgggtcgggaactgctagtaacacatgcaatgaagtttcgtatcaagctgatgttagaggagcaggtatgttcagaccactacatgaactattgcatactcgttcgcttttgttttttatctttaacttactgatcaatttcgctcggtgttacaggtgggctttcttgtgcattcgaaaggcacgagtctcatagcgacagtcttgatattcactcctccgagcgaacttcttacaaccagggattcactcccaacagagttcggaagagggaagccctgattgacgatgttgtcgggagtgcttcttcgagggtaacttctgctttcgacaacactattcccgaggcaaagggaaggagaagtgatcgagataataacttaagaaacaattctctttccggaggtggtcggtcatctttagacagctcccagaccgaacgcaaaacaaaaacaaagttgaagcaaaagaacactcaaaacggaagattcatggaatcaacagaaactcagttcaatagaaaaaccgaatcgaaagatgcagaggaacccggaatcttccctaatttaccgatcaacgaaatagatccaatagaagacccaagtgacctcggtggaaatcaagatctgagtacatggttgaactttgaagaagacgggttaatggaccatgactcgatgatcggtctcgaaataccaatggatgatcttgcagagttgcagtttatttagttagttgagaaggtatcaagatgtggtgatgatgatcaaatgtattagcacacagtccaaccaataaaaagaagaaaaaaaaa

SEQ ID NO: 255782 - DNA, 609 bp, Cannabis indica
caccaaaagaagaagaacaaacactcccacagaaggagaagctcaataacgagcagactcacacaaggagccaaccagaaacaacaccgcctaacagtaaaacaaaaagacctctgactaaaatccaggtacaaacaacaccccgaccttaagaagaagccacatttaaccaaagggtcaaaaaaatagacccggaacctcaacatttttagtggctttgctccagaaagagcaaaatacatgaaacacaaaagattccaaagacaaaaaaaaaaaaaatcaaggaaaaaatccagagcaaagaagagaagcccacaagtcatatagagaagagagccccaagacctagaagttggcaagcactagacactagacggtagggaaacctaacaatgcctcggaatgaaacgctacacaccagagaaggaattgtagtcaaaaaaggaaatatagctggagaagatatccaagagggtacttgggtaccactgacagtcaggttgaagacgactaggaggcttcctcaaccagagagactcagagttccccaagcaatttcaaaatcgcattctgtacggagaaggtctcaaaatcgtgcaaaaagatatg

SEQ ID NO: 255783 - DNA, 794 bp, Cannabis indica
tgctataaactatggaatataatcaatccaaataaaaaacagtacagtaaagttaagcttctaagtccttgaaccgaacttctaactttgactctattcttactttcgcctatttatgcaccaatctatttgttatcagacaccaatcaactcaaaccctgttccccgatgaactaataaacaccatatagcttactttttttcttctccgcatctcccattataatttaacaaaactcaaacttcagatccaaataccaatgcagcagcatatgagaaagtatatttcaaaaataaactcgataaacgaaaagggtatgatcatcttacatctcgactcttcctcatcctcatcacaccacttgttccaatcaactttcaggtaaggtgctggtttttcttctgttttcaataatcttttccaccaacctttttgttctttctggattgaacatattatgttccttaatccaggttttgtcttacaaccctgcatcagtataataatatgaacaattataacagcaacagaatcaaacaaataacagtgtcacttatgacttaaccatcaacaaaaataaagaagttcggttaatagtctctaaaatttatctcagaaacagaataaaagggtatccaaaacatagtacagttcacaaataaactaaacacaaatctctgaataaataactaacataagacatctgctataaactattgagacattttacacaacccaatttgatttgactttggaaaacctcatccaccatgaataggggtataatcaactc

SEQ ID NO: 255784 - DNA, 607 bp, Cannabis indica
gcgagatgcaaatctctttttcgggtgcttttgtatttttttattataagaccttccaatgaatctaggaccccaaaacaaccaagaaaagccaaagaaaatagccacaatagcctaaacctgattgtcttcttccttggcagtgaatcgttaaaaatagagtctaaaaatggtgattttcgttataggctttttaactttcattcttcacatccaaacatcttctaggagtcccttaagcttaaacacaatcttctttaaatctaaaaaagactcaaacacgtttgaatccaagattactcaagaacgtgtacgaacgtgcatgaaaatagtgaattttgttcttggtgttcacagactgtttcaatgcattcaaacccctccttggaacctaagaatcccaatgaaaactttcaaaacaacccagagttttcctagcactcaaaaaaaaaaaaaacaaaaaaactaacatgagaggaaaagaagactcactcctaatacgcctcctggacgttttcttaatccctaaacgtaggtgtgtaatcgtagtataaataaagaataaataaatataataataactgattagattgaacgagttactccc

SEQ ID NO: 255785 - DNA, 564 bp, Cannabis indica
tgacgtactcgtgtataagagccattattccgtaagtataagggtacaataaaagtttgaaatagaaacgttacattggaacaaataaaaatgtactagaatgaccattttacggggtttacgtacttttataaccctaaagctgttatatcatagtagttgcatgcgtatataaattaaaataagtagtacacatataattagttgtataaataaaatttattgttcttagtattgtaaattattagggagcagtctgctctcatatattcaagtaaagaaatgttaaaagacaccagtagtgccaagtacctttttacgtgttaatatcgttattggtctaattaagtatcagattctatatagtttaatataatagcttttagtgaatatcactagccaatcgcaaggtgacacgtgttaagggtgctaggcaccactgatgctcaatagcaatagtcattcaagtaagtttatctaaaaaatttgctattgccctcgagccacattctttcttagagtcggtacaaattttttaaaaaatagtttcatataaaaaaaaaa

SEQ ID NO: 255786 - DNA, 706 bp, Cannabis indica
aaaaaaaaaaaaagaaacacttatatattaatgaaaacaacttttagtaacagtataaaatgcgaacaaaaaaatgttatgaatataataatgaaaaaacccttaattttaaaaaaattaataattataataataataaaataataatgaaatagccatttttttatgtttgattttcttatcaataccaaaattgagttataacttgcgagaatataattagattggtctcaataataagaaaagtaggttctttctcccaatagcattgaaaaagttattctccatgatttcttaacaaaagaaacaaaaaagttattcttaaacgatgtgtggtaatggaatggcttttaaaatggaaacaaatatttaaatacataatatttatatcaagtgggcatataaatcctgagataaattaaagtcatataatataatatatgtacatgtagatcgattcaattatatatgcatgtaatattgcgtagtggaaccttaatattataaatatatttattctatttaagatttttgtcactctaattatgatttatgtatattgtgcttgttgaatttcttcaatccattaaaaatggtctttaattatttacagtattgtaaattaatttttctaatagaataataatatacctatattttgtaaagcgatctgtgcgattttatctttttgaggctgattgtaatt

SEQ ID NO: 255787 - DNA, 2284 bp, Cannabis indica
gccgagctccgagtgacggatcgggttcgggttctacaatcgcgtgcaaaagcgcgtgcgcggctttcaacgcgccggagttttgctgcactcggggataacgcgacgccgcaaacatgctcgccgactcagtactcggccatgttcaagagcgcgtgtccaaccgcgtacagttacgcttacgacgatgcctccagtacctgtacctgttccgggtcgaattacttgatcaccttttgcccaaccgggtcatccctttgattaattaattaattattaatatatatattctattgtaggaagctttcttaaattaaattatgtgttagtacgagtttttttctttttttttttaggtaaagtagttagtacgaatttaaattagcattcctatgtgatcggataaaactaaaataattttatttttttattgtattggattggatctgataattaaataactaagatctaccgtatcattgacattaatttattatttacgatattttatcttcacatttgttttcattattggcattatatttacatataaaaaaatatgagtgtacttttaatttattatcaataaatggatattattaaaaaaaattaagagtttttatgtttaatttttttttatttaattaaaaaaaaattgctcatttttattgtttcattgattgaaaaacaattgaatttgatttaaatatttttattcaaacatattttttatatagtgtaaaaaaaattgatatatttttaaatttagtaactaaattaaaaactttattattcgctatttaatcaaaatttaataatttaatattttttttaaaaaattattatttataattaaatttatttaataaaataataacatgtttcatatgttttctttcttcttgggccaaaaggcaacaatcccgtacaaaataaataggtcatatggtttgggattttgaaataaaataaaataaaataaacaaaattgttaaacatggtaatctgtttataaatttcgaattttattttaacataattattaaatgtatggttaattaatattttatgcaaatatttacttgaaataaataattctttgacaatgcaaatacaaattgcacctccaacttgagtaaaagttatgatattttttaaaagcaataaaataaatttattgaaaatacaataacattatacaaactaaatatatttgccaattgcacaaggaaaactagaagcttgtcacgaggcaaaagtcggatgaacataaaaagagagaaatactttttctgacacaagatcaaatcttatcctatgtgtcagaccatagtagtgtgtgtaccacctctgaatatgcctttttgtctgacggctcctctgagcgtattgtctactaggtgcaacctcttcccgacacgtgccctacaccaacagtggtgccatttttacagaccctttgccccacgagaaaaaacctttttaagggcccaacagtctgtattcttatgtattttacctcaatagtgggtggggtttttacagaaaatcatagacgggtcatgggtatacttgtacccaaacttcagcctatataaacccctttatttcttcacaaaggggggatcaaaaaattacatagctgaagctctgctaaaatactctctaagctttcatcttcttcaagagaaacatagagaaccagagttagggtttttagtatacacaccacttctaatacattcaaatgcctataaggctaatatactaactcatggactagggataattaactttcgaactaagtaaaatacctttgtctcatttatttaatagttatttaattcctaaagctttcacttaattagttttccaaaatctcggtaaatattttagttgccttcattgagaggtgagaaaagatttgagccattacatttcttcaaccatggtggctgcacaaaaaaaatggtgatagaaaaaattcctcaggcagaccacaatgttgtcatggatgatgtaaaatctcaccctctgggcactcccaaccgagccatgtgaggagaggatacatctgaagttggcaacataagggatgaccctgatcgtcatcacaagcaagttgaagatgaagaccctaaagtcgagggtgacgtggaagaagatgatgggtacgtcaaagatagctactataaagatgattatcattatgaccaagaccgagatctggtccaagtgtccaacaaactacttgtgtaatgaccgcttaattttagtatgagaa

SEQ ID NO: 255788 - DNA, 1275 bp, Cannabis indica
ttattaggaaagtcacgatcctcgagggaaaattcaaaccctttacttccatcgttaaataaaaaagtgaacctggactagaaatattactatttatgcatacatatcatagagagatcatactaatctaaaaatgtccaacccacagattgatatacaatcaatataatgataaacaaaacaagcaccttatataaaatcaattttacaagtatatatacattacctggtgatgctgtgtgaaggaggaaggactgtgatttcggcgacagaggaagatctacgaaaaaaaaagtcgagagagcgagagagagagagtctggtagtggtagtagcccatctccagagagagtgtggaagaggagagactgtatcgaggaggtagtatttattttgaaaaaacggggtaaaacataacaactcccatttctgtacaaaacgacaatatcatattttgttgtctgtagagttagttatcagtctagaaagcaaccagagtgacgtactcgtgtataagagtcattattccgtgggtgtaaggcccaatggaggcttgaagcgggaacattacacttttagtcgcaacataaatttttttgtgactaaatgtgacttttagtcacaataaaatgttactgactaaaacatagtatttagttacaagttgtcacaaatttagttttagtcacaacaaatactgtgaataaaaatatatttagttacaataaattgaaatttttgtgactaatacctttaatcacaaactttttagtcacaacataggaataataatttataattaatcacaatttttttccttttaatcacaacttttattgtgactaaaagtaaaattttttgtaaaataattgttaagtgcttaattaattagcaataatttttatatttatgtgtgcggttgatttagaatttataatctaagacaaactggatattctactttcaactctctaattcattaattgaaactcttcctaatttttttctaatgtaaaataatgttcatatatttcccgaacttatttgatataaatctcgatcttatttgacatatatcaaataagctcttgaatcaattgtctcttagtaaaattagatgaaaattcttaaattcaacaatttcattaatttgggatttcaacagacttaaaggttggaggtacaattttttgtatatgtcaaagttcgaaaaacaaaaattcaattttttttttggaactaataggtttttcttaatccttatagtgtcttgtt

SEQ ID NO: 255789 - DNA, 3168 bp, Cannabis indica
gctaaggctttcacgaaattttgtaaaaattatttgttttataaaaaagaattaggtagtgtgtaaaaaaaaattataaatgagtaactaaaaggctttctatgaaacaattgtaacatcctcaactttcttggagttaagagtaaaatgaaatgaaaatgaaatgtacacattcaaagattgtcatattggtacttaaattgctagagagaaatgcatgttttttacattgtcattccacatttcatagtctgatccaacaaagacacaacctcagatatgctcggccgctcggcgggaatttcctttagtgcaagctcagctatgtctgcaagcttaagcaatggttcaacatttcttggaagagccacattcttgtcaacagtggctgctgctttccctctttttattaatggcaatgcccaattaacaattcctgcagggctgcaatccctgtcataagctttccttccacttaaaatctcaagcaaaacaatcccaaaattgtaaacatcactttccatgtttacattttggtccttctcagtagtagtagtacttagcagcccaaaatctgaaatccttgcaccccattctgcatcaagaaggatgttagaagttgtcatgtcaccatgaacaataggtggcttggcttgtttgtgaaggtactcgaggcctttcgcagcctgcaatgtgattttcaaccttagattccaatcaagaggtgaaagctctccatggagatggtcatatagggtgccatgaggcatatactcataaaaccaagtaatcgttcccccatctctgcacatatcccacaagtttacaatattgtgtgcctcatgttgcagagtatttcgagttctgcttcgaattcctttgtgtttgtgtgaattatggtggctgcattagccctcttgacagctacttggttgccatcagagagaacagctttgtagacaaaaccaaagtttcctctgcctaactcattatactccttgaatccatgagtagcatctttgagctcggaaagccgaaacacttgtgttgttgcaatgcaggtttgtaaagaaacagatgtttgtgaattagtttcagggtcagcctctaccgcctgctttcctgcacacaaaaagcaacagcttctacctttttcttgattctttgatctgcttattcggcttaaaagacaccagcaaatcagaattagtaaagagcccgagactaatgaaccaatgatgatcactaatttcttcatgaattcttgtctatcttggtctcgaatcccggaaaaaagatgaagaagaaatgttacatatatcccaacaagaactgttctggcaaagtgaacaagcagtgcatactctattagcattctcagtacaaatgctagaaggaaaaaggccttgagagcaatttgttccacaaggcaagcaaattttgacatcgtttctagcacataaactagtcaaacctgcttcattcaagacaacactagcattaaatgcaaatttccctgaagcacacgagcccggagagcacactcccgggctacacaactgcaatggtggggtgtaatcttgcttggattgaccatgaacaccccaacaatcaagaaccaagtcaacctctctaaccccacaagtggtgaaatctgaagaagcaattgccataaatccatatccctttggaacagacaatggggattgaatacttccccaacattggacactatgatcgtcctcaaatatcccacagtagtgtttagctccaactgataagctcataaatcgagtcccaacaggaggagaatcaaactcagtagcctcaccccagcatttgacttcaccactcatagctgtgattccacaaacagagttcctacctgcagccaaggacataagatcacctggggacgaccccaaattaccagatttacggtcccaacaaatgacaccaccatctttagcaacaccacaactgaagccttccccagaaacaacacttcttaaaagtaaaccattaataattgaagggtcataaaaaagagtattagatatagcatatacatttgaactattatctctttttttaatatactgccaacaatcaacattgcccacttcatttttttcatagtagtatcctttaataccacatacatggtcttttccagccgccattacagaataagaggtgcttttataagcttcagggacaagatccattgctgaattcgtttccaagttccagcaataagccttggaagagttggacgtaatgccacacatgaattcttcgccacccgaaagcgaaaccatgtttggaagagaattgaagtatgttgttgatgatgaggacttgttttccttatcccagcatatgatgtcttgcttcccactagcatcaatggcgcagaagaaccctttttcgccaaatgcagccgcaatcggcccaaccgagccataaccaaatgcaaactgcagccatggaagatgaaaaatgagtatgaaaatgggagccccaacaaagagacatctttggattgtcattcccttactgtgttttataggattttttttatgagtgtttctgagttgttaataatggtgtggctatggctttgcccattcttatctctctgattgaagttttggatttcagacggttatggagtcaaatataagtgtctgactttgaaagaagtagttaatgcaaagtaactgtaatttaaaaattttataaggccagctgtctcactgttttgtgtctttgtttctctcattttatgactttagaagtactttgattaattttcttttttattattattattcagaagttagatccaacaagctcatgggatcaaagcaagttgtagtttttggaatatttatacaaatattataatataatttcatacaagctttcattgacttgtatactacataatagtaatttattgttccccttgattgtgcccaataaacaagattataacatacataaagttatctattctccatgtttttccatacagagattttaattgagaatatttatttattatcaacttggtgttgtattatcgaacattaaaaaaaacttattcttgaaattgagttcctagttatgtaatctaaatatttgagttaatgatcatctaaa

SEQ ID NO: 255790 - DNA, 1290 bp, Cannabis indica
gtattaaatgtccttgattttttcccataaactattttttctataaacttgaaaggaaacacaatgaccattttcattgaaaaaaaaaacacaaataaataaatatgaactaagaaaagaaaaggtacaattcaaaatttcaaaccttgttgaaattttagtacagattatttaatcataatactgaagtgtgttttttcttgtttagttctttatagacaacgcaaaacttttttctgagcctttaaaactaacaactgtagtatgaatatgataaaataaaaagatatataaaaagtcaagattacgaatgattaacatattaaagataatcatcgtccttgtcataagaaaaacagctaattacatcactaatattatcttaaacatatataatgactatcataatcaaccagtgaaaacatatatcatttttcttttttaactatatatacatctaaaattccaatacggcaagtattataaaggtaaaaaaagttaaaatagatatatattaaaaagaaaatccactaactaatcaaaaattataaacatcattttcatcatcatcatcatcaatagagaattctaatggtaactatcattcattcatcgtcacggccatttgagtaaaaaccacgatcaataatggcgcttccacgtaagcttccggccaccagagccggcggcgatccgggttttgacttgctcgaactcggagatccgacaagggatggtgattccaccgtcgtgttgaaacccatactctttctctgcctctctcaaaagctggccaaacaggggatggttaaagtaaatcacaggaaccaatactctgctaaagtctccgtcttcttggcgcacgtaaaccgccaggtggcccttcggaacctccgtttgtttcttcaaaaacggttcgtgacccaactgaacataatccgacccgggtttggagctacaaagagatttagctcctttcgtgaggcgacgaccccaattgatgagtttcgaaatgggcttggacttgtaagttgacgaagccaagctcaatcgctggtacccggttcgaatacgggttttccggaggacccatcttgtgacacgaaaaaatcgtttcccgagcttgaagccgcgtattttcgccataacttttatttcgagagtgaaaaagaaaaaaaaacagagaaggctagaaaggaagagatgggtgatattgttttggttttacaatctgttgggtgaaaaaataatgagtttttggtggaatagtctgttgtctcaagaaaatgg

SEQ ID NO: 255791 - DNA, 514 bp, Cannabis indica
tttgtgaattaaatttcatatgaacatataaatgaatagaaagtgagttccaaaagtataaatgaaaaaactccaaatttaggattgtctctcttcgaaggaactctctctctggatatggcaattggcgattcccttatgctctcttcggaagagcctattcaacagatgtgctctaaaagcatggcccaaatggaggatctactatctcgaacaagcaaactaacggtcacagacgaggaaggatgggaaatcaacgaagatggggctgaggacattggcaaattgtgtatcattgggcgactctgcactttgaaaccatttacccgttctttactaaagaacatactatgcaggctatggaatttgggggaacttgattgggatctgaaaatcaagaaaataacagacaaagctctgttcttgattctttctttcaaacaaaacaatacacttgaaaggattttgggaagaactccatgggtattgaatgtagggttccttatcttagaaa

SEQ ID NO: 255792 - DNA, 1974 bp, Cannabis indica
atatcaaagttcagaggaaaagaattactaattagcctaaaaaaataataattaattttctacctaatttttttagtatacaccaacattttgattaatattagaaataaaatacctatgcacctatatgaattacaggctgcttctacaatacacctcactagaattgtgcactggtagaatctctaattgtttcggtatcttaaaaaaaaatttagtctaattttttttatagtcgtgtacattatagttatttaagacatcttgcaaaattttgagaaatttagaataatttacaatgtagaattcaatgtttaaactgtctattttacactcgtataaagtaaaaaagccatgcattcaacagactctttgaaccctatttttggcatgtaaattttttttagatttttcaaaattttgcaggatatctaatataactacagtatatacgaacataaaaaaatcggactaaatatttttcctaaataccaaaacagattaaggtgcatcaatgcatccttttcaagcagtgcattgtagaattttcctaaattacataacatatatataaatttggaaaattctatgatatactcctctaaaattggtgtaccgatgcacccctccaattctttctgcatgcaaaagatggcaagaagaaagaaaaaagacaatgaattgtagagataaggtggagctttaaatgaaagaataaagaatggtaataccgccacagacggtttttatgtcgaaaagagaaagaaattccacaagatgagatcgacgacttggagagatcacaaagaatcctatggttagggaaatgaggggtctcatatgctgatcctgggaccaccgaaatattgggatcttttttttttcctcatgtcatccagcagtcagaatcactcctcctttcttgctaagtgcattttgccaagtaagagagggagcaaggaacaccctcaagcatactgcgttgtcatcacgcgaaaagtggtaaaaaccatgaataccccttgaagaatacggttcattcagggaggtgtctgtgatcaaagaattgtaacacgtgtctgcgaccaacactcaagataatggcaagttttcacgacccaaggagtctcgaaagcttgggggtaaatgttatccaaattttccttcaacagacatgtggcatgatcaaagcaaggatacgagttccgcatgagacacccgggaaggctaagagaaaatgacttcccaactgggagtcaataagagataataattaccggtagcgatctcctccagtgaggaatctgaacaacgatataggttctaaaagcccgagacatgtcagcttctcgcaaaatggtgctccaaagacggttacattttttttgacacaagattagatcgtcccctgtgccagcccatggtagtgcgcgtatgcaccctagagcacgcttgttgcccaacggcctgtgtagagactatttcgtaaaggagagacctttgcacgacacgtgtccaaggtcgtaaaaggcccctcaccagtcgcactaaaccgcacgatgaagaaggttcccaccggcgaatggtcggatcgtctttccagagtaccaaccttagtaacgtgtggaagaggaaaccctaagtaagcaaagagcatgccctttgccccacatgcgcctatataccctggttctttcgaagagaagggcaagacttttatttgtcgttaccctgcaaaaatacctagcagtaactctctcgatacaaaatttccctactataatacattgtaatctcataccatccactctaagaggctaataacattgactcgtggactaaggaacattaacgactgaaccacgtaaaaacttattgtccatattatttatcgcttaacatttcctttaatttctcaaaatatttagttttcgaaaaactcgataaacacagattatattttctttataaata

SEQ ID NO: 255793 - DNA, 1250 bp, Cannabis indica
tctgcaatcagtacatatcttttgcctaataatatcacggagggcattatattccaggagttagtcaaaggtcctcatagttagcaaggataggaaggtttccaggactctcactattcatccgctactagagaggattagagtcccctaaaatagtgagtatcccaagaaggtagcaagttagcgcgatcttggaagtatgtggcctaatgatcctagaacctacctaacagtatcccatccggagctcaaagcgacagttacatatcatctaacaccaaatcaaatcttgtcccctgcgtcaagccatggtagtacgcgtacgtgcctctgaagccccctttttatccaatggactatctagacaacaacttttcaaggtgaaacctttgagtgacatgtgtcctcattcacacaaaattccttacaacagacgtacaccacacgatgggaaggtttcctaccaacttacagtctaatggtcatgttgtggtatctgcccttgtggcgtgttgagtatgaaatgctaagtcggtgaaggatatgcccttacccacatgtatgcctctaaatacccttatttttaatgtgcaaaaggtgaacaatgtcatacttaccgaacctctactaaaattcctactagctttcttactcttcaagagaaacaaaaggaatataaagctaaggtttatattgtaaacacttagaatattaaaacactcgcctataaagctaatacaacagactcgtgaactaggaatgatcaacactcaaaccacgtaaaaattacctatttatcatttactattttatatctttcttaagctttattttattggtttccaaaaatctcaaggtgattattttggtgctttcattcaaagccaaaaaaaaatatctagtcgccccaccatctcaaccatggtgaacactcaaaataatgtatgtaagaaaactcttttggatacaattatggaagaggcagacttccttgcctccggtctccagccaagcgtgtaagagaagaaagcacaaccaatgctaagaactaaataatttttttactattatttttttaattacttttagtttatttttgtaatattttatatatatatatatttaagttatttttcataagttaaaactaatttgtaacaaatttttaatggtggtgagtagtaaaatatagtttcgatgctaacaaatatagtttctttggtgcgtctaatatttccaagctactttgc

SEQ ID NO: 255794 - DNA, 887 bp, Cannabis indica
agagaaagaaaggtatagtagaatgaaactaccaactaataactcacatcaattaagtcagatccctttcgtgaaatgagcagctgccatgcttgttctttgtggctcaaggaacattctacaccatgcattggcatttgattataagtcctatagaaggttccagacataatcgtgtgttgcaaagcaaacgctagacgcttgtataatgggtatggaggaacccctttcaatgaatctgcaaaactgagagtagagatttactaagcttaaatgtatggtataagaatctgagtaaataaaaatagaacaatttaattctataataagaagattatgcggagtaaggatatgaaattctagttaaatttcagaggattataaatccaaatgaaaatgagttgaaattccctattgaacagcaaatacttcatcatcaaatgacaatcacaaattcaattaattttaagttataacaacaacaacaacaacaacaacaacaacaacaaaaacacaatgtttcatcttaatttaccgtcagattgggcagagaaattaaaaaaatactgggcttgggtcgtgtttgaggaggtgtgagcagaagtccttagacatgtgtaagtcgaattgtagggtttcattgagaaaagagtgaagagtaaacttaagaagctcttcgatgcgatttctgaggtcatctgcagacatttctctagagcagaaaatgaactgtattgtcttctaccagctataaaaatctggttttttttattggcctttgtcccgttatatgcatttttcttaaaaaaaaaaagtaaaattttattatatacagttatagactatttaatctactttttttttttttttttttgtacatgtattaa

SEQ ID NO: 255795 - DNA, 573 bp, Cannabis indica
tcccttctccttaacatcttctttatattctatgacaaagatataaatataaggggggaatgaaacccctttaacaactaacaagaactggagaatgcaaatcacaagataaaaacatctacattctattaaaccttacctagacttttccagctcctcttcaagacgtttcactcgttccgcagcctgttcttgggcctttcttgttgtttcctatattattgtatagtttaaaggataagttattagtgcaaagcaggaaagactagctaaagaaaccaaaaacttgcaaaaatttcctcatacctgagaaccttcaagaagcaacttgaagttgggtcttctgtcttctgcaaaatatgtatatagacaaaattaaaaatagaaaataaataaacaataatgaataaacaggattggtctatctaaggcagaaatctcaagaagaaaacaatcttttcaagataaagttacatctatattctatacagcaattctcaacagaaacctcaaagtaagatcggaaaatcgatagagacctgaagcagcctctacaggaagaggaagagccga

SEQ ID NO: 255796 - DNA, 645 bp, Cannabis indica
gtcttctttgagaaagactcctcgacccggttgaatgtcataaatactaattatattaactatataaaaaaataaaattaattctaaataaaatattttcaacatacaaatatataactttaatttcatgaaaatattatttaaaatttaattaactttgtatttttatactacaaaatatgcaatattttgtacacttaatattagattaacttaaaaatttgagtatttattaattaatatttaaaattctaataattctaaacattttattgtagattgtttgtaaaatattattgaaatgttatataaaaataaattgaagctaaaaaaaacaatattgtttagtaattatcttattaataataaaaaataatgtgaaaaaatataacacaaattcaaatcgtataaaaagtgagttgacctatataagaaaaaagatcagccagagaaaaatgacacgaaactaagtactaggggtgtacataaatttttgtaaaccgtaccaaccttgaataacccgtccaaaccaaactgagataacccgataaaaaatacaaactgaaaaatccaacgaaaataataactcgtccagtctttatattggtacggattgaaaatagtatcaacccaaattaaccctac

SEQ ID NO: 255797 - DNA, 1063 bp, Cannabis indica
ggcaaacctgaatggatgagcatacatctaaccctctccatgatacttctgttcatcctttttgcaagcccattctgttgaggagtctttatcagagtattgtgtctcataatcccaacttgcttgcaaaaattcttgaactgatcatcacaaaattccaggccattgtcagtcctcaatttcttaatctttctgccagcttgagtctccactagagccttccactctctgaacttgctgaatgcttgattcttggtctgcaatatgtgttacacaaacatatctagagtagtcatttatgattgacatgaagcatctagatcctccccttgagatgattctagatagtccccaaacatttgagtggagataatccagtgttcctttggtgtgcattccagtgccaaatttgatccttgttggttttttcagggcacattgttcatagaattctaaatctggcaccatattctttccaagtaacccttgtttgtcaagaatcccaagccctttgagactcacatgatcaagtctgctatgccatagcatagtagagttgatcatgcttttcgaggccatagatgcaaagttgctagtggaatttccttgaagaacatagaccccattgatcataacacctttcatcaataacactgaccctttttgcaccattaaagcccgtgattccaccttgactgagcatcaatcctccatcaactctcttctactccaagaattgatccctgtctggacaaatgtgaaaggagcatcctgagtctataacccaatcaacactagaatagtcttttgaggcaaccattacccctgcactttcatatccatcaaagtcactgccttctgaagatatgtcaacattgccatgcttcttgaaatcttgtttctttagttcaagacagtcctttttaagatggttagttttatgacattgccatgcttcttgaaaaaaaaatagatagagagattttgttgaagaaaaaaggaatgtgttttattattctggtcttaatgaaatattggatacaagttactcacgagagagtga

SEQ ID NO: 255798 - DNA, 902 bp, Cannabis indica
tagtaaatgtaatggtaaattttgaaacataatcaactcaaaattattagtactactactactaatagagcttgtaataacttaaactttgtgctattggaacaggtggaacactggctcctattggttcccctgatggttcaccaggtaacacttaaaatttggactagttaattatcaattagttaggtaatttgcaaagactaacagaatttaatgttgtctatacgaatgaatgggtgcatgctatttaactccttacgtcaactgtatgtttcgtctataactgatctttattagctcaagttgttatgtagtgtcaaatcagtcttaattatgtacctacaaaacggttattttaagaaatttaaactaaatgaaaaaaacaaaaaatacaaatactgaaatgggacaaatttataatatgttgcatacacttgagcggatgtggactgaataatgaattatagtgattgaatattatttgttttttctaccttcagtctttcatttaacagtaatttacatgttttgatcgatgttttttcgtacatagatggaatagtgtatacaactccatagtcatagataatttaatttttttactatggtgaataaaattgtacagaggtattgttgtgtcttattaataatatataatggtcccaaaagaatttgtcatgagttattagctatacctatgaacaataaacatatttttcaaattcactttttaggcaataggagaaagagtgagtcccccaaaaaataaaacaaaaggaagtgactgtagtacataatcacctcttaatcttattatcttgacttagtgtatcttgaagacatggtcaaactgagtactaatcccatatgcaaaatcattcagtcatgtaatttttcta

SEQ ID NO: 255799 - DNA, 1643 bp, Cannabis indica
attatccgtgagagccaaaaaaaatccttctgctacatcggttttatgtttctatctgatttttaggctcaccgtttattactaactataatgactctttagatatgtggaatgcacctcagctgctattcaggctttgatatcatttagaaatttgtaccctgagcaccggcaagaagaaatagagcattgtatcaagaaagcaactgcgtacattgaaaaaattcaagctaaagatggttcatggtttgtcctgttttacaattcataagctctgactttggttttcctcccaacaaatcagttttgtgcactacttgattaatctgtgcatacattgttttatataatacttttttgtctcaataacttctcttaagagttcgaatttgcttataatttttggaattgctgaacaggtatggttcttggggtgtttgtttcacttacggtacatggtttgggattaaagggttggtggctgctggaaagagctacaataattgctctagcatccgcaaagcatgcgactttttgttatcaaaacaggttgagtctggtggatggggagagagctatctttcatgccaagacaaggttaattttgttaagatttttacatgctccaagttttatcctaagcatgacatctagtttataagcttagtctgatttggatagaaccatttcacacttttcttattatgagatgcacaatataattatctttttacatttgtcaacatataatccattaaacatataatagtgaaacagaaatgattccagatgataaattgagcttaaataggttttggttgattttgttatttaattctctcggcagtaacctcttttggattttccatacaggtctactcaaatcttgatggaaataggtcacatttggtcaacactggatgggctatgatgtctctcattgaagctggacaggtatacatcagaatttgactaatcaaatcaatatgaattgtttcaaacttctgatgttgttaagaacagttgagcccaattggtatatattaagtgtaatgcttgtgtgtatgcaggctgagagagacgccaaacccttgcatcacgcagctagatatttgataaactcacaaatggagaatggagactttcctcaacaggtaattcctatatatttctctgtatatgtctgaaaaatcatgattctttaaagtaatgatgagcatgttaaatgagtggttttaatcgcaggaaataatgggtgtgttcaataggaattgtatgatcacttatgcggcatatagaaacatattcccaatatgggcattgggagaataccgctgccgggtgttgaagcaggctccatcatgagctcgcccttaccaaattcggtcattcctttccttacttaaaatccaactagtctcttaattctccatgttatcatgttgcttatttcctttttcttgaccaaatatccctttgtacctttggcaagcataataattagtggacatgataacagatctattacctaataacataaaaagatgggttttaacccaatattagagtaaattgtattgtaatcatcaattatgtctatatatattcataaatgaaagccttggagtgtggatagcactggc

SEQ ID NO: 255800 - DNA, 2234 bp, Cannabis indica
atttccgctggaattacaacactttttatttttagtaagagaatataacagtttggattcttctgaatctccttctggcttcttgatctctcctccgatgatggtatacgtttggattatgcatacgggattttcctgcagtaaactcttcgattcttaagtaaaaaaaaaaagattctaattgcatgatcaagctagattttgaggaaagcttatgataccatagaaaggggctttattgaaaaaatgttaacagcgctgcgatttccgaaagaattcaccaaacttattatggtatgttttcaaactccttggttctctcttttgcttaatggctctatgtatggattttttgaagctaaaagaggatacaaacaaggtgatcccatgtcacctttataatttgttcttaggatggaatacttatctcaaatattgaagaaaattgaaaacaaagaagatttcaggtaccatgatagatgtaaaagcttggaacttaaccatctttgttttgccgatgatgtcctcatgttttttcatggtgactttaagtcaatctatgttatgcttcgaggactgaagttattttcggagtcgcggcatggagaagaacaaagagtattgaatgcctcaggttattcgagatggccagtctcccattcacatacttaggtattccgatttgctcaaaaagattctcaaagctagattgtgagatcctgattgataagatggtcaagagaattcgtctatggagttctcagaatctttcttttgctggtatgaccacattgattaactcagtcttggttgcgatgcatacgtattcggcccaaatcatgaatctaccaaagagaattctacaaaaaaaaatgctttatgaaggagttttttgtggaaaggaatagaagagtctaatgatatagggaaagttgcttggagtaagctttgcactccaaagttgatgggtggattatcattacattattacttggaatattgttacaattgggaaatttgtgtgggcattagcttcaaagaaggacaacctctggatcaaatgggtgcattatatgtacataggcaaggaagattggtggtcctataaagctcctggaaataacagttggtattggaaacaaatatgcaaggtaaaagatagtctagttcctgtcattgattttagaaattttgcttcttcgaattacaaaattggtgatggatatactaagctttgtagtccttctcccaaagttgactggaggaagaaagtatgggatagacttagtcttccaaagcacaagattattatttggctgactatgctgaatagattgcaaacgaaagacatgttgctcaaaatgaatattgtaacagatagtgtttgtgtagtttgtggcagccatgaagagactacccaacatctcttctttagttgcacaaatagcattaaaatcttggaaactctaaaaaatttgttgaactgggtcactttagccactaccattcaagatcaagcattccactagggtaactaactgcttgaaggagcaagctttccatgtggaggaagaaggttttttccccagtaatggttgatgtcgtatatcatatttggaaaaattgtaatcaagcattttagcttcacagcgtccaatgtccacatgttattgttaaacaaatcatgtttgaagttaaaagtagaatacaaattcaaatgtgaaagaaaatatctgtgcatgatagagattggagtgatcacttgtaagtttgttaactgttcaggccggaaggcgctgctaggttgtaattaaaagttaattggttgaatgattataattcacctgatttagcaaaaaaaaaaaacaaaaaattcttacttagagaaaaaaagtagacgaaaaatagaatttgaatatatagaggaaatccaaccccctttctaattatacactacacaaagtcttacttttagtcacaacaaaatttgtgactaaaagtaagaaagctgtgaccaattataaattagcattcctatgttgtgaattaaaagtccgcggctaaaagtattagtcacaaaaattacaatttgttgtgactaaatatattttaagtcacaatacgtgttgcaactaaaactaaatatattagcgacaacttgtaactaaatattatgtttagtcagaagtaacttttttgttgtgcatgcctaaaagtcacattcaatcataaaa

SEQ ID NO: 255801 - DNA, 1758 bp, Cannabis indica
taattaattaaaaaaataattaataattaattaatttaataattaatattataattaattttttttaaaaaaaaataaatacttttgccagcgtattcctgcgccggtaaaaagtatcaaaactgacggttggcgccaaatagttttcccggcgcactattgcgccagcaaaagcttatcaaagcaggttcatagtggataagggcattttttaacaccggcgcttctttttcaccggcttgatttctcgccggtaaaaggaagttttaccggcacatttactctacgcaccggtaaaaagtcttttaccgaccaagcttcccagataagctttgccgtcgcagttgtgcgccggtaaagctttgctggcgcagttagtttacttttcaaaagagggttttcttgtagtgttggcagacctgtgtcacataaggatttcttagagcatggctgggtacgtagttatctgtattgactggctgaatggtaaaagggatattttgtccgtctaatcctcttttatgatttagatcattcttgagatcgtgtatggtgcctaattagtcaaagactgattctcctaaggccttcttctctagctattatcagcgactcgttggtgttgtatatctgtttgggaatggatattatattgttcattctctcccaagtaacaagttggaaaaacttgctcgtctatcgcacaacccacagtttgtggccttaaattgggtgactcacttccttaggtttgttgagttcttttagctaatgttcttctggcccgtattgaggtccagaatggatgcagtttgtcctttggtttggatcatgtataattggagtgtctgacattgatttttgtctagttatcatatatgctcgtctaataagcactgtagcctgcttggaatgattgtcaatcacctcttgctgggctctcatgatttcaatctgttgattcatccactcttggaattggcatatttgctcctcaaaagaaaaatttattgctgcttgggtatcttgttgatgagtgttggtgtgctcttgcatctgacctagtgcggctcgtaaattctgtaattcagtgccgtcaccaattgtcctttgaggatttccaacatattgatttccagtactgagtttgttcggtccgagtactggtggttacagtttcttgcacacgtggacacgtggaccttccaccatgccagttaacatctaaaaatggatgaaaatgttaatctgctaacagaacttgagtttaggaggttttactaccaaaattttagaatttggggttaaatgcaaaaacctaaccacttaaggaagttttgccgcaaataactcttgtttatacgaagaaaaaaaatacataacaaaaaataaagtgtaaaaaatttaccaaaaatagtaatttatataaactttcttttatttaattgataaattacttattattttataacaaacaatacaagaataataattaaaaaaacagtaaggaaaaacaaataggcaacttataataaaatatttatatagtaaatctaattaatataactattgattaattcttcttatgaatattgctgactcttgtggtatctttatcgtaaagtttcccatatacatattttaaaaatagggtgcgacacacattggtcatgtatggcatctttaatatatgttactctttctacttaagtcctagtagtcgtagttaaatttcaatatgaaaaaataaaataaaat

SEQ ID NO: 255802 - DNA, 3197 bp, Cannabis indica
aaagtattagtttagaaaaaaattaatcccctaatgcatgcatagaaattcaaatttccctatttagtactaccacttctctcatggttaaaaaaaaacaactatataataaataatgataattttaagctactaatatttaataacaatactctatatatatataaatattaaagtttgacatgatatatatgactgaaagaaaagttgaaatgagagtaccaaatcaacatcaattaagtataataattctgacacacctacatctagctatttccttttcaactattgtaggtaagtctcattcacttttatgtagaagcaatcttaatgagaaagttattataatattttgctagcattataataaaatgttattctataattaattaataagtttttataataattattaaaataaattaaataaaactcaatactaaattacattaatttacaaaaagtataataaataataaattaagcttgcattctaaacttatttagagtaccaactgagagtttattctccataatatacaaaaagcaaaataaataatcttatacttttttttttttgctaaaagtagaaaaataatctcacacttctggtttgggataaataatctcatatatatattaaactattttggaagaagattattaatcatagtcccaatgttcaacaaactttggatgacaattaataatcttaatcttaatcctaattctattttattctgccaaacgatgaatatattattaagagttagttatttacatgttttaccaaggtgaaggatgtcggtgtcacataatgtaagtgttgtaagttattattcgtgttttaaggaatacgtggatttcaaataaaagcattaaggtctatcactaagcccaaataatataaattgggttgagctcgggattcattctgtcttccaggaaaataatacataactcgtgtatatgagattccgcaaagcctagtctgtatttagaaggtctatctctgtatatctagaaaaagtcctcagtgtgtatctggaagtattattttttttcattttttttgccaaatcgcacaagatcataaattactttcccaaaatctacgaacaaagaataatatcttgataaaaagggatatgaataattaaaaatcaggtaattaatttacccacgaatataggagacagtatgaacaaatagctttgtgataagacttctacgtcagcatgcataaggtaactcgtgggtcggtcttcaccagataaacctaaacttaatgtattatttgtaaactcttcattagaggagaaattataactagtatgacctttataatataatactcattgaatccttcatggaaaaggttgaaaattctgagtttacttgctcagaaaaagaatggagtactactcatatactcattgtaatccctttaggattttttagcctacttcataataatactaacttgaaggctatttaatgtcataaccacgtaaaaactctgagtgtcttcttcatatatatttcttttaaaattctattttttttagctctaatatttaataattagctttctgaaaaactcggtaagcacaaataatttgttattttaagtaaatttaaaattaaatatgtagaactcaatattaaattgtacctaaaataatataatatgagatggagccaagtatgtacaactgaaggggacttggccctcccaaattttttattctctagtaaagttatacttaatattttgaagaaaaaaattgcattttaacctctccttaatttgtgtttttagcatttttcccctaaatggtagagttatctaattggggtgagtaggacccaaactaatctaattacaaaactaattcaatctaatgcatataaaaaaattggatacacaattacaatttaattgaatttaaataattgaattataattggcttgaatgggttattgaatgacagggaattaaaaactaatccactctaataaataataagtacatgtaatatatattaaaataataataaatttaattatatgtattttccctgattttgtccaaaatacgtggatcaaccggactgtgacacgtggactgaagaagcaggactttgagataattcgactaagtcttcttaatcaaaaagatcagcatttaacatgcctcccggaaaaggcatgtaagtttcatatactcccgaaaagcaagactacaatgaggcatctccaggaggtatcaaatcctatctgaactgtcacctcgcatttaatgccgcatgggagaaggggtattaaaactgccataagtattaaagtctgacggcgtaacccctcttctgcagctactacgctatgattaatgagcctagtgacagctactttatgagaagtcacattagtcaagaaaggataatgaattacatccattaaacccctaaaaagcctagggattagaccatgcattttctatgatgtattcattggaaatgtgtgcctttactgaatattacagaaagacatctacctcaattctagggatcaccccacaaaaacactataaacaccccccaaactcattaaggcaagggtcaataattctgggttttataagaactagagagaaaaaccaccaagaacattctctgtaataaatactcacaaatatacagactagtggactaaggctcattaatgctccaaccacgtaaaaatttcgtgcattaacttcttacagctttcctaaatattattatattggttgccgaaaacctcagtcaacaatatgtaataaaataatttgacatttcatttttacttggtcgttattaattttttatgaactctatcacacttaattaaagaaacctttaaaaatcataagaactcacatatagcttagcttatgtattttttgtatattttttaattagttacttaatattaaaaattaggtgccaaataaaatataattaaaaaagtcaatccaatctaaataataattgaattagatcaattagattgaattatgtttattaattaaattagatcggatgataatgatgtaactgatgctcatgacaactacttctagttgttaaagatcaacacctactctacaagtatgtagaattttctatcattttggtaatattatagaattttc

SEQ ID NO: 255803 - DNA, 818 bp, Cannabis indica
acttcctcatcttcagggttttgtgcgtcttaaggaggacggggttgacatgtgatacgagtttccactattgtttctttagcttaaaaggttgttgtctatctagagacgcttccttcagctctcaatgaaagcaccaaaatattgactgaggttttcggcaaccaatttaatactatatgtaagaaagctgtaggaagtttaatgcatgagatttttacgtggttggggcattaaagagccttagtccacgagtcttttttatttatgagagtatcagagaatgttcttggtagatattcctcttagtttctctctttaattcttatgaacccagaattctcgacccccatatcagtgcatttgggggtatttatagtgtttttctggagtgatccctagaactgaatcacttatctttctgtgcaggtttgatagaggcacatattcctagtcgatgcaaaataggaaagacatggtctatactgtaggcatcttaggggttaggtggatataatcctttatcccttcttgattgatgtgatccgtcataaagtagtcgtcactagccttattaatcatagcgtaatagctgtaaaagaggggttacgccgtcagacacattgcttatggcagttccaatacattttctctcatgcggcattaaataagaggtgactttttgttggaaaatattttaccaggatcttagatctacttacaagtatgtttattaacaccctaaatatgaactttctaaaacgatgaaataaacacatataaagtttaggaaaccttacattgagtgcagcggaata

SEQ ID NO: 255804 - DNA, 770 bp, Cannabis indica
ttattatgaacaaataaatttattctaaattaagatatagatatatagatatgtatatgatgatcatcaaattataaattttattaattaccgagaaaatcaatggccaatttgccattggaaaatctaccggtcggagtgtgattgaagtcccttccataaggaagaaaattggacttcagaagcgtcggtaaattgttattattaccgacgtccattgtagagtctccgaacagaaacacagcaggaactctctgctgtgtggaattttttacaagaattataaggatcaccaatattgtcataattgacttcaaatccatattgatgatcagattcaagcttcaaaaacaaattgatccttataattaattgaaagatgatgagatattcagagactgatgatgaatgcatgatatttatatgcatgcatggatcatttttcctgattaataattgatcatcaccatctttccatttattttgtttgaaaattaatgatcaactaacaagctttgaatgagtagttagtttaattttttatgtgtgaaatatattatgtaagccaacattcaaagtacattattaattatattaaaccgttttgctatatatcttttctatcttttccattagttcatcaaaatgaaataaataccttattaaaagtaaaaaagaaaaaaaaaaaccgcacattgtgtatatgtatattatactttaagcaaaaatatagaaaatacaaaaatacagttgtacagaattttaaatat

SEQ ID NO: 255805 - DNA, 1254 bp, Cannabis indica
  modified_base (816)..(816): a, c, t, g, unknown or other
tgtctgctgaaactgtgagtttattagctgcactctctcaccttttatatctaacttaaatgtttggtttttttttttttaatgtttcttctatatgaatgaagcctttttagatttaacaataataataattagaaaaaactaaataaaactagattaataaacaagatgaaaaaacttcccaacaaataaacctgtcttaacccagctctaataatcttttcttctcttaattaatgattaactcggctaaagttagaaaagtcatgaaacataatataaacaactttatcttattctccgtttctttagatttttattgctataccaaactaaaaacaaataaaatgggctatatatttcttgtttttcctttttgacatatgaataaaatgatttacattgtttacggtttgaaaaaaaaaagttgatcagttacgttttttttttttaatatgtttttgaaaaaaaattctacttatttcagaggttaaaatcaatcaacttgaattctcaaaaaaaaaaaaaaaaaaaaaaactacaaatacaacttgttttgtacaaaaaaaaataaaaaaaatacatttacatgaaaatactaacttattattaaggttgaagtggaacacaaatacaaatgggatgaggactttttaccaactaataaagctcaccatctagtctaaagatatacttagttaattcgtgtgagtggcaatgctaaaattaagactaatatgaaaatgagataataaaatcttaatattgaaataaataactcattaggcaataaatttgagtttttttttttttttnttttttgacaaatttgagttatttgttaaattataatatatatttctttaaataattaataattcatattgatatcttaatatctttcatatttcaaaggactagtttaacgttatctgaattgttaagattctattaaggttaatacaattttggatcttatattttgtaaaagttactgattggactttctattttgttaaatgataaaaagactctgcatttttaaaatagtacaaataggaccctgagctcaatttcgttatttttttaatataaataacttgaagaaatttctagcacgaacagatgtagaaaatataactaattttgtcatatcacttctatatcatattactagggaactaagccgcgctttgcgcggtgttgttcaaattttataatcttttcatacatatatatatattgtacttatta

SEQ ID NO: 255806 - DNA, 624 bp, Cannabis indica
agtattattgcatatgtgagtatatttctagatatttattgcaaaagttaccatatcctatagacaaaaccacaattaactgcttttctttctttttcaatggataaatttcaaggcatgggaattgtggacaaatgacagaggattggaggtgatggatccattactagaagatcagactacagcccatatcgatatggtgctaagatatatccatatagctctcctttgcgtgcaagaaagtgccgtcgataggccaaatatatctcaggttgccatgtggctaagcaattctcatgaagacttacctcagcccaagcagccagctttcctcaattctatctctactgtgaatcgaaacccaattcagaatgagcctgaaataatctctacaaattttgtaactctttctgcaattgaaccacgtccataaattcaagagtatccttatgttgaaatttctttgtgctggatttgaatagatcgttgagatttgtttatgacatctttccattggcatgaggcaactcttagttgttcatgacatttaagtttataaaaatttgacttttcttttttgtgttatttagagcgtagcacaccttttagaaaaacttaaagtta

SEQ ID NO: 255807 - DNA, 1713 bp, Cannabis indica
  modified_base (1670)..(1670): a, c, t, g, unknown or other
cccattcaacattcatcatatcttaattaagttaaaaaattaattcataagttcaacattcaaatctatgtttaaattaaagacaaaatttaacataaagaaatttaaagaaagagaaagaaattaggtggagaacttgatcggatcgccacgctcgcaccaagaatcttcttcttttgcttctaagagtcttttctaacttcatgacataaaaattcgagacccccttcttataatgtagttttacaacttaaaattaagtacaaaaatatccttgtctcgtacggaagcaacttacagaatcgaaaacattgattctgtactagctccttcccgcaaccgtacaaaaactccgtcgcaaccaccaaaggccccgccgtgtgactacctttcagaatttcaacacgattggaaattttcaatagagagttgatattaaagtgatttttattggttgccaactttcaattaaacaaaagtttcagcgaatatatagctataattattgtggaagttgatcctctaaactaactctttatccaactcacctaaaccaactaacttaactaactttctgttatgttaattagttagttggtgctatttcctagtatgagttaggcctataaatatgtctattcttttcactttaaggaagaggtcaagaggagaataagagagaggatttgagagttgcttaaggtgagtgttctgttcttgaagagggtcaagaacaagggggtgtactcgggttggtatagaaaactgtgactgttttctttggtgtgtttcgagtaccacagggctgagattgctctgaatcttgtaattgtattgatactctcttattccacatattaatgaagaattggtgatgtttctcaactggagtatggccagggatcatgttgatatctaggaccggaaccaggatatattcttgtgttgttctttgtttaatttctgtttcttggttcattgtgttgttaattagtttgtggtcattattgctgtcaaagttgtgagtttattgcaggttttaggattgaatccttgatgttattgttgctgaaattacaacaattattatttatatttttcagcatcttcagtataataagttcatcattatccactctttcgtggtctgtggcttaaaatattacagaagtttgagaacctatcgaacttttgctactatttagtaatataattatattttatttatggtgcgaaaattgaataaattatggttgattacagcgtttataagtctcattggaggcgatataaaataaagaaattattattaattattttctaaaagaattttttttcattcaaaagttaaatgaataaaattttaacaagtcatgcagaaccaaatgaactctctcagattattactcttttttttttctctataaatttatattatattaattgggctcacatttacaaacacacagattgtgttatctatcacagcaaaattccttgtttgtcaccgatgagtttttgaacattatttttttttttaaaatctagaattatatattgttcaacaaatatcatttacatattatgcaacaccaaaaaaaaaacaacgttacaaactagtaaatcattcactatctattatttgtatttttaggttcatacacttactnttattttttactatctcgtttctattctctctattaactacaa

SEQ ID NO: 255808 - DNA, 662 bp, Cannabis indica
tataaaattataatataaaaattagagaaaaaagaaaatagataaataaaatatatatagttctaaaggattttgagaatgaattattacatagaaaatatatataaattgacattttatttacaaaaatacttccataaagtaaaaacaatatttatactttttatgtgattttaattaccaaaataccacttaccctatcatcacttacacagtcagacgatagttgtcgggtggttgctgcgtggttgcgcagtagttgcatcagacgaaggtttcaatcaaatgatggttgcagggaggttgctaggtggttggccgaaggttagtatcagacgaaggtttcaatcagactaaaatttttgggtagttgctacgggttggctgaaggttgcatcagacgaaataactgttagcaaaatgttatgcaactgttgtgaagcattcaaaatcaaaacagtgtttccacgtacgtatttctatctacatgtctcttaatgatttaatatgaataaattccccattagaaatttggaaaacaacaaaaatataacagaataaacattttgttatagtattgatgtaatttttttggattatacttcagttggatttttcgggaactccagctcaattttatgagatctgcctttcatggatct

SEQ ID NO: 255809 - DNA, 627 bp, Cannabis indica
ccatattaaatttttttactaaaattggacagaagtccttaaatctaataatttcaatagtgtatatatcaaagtttggggagcaaaaatcttaattaaccattttttttttcaatttaaagtagaggtaattctaggatagatttctatttataagagttatttattttttttatgattgtgtattttcttattattaaataaatattaattttaattctttgttaaaaaacatataaatttaaattttttaaaagaaaaagtataagatttggtattttattaactttttagcttaatatttttttataattgtatatattttaatttttttacttttactcaattattcttcttacttttttaaaaaatatattattaattttgatatttacaagaatttttagtttaattttttatagttattttaaaaaaaatcaaataatttatcctattaaaaataaaattaaaaatattttattctacatatattttaattatttaaatattatttttaatattataaattatttaaaatttcaaaaaatttacagaatatctttaaataaatttaaaaataattatcaaaatagattcgaagtggacttgataaagtttagattttta

SEQ ID NO: 255810 - DNA, 2785 bp, Cannabis indica
agaatttttttaaaaaatttatagatgattttgtataaatacaatgtaaacaatcattaaaaaaaaaatctaaaagaattttcttgatgctaaaatagaatctatgtaatataactaacaaatactcgtgcacaaaagaaaaaacgagagaagtagtaagttataaaggcttaacaacttgtttgttatatggatttgccatgctgagatgaagagattcagtgattgtgagtggtatagcaaatcctttacctttgtctgttagtttagaacactttacaagtggaatggaaccttttgctattatagaaaagcacagagattcttcccacttggacaccttgactaatgccactttgttatttttctatgccttaaataagaccatatactaaatggttggtcattggtgcgtgtcaacagctctgcaatcttacttgtctgtctctcttatttttcttttctttaaagtctacaatccatcttctgattttggatcacgtttcttttcttctttcaagtttcaaattctgggactttccgaagttgaacagatttgatcttgaaactctgataccgctcttaaagtcaacatttttggagatgggttcttgtttttagcttccatattatagaaacttggtgaagcctgtggctttctgtgccactgaatcaagaatattattcaagtttaactgatttggtcagttgggttttctcatggaggaagaatcttgaggatctttgtatcttcaacgtaataatcaatagccggatctggtagagatttctaaggtactttttctgattctttttcttggtttgtgaaattcaaagatattcagataaagtgaggagggagatgtttgatgcttgcttgatgatgaattttaatacttctttgagttacccaacacacaaattgggctatgcaaatgtaaacactcaaaagactttcttgtataagtcaaggtcaaatcgtgttctagcaatgcctccaccatctccatttcttttaaacacagatgaagatgggaaatttggttcaacaagtaatgattctggtgattctttagttagtttggaaaatactattggtataattggaggggtatctgttgattctactctgaagttcttgagaaaactagttaagttgggtttaaaagatgaagatagtattccttttgtgctctgctctgaccccatgttgagtaaggatcttcagttacttgaaaggagttctttgccttctttaagtggtcacaaaacccaacgagtacaaatggatcctacccgaattgtggagaatctgagaagcaaaagggtcttcttggaaaattcaggagctcgttgcattgtcatgccttgtcatttatcacattgttggtatgaagaagtttccaagggaggtaatgttcctttcctccatatgggagaatgtgttgccaagcagctcaaggaagccaagttgaagccacttgaagctggaagtgaagtgaggattggagtgcttgggaccaatgtaactttaactgcaggattttatcaagacaaattgcagaatgaggtaattcctttacattttgttttttctcttgctgcaacttacattctttaatatgattctaaagactaaacacacttgcaggggtttgaggttgtgttgccagataaatcaactacagaacatgctgttgttcctgctatggaggctttaagtagaaaagatatagaaggagcacggaatctattgcgaattgctctccaagttcttttggtgagggctgtaaatactgttattcttgcctcagatgatatgagaaatcttttgcctctcaatgatcctcttctcaagagatgtgttgaccctttggatgcattagccatgtcaactgtcaagtgggctcaaactgctgaaacaggtaaatgaagatagtttacttcttctatgctatattgatttggaattcatacagaagaacatgttattggtgtaaaacttgatttgtctgtgttactatgaagttggaggattgtataaattttgaaaagcttttccgttgattcttcagtaggaccaactctcttacatatcatattgagtagagtatatcattgtctgtatgtaaaagaattccattttatgagagctggaagctttttgtcatggacatgtttaaagggctgtacaaaaatattccaattaagattggttgatgttctttctgactaagtaattgggataagtatcgagttgtttatgattatgccccacttaataacacttaattacattctaaattactttaatggtcatcatatcacatcatataaccaagataagtgtcacttatccgagaaaataagggaagaattgcaatgagagcatccattacgtttacacgtattttgttcgagtaaaacaagaaaagttaataattactatcctctagtggcatcttgcttgtccccacaagaccatgtgtaacagatttaaatggctacaaaaagagaaatgctactgggcactttaagatgcccctaagtaccacaaaaaataacacatgttagattttaatagagtctcatatattttaaattattaatattggtgtaattttagacaccttaagctaccaaatatcaattctcttaaaaaaaaaagcaaaaatccctttttactaacacattttcccacaagtcaattcccatattgtgttttccaaaaaattagcagtggaaatggaaatgtgtactaaagcatggagagtgtaaaagcttt

SEQ ID NO: 255811 - DNA, 1278 bp, Cannabis indica
  modified_base (693)..(693): a, c, t, g, unknown or other
cttcatcttcattaattctactactagaagaatccattttgattttcttggaatatattgttatcactacactcttttatatgtaatacttgtaaatctatttataatcctcggattgtatataatatatttatttatttttgttagtttgtgactagtgagataatttagaaattaagtcaacttgctttcctggttgggaccatttctcttttaattacctttttgtattgattagtcacaaataatgataaaacagagtgagaaatatattagttctttctagtgatcatattaatttctgaaaatgttggtaaaattataaactatcgaaaagaaaaagagataaatcaaaaagaaaaaataaatggtcctattaaggtcggcccagtgaatcttgtttgttcagattatgatcataattatgttggcccatttacactagctctatgttgagattttatattaattgagtaaattagattgtatattcaatttattttatctttatttctatattctttaagatatactcacatttatagatgatgtgtccattatactccttaaattgagtgatggtatattggaaaatttactcacaaaaacggacacattttaataaaatgtaatataagaatgttggtaaaattaaaaattacaaaaagaaattttattggctaaaaaaaaagngaaaataaaaaaagaaatggtcctattaaggtcggcccagtgaaccatggtggacccaggtagcaccggcccgttatccttccactgccgagagcgggaggtattcgctgctctgtgaagccagcctcacgcattaccctccactctaggagcccagtgggccggactttcgtccaaaccacaaggcccaaatcccagcttggaacgggcaggccagtaaacagctaacactgaatccagcccactgaaccaacctaatgtcccatttcccacttgcccccacttgggttataggcccacgctactaggcccggcgagcaatgttgttttctaagctattatatactactcagctttcaccttcatttcccatgtgggacttatggtggctaaactctttgcttcagattagccagaaatggcaatgcctatattatactatcttaaaactgagtaaagcagagaaaattgaaaacagaaaaggaagactgaaattgacagtaaacaacatatatacaagcgaaaccaacaactaattattcaattcaactaacgaaatataacataaaactacaaattagatcc

SEQ ID NO: 255812 - DNA, 545 bp, Cannabis indica
tttcagttttcaaaattgtgtttctaaaagtgagaaacataattctgaaataggatctgcataaacttctgaaatagaattggagatttgtcattaaattgtgttgttggtccctgaagtatggcccctataacaatttgatcctcaaagtttcaatttgagtattaaggtccttaaacttagtttctaccaattaagagtctgtttggttgtgttttcagttttcagaattgtgtttataaaagtgagaataaaaaataaatttttgtcattttaaaaatttaatagtgtttggctcctgttttttaatattttttttttttcttaaaaacaacgtcaatattctacaccataccatgatatgaactcagctcacctcgaactcgaccccagacctggacccgaacaagaacttggactcagactcgaggttcaaggtcgggtcgatccctaggccatgttcgggtccacgcccggatcagtcccaaaggctaggccgtgtccgggtccgaaatcggggtctaggtctggtccaaggttcgggt

SEQ ID NO: 255813 - DNA, 859 bp, Cannabis indica
cattaaagatagtctaagatgcatatcactactgttatatcgttattattagaatttaatatcagatttcacacattttgatttgaataaataatataaaaaccgctaaccactcccaaccagagtctcacccaagacgattaagggccttatgtagagaaattaaaattgaatctcttaattaaaaatttatcaatcaacacttcataaatactatttttttttttaaaaaaatacttcataaattctaaaacattcaaaaaatttagaatcatatgtattaattttttttagtaagtgctaagtgcatatttactctaataaatatttattatgtatactatacattatataaaaaaaatatatatattatattatatataaagggatgataaaaaattgagtcttttaatgtaagaagtcttgtgcactagctcaaactgctatgtgtttaggccggccatgctcttaacatcgataaagtgttaaacactttcaatgcgaaatataggaatccacttaacataatcatgcagttattatgagatagcagatgtcacaaataataaaacttagactaattttttttatttaagcaccatattttacttgggactcaaacccaagacctccaacacacacacccacctatggccacttgagctagcctgaagtggtcgttgagctagcctgaagtggtcgttattgaacttattctgatgatgaaacaaatgacctctaatatgagcaatgagtgtataaataaactactttcatgatgtcgtagctagttgccacgaagatgacccattgtataaagatagaaaaatttatagtaaatcctttagaaagttagttt

SEQ ID NO: 255814 - DNA, 724 bp, Cannabis indica
ttggagcacacatgatgtgtggctccagtatcaattatccaattagatttaggaacaagagatgccacaccagaaatgttagacacaattggttattttaactgttgaggctgcaccgagttttcttgcagcttctgtgctaacatagccattaatttttgacaatgagtagctagatcatgctggtcagttgtggttttattgctgtcatgcctgcagtatagttggtcgatgatctcccttgctggtttgctggtttaccaggtatttctctttagaaccttccatatagcttgtgtctagggggatacccatgaatcttgttgcattttgaaattctgtgtccaggaacaccacaacgggaacaaataggttgattgtcacctttattatctggtcgattgtttccacgattggcttaagcattgccagcaaattgtcctgtgttatcactggactattggttattttcagcttgaggtataacaatacctctttgtttctcctcttgaattatgctggcataggctttgtttacattggaaagtgaatcttgaagtaagatctgagatctggcatttaggtaggactcattcaagccaatgagaaactcaagcacttaattatcttcatcttgacactcttgaatgatcttctttgctccataagtgcaaactggttgtggtctgtactcttgtagtagatcccataaacccttgagttt

SEQ ID NO: 255815 - DNA, 457 bp, Cannabis indica
gttgcagatactcgaaggaccaaccctaaatccagatctcaccacaccactgacaacaatcttgatgatcaatctccaagaaatgagtcgataccagtctccaatcgcaggcctcatgatcgcaccatcaacgatgatgtttcaagcccattctacctgagctcaggcgaccacccttgattagttcttgtgaccaccgttctcaccggacctaactatcaatcttggaagcgtgggattactatggctcttgctacgaagaacaaagtctccttcattgatggttcaattccccggcccgattatggtaattctcttctcccatcttggttacgttgcaatagtatggtgatgtcctggttggtcaattcggtttccccgacatagctcatagtatcatgtactttgatcaagccactgatatgtggcaagatttagctgagaggtttaatgaggg

SEQ ID NO: 255816 - DNA, 629 bp, Cannabis indica
tccaagtacaatcatcctctaacgattgtggcatctgcccccttggtcttcatatgcgtccctctttacacacatgtgtaaccactgaagcctcacatgtctattccaatttgaaccatcatatggtcatcaactctcaaccactatcatgactaacaagaatttgacggcccctacaatacttccacacccatgccaacaagcttccttttcaaaaaaagtgcctcttgcggatatgatgccactcaggcaaacttggcctagcgtaccaagcatacaatatggactacccaatcaaccttttactatgccaacgagttccaaatattttattgtgcctctctacaatttcatgtggtagttttctttctagcatccttccacatgcctacatcccctttaggataggtcaaccaggttcacctcccactgagatgaacttggctctgataccaactatcacgggctcaccttttcaggcagcagaacacccgtgcgacaccttgacttctcaaagccaaggtcagccttccaaccattagagtaataaataataatgggctcatttttcgcgcaaccgtgtgcctcgtgcacactttcgtctctccaacaactcccgtagagtcatg

SEQ ID NO: 255817 - DNA, 1152 bp, Cannabis indica
caccaaaatcaaacattttatagattcttgatttaaatttaagcacacccataatcactattcccaatatacattccatattcaaaaccaattcaaaaaattgaaccaaaaattaaaactaacttatacaaacaattgaaacccagaaataaaacaaagcttattcgaaccttagagagccaccagtggagttaataaagagtttaatatctttagtagaatccttggcgtccaacaagagaagctggctgataatggcgtcggcaacgaagtcgtcaatgctactccccaagaagacgatcctctctctgagaagaagccccatggcgtcggcctcggcgcctctcatggcggtgtcggggccctgaggagaggaagctagtagcatagaaggggtgaaattatgggggttggaggagggttttgggctgggagaggcagttgcttggaaacatttgaaaatggaggttttaggggatgagatagggaggtggtaggagaagggtttggggcgagaggagtggaggagtttggtggagggaaggggagaatagagtgtggatgagactgagagcacgtccatggccgacgagagagagagagagatttgggtaagggaggaaaggaagagctcctgaatcctgattattccacccgattggggtcggaatttaattttgttttactatgaaacacaaaatgtaatattaagtaaaatttaattcagaaatttgagtttaatatgtttcatatgtccaaatataaagaaaatgtctctctattttatgtttggtgagtgatatgtgtgagaagtttgattaattacccataatttagactgaatttgaaatcagaaatttaaaactttatttaccatctaaaaatttcccaaaaacttttaaacacttactattttaataatttttatttcatattaaaatttatatttttaattggaactgatcgttctgcaacagaggtgttggcaaaaattttctatgcccaaaatctttctggttttgagtcttttcgtcgattttctcttcatttatttctctttgctattcctgaattcctatttggaacgaatgaatcctggaagttttcgtttctggatagttagtttgattggttctaagcatggggaggact

SEQ ID NO: 255818 - DNA, 1470 bp, Cannabis indica
ttttcgatatatttatactattttcttcattacatattgtttttatatactctattttatattatagattatagtctaacagaagttagactttaaaaattgaattaattaatgcattgatatatttatatgagatatgtattgtgtttttcaaaattttgtggtatatattatcggctatgatcataggatttaatgttccgatatcacataatttttaagaagaaaaaacaataaattaataaagaagtcaagttgcaggtagtcattattgtcgtattactagattgttaaggggcctacaatttataattattaacaagaaagttgttatattgtgtcgtcataattttctatttacttcttcaaagcacaggtgcatatccatcataacacccttttttttttcttttcattttaattattcaattcaatcatgtatagttgttaggtcaataataaatatacaaagttttaagattattttatttaattaatttacatttttcatcgttgattttttccaacatttctattaggtttacagcgtgacattaatcatctatcaatcattgaatattgcattattgttatatataaagatctatatatgtatagtttatattatatataatatatatatttatcaaagttttgtgacccgtgcacgttaggagcttcacttaattggattttataattgtaaatgttacaattattaataccaaactaatcactttcaacttttctcccatattagctaattttagtaactgtcttaatatatatcactgctcatggtcataggccaggtgtattcttaagtatctgtcgtattatgtaatgtttaattaacttataatatcgtatgaacatgagaaataaatgaaaatatcataatttgattatgacaattacaatcttataaatacaccttaatctatacaaaaattagaaaatatgcattggttacagtcacacctaaggaggagaaaaagattaatagaagtttgggattatttcacaaatacaaaaaaaaaaaaaaaataaataataacaaaaatacagttgtacagaattttaaatatttttatgattttttgattttgtttatagaaaatacagtgtttttatgttgtactcttgttaatttttaatgttgtttaggaagttattttttttgttaattttcttattatttttgtgttatttttataaaaaatcgtgaaaataaatttttttttataaaaattagtgttttatgtaattattcttagaaatttaaagtagagctcaattaaaatagggtagctgtcagaagctgattgtgccacgtttcgataaacagatcaaagaatacaaggcttgcaaggaagatgaatgtcatgtaaacaagtatataaatcattatgttttgttgtttgctaaatgtatatatatcattatcgattaagaaacaaaagaagtaat

SEQ ID NO: 255819 - DNA, 867 bp, Cannabis indica
caacaaaacaactgccatccacacaccttggggaccatcctttcttgtgcaacctctgatagtcggggcacaccttcagcatttcaattaaaacttactgtagatgttgcccagaacacaacaacaaacaagacaggttttggtttggcgctcttcaacaacagcggggatttacttttgtctgtagcaacaccgtggcaaggaactcaaaccggctttgttaatggaagctcatgcacttcactatgctcttttttggtgccaacaacgaagcatacagccagaatacattgcctctgattgtaaattccttgtagattatatttgtaatgttgctaatcatcacttactattgaacagatttgccaaggacattaaaaacttcctatcttctcttcctaatgctacttttaggcatatttctagagagcacaatgaagatgctcatcgtcttgcgaagtttgcattaggcctagattaggaagttttttggaaagatcaaaattttaattgtaatttgtatcctgaactttaattctctttgcaatggatacaggtttttttttcaaaaaaaaaagtatttaatttattttgtatgtgcaaagaaaatcaagatattaattgagtagtgagtccgtgcaggcatcataataagttttaatttttaaattttactattcctatatatatacatggtaaatttaattttggagaattatcttgtatactattgttttttaaaatttttgtttttttcaaattttatagttttgggttttctctaagtggttgtcactagttgcaataggggtttttatacaatttttttgttgcaagttgcaccgctagttagcaatagaaatttct

SEQ ID NO: 255820 - DNA, 1149 bp, Cannabis indica
gtcatgcaatacacaataattactttttttttttttgaaagcacaataattaccttaaaacacacaatacttcctaaaagattcacattattttattggtttttataaaaatttaatgcccttttttttcttaaaaatatttgatgcctttgttgtgtagttaaaatatatttttttgttagtgaatgtaaatacttaaaagaaagaaacaattacattaacattaatatttatttctatatttaaattggtaggcactaataattattaattgtgcttacgatgtcgctgagagtgaggagttcaaactgtctctttttagatttcaatctcctattctaaaaacacttgtgcggtgttgtgaaattacatttctcagtctcatatgtgtaaccgtaaaattctttattaattatatacttatattttgttaaaattattgtaaaataatataaatattgacaataatcaagaatattataaaatgagtgagattatcatacttacatataaaattagaaggtttatacaggttttattttttaaaaatatttttctaaataaaaaaataataatttctcaataaaaataaatatagatccatttaaaatgatatgtcttgcattgcatgaagtatgtcgtaaacatgttgagtaaattttatgactattatattagtttttctttaagaatataaaattaaattttgtgagtgaatttcattatttcaaaaattaatgttaatgatttcattacaaaattacgacctcttagttaatttttacttctaaaatcacatttttaaatatttttttaaaatttctttatatagaagtattcactataattctcaatcaattttatatataatttatagtattgaaaataaaattttcatattacgtgtgttcaaaaaaaatatcaaacttattttcaatacggtaaattattcgacaatttttaaaaatttacaaaaataatattgtaaatataatatatcgatattaaaaaattgaaattttatatatacaggaaagtaattataatgttaaatttgggtttcagtaatatttgtgcattaataagatatttttgacatttattggaatggtttatctcatctagccatgtacagtaatgagttttttt

SEQ ID NO: 255821 - DNA, 996 bp, Cannabis indica
tgcaacataaaatattatttctgatctttattaatatgtgagtctgatcatattgaaatgagttttatttagggcacaaaacccaacaagaactactgagaagacagcaacgggacatactccattctcgctagcatttggctcgaaagcaatgttacctgtggaagtaaatatctcggcttctacacgggattatactcaagaagagaaccaagaacctttaagattatcattcgatctgcttgatgaaaaatttactaagtcgcagataactaatgtaacgtaccaacatcgagtaacaagatacttcaacaaaagggtccaaaaggctttcaatgttggagaattggtgctaaggcgagtatttgcaaatacgagagatgtatctgtaggagtattcaacccgaactgggagggtccttatgtgattgaagcgatagtaggaactggggtttacaaattggctcggctgaatggctcgctgataaagaactactggaacgtggaacatttgcgaccctactactagtaaattaatgattgtaacccacatttctgatgtaatattttgaacttcagttatgaataaagttaatcatttcttttttcaagtaatcacaaagtgttactctttaaaattacttgaggcgcatatgtgtatgattaactagaatttatcttgaaatacatgatatattgcaaacccaccactttagaattttttttttattttttttttgtagtttttgggaatcaaaccttttgacgagaagacggaaactattatgaataactttttgcttaaaacctgactgacaagaaaacaaaatcaaaagttataaatgagatataactcataactcacaatgtgaagcgcaatactaacgactagcattgtataggaaagtatgaaacgagacatcaatgtgtcttgaaaaaagtacttaaacctagaatatgaatagatgatctatctattcatataagcaatcaaaa

SEQ ID NO: 255822 - DNA, 687 bp, Cannabis indica
agaatattttgaaggataatttggctcaagtgactccctcattacattggctaattatattttttttcactaaaactttgatgtgtactatcttgaacattttaagttggtaaaatttctttcttaaattaaaaaatttccatccaatttaaataattgtttgacatgaatgaaagtttaatggtcaccatttggtatatagacaattgtcatattaataaaattgaatgaaattggacataaatcattaattcaataatgtcaatagttcgggatgaatttttaacagtctgaaaaagttagtacaatttagtatatgtcaaaattcaaatgacaaaaatcctaattagcctttaaatttgaggaaattaaactatatgcatattttacattattgtctttttttcttttaatataataaccaattctattgttgagagaaacaatacattggtcaatatacaaggaggaatttcttccaaccaagaaatcttgttttccatttatagtgcatatcttgctaacccatgtgttgcagtataaccatttcacatcacatgttgaagacatacacccggaaagacatataacaaggacctaataaatctaatgatacaactctattgggagacaccctcagaaaagaattgactgaactgaccacgatttcgacatcactctccacaa

SEQ ID NO: 255823 - DNA, 1187 bp, Cannabis indica
gaataggatagcaattaggcattaacgatttgggtaaaaaacaacaggattctcctccctatcatctcatcttgcttaaactttaactgtgttataagttttctgaattactttaattcttttaaatcataattattttcgatttgccaaatagaattataggtatagtttagtaatagttaatccaattccctgtggttcgacctcacctgtgtgagtttactacttgattgcgtatacttgcgtagtgtttataattttcagcaacaacaattttaattccttttgtcgcggagttgtgtttgttttggcctggtccgtagggctatacatgacaattacctttgggaacaacttggtttgccattctgcaaggcaccatatttagactttaatatttcatgctgtttttaactcttagctttatgcatcggcctatgtagttattttaagggctgtcttcttaggctgtttagaagcatgtgtttccaacgaccaactcttcaaacctttaatatcagtcagccttctatccctctactgacttaggaggtacttaaaaagtacatgtttcctattgccagacaggatggttttggtcttaaaccctcatacaaagttttttaagcataagctaactaatagtttctaaaaacatgaatggtcttctgggctgttcccgaatcactgtatgatcacagagccttgacattcttcggttgtttaggcctttttataatttaagtaggccaatttcacatgctacagaatttagacgacattttcctgctcaggataaagctgaagtcaataggagtttaagccgggccttaatattttcaaattctaaagaactctttttgaaagttttcaataaggtcttttggcgagtatttcccttttctgggaaatttggctaaaatgcttcttcttccaaaacatgtgcttattttcacttttagaaggaatttaagcagtcttcctctttaaggaatttggttgaaaatacatcttgttttaagaaaaaattattaattttaataaacaaaacaagtaaaataataaactacggcacacggtatgtttgggggcacacacggctaggcatgataccccctaactgacctgagaagtatagatatctccaacttcttggtcacttgttttaaacatagcttgtggcctaa

SEQ ID NO: 255824 - DNA, 2545 bp, Cannabis indica
ttttttctctttgttttttccttcttcttcttcttgtccatacactagcgttgcaacgaaagtaataccttcaacaaggcaaaaaaaaaaaaatttgtttagcataccacaacaagtccatacaaaaaagaatataaggttaaacatctaaagaagattctaaggctaaagaacaatataactaccaaattgacaagaaaaagaaaagaattatattattgtaaccattggttacctttttttttacttataatagtaggttatcaataagtaaaaatttcttttttagtatcaaattaattataattaactattttttaagataattacttgaatatttaacaacacctttttagcaattaatatttataaataattttttttatataaattcttactgtaattattttaagagttaaatcatttaattataatatttacaattaaactttaatttttttttatatataaaaattagacttctttttacacaaattagaattctcttcttgtataataaatttttaaataattgattatttttaaatgatattaaattatttttttacgactagaagaactaagtataaggcctcaagctgaggcctaagttgtatatgttcaaataccattggactagagtaatatttctacctacaatactacaccgttttgttgctcagtcttaaaacacttttaaacttctggtcaatattatgggtaatactacatcattggttttcttctccataaccgttaagctatacaaatgacctcacccaaacctgtactactcctctttctctctgtctctccacacacttgtaaatgaaggagttgcatatcgaaataggttgctcttcctcccttccaagcaaatatcccctaataatctcattctagtttttaatccatttttgtgatttgataggcataagagtcctttaattatgtacaaaacaagtcaaggcgaggagagaggagtttttctattagagtttgaggttgtttcgttttgtaggagagcttgactttgtttttttgactctagtttagttttttgagtaaatgactacttattgaaaaaaaaaaaaaggatggaggagtttagccctttatttttgggaaatacattgaacatatttcactttttactttttaaatatttaaataaaaaattaaataataaagtgtaataatttaaaattaaagttatatgtataataaaattttaattataaaattacatgtttataattttaaattataaagagttgctataagaaattaataatttaaggagaaagaaaattactacaaaatcctaatttaataataaattacaaaaaattaattaataattataaataatttaattttaaaatacaattaatgttcattaaggttttataagaaaataaattattaggtgactattaggttataagttaattattttttatttttatttaatttctaaattaatcacaaccattcaatactgaaaaattgagtttttgtaaatgccaataattattacataataatagtaataattcaactataacagtctgtagcagcagaatataattctatcaccgcagaacataattttgcaaaaaaaaaccagaaccagaaataaaatactagaaattaaaatcaattgacacaagagaattgtacgtggtatcacggggccacgtccagagaaacaactttgtcttcaccaaagaaaatatgcaaaaaaaaaaaaatgaaagctagaagagttgaaccgattggctgctctctaggctctatttatagaatatagcaaccctagagacaaccacaaaattgattccacaactgtacaaactttcctaaaaaatcctaatttgcagcatcagaattaggtttttacatcagcaaagtagaccaaaaaggaaacttgccaaataagtgcccgatcatgaaagagaagataagccaagtcttaaggtagtaattactattatctcttattaagaattatatttgtaacttaattgtcaacaataattgtgttactttaattatttttgtgttttccttttgtatggaagttttatatttgagtgaaagaaacgtgagtcggagagaagactttctatcgctaaatgttagtacattgattaggacaagggttcgttgatttcggaggtggtgaacatggttttagcatttcctaatgctttaagcatacatattggtaggagtttcatgtttgaggagtttactattatgccaaagccatttcataagaagcaatgtgtagattatgattgtggtatagatgtattacaacttatgagagttgcttacccaaatggtaaaatatgtgtacacgtatatttctgaattattattttttattaatttatttgtttgttataaaagccaacattgttatttatttttaatttgatgaagatttcttctaattacaggggcatcagacaatagaaagagttgttgcttctttggctattatattatcgtctttgaataaaattcgactagcttt

SEQ ID NO: 255825 - DNA, 611 bp, Cannabis indica
ttgaagaaaacgtatttatacaagtacaaaaatagagcaataagctcataacagaattcagttaactaccattaattaactaacacaactaactaacttaagcaaaacagaaaactaactaagattagtgagctatgttaacagcacatgatcataccaaaaaatagaataaagcattttccgagatctaggatgtgttgttgggaatttatgttcttacaaaacctctgtaatgatttcttgaagtctacgaattacgattgaaaatcaagattaacattcatggtatgaatgcaaattttgatattcatagaaaagagatatggaacataaaatgagtgaaatgatataaatcaaactagtgtaatgcaaaatcaaaatatattaatccacaacactagagataataaaataaatcattaagggctcgtttggtatgtcgtattgtattgtgttggattgtgttgtgttgtattgtattgtattagtattatttaattcaatactatgtttgatattgacttgtattaatatatagtattgtattctattagtattatttaatctgagtcccggtcccgatctcgagtctggatcctgggtcggggtcc

SEQ ID NO: 255826 - DNA, 925 bp, Cannabis indica
atttaccggttttttaactaactcttcttcttggttaattagattttgctctgctagggcaaaacgtttgttcttggtatttttcaggtgtttcttgcagatctgctgaggtgatcttcagattgaaggtgcatcagaggtcgtgcgtttctgaagggagttcagattgctttgctgaagagagttcagctgaatagaagcaagggagtcttgccttctgaagtctaaggttcttagatgatttttcgatttgagtgtgttcaaatcatttgggtaatttctgtatgaattagtttcagattactttttgtgtgattgtaattgaaactggaaagtgtatcttttgattcatagtgaaagttattaccccggttcaagggaacccaagcattagtcgcctgaaatgagttttcagggtccgatgaagcttgtaaatttgagtgttttctgtttagtttcatgcatgttaagatcagtataaaaatgttaaaacatacgtaaagaaatcaacactgctaaacttttcaatttaaattatcagattcaacgctggtttattgaacagattccgattgagaaacgggatcaactataggatctagatcctgaaaaaaataataacaatgtattagattatacttaaaatacatatataaaaataaaaaaaacaacaacatagaacaaaaaaaaatacaaaatataactaacaacaaaaaataaataaaaaccttggcatcaggatagaataatttcttgttacaagactttatttttttagcacctctcttcctttttctaacatattaaacaagttgattaacatttttatccatattgattgtaaacctattgaacaaaaaagatacaaagaaagagaaataagaaaataagtacaacaatagattaacagtaaccatataaaaat

SEQ ID NO: 255827 - DNA, 1603 bp, Cannabis indica
tgtactttttgtagtagttgtcttttgtagagctacatactactctttgcttagtcgttcgccgttgttgagggaaagctggattccaccacctctggattgggatcaaatttaactgtgatgttcgtgtgggcttagagagtatgtgtacagctgttgttgcaaggaatcatctgggaagggtgattagtattcacacgtcccggttggatttctctgatgctctttgtggagaagctgcggcctgctgcttggtggtgtctgttgcgatggagctacagtataagtatattattgtggagagtgactcgagactaccgatcaatgcccttaatgggaaggcgtcctattgggctctagagaactatgtctccttttgtactaagtcttctccttatttcatatgttgtaatttttcgaatatgagtaggtcttgtaactttgcagccataatgtggttaaatgggcttttacgcactagatgtacggatccattccgatcaactctttaccggagaatattttgtataatgaccatgaggtttaatatctttctaatatataactaagcttatttatttatttatttattttaaaaaaaaattataggtcggtagattatatatgggaaatagaaaaagaaaatgtaaagaaaatgatatttatatatataaatataaattttatatttatatatatgttctctgattcatatgatgtcatgacagaaataagactctggtgaaaaatggcatcaatataattaatggaagaatgtagataaacaccacaccatgcattctgccattattgcagtaataaaattgacaatacaatattctctttcttaaaaacacttattatatattacaaatttaattactagtaaatatttgatatattaattacccccttttaatccttttgatttagaaaatttatttgcaatatatatgactataaattttgtaagaaatttcatataataggattaatacttaataattgatcaactatatgattatttgattgtagtatatataacttaatttcttttgttatgagaattatgagtatgtgaaaaatgcatgtctaatttaaatatgttttaagggttactgttagtattgttcagtggttaggttttcctaatttaaatatgtttttcataaatgttgtaataatttattatttaattaattacaaacaattatcacaatgattaaattcttgtaattttcattacttaacttatttccatccttcgattctcttttaagtgctatgaatttaatccggtagaatttaactcattttttcattgaacgaaaggtacgaaaatactctcgaacaaacataagcattattagttgaactactaaaattcctaattattttgctaatccgagtatattcgaatgctcgaaaatcctcataacgcataaatatataataaaaaaaccctaatgtctaatattttttttttatataataaacttttccaacattatgatgatttttccgtacatatgaaaaaaaaatatatatatgaaaatgtcacactcaacattatatataaagtttaaactcttttttttttttt

SEQ ID NO: 255828 - DNA, 919 bp, Cannabis indica
agagtttattaattttccaaacatgaaataatgaaacacaagggtattaattaatgctataaactccatatataaatgaatgaatgtacgtaacatcttttgtgggtgatgctaagcttttccacgtgagcataacttggtacataatcttttactccttttgccttgaagaaagttcctaagttcacatttcatttctctaatgactcatgtattcaaaagatggtaacaaaaatacaatacaagcacatttcaatattgagaaaattcatataagtctagataaatataatttgatgtctacaacattcttactaaactacatcctgattaccattattattattattattattgaactctttaaaaatatatatatcgttaaagcatcatgtggtgtggtatatagttgactatatatacatacagaatcaagatcctaaatttcatgtgacataaacttgtatacatggctagctatattgacattttaatcaagagatgtaagataatactaataaaagccaagccaagctaatccaatcccagttcaagccaataataagggacactttagtaaatttctacgtctggaggaaacacgaaaattttgtacatatatactttgttgtatagggataacttacaaaaaataaattaaaaaatgttatttatagaataaaattaaaatctggagaatcagcgccaaaacacaattcccatgcttcttcttcttcatcttattcatatatatgaagtgaagccaacccaacccaacccttgatactccgctctgtttttgtgtgatatgtatggtagttgtaaggtgacttttacatgaaaacaaagcaattaaccaaaccaaacactattgattaataattacttgtatatacatatatatttatatgtttgtata

SEQ ID NO: 255829 - DNA, 1120 bp, Cannabis indica
cgttattagatcaaaattcgatggtttgatatttttaaaattgatatttatagttaaatttgcttagtaaccattgtaatacccattaaaaagtgttccatatatattttttttaaataattacaacatctttttttttatttgttatttttgaaaaaaagtgaattaataacaaaaaggtttgagaaaaatgttcaaattccaaaaatatatctatgttatcaaatattgtttaaagcctcctcattaaagatactctaagtaccctttattattatttttttttttgtaaagttagttttaatatagagtaatttgcagcgtaaataattacaaaaaacaactactttaagtgacaactttttagtcacaatataaattttttgtaactaaatatgatttttagtcacaataaaaagttacctgtgactaaaaagtatttagctaaaagttgtcactaatttagttttagtcacaacaaatattgtgactaaacatacctttagtcataacaaattgtaaattttgtgactaatacttttagccacaaactttttagtcacaacaaaaaaattatgatttataattagtcacaatttttttttacttttagttataagttttgttgtgactaatagtaggattttttgtagtgaatatttatgtttaactcttatttataaataaataattaagttaaattataatattaataatacttaagttatatttttagaattttcctagttacttaatcgttaagtatatttgaatgaacttttaattaaaaaataaaatttaaatgatattaaccaattaaagaccgttatgtgactattaattagggatgtacataaatttttgtaaaccgcccaacccgaacaacccgtccaaaccataccgagataatccgacgaagatataacctgcccaatctttataatgggcaatccgcccaatcaacccgactaacccgacttgaaacgagtttttaatatatttttttatttatatttaatctatatattatataatttatatacatatttataaaaaataaaaaagttacaaaagtactatatttttttttattgattggatgatttgaacttttaaattc

SEQ ID NO: 255830 - DNA, 1193 bp, Cannabis indica
actatatatttataattttttgttatttttatgtatttgtaaaataatctctcagattaacatggaaaatttggcattcatatttaaaaagtatgttaattcggggtcttagatggaagacggtgagacttagttaaagtgagattgagttagagagacttttttgaaatataaaaatatttttagtaggaaaataaattaaaaatacatatacatatgctatttctaattgtgtggtatatttaaaaaatcatattttacattcaaacaaatttctcattatttataatgggtgttatgttttttcataaaataaactacaaaatgatacatgaacaaaaataagcttcttttttttaatacatgcatatacagcaacatcaactcaacaaggatcccttattatttctgcaaattttttttaagtcttattaattattgtaatataagatcaatttgtaacaagtgcgtcaaaaggagtaacaatgacaaatgtgctcgattgataagcacgtattagtaatttagtacgtgccagttttttcttctttaacgacaacaagtttttttccctattaatctgctgcgattaatagttacaacaggttttgtactgcactattcacaggcaatgcagtaccgaaaaaaaagaatatattttatagacagaaaatcatatatcaatggattttataggggtaaaattttcctgatttcaatttcacttattcgtataggaaataaagatatatgggaaagtgtctatctgagaggagacaacgattttcttgatttttgttgtgaagagaggaagaaagtaatgattttccctttattttgtcaatttaataattctagtttgaaatttattatagtacatatccttattgattactgtgtggcagagaaaaaataacatatgattttttttttgaaaacaaaattaacatatgatttagttaataattaataatgcaaaatgcacgtatagtttagcctccttattgcaatataatataaatgtcaaaatcattttgtgcgacagcgcgcggtatcatgttttagttttctagtcttattttatctgggtgtatggtttttaacccttctggccgggtgtatttatgtaataatgatgttatacttaagatcaccttgcattaattatgagaattttggccttgggcattttt

SEQ ID NO: 255831 - DNA, 585 bp, Cannabis indica
atgacattgaacatagaaaaaaagaagcaatttgatatatgatggaaactagaaattaatattcaataataaaattaagaattcatgtctcgaattttgaaataaccattaactaaaaggaaactactcagaactagacattataataataatcataataaatagtaagagtttaaggagaagaaataatgaagaacactttgaagtcgcgatctctgtttctttatttttctctctctaagggcttgtttggttaatggtaatgggccagaaaggaatggaatagaatactaatgggcctgattttttttgtttggttggaaaataacacttttggaaaagaattccacagtaatgctattcccccaaactaatggaattgcttttccatttttcatttggtgtaattataattccattccactactttagcatatcaacaaattatctctcttctactccagccatgggccaagctcaacaaaccctaaccctagcaaattgaagattaatctgctgccattattgtgactatcttcttggatcatctttgcaactgctgagtgctgggttccttgattggtg

SEQ ID NO: 255832 - DNA, 681 bp, Cannabis indica
aaaaaaaaaaaaacaaatctcatttcacatggtgtaattggtatcccaagtaagtagctcaatttttattctacttttccctcgaaagggattgttggtgtttgtcttggtccctcttgagtttaaatttttgtaataaataaataaataaataaaataaaataaaataatggcaatacgacatatatgactgcacaaagtgtcaaatttattaaaccttgaaccttactctattcaagcctaagctttcttcttatccgatgcacaaattgttaaataactttttttaacttataaatatataatataattttaaaaaaatggtgtgggttttttgggatctacgttggttatggtttgccttactttaaatgtaaatttttgtaacaaaacatctttaagaaaagaaaagaaagcaaagttgggtttgaatattatgattatgaaaacatgaaagggctaatattaatgaaaagaagttattagagacatattgtggctgccatttggcatacatattcacaaagccgaccaactaaagccaaaagaaagcgactacatgtaattaataagctacacctacattattaaagatcactacctaagtggtcaaaagattttattgtgttttattactttttttcttctttgttttttatttcttatattttaattaaaaaa

SEQ ID NO: 255833 - DNA, 588 bp, Cannabis indica
taatattttagtataaattaaagtttaacatagttttatataaaaatatgatatataattcaattcaatataatacaatacaatacaatacaacttgatacggcgttccaaacaagcccaaataacttaattaggtaggctactattctgaacttctagggggtcttgcggcgtacgtcgactttgatttaatatatatgactattgaatgtatttatatagttcacggaacgcggtcttcgatctccactcccagtgctgaaacttcaaaccttgtgtatatatgtttacgtagttacttgatcagtagtttatgaacacaacaaatatcccttgactttttagttgacagtccgcgcttcgcggcggaagtttaaaaaaatttaatatcattaatttttatataatttttatttgaataatatgaaaagttaaatatataaatgggttagctcaatatgtaagtataatattttttataatgaaagcccgatatagttcatataacacgcttctgtatatatctcgattatttaaaattattctcatcactatatatcacattttgttattaccgtatctcactaa

SEQ ID NO: 255834 - DNA, 624 bp, Cannabis indica
ggtccgccgctaataataatagcggtcggaccccgccggtattggtccgccgctaataaattttgaattacaactgttttgttttcctgcacttaaaatatcacctaatattaacagcgggctttcccccggtattactaaatgcccgccgctaattagtattttatttttttaaaaaaaaaaatcagaaaagtggattaataccagcgggcccccacatccgccggtaataaccttattattaggggcggaccttccccaccagtaatagggccgcccctaataaccaaaattgttgtagtgactgaactgcaacagaatatttcaaaaccacaaggttaaagaaagtgtaataattcaacgattaaaagtaagtgcaaagtttaattttgtaagtaataacctggagaagatttaaaaactgcaaacacttaacaaactcattcaattccaaacaattaccaaatataataaacacatagtacacagaaatatataaataattacctgattcaaatgagtgtgattaacaataaaaaaaatcgtaatatatttattgacaaattctcaatatctcaatgatcatcaaaagtcaattaaaaaaaacaaattaaatatatatat

SEQ ID NO: 255835 - DNA, 1247 bp, Cannabis indica
cacagatgctaagcccattaacaattgatcaccaacaacatgggctaacacagcaaagaactatccaatcaacccaagttttaataaaaccaataaaatttaatgtaagcccaaataaaagtctaacattatagacaatgcattcaagaatgttgaaactgtcagtttaaatggagttttttctgtactatgaatgaaatgaaatgataataataataataataataatatcaatcaaataaaatggtagatttttagaaaaagaatgggaatgacataatgaaagttttgactttagtaacaatattcctcttgcatggtagagaagtaacaatattttcttagctttagtttttcatttcaatttgttatattttctcttggtttaaagaatatcaataccaagaaatctgagtttttaattactactcacacagtttaataattatattttattttaaaatattaaatatgtgtggatgttaaataggaattacatgtgaatttttatttttaatggtttatgtttaatggaaaaattaatagttacataagaaaataatattaattatttaaaaaataataatattttataattatataatgtaattaataattaagaactaagatcaattatctctaattatataattattgtatgactacttggttgaacaaatatgctaaatctcaaaattattccaaaacacacattggagtctcaagactcatctcaattttcatctccatccaccattagtgattagaccaaaactaataacattttgaaggagatttattacattatgtatctatttacctaatttccatgttacctaataattttttcaagaaattcacaaccatttttgagttttaaagatatgtataaaattaaatttggctccattttaaccaattaatgaaattcaaaacctatcttagaaattaagtaagattatatcaagatagagattacatatatataaaaatgggtagttgaatataattgactaataataatgatgataataatatggaaaacatgcaaacttaaacacttctacattagtaaataatgttatgaaagtaacattagaagatagcattaattagaagcctaactgtccctagagtaggccaatattgtgatagcaatttttgaaccttaagttgggccaagtgccaatcattctaaattggtgcaccaaattgagttgaacttaatacacttcctttctattctt

SEQ ID NO: 255836 - DNA, 1476 bp, Cannabis indica
taatgatccttggcttccacataattcaaacaactatgttgtctcacgacaccctgctcttgtgaataaatctaccagctgcctctttcaagtttgtactcgagtgtgggatgaggatgttatgaggaacctgtttgttgcccgtgatcaggaccttattttgtccattcagcttagtgattcggccgctaatgatggttggagttggagacttgagacttgtgggaattattcagtcaaaagggcatataaattcttgcaagaatctaagtgtgcttggtgccaagatgccaatactaatttttggaagcgactttggtcattaaaagttcctcctaagatcagtaattttttatcgcgagctacttcgggtgtgcttccaacttgttttcaattacaaaaacgtcacgttcctgttaatgccgactgccctttgtgtaactgtagtactgaaactattcaacatgcgttggtggaatgctcgtttgtaaaggttgcttggcatcgcatcacaatgggcgtcggggctggggctgtaacattcagcagctggttgttaagaattttcaccaggggcacgaagttgaaatggaggaagcagcgatggtgagttgggctatttggagtgcgcggaatgactttgtttggcaaaagaagagttggcttgcttcaaatattgtaacatcagctagaatcatgcttgatcaatacaaatttgctcaggaaaggaagggcctttcgttgtctcctttgaatgatggggggcgaaactgtgagcgttggattgcacctgtgttaaacaagattaaagttaaagttgatggggctttatttgaacaagagggttagtttggaatgggctgtgtagctcgagatcatcatggaaccatggtagaagctttcaagaagggaaaggttgggtatgtccaacccgaaattgctgagatcgtaggcatcaaagaagcgttgagttggattgcgactcatccctgggacaatatagtgttagaaatggacagtttggtgtgtgtccaagcagtccacagtaaagtctttatgtcctcacagtttggttttattgttcaagatgttaggaatttacttttggctttatcttttgttgagttatgttttgttaaatgatctgcaaacaagttggttcattgcttggcaagagactcttgtttctctacagggtctgtgcttcagttggaggatttttcctctgaagtgcgttctattattttgaatgagtttattcattaataaatctcttgatttattcaaaaaaaaagtgtttattattttttattgaactttatacattaatcatatattaaactaacaatagtagaaaattaaagtaaaaatataaaagatcaataaaaataatattatttaagaatgaaaggtcaaataaaataaaaaaaaatagaacaaaacatggatgaaaaggtcactctactcactctatcc

SEQ ID NO: 255837 - DNA, 1263 bp, Cannabis indica
tgcattagaatttgattctactttaagtcgatttgattctcattcgattttaatttgaatcgtcataagcaaaataaggtgtataaccaaaaataatctgaattggtacaaaagagttgagtctatatatagtacaaagccactatgactaatcttaactaactgttaacagaattaatggaaacaactaacttaacagcccccctcaagatggagtgtagatattttttatacccatcttggacaaaatgttattgaacgaggtaggaaacagaggcttcgttaggatgtctgcacgtttggctttggaggagacgtgactcagcttcagtgatccattaatgatcttctctctaacaatgtggcaatcgatctcaacgtgttttgtgcattcatggaagatggggttttctgatatgtagattgcagcattgtcgtagaaaagaacagaaggcaggctaattttgatgttgagttcttgaagaagggatgtgagccatgtgaattcacatgtagcattagagattgcacgatattctgcctcagctaatgatcgagaaactgttggctgcttctttgatttccatgaaatgagtgtttgtcccaggaaaacacaatatctagagatagattctttggtatcaacacaagctccccagtcagcatcagcgaaagcttgaagctaaagtttgagaggtggggaagcatagaaaccgaggccttggcatggtgaatcttttaggtattgaagtattctggtggcagccaccatgtgaggttgtctaggagattgaaggtattggctgagtttattaacggcaaagcttatatttggccgagtgatagtgaggtataaaagtttcccaataagacttctatattgagttgggtttggaaggagttcccctgaagtattactgattttaatatagggttccatgggagttagagctagtttagaatcgaggcatctagtgtctttgaggagttgtaatgtgaatggcctttgggatacataaattccctttgagcaatggacaattccaaggccaaggaaaaaatggagggggccaaggtcttcaagtttgaacctggagtcgagagtggagataaaggaatgaagagcagtggtgttgtttgttgctacaattatgtcatcgacataaatgagcagtgcaaggaatacatcagattgatttcttgtaaaatgtgaatcgtcattttgggcctgtgatgttgcccaattagttacactgcggtcgc

SEQ ID NO: 255838 - DNA, 1394 bp, Cannabis indica
tattattactattattatttattcataataatattaataataaaaacagtactacaaaactgatattaaataaataaattgagcattgttatataacatcttaaaatgtctaatactaattgtttagcagctattgccaggaaccacttgggtgaggtggtttgggttcacacgtccagaatggattttgctgacgcgttttgtggggaagcggcggcttgctgtttggctatttttgtagtgctggaagtgaaagcccagtttgtcatagcggagagcgatttaagaatagttatcaatgcgctcaatgggaaggagtcatgttgggtcattggtaactatgtctccttttgtaagtcacttttcttgtttttctagatgtattttctctaatattagcaggacttgtaattttgtcacccataatgtggttaagtggacgtttacccacaaattatttggtgatattccgctatccaccccgttggctttttttaagcttaagtgcggcttgattggggttgtgttttgtttttgtcattcgttttttgcaattctaattagtcctgtttctgtgacataattttaagtgttttagtcttgcctctatgatatgatttgagtattttagtcttgtctgtgtgacatagttttgagtattttagtattgactatgttatatgtttttgttttgttttgttttgtttcgttgttggtttttctttgttcttcaatgactcgtcaatacatcgttgttagtggttgagaataataagttttttgtgctcgagctacgagattgaacctactgcaacagtttttacagctgtgttttctaaacgataaatagaacaaaatataagtgttcttaaaattaactgtaatgctaccattttcttcatttaattatattaattttatatcaaataatctaagaattaagcgagttatcataatgaaatggaatggaatggaaaggaaacaatttttattctattcctttgtttggttgtattttaaagtattggaatagcattccaatggaatactctttccaccattttggtagaatggctattccattttaaaaagaaatgaatgaccattccattataacaagaaaaaaaatttaatgatttttttatcaatttttttatgcattttaaattttattccattccattcctatttctattcccattcctattcccattcctatattttcattcctctcaatcaaacgcctcctcctcttatgagataaatatcgcacaatttattcaaatatataaaaatatatagaaccccgtacctattaaaatataccaattatgtaacactatcttgtgtttttaattctgcgctttcatttccttcttcttcttatttattta

SEQ ID NO: 255839 - DNA, 801 bp, Cannabis indica
tttttttaggggagagtgacccaacaactacaaagagcaaggggtaggggtcacttccaaaacaactccaagtttcaactaatccaatagatatttgggcaaggttgtgcacaactgtattcctttaaggactgacgtgtgaaaagaaaatagtgggaaaggaagctaacacttctttaagagcatcaataagagctccatattttgataagatgttgtcttgagatttgatgtctttgacaaggttcaaacaatcggtctccacttggtgaattaaaatgtgattgttttgacaccagagtaggccttacaataacgcccatgcttctgcatgttttgattgcatcataccatgattgcttttggcaaaagcagctatgatctatcctactgagctacgaaccagagcccctacacctgttttctcctcttttgctaaaactgctccaaccacatttagcttaaactgacctgcttcagggggtccaagtgatgacagtggtgtcatcctgggcacgtttagtcttaggttgtttttaatattatttttgagttagtgtatttttaatttagttctactcttgtttggagcaattttacgctttttaacttttattttttacagatttaaaatagaagaagattagaaaatatcatcaaaagaataagatggaaaaaagatcaaaagatctcagaaaaaaattatttataaaatagagaaaattgtgcaagaaaataaagttgaaacttcgagcctaaattcgactatgttctgattaaattttggaaaaagtcaaaaca

SEQ ID NO: 255840 - DNA, 951 bp, Cannabis indica
tttgttgtttttttgttgtttttgtgcatttgtgaaattaacccatatttataacactttattaaagatgctcttatatttagagaagcacaagattattaccagataataaaagaaagtttccattctaagttgtacaaaaatagattgtgcttataccctaaataatgtgtctggacgagtcctcacctcttgtccttcttcgtactgtggtgaggtggtaatgggcggctctgccgcatggcgcagggtagtggaaggctacccccaggtaccgtacatggtgctttagggtttaataccctttcctttaaggaacatgattacgtttgctacttttcacagccgctttatattatccttcttaggggacccaaaaatctctgtttttacccagaaatttctgtttttttctaaatccaagacgtcttctttgctgaaaactgctactctgctcaagcttattagttttactatggcggctatggcgggtcctaggattgatgagctggtggaagagacggaaaacttctctttggatgacttctctattcaagtcattccggatgataatatggcgaaggatacgatagctcgtacggtggttggacgcttcgtcggaaagaggggagtagccatgggtactatgcgaagagctctttcaggcatgtggagattgtcctcagggtggcgtctgcaggagccactccccaaaacctacatctgtcgtttgaacaccccaaaagaagctaagttcgtccttgataatggaccgtggaacccatgtaatgggttctcttggtggctgccttgccggaggacggaaactggagaaatgctaacttgaatattgtggacatttgggtcaaagcttttggcgtgccgatgcctttcatgaccgaagagtgtgtttcgaacatggcaaagcggatgggaactctcctgcaatcc

SEQ ID NO: 255841 - DNA, 893 bp, Cannabis indica
ttttttatcaagataatgcattaaataaaatataattttcaaaattttttatatgaaatttaattataatttttaatacttttaaacaaatagtcaaggtgcatcctaattttctataataaaacagaaataagatagaaaatagtaatattattaacatttttctctttatattctttattattttttattcgttttagtttttattcttctttgctcatatttatacttttaatttatttttacaatttttttctaatgttttttatttatatacataacgcagattttgttaactaaaaattgagcctaatagtgacaatctcacacagaaaaataaaactattctgcatagttgacgagtcaatcttattagattttctgatggttttttcagggccttcttcccttatgattttttcgttccttttttgatctaacttgcctctatttataatcacatagtagtcaattaattatagaatagaatgtaatctttacaacgtttttcccctgaaatcatggagtttgattacatattacgtagtataaatgcgattattatttgaatatcacacagctgtgatttatccgcttttactgggtcaaaatgattgtgtgtttaaacacatcttaaatcataggttctgggatgtctcaacaggaactcggttccaatgaccttgacagcgagctggagctttttctcctatcttttcgaggttgacaatgtacgcttcgttgcttctttgtttgaaggcttaacgctttattttgacaatcacaattcttatttacaaagaatacctcagcagtcatttgaatgtcagcttttgactcgtcaagactataagtctcactgaaaaacgtctgaagttaattggtcaaagtca

SEQ ID NO: 255842 - DNA, 704 bp, Cannabis indica
gtactcatgaatcaatatgtatattcattttatttttttaattaatattacacgtcattattatatattaattaaattaatgagcattattaattaggagatcaataccatagcactactatgaggtatattgttatataaattaaatagttagcggttttatatgatttttattgaagtagaataaataagatttaatattgaattgctttcgatagtgatattacgtattataaaagtgttaggtacattatacaaaattttactttttgtcacaataaaagtaaaaaaattgtaactaattataaattatcattcttacgttgtgactaaaatatttgtggttgaaagcattagtcataaaaatcataattttttgtgactaaatgtgtttttagtcacaataattgttatgactaaaactaaattagtgacaacttgtatctaacctatgttttagtcacaagtaactttttgctgtgattaaaagtcacatttagtcacaaaaaaattatgttgtcattaaaagtagcttttttgtagcgagcactaggttctctttggcatccatttatttaatcgagcattgttatgaggcaccaaggtgtctagcaccattataatgtggcgctctataaatacgtagctagtgattttctgtaatttttattaaactaaaacataagtggaactcgatattaaat

SEQ ID NO: 255843 - DNA, 685 bp, Cannabis indica
ataatcagaataatagtttttttttaatatttaaaaatattaataccggcggaacaatgattggggtccgccgatattaatgcatctgcgtgtaaaagtgcagacattaatatcggtggaccccaccgctattaatccgcaggtattaatattattaccggcggaataccattttcgccgctaataaccacttatagcgaccaattatcaccggcgaattccgctggtattaattattaccggcagtctggcctattaataccgacggatgcctccgccggtaatgtgcaaaattgttgtagtgttagacattaagccatctacctcaaacaactaagctataaatatttgttgcttataatacacttaaattttacttaaataaaagcctaatattatttttttttatttttttattttgggacccaaaaagtgtgggccctaggcacgggcctagcccgtctatgcctaaggtcggccctgatagtggcgtagccacatagcaacataacgtgtagccctctcaaaattttgttttattgtgtaattaattttttttttaaaaaaataattatggtataaatacttattttatttattttgttgctattaaataaccaaaactcaaaaataatagcaaaaatattcgaaatcctcttttatgttgtttccatcaatactcttt

SEQ ID NO: 255844 - DNA, 3314 bp, Cannabis indica
tatatgaggtaattcccctttaattaatccacattataagttaattttcttttaaataattttccaaaaatcgttgagtaagtaattcttttataaacttgtccacatttgatattgggagtcaagaaatatttaaaaacaacttattaacataagttcccaaaattattttaaaaaaaaaagttaattagcactttgacatatatcaaatcatgtcctttgaacttttaagattgttaaaatttttttttgaactattaagattgttagatttaagaactttcgtctaattttagtaagagaagtctaacatggatgaaaattcaagggacatgatttgatacatgtcaaaattcgagtggcgtgatttggtagatatcaaagtttaaagagtatgatttagtacatagacaattatcgaattagtaaaattgaatgaaatagtacaaaagtctttaaatacaacaatctcgataattcaaggaggaaatttttaacgtccaaaaaagttcagatacatgattaatacttgtcaaagttcatagattaaaatttttaattagccaaaaaaaaataacaaagttgaataattaatggtgatatttagttcttttttgagaagaaaaaaaaactattaaaagacaaaagtaaaggtgtgatgtaatgttacaactacatgaatagaaactagtttatgtaataagcgagattcgtattacataaacaaagtcttaaataacgaaagttgatgtaatcccattcccattttatgagacaggaaaggaaacaagaaaaatgacaaagggaggaattggcatgcagtgagaattgggaaggtggtaagaaagagagaggttttgccagttagcttaactgagattgttatattgtgagtttgtggcccccttgggttgtttggtaattttgttttcatcctctaaaatctcaaatgaaaccccccttaaatcattcccgtgatgaaaatctgaaaaggaaacttcctcgtttaatttatatatcagggggaaaatatgatctagatacatacacactagctaagtgtgtttggtgtttgtgtgtgtgtaattaccacacactcacttactttgctctgttccaaagtttgattggataaacggtcgatttttgggtttcaaacttggatatttactagcttagctttgcgtctaattaaggtaaagaaagcatatatgattattcctttaccccaagaatgaagcaatgtacttcaaatatatagcggatatatataattatgtatgtgagtggcaatcttaaggtatatggagctcaagactccctatataactagtttaattaatattaagacaataagaattctaaggttcaatcattctattgagtatttttaaaaaatataaaaaagtagagattgattaatcttttgagctcttaacttaaaataactctctttaccactactctaactaattttattatattttttttattatgtaatattttaccgatatgctgataaatttttttattattattttggggccctaagagttcggggcctgaggcggactcgcctaccgactggccctgatgtctcacaaaactaactagaatcaacactagttgatttgttctgaactcacttttaataataataatggagagcttcgattgaaaaacatgacagtaatacattaggacttttctcaggaggattattaactcaagtttggaataatatattatggagtaaaacaaaattgtacaatctagagcgtgtctgaaaatcaaatgaaaacatgatgagctgcaaaagcagagcattttaataagggaaatgatcagaatgcagagcagtatgtatgataacaatgcatgatatataaatatatatatgtaatcattcttaaaatgatcaaaggggcataataagacaaaatataatttcagaatatatagtgagagaacaaaattaattagagccacaaatgtatatagcattatacttaattggagaaattaacattacatataataatgtatgataaatggtgaaaaattagcagagttgggttggagaattacgtaccgcttgctgaaacccagtaaggtaaatagcaatagagcactcatctcttcctggacaaagtgcagacatagtaacatctgtaatggcaggaatcaccataaatgctgagtagttatggaggaagatggtcatgaaaagatgccccaaccctctattccacttttccatttcttctatatatctctgctctctctctctttactactatacttatcaataaagaagcatatatgtaatgtaatgttatttatatatacacattaataattgataaatctacgaaaggaccttattttataaaagccaaggaccatacatgatttgtaagtcgtatactttgtcatttaatatgttacagttacactccttaatatatgtaatcagatcagtcgagtgcattaatagaccaatcaaaaacccatatttttggaaataaccatgttttgattgttcataaagtgacaaaacataaaaagtgaagaaagtgggaagccaaagctacgatgcgtggcttgcaagttcatgcaaaggcctcaaattttttcaagataaaaagaaacttatttaatgtgtgaacgtaaatacgttttgaggcgtgcaagtttaataagctaagcttaattaatttgggtttctctctccacctctaaaaatatctaaatccatgtctaatcagaaattaaccttacataacaatatatatattattatggtgaatattttctccagtgaactgttgcttataaattagctgtgcacgcgatgatgagctagtttggatggaggattttccttctttccttttcgatgtactgaacgctgatttttttcaataaaatttagttcattgttcaaaaaaagaacaatatatttatatatatatatatacatatatataatttgcatctctttagttcctcttctgtttgatgatttgttgagttttgaacataaaaaacgacatttcttttagacaaattttgtcgtcaccacatttttagttattttcttcattttcattatttcacttatgtcatctgatctataacgatttggattttgaacatctcagtattattatcaatgaacttgtataaaatgtttgattgacccacatagaatcatatagattgacagaggtcacagagtggaaaaataagactttcttatgttagataaattaacaattaacccaagatctatttgtatataacatagaaca

SEQ ID NO: 255845 - DNA, 1237 bp, Cannabis indica
aaaattatttttatttgtaaaacaatttaatatattataaaaatgacaaatatttacaagtaaaataaatgaatgtacaacgataagtataagaaaaaaaaaacacttacagatgattccgatatggagatatagcttgagttgcttatagatagtaacacactacaacaaaagatagtattaggggtgataattttaggggcgacaaataattacctctaataacctattattagggacaatattcattagtcgtccctaaattattgttcttactgaaatgggcgaagggtttttgaaggggatcatcatcaaattttttaccaacgacattatcgctggggattggctgacaagtagcagtgtgtcagccaatctccaacaacaatgtcgttggtcgctatcttggggggaaatctggcgccattttgcaacgggtataattcaaaactaatcccaacgacaatgccattgggattagttttgtcgttgatgcttgtatttctgaaaataaataaataaataaataaaagtgccaacaacattgtaatgtcgttaataatggcctttttagtgaggactttaagacgttagtaataggggcgttggtaatgcctcttattcttgtagtgtaattagttgtggttgtaactgtatttatttctttttttcccttatttgttttttactgctaatgttagttaattagttgggattactagctatatatgtatattaatatttttagatatgttagttagagatgtgaattgtaataagagataaagagatttatgttgagaaagagagttctctgaggtgtgttcagagaagaagatcgagaagccattgatgaggcatgctcttagtcagtaaacactagatttggtttcatagtagatgaactgaatccagtgatcaaagggtgttcatatattaaaggattaggttcttcaacacattattagataaaagtttgaacctcttaaaattggttgtgttcatctttatgcttttatgttcttgtactatttgattccttgttctaattaaatatgtgcagtgttgtgttgtgtgtgtgagtggagattggttcgagattagagttggttttctagaaaccagcatctagaaataagggattctaacccctttcttagtggtgcaataatgactctatctataggcatcaatgcaccttggatctgcttgatctgggcccaattgaagttgtttt

SEQ ID NO: 255846 - DNA, 1866 bp, Cannabis indica
tggacttggacggtctggccttgtaatgaatgagtttaatatgttcagctcatcgtacaagtatacaaactactggtgagatggtacatttttttcaagaaccaactggtagaggttctgtctcttgacgaaatcctctacttttacaagttggagtcgaatcccgatatggaaggacaaaactatagtcggcttctacttgttgaataattggtctaacgcgatatgttccatcagtatatgcaaatacactcagaattttgggaatattggtttttcacatcgaaattcccattaaaaagacatctgactctttcattggatttcaatgttacggggaagcactaaaacttttcccaaataattttctttgactattccaccacttttggtaaaagtctgatcagggtaactttttctggccttcaacatgatatttcccgtcttgagctagctccttttctggagaatgatggtgaaccttcactgcagtacaaactcagaagcgttgcaagtggatggtttagtcactatggagaaccataggcgagttagcttgattgctcctcatcagagcataccctcacaattcttgcaagatacatttcgatcaagctcatgtcaaacaagctattgccgagatcattaaaaacgaagcaaaagaaagccattaaaaaagataagtgttggcttgaaaatgggcgaggatacatccagagtccatgaacgaagatgaggaacttgaagcccactttgttgacatcttcccagatgggggcacaccgggtgccagtacatttggaagaggtaattcttattttttcctagttcatgctccccatctagaagagtttgtcaacgctaatcaatgagggtttaacccttattttcttgagttagaccaccttaagtatcctgccacccacttctaaattagggtagatgaaatcatagagagtccaatccacttcatcccactatcgcaatgccctagagtagatccctttactttgatgaactacccatgcttctttcgatatggtagtttcttaggctgggaggacgtagcactatttgcatagggggatcctttgtacaataacaataacggttaaacccaaaccagatttttgcatttgtttattaattttcaagcattttttatttttctgtacatctgaccttgcttcaattcttttttgcaaagggcccagagacattataaatgagcatccttaaggccttcatcagccatgtggacattcaggctgatgtggtgtgggaggaatctaggccagcaaagggaaaagctagagcttctagttgtagaccacaaattaaagcaattaaatcccctataaacatggtggatgccactattgcggccaatgcactggacgattctgattctctgaatatcatggtagctccacagaactagattttgctagccccaaggcacccatcctggatcaacttgtggtcttcgggtgatgatgatgaggatgtggaagggcaaatctttccactaaagaggtcaatggaaaattttgagaggcctgctaaggatgccaaacttgaggtagttcagaagttgacatccaagtatttagcccttgaacggagggtagaaagagagaaatatgagcaagagaaggcaaaaagggagaaagataaaaaggagaagaggaactacccgagtgataaaaatgcaaggaccacaaggtatcgagaatttggatcatcaaatcccaagcagtttacgaaagcatgaaataagggctaattcctcatccatctatttcctcagcgacactttttctcccaatcaggcccattaatttggatgaagaatatttggctaag

SEQ ID NO: 255847 - DNA, 1817 bp, Cannabis indica
tggagagcttgcactaggctcctaattcatcccacacatcatcaacgtcaggtactgtaattttggtttttattgaaaccattttgagtgttttaatcttgagaatctgtggtatgagttaaagtgtttcatttttgtttaattaatttgttttttatttttctttttttaattttattgaactttgttttttcagttgcttaaatggttttagtttgtgtttcagtaacagaaatggatcgtgcttttcttttttcctgttttttctttttctttttcaattcaaatcttgtggtttgattgatcttctatggattgtttctatttttcttttcccctgatctgtaccttggctaaacagagtttgtgtactcttaccgaagtttttactggattatgttatgtataatatataattgggtggtgaaagttgatgacaaatatgtgtgtatatgtatacatacgtacatatataatatagtgataaaaaaaagtcaattttttgcttagtttgttggtattacagatttgtgtataaccaaagctttgtgtaaactcgaaggtttaaacttttggctgttatcaatatcaatccttagcttttttcttttaagcttacgtttttggagtgctggatctgggatcagcagtttttcgttttgtttttagtgatttcttaaggccttcagagattgttttgtttttttcattgtaattatctagtcaattgctgtccgaagcaatacatgtaatatcttttttttttttttaatttgttcttttatctttccttttaatcataattaattgcctaagggctgttcatcttaccttgcctttttttccttattaattttctattaaaaaaaaatctttattgccaaatttaagactctttggtgagtgtatgcgacttactagatttgattcattaaacatcttcccgttacaattttttttttccggtaaaatgccaggagttatttatacctatttaagagaataaatattttttctctttaaaaattgtcttttgggatggaataatttagttgaaatttgtatcatctgattctgtgtaaggtctttggttttgaagtagtgctgtggttttacatggcagaatttttatcttccagttgtgatttatgtttgtaattggcttctttgctctgctctggtgaatctaatggttttgttgttgataaaagatgagtcctcacgtttgtcttttccaagtttatgttgttcatttttctgtttttttaatttttgtatctgtgtaaattgtttcttagtttcatgctgtaagataagttattattatctattgaatgagcctgatgtgttgtttttgtgttattctattcatacagattacagtagatcagattcaagcagtgattcagagctgagtattttgagcaaggaaactgtaaaaataagggatatcattacaatttcgattgtgagaagatacgtgtgtatatatatagagggggaactggttagatttgtgatttgttgaataactggtttgcataagtttggtctttccttcttgagggtctgtgcgaaatgggaatttttgaagagatgggattctgtggtaattttgactttatttcatgcccttctcgggatggagaggaggttcaagagtgcgaaccagaggcaactgtggaagaggattatagcgatgaagagatggatgtggatgagcttgagaggaggatgtggcgggacaggatgttattgaggcggctgaaagagcaaagcaaggggaagcaaggagttgacaatgcaaagcagcgtca

SEQ ID NO: 255848 - DNA, 1154 bp, Cannabis indica
ttttttttttttttgagttgtaattctctatatatgtatgtgtccaaaatgagatcacttgtaaagatatttaaataaatttaaagaaaagatatttaaataattttttctaatttagattttttttttctctcttaaaaaaatatgaaaatatatatatatatttttttttaaaaaaaaacaacttaaataattaaggccacatataatattgattatgtgttttaagggtaaatgttaatagtatcacactctatggacaaaatcctagttagtatacttatttggtaacaagttattatagagcatagcattgtggacttggtgaggaactacaccgtggacgaggttaaagacactcttttatgatttcttagtaccaatgtttcaaagaaaattattttttcatataaaaaaaaaacttaaaactattactccctctgagatgaagtgtctagatacaataagtgacttttgacctatatcttgttgcaatataaatgatttataaagtagcactcaaaatcaaccgtaatcattagacttaataacactcaaaaccaagatgtcttcgttcatgagtgttgtggtataattccttcaaataaaaaggtctccacaattatcatttttgaaaagttgtttctctcgcagttacctagtcccaaaagaagtcttgtggaatgatagtcgtgttcggaagggagttcccgattgactattatgttcactttgggtccagtatacaggatagctaatccttccctagaaaggagttccagctggctagttatccttcctgaaacggtggtgctggatagtcatctacaacaggccttcatcctatccggaagcgtgtccagcgaaggtcctggcccttgagtccaaaagctcgttcatgttcctggaggccctggtacttaagctgacgtggagacttcgctcaaatgaggttggttaagttagttgtttttaactaacttaacaacctcatttcttgcagccacctactttacgatcttgatcctaattaagcctataaataccacatttaactcaacttttggatacacgattgagatacgagttggaaaactcttttcagttgaaattgagagagaaaagattgagagagagagagagaggtgcagaga

SEQ ID NO: 255849 - DNA, 1605 bp, Cannabis indica
taaattaaatttttaagatttactaaaacaatgttaaatcttttctaatctttatattaaggggggtacactttgatagttgacaaagtttaaagaacaaagttgttaattgacaaagacatgtcatcgggtaaacggaataattagacagaacctaatagaaggattaaatttctataaatgtaatagttcagggaatttttaacaagccgtatattttagaagccaaaatcaatattatcaaaaattcaagaggcaaaattataattattcaaaaaaaaaaaaatactaaaaggcactactttttttttttttgataaacctgaagctttcacttcacaaagaagcaagaacaaagtcaacaggtataactggaaggcaaacaaccattccaaacgcactcgctaagaagcctgagaccgattttagcatgatcatgaaccaacatgttatggctcctatgaacatgcttaacaacgagtccagggctttgagctagcaaggctttagtacaattaattacatcacttaaaacataattattacaaaaaacattattaattttgtccactactaatttacagtccgaaagaaggatagaaaccggcagcttagtagcttgtaaccattgaaccgcagccgaaatggcttttgcctcagcaacatccggaggaagcactccttgtaatgggagcataaaccctgctttaatgatcccacgctcatccgtgacaattgaagctaaactagtcttttgagacgccacatcaatagttgcatcagtgttaacttgccaggttcctacaactggggtagggattagatcttgacactgtgaagttgcagtatcctgtttgaagttcttggcacgagctaattgaaattcatccaaaaaattacaagcagattgaaaaatatcttgtggccaaggccttttatgattatgaaacactttattcctatagttccaaatttcccaaacaaaacaaaaaagtatagcactctgttgagaatcaaaagtttcaaaggcagcaacaaaaaagttatccatggagctagttaaattactattataaaaaccaataaaatttgaatttttccaggcttttctagcatacttatagtccaagatggcatgtttcactgtcttcgtggtttgatgacagatcgggcaggcaggggatggaattatgtgatgaaaaaataaagaggaagcaacaggaattgagtgggacaaaactcgccaaatcaagtgtttaactttagggagaacatttgaagaccaaactatagtccaaaaccgcttactattttgaaaagaggaacccgaagctatactacggtctgtcaaaggaaggtgataagcactcttaacactcaaaatccctaaagattcttgaccccaaatgagattatccgagccacatgcaccaggaattggaacattaaggatatgggttactgtggaggagtcaaaatgctaattaagcctatctaacttccaaccacccgatggggagagaaaataagaaagagttaagtcatgaggaggaggggaggcataaaatttataacgaagcccagggatccagtgatcctgaatcg

SEQ ID NO: 255850 - DNA, 1077 bp, Cannabis indica
acactatttttcttataattttttgaaggtaatcattcaatttgtatttaattatatttcatattatattaatttttgtgtatatatttttggattattattttttttatttaagcgttcatatattacaactatattttatctaatactcgaatgaaggacctccaatacacaatcccacttatagttacttgagctagcatcgagtgtgagtgtggtaatatatattttggatatgagaatgggctaattcttctttttgatataatttttgaagttttcaagattctattgacacgtgttaaaatatgtttgtgtgaagccattattgttttatttattttaattactcaattaatagctttttgattgcattcggggattttggggttgtttatgtgtcagtcaacggtttgtaagagtagttgatattaactattggagtataatcggacggtggggatctcatcaatccaagggacggattcaattcaattccaatactcgtacactacctaatgctgaatgacatggactattatttgcgctttttctttcccttttttccaacaaactattactactaatatatatttttataaataaaataaaatattaatatggtatcttatgttaaaaaatattagactttattttatttctcacgcgcgtgttaagcacgtacgcttccacgtaccagtaactatccgaggcagtgctttatgtacttttctgcgcagcagaaccaaccctactttcaaaaccgtagggtccttccacacgcgatttctagcgcgtcatattcacgatcgagtcttactctaaaacgtcaataactcgtataagcctcttctttctcttctctttcttgcataaaccaactaacacatacaacggagagaggtttctctctccttctctcttagcgattccattctttctggtttcgaattctgagaatttgggggcgcatcgaaaccctagattcgctcccattgttaaccggtgagtttctcagattcgtttcttttttcttttatttttatttttgtttcgattttttttttcggcattttt

SEQ ID NO: 255851 - DNA, 517 bp, Cannabis indica
gggtgtccagttgaacaacatatcttttactaggaagttcaacaagggatgagttattgtcgagaaaatctggatgaacctataatagaatccaacattcccaagaaaggatcgaacatccttaacatattaggggagggtagctttgatatgagttcaatcttggattgatcaacctcaattcctctttgtgaaatgacacgccccaagactatgccagatggcactatgaaatgacacttctcccagttgagtactaagtcgttctctttgcatcgtttgagcacaatttctagattaggaaagcttgattggaatgaatcaccgaagactatcaaatcatccatatatacctccatacaattatcgatcatatcactaaaaataatcatcatgcatcgctgaaaagtggttggagcattacacagaccaaatggcatacaccgtagggcatgttggaattatatttatccaggatcttagatctactcacaagcatgttgatttaacaacctaa

SEQ ID NO: 255852 - DNA, 1672 bp, Cannabis indica
tctctctctcttcgtctctctcacggaccgaacaaaaaaaaaaggcacagtggtctgatggtcggacccatccgaccatcggaccaccgtgcctctctctcttcgtctccctcaaaccgaaaataaatgcacagtggtccaatggtcggaccatatggtccgaccatcggaccactgtgcattttttttttgtttcggttcgagagagagacgaagagagagagagacgaagagagagagaggaggctgtgtggttgaggcttcgggtccgacagaggaggctgggtggtcgcggttgagggtcgacggagctgggttggtcggggttgagcgtcgacggagctcggttgagaaagggggcgtcggctgtgagaggggggctgggtttcgtggttcggctgatagagaggaagagagagggtgatgttttgaaatgtgaggggtagtttaggaaaattagtaaagtggtcatattttttgtagtataaaatgtattgattttaaatttttttttaagtttttaagtatagaaaatcaaatttgcttatggtaatattcaaccaagcatgtgataggcaaagaatctttttattgctcttttttaatgaggaaaattatgatgctttggttaaagaaaataactacgagataattaataatcaaacttatattaagcatattctaagttctaacctatcttaactgaaagaaaaactatatatatatacagttacagtatacgttgcacaagtactaaattattagttaaataaattagtggtaacttatgttaatacagtactttctctttttttcttgggagaatagtccaattaacgtttcttgttaattaagatatatatagaaaaaattaattggaccttggaaagaaaataaaaatatattttaagcaatcgacttatgttgttgtcggtggccactggccagcacgaaaactgtttctttaagctattctactaattatgattctcttattaacttcttaattagctgtcctttttataaatcgaaaatataaaaaattaagtaattaaacagtgctatgtatgtggtatataaatagcaaagttctctttcttttagactttagttgttaagctagcttttaaacaaaaccaactttatacatatgtggttgtttgagtaggtgtaaatgatcaaatatactttcagatttagctaattattacttttcaaaaattatatggaaaattttggacaaaaatttacaattttactgtcacgttgaattttttataaaaatactgtctttctacaaaacaaaacaattaaaataacaatgaaacaactaaaaaacaacaataaaacaaccttaaaaatttaacaaagtacacaatattttttttttttaaaaattccacctctcaataaaattgtaaaaaagtaaaaaatttcaatatgtgtgtaaaaactcaattatatttgctctttatgcctttttgtgtgcctttaatttcttgtgctagctagctaataaacaaaccaaccctacataactttacggtcgatgaaaaaatcatataagtcaattaatttaggtgccgtttggtaacacttttgttttttaattttttaatcacaaaatgaaagtaaaatttttatttttaaaaaatttatttttgaaaaacaa

SEQ ID NO: 255853 - DNA, 2371 bp, Cannabis indica
tgtgatcttgttcaatcttacatttatgtccacacaccttactcctgtccattcaaaatttctcattctaattcaactcacaatgatatcatatagtatgtatatataaatatcaccattgatgagtattaaacaattagattttgagtactaaaaaatttaaatttatcttttattacactaaataaaaaatatgtttatataagacatttttgagtgaatttcaatttttatttattatcattttttttttaattttatttttatttttttctaactccagtgtaaaaataatttttttttctaactaaatgtaaaatttaaacataaaaattcaaaattcaaaatttttaattattactcattatgagtaatacccattaaaagtatacctatgtatatatatatatcataattcatagtcataaaaagtgagaaattttggtatttcaccctctaaagtcttatttaggtagatccttatttgttttaacattcacaaaagttttacagcttaattttgtattttttataattatgtactacttgaaattttttaagaaaataaaaaataatttacaatactgaaaataagttttaaacaattacttaccacacatataaaaaaaaataaccaaacgtgtaataaaatattaaaatcttattttcgacattataaactacttaaaattttctaaaatatacaaatgatattaaataactatagcgtacacgaactatgagaatatacatatacattcttaaagttaatggctgtatatagatttttgtatgcaactatacctataattaatagctacataagcaagtttttttattaaaaaataagtaacttgtaaccgaaattaaaagatattaatttgtaacgatttttatagttgtgtatcatttgtgcatcaaaaaaattatttgcatattatttaaagagagaatgagaggattagatgttacctttgatcttgcaaagggctttgcgaacatctttctcgcaagccttgcagtgtatatgcaccttgagctccaccacctctaactctactaccatcattaataataataccaaaccaaatcaaaccacaaactatcaaaacacaaacatctatataaataaatgtatattgactttacttgactcacaaacaacatccaaccaatgccaatattcatgagtagttgtcttatgattatgatgatggagttgagcatgcgtgcgtttgtaagtgtggccaactataaataattataaagtaatttttggtataaatacttaagtctaattttcgattacaaataaatatttaagtttaatttttagcggcaataatattaaacttatatttttgaaactttataggtacctgaccgttaaatgttaagtatacttgtcattttttgttggtatatttaaactatttattttttttaaaaataacttggaccaattagagattaccacgtagcaattttatttaacacttaacaatcagatacttaaggaagttctaaaattataacttaagtattattaccgtcaaaaattaaacttaggtatttatttacaactgggagttaaacttaaatatttatgctgtaaattactcataattatatttaattaaaatgaattttatttattttaaaaataatgattagtgtactcaaaatatatatagtaaagttttatttattttaatattgtgagttttttaaaccaatcatatttatttgagatattgggagcaaaactatttgaattttatttttttttaagacttaaccacataagctaaaagtttgatggcaaaacctattgaacttccattatgttttgctcttttttatacttctgtccaaaaacttaaattaagtgtcatagtggactatccgcgtagacacaatgtacatgtgacaaatttttttagtgattctcgtaatattaattataaaaataatttaaaaattatatataaaaaaattattttattttattttttccttttccttttcttttttctttttctttttccttttacttttcttcttcttctgaactgaaaaaaaaaaaaatagtaaaaacacttaaaaaaaaaaaaaacaaagaatttcaaaaccatgattactcccaaacttcatcttctctactcatcaaaaccagttgagtaagaacttcatcttcatcttcttccttgttaattccatttttggcatatttaattgacaaaaatattttattatttaatgtatatttcggctggcatatattgatttggtttccatatttgtgtaaatcaaacttgaaaggaaagttgtctagctttcctatttttggaaaaaaggtaaaaatggtaag

SEQ ID NO: 255854 - DNA, 2912 bp, Cannabis indica
gagagaaaaattattaattaacccaaaaaaaattaataaaatctattaaattatctctcatattacattggaatgttatttttttccattttaaaataaaatagtcattctaacaattatttctttagaatgatattctaatactttaaaaatataactaaataaaaaaataaaataaaaattatttcattcaaccaaacatattcattaaactaaaatatttgaaactggaaatttatttgatctaattaatagtatagtagtatgacacttcatttatcacatataacccaatagtagtgcgaaacttcttgaatcgtagcccaccaaacattaccacattgtcacatcttaaaccttttccatcataaatgacacaaaattataacactccctaccaaccaaaccaatccaaattccaaattacatactacaacaaaactaaataataataataatattgcttgtgttaatagaatgaaatcaacctctcccaaaaaaaaaaaaaagaactcctaaggttttgcttggccataaacaagttgttcaaacttagccaataaaaacttttctttctttgctttttcacacctaccctgatatacaattaaaaccacctttttcatgataattataataataagaatgttcttaatttagaatccaaaccagtattgaaatgattattatgaatatccagcataagcattttgatcagtcatactcataacactgtctttaatctcttgtatcatcttcaaaacttgccacattgctggtctctgttccggagatgtcaaactacaaatacaagcaacttcagtcagcattcccagctgaccatcttccccgacatcgtcgtctctcatggctctcacccaatcctgcacgtccgtaggcaacaggaatggatgctgcgacgggtgcttacccgttaacagctccaacaacagtatcccaaatgcatacacgtctgatttggccgtggctcgcctgcttgatttccttgtttcgggtgccctgtagcctgctgaatcaggatcgtcgttagctgatgaatctgccaagatggcaaggctgtaatctgttaaacaagcctcgaaatcgggtcctagaaggacattggaggatttcaagttgccatggattaatctagacacttggtgaatgtaagcaaggccttgtgctacatcttctgctatcttcaagcatgatgtccaatgaagtggctttgctcttgttgatcttgaacctaaatattcataccaaaattcacacaaattactaaggggcatgtttggaagtaaagtcactatgtaattactagggtagttagtaattacactaatactaaactcaattatcataaagcaataaaattggagagtgaatgtttttttttgaaagaactttggagagtgtaactgaaccaatcaattatcttccattacaaacatgttaatatatgcaattaataacaatttcaatcaatttgataactttattaacaagttattattgacttaccatgaattagattgaagagacttccattaggatggtaatcaaagatgatgagtctttctcctttagcctgaaaaaaagccctaacgggaaccaaattaggatgacggagtccacctacgccatccatatgcctttcaaaggcttcaccgctaataacggccgttttaacggcgtcaagacgcttaacagtgacaataagctgattatcaagtacggctttgtaagtagttccaatcgtacccctacccagtagctcagccgaagctctcatcaattgttccaagctatagagctgagcttccccagcactaaagaccaaattgccactcttgtgaactctctgtaactcttctactgcctttgttttcgagggcaattccgtaatttcacgagtggtttcaacatgtgatgaaggtccttgttcaggtgaaggagaaaaagaagaagtagccattgttgatttatgggccctggcgaatgagaataggcccaatagaatcaccattacaaaggccgacccaatcgaaagcccaagaataaggcccgttttcttgtgattcaccggagaagaaggagacaaaacaacgccgttacctgacgacgactcagcgctctgaaccagcggttgctgagccgccgccgacgacggagacggcgaatcgaagaaaggagcgcgtgagttacacaccttgttgataatctctccacaaagaccgacatcgttccacaaaaaagacgaagctctgaaccgcgaaagcgccggagttaacggaatcggtccagtgaggttattcccggagacattaaagacgagaagcatagactgatttaacggcggtaaagttccgttaaaccgattcaactcgagtctaagcgaattaagtctatcaagcttaacaatctcaacaggaatgggaccagtgaagttgttactcgacagatcaagagtgagaagacgatgcaaagtgagaatcgaaggcggaaaagaaccggagaaggagtttcgatcaagaaaaagcgatttgagattagtgagagcggagagatcaggtaatggaccggaaagggagttgttgttcaagctgagaacgcgaagctggtcgagtcgactcagtgagtcaggagggaaattacctcggagaccgaagctttggaggactaaacggacgactcggccttgagcgcatttgacaccttgccattgacagtagtcgaatcgttcgttgagaaggtagaggagtttgtggtcgaggtcggctttggatttaaatgttatgagtgaaacggcgtcggttggttggaagagtgtggtttggaaatggaaggttaggatcaacgtcgtcggagaaggaggcggcggcagaggaggagaaagaaagtaagaa

SEQ ID NO: 255855 - DNA, 566 bp, Cannabis indica
ataacaaaatacaatctaacataatataaaacaatcacgaaaacatatagctatataaaaatttaccacccattcgaccgtatatgtattcgcagaacttacttcactatagatgaatatgtaagatattcaaactcatctaacattccacctatctgaccccaatacaatatattgtagaactcacttcactacggataaatatttaagatattcaaactctaccaagcattcatgattaattaacattccacctatctgaccccaatacaatatattgtagaactcacttcactagttaccaaataagttggatccttataaattgacctcaaaatctacaatgtaaaaaatactacaaaattaaaaaattctttatttagctacttattagttatataattaatgagtgactagttactaactacttaattgagtacaaactagttcttaataagtaactagtgtaacaccctaactagccaaggagtgttacgtgatttttaaacgtactgtgcagctcgttgctaatcaacgagatttatggaaatcgtgattaattaaaa

SEQ ID NO: 255856 - DNA, 725 bp, Cannabis indica
actgtagaattactccaattgtcttctagtttttcgatcgcagcaatgcccgctactgagtcgcacaccgatgcgtcaacttggatcaccggtaagtcgtgatttcccatctgagggagtgttgagattgaagaaggaggattgtaatctgtctcctgttcccttagtgagaactcttgcgatctgtagtgacacttctttgccagcagaggaatatcccagggagtgtattcatgtacaatcttgttgcgccaaaaccacagcacttccacgatgcacacagcaaacacctttaaatcatggtcctcaagctccaaccaccatttcacaaagtccatgatactgatccagcccatctggtctatacgaatcccccatttactcttgaaccaaattccgcgagtaatgttacatttagcaattagatgcatcatatcttccgtttcttcctggcagaaaacataggctctgttatggttcttgagaaatctgagtctgccaaaggttggaacgcagtctgccatcactttccatatgagtagtaagagacgcggatgaatcttcgatttccacagctgcatccaaatcggattggtccccaagaacctatcatgttgatgtaaccaataggcgcttttgacagaaaacttcccagacttagccgctttccaaaacaaaatgtcatttccttccccaagtggtttaatgttgagtatagtctccgc

SEQ ID NO: 255857 - DNA, 710 bp, Cannabis indica
ggtagtattatttaatacaatacaatgtttggtattgacttgtattaattgatcgtgtaaaattataatatattttcaatacacttgaccccaacatcaactacgggttcggattcaggtcggagtcccgagtcttgggttggggtctgggttcgggttggggtccgagtttgggttcgggtttgggtctcgggtcccaatctcgatcccaggtctgggttcgggttcgggtccgggtctgggtttgggtttgggtccgagtctagggtctaggtctggggtctgggtctgagtttggatttgggtccaagtccagagtctaggtctggggtctgggtccgggtcccgagtttgggtccgagtctaggtttgggtcccagtccgagtctgggttcgagtctgggtccgggtccagtttcgggtttgggtccgggtcctaggtccgggtcccgagttcgggtctgggtttggatacaggtccaggtttgggtctacgttcgggttcgggtctgggttcgagtcccaagtccgagttcgggtcggagattggtgttaaccccaaatcatttgtaaatattataatacaacatacattgtattaaaaaattttagtcgtaataattaatacaataaattattttatccaaacataatgttatttattatttaatacaatacgacatttatacggtgtaccaaacgagccctta

SEQ ID NO: 255858 - DNA, 1327 bp, Cannabis indica
aatttctcaaaattttgtaacatatcttaaatagctatagcgtacatgaatatgaaaaaaaaaattaggttaaattttttttctagatgccgaaacaagtaggggtgcatcagtacatcccttttaaaggggtacattgtagaatcacccacaaaaatattacttttcgataaattttagtgtatcaatataccttttcgtgttttcaatattcatataattttagaaaattctagggtgcacatctttaaaataaacacacttgtatatttttatttattttggtatccaaaataattttcttataattatttaaaaaattttaaaaaatttaacacgctaaaaaatagaatttaaacattatgtttgcccgcgtgattattttgttttatatgcgtgtgaaatatattaattgaatactactttctatattataaattactccaaatttttcaaaattttataggatatcttaaataaatataatgtacaggaatataaaaataaaattagactaaaaatttcttctaaatgccgaaacaaatacatgatgcattagagcatctattttaagggggtatattatagaaacaccctgtaattttaatcttcattatatatataactatgggtgcactcttaatgagtttttatgattaatttttttatttaattagaaaattttctcatttttacattatatgggctggggttgttccatcagctgaaaaaaaaaataataaaaagaaaattttcggcaaaaaaatgataaaaaaaaaattgagtttgacttaaatattttttatataaacatatttttgatatagtataaaaagaggtattttttgatattttctttaattaagtagctaatttaagcatagaaatttaaatttctattttattattcgcgattagattaaaatttaatggtttaatatttttaaaattaatatttatagttgaatttgtttagtacccatcaatagataatacccattaagaagtgttccatataactatatacattgtagttatttaagatattttgtaaatttttaaacaattagaaataatttaaataatctctcgtacacatgcctattttattttaaatcgtactttttgtattataaattattttaaaattttcaaattagagaatttctaaaataattactacattcttttcttgattggagaattttatgagaattgagggtatagtttacttttttatggtataaataaataacactatagggttatggtttttttattttgtttacatttatatgggtttttaatataaccggttctgtaacat

SEQ ID NO: 255859 - DNA, 1421 bp, Cannabis indica
atacgctacctgtccgaccttctcgagtattttgaatagcactatgaacgaagggcttaacttttccctcatcctatagcgctttacacccttcattgttgagactcgtaagaaaacatgttctcctacctgaaattctatgtctatgcgcttaggaccagcataacttttttgcatgatttgcaaagcaagcattcgacccttgattttctttattgcctcactagtccgctatactaactcaggacccaaatatttcctttgttcggtcttatcccaatgaattggagaaagacatttcctaccatacaacatctcatagggagccatccctattatattctgatagctgttgttgtaggaaaattctatcaaaggcaaatatttactccatgaaccctcaaagtccatagcacaggctcggaacaaatcttatagtatctaaataaccctctcgaactgtccatcagtctaactgtgaaaagttgtactgaacttcactttgtacccatggttctctgaagaattttccaaaacttagatgtgaacttcaaatctctatccaaaataatggatttcagagccccatgaaggcaaactatctcttttacatacaactacacatactaatccattgtgtaagttgtaacgccttgatacttaggcgcgctatagtaattttccaattaacgtaccacatttgctaatcaaaggattttcctcaaaaatcgtgctaaattaaaactttgaggaactttaaactttataaatttatatatatttatttacatagaccgggatcccgtattttaacttttacaaatattttcaaaatacatttacaaacttgtcacacaacgactacaaaatacaaaccatgatgtcctgagatcgaacactctaggtcgcgtcgtctcgacatgtacaatcaccatccaagctcagagctcactcctgttcagcctttgccttttctttacctacacataaagtagcaattgtaagtcaacagactcagtaagaaaagcatataacaaataatatatcaccgacttatatctaggcgcccatacacctatccacaaggcttatcaaataagtaagaatgttctttacactgggtattatcgaccatgatatcatccactgccagtgttatgattgcaagttgggcccagtactatattcgttccgctatgatagcatcgataatacccaaaagtataattgaccataataccactcttaatacgtactatactcgtacttctgacctggtactatgctcgtaccgctatgaaagcataaattaatactttctggaattgcatatcagtcgaacccagtactatgctcgtactattgacccgagactatagttgttctgctatgatatcgattcacaacctttaaaaatcaca

SEQ ID NO: 255860 - DNA, 1714 bp, Cannabis indica
aaacccgaaaatctgacccgtgtgcagccctattataagctaaagagaatggatcaatccatagtacctagagcctaaagtgttgaccatctccggaaatgctaccaatagttaggagatcagtattttatttcatctttactctgtaagttaacctgtggcggacaaagtatatgtattatcctacataaatttaagctaagtgatccaaaaagtcattttttacttcacttaggggggtattaaggcataaaatacgcgcagacaggccagacataagaaaagtaaaatagatataaactcatggtataagttgtctaaaatataaatagtaaaagccttggagtcgggctataatagtgtctcccctaataaaaaatacaaaaaataaaatattgtcttgaggggggaggaaataagtgaaatataaaaagataaaaaaaaaaaaaaagaagaaaagagaaagaaagaggggttcaattagtcaatcagctcgtggaggtaaacggggacccctgcacttggccaggatagcttccagcttcttgttcttttctcaaaattgagccacgactgcctcaagatcaggaaagaagtggagatgaggttcaaacttattagatttccagcacatgaacaccccgtcttcgaagcgcttctcgcagtgcttgcacgtgactggagcaagtaaagcctccctcacagccttggtagcctccttttgagtttgctcccgaattcacgaagctccttgagttcaacagtcatatttgcagctgtctccaagtcagtccggtgtaattctttaagggacttgagtttcacagaaagttcctgggtttcctcccgagcgtctccgaggtctttcttgtcgaaggcaatgacatcgtctttggccttaagtgcctcttggtggtttctcttcatcagggtcctctctgccagggtatcgttgcgaagagcctccactttgtcctccgactctcggagcttcttcactaaccccttccatgccacccaactctaacacggtgaacccttggtcgaccaaagtcttagagagccgatcggcctccacatcaatctggcaacaaagaaaaatacacttggaacttctaaaaatatacaaaggagaggcgtggaaagctgacagttatcgcagtcaaggcaacactcatgtcttggatttggtagacgaggttggagcaagcacaggccgcatacctcttcctgggaagctgggtcaaatcggtagcgaagtgacttatcatctctgaggcaaacggtgccatattacgacccaagatgcgcttgaactagtcggtcatgggatctaagttcagatcctatacctctctggtatacccgcctcggaaaggcccatcttgagcttccctcaaccacttctttagggcctcagcttcagcgtcacgcttggaaaattcctccactacataattatgcttggcaatgcggagctgaaccctttcctcatcggggtgggcaggggtcagaaggatgcctagaggggcaagatactcgtcaatctcatagggaatccctgaatcaacactaggaccagggtagcaaccctcttcagcttcttaaaagattctggcttagtagtggtgctcttatgcttccagtcgagtggaggaaccacctcttcttcctcttcataaatcaaaacaacctcctggttcccaatagtttc

SEQ ID NO: 255861 - DNA, 850 bp, Cannabis indica
gtgagaaaacttttatagagttaaagcggcgcttgattactgctctggtgttaactcttcctccacataaggaaaagtttgttctttattgtgatgcctcgagacaggatctgggctgtgttcttatgcaaacttgaaaggtaatagtctatgcttctcgacagttaaaggagtacgagcagaggtaccctactcatgacttagaactcgcagtagtagtatttgtgctaaagattttgcggcattacttatatggcgagaaatgggagatatacactgatcataaaagtttgtaatacttctttagccagagaaacctgaacatgagacagaaaagttggttgagctggtgaaggattatgattgtgagatcctttatcaccctgggaaggccaacgttgttgcggatgccttgagtaggaaaggccagggtcaagtaaatatagtgaaaccgatttcccaggaattatcagatgaaatgacccgagctagaattgagtttgttgtggggaaattagctaatattaccctgtaatctactcttttggagagaatcaaagaggcacagttgcaagatccagaattagtgaaatcccgagttagggtttccgctgggaagactgtagattttacagtggatgacacggggatcctacgatttatgaattgtgtttgtgtgcctatgaatgatgacattaaaagagagatcatgattaagtcccatacgactccttattcagttcatctagggtcaacaaagatgtatcaagacctcaaggctatgttctggtagctagtcatgaagaatgatattgctgaatatcttgctaagtgtcttacttgtcagcaa

SEQ ID NO: 255862 - DNA, 1171 bp, Cannabis indica
gtttctaaaggttacgggaaatatactaaagacaatgacaataagattcttcagatgaagagcaatcacagcagtgcagatgatttctttgatgagatatgcaggtttagatacatgaaccggaagattgttcgaattgaataacggctcattaaatctaattccttgttcaatttatcattcaatttcaagttttacctaatttttcaaatccctaatcaattgaactactaatttggttcaatttaaattcataattgttttttcccccttaatctcttgatctcttgagattggtgatagtcattaagcaagtaatcacattgcagctgttctactacatggaaaaagtgtacaccttaaacaaaggcatagctttatggaaaattttaacttaattttttcagttatgtttttttcagttatgttatctataaattcaagctgttgatatatttgttcctttaatttaaataattttgttttttttaaaaaaaaaataaaaaaaaaaaaaaaaaagaaaaggaaacggttggtttttagtcaaaattaggattgaaattttgaacagaagtttttgacaagtgggaagcatgcgagtcagcgagtagggctgagcattggtgggtttggtcgtttttttctatataaaaaattcagaattcggttttcagtttggattggtgcaatttaaaaaccgaccgactgaaaatcgatttaaaccgcctaaactaaatctttttttttaaaaaaaaaatatgatctattattctatgaacaaattattctacattttataactataaacatataaattaattattcaaaaattaattttcttatttttttaactttaatattaataaaataataatatattattattattatatattattagtaactacaatacaaaaatataaaaaaaaaaattaataaattaatatatatatatatatgtataacggtcggttttgattttttcggtcagtttattatctaaaaaaaatcaaccgttcaatggcggttttagccgttagcagtttttttgattttcggttcggtcggtttcagttctaacagtgttcggtaggtcaatttcaactgtttttttggtgttttaaatttatgctcagaagtcagccctatcagcgagctagtattcttgtga

SEQ ID NO: 255863 - DNA, 685 bp, Cannabis indica
tccactacagacacaacagaaaacgagaatgttccctccgtcgccattgttgtcatatttgttttttcttccttctcggtccccactaaacagcaatagcagcaagcagctccacaactcactcacaccaagaaagtcccagaaaaatctcacaacgcaacgatcaaaacaaacatcttaaacacaaaaccatcttcctctgagcaaaaaccgttgtgggtttcagagaaaaagatctgaagatagaaatgaaaacaaaacagagagctcagaactcagaacagagagagagaatgaatatgttgtgtttatgagataatatcttcgtagttaaaagtagtgaattgtagtcgttggtgatgaataagaaagaagaaagatgataatgagtcttgtttgttaccaattcagagactcacattattctccatgacctttagctttcgccctttatttttattttagtttttcaattttttttctctctacaaagcaatccaaccatctcttcctctactgccttactttatactctgtgaccctctctctctctctctctaagcaacaacactccgaacctagtcccaagccttctcatttaaagacagcatttgaaaaaaaaaaaaaaaaatttcttttgacaaatttaaagaaataattgtttattcttttaaagaatcatttt

SEQ ID NO: 255864 - DNA, 864 bp, Cannabis indica
actggtccaagtgctactgaaagcactaacagaaatcgaccagcaggaatttaccaactaagggaggaggacagtctcaaagcccaagttgagtccttaacaaagcaacttgaggcctttaaaaaaaaaagtgggcaaggactgaatatggttgccaaagcagaaatacatgagccatgttttgtgtgtggagaatcggatcatttagctaaggattgtttagcctttagagaaatgaagggggtttatgaagagcaatgcaatgccttagggacctacaataagccattctctaatacgtacaaccctggttggagaaaccacccaaatttcagctggaaagatcccaaccaagcacaatcttccggagggcaatggagaaatgagcaccaaaatcaaccatcaaaagctcagcctgctcctcaatacaattctccacctcaaaggagttctcttgagaacacccttcaatcattcatggaggagcaaactaaaataaatcgccaaatgatggaagaaatcaaagaaatgaagagtcaattttcaaaattgactgggtccttggctatttctgaaagaggcaaacttccttctcagcctcaattcaatgcacaagggcaacatatggctcaaacctccagctctaacgatcaaatagttaaggaggctaatgccatcacaactagaagtggtaaaactttggaagatcaaccaataacagctaccacttcaaaatctccacatgttgtccctgaaagtgtgccatccaatgcttctgcaaaagttccatttccccaggctttgagacctgctgggaaaaatcttgaaaatcgaggagaaatccttgagcacttgacacaagtg

SEQ ID NO: 255865 - DNA, 1394 bp, Cannabis indica
gaagttttactggcgcagttactctatgcgccagtaaaaagtcctttaccgaccgagcttcccagataatctttgccggcgcagtaagggtacttttgccggcgtaacaatgcgccggcaaaagctggttttcttgtattgaggaacaacaatcggaatgccgaaggcacgagagcttggacgacctacaggaatagtgtcaacaacaccaggtcggatgatataagtccaattggatgggagataacgtctccaccccttcctaagctcccaaacaaattgtccgtagccttctcctgcaatctgctcggagtaaaagtgatgttgcacctcgggttccggagtaggaaaactttcactactcacttcccagtcttcgaaacttgagttagagagtccgtcactcgaagaggaaggactggcgcgaagacgaggttggtcctcgtataaaagctgaagaagatcttggtcaatatggtgttcgcctctccaaaactcaccagggttcatctacaaaagacaatacacgagatgagtatttggccgggaaatcgaacagaaacaggcaaatataccgaccaggtctacccgacgaattaaaaagatgaaaaatgcgtaaaggttaagttcgtaacccaggagttcgaaaatttaaaattaagggttaattttcattaagccttgaatgggcaaagtgaagatcgaacagtgtgaggttaaagtcaaaatatcacaaacaacgaagtcatatgatttattacagtaaaaattacgaagtctcgagcctagattttctacatgtctcctaagacaagtcaagaataattgtattttctacaatggaaaccgagaaaattgaaaatacgaaattaaaggagagaaagatgagaaacttactcaccgtttgaagctttgaagctgttcggatctttctgctagaatcccacgatagtctcgagagaaaaaactatttttgctctgaagttgcttagtgagaaaaatggaaaagtagtttatgaggattttccaccctatttataagcagatttgtgaaagggtgtaattaattaaaacctcaaacgcttcgatttctccccaaaaagcaaatattgggaaattaaaagcaatcaagtgctgaagaagagtaatcgtcaaaagcgtgcgagtgaaaggcgcgtcttgagaaacgaattgatcagagcattaattagccgaaaactgaagggactcctagtcagaatcacatcgaatcacgaacagacgcattcaacacgtgtcacccatccagatgtaaggtcggctcaattgaagtctacacgtaacttcggaagtcctatacagacttgggggcaaatgttatcccattttttgcactacgacgtgacatcacatgc

SEQ ID NO: 255866 - DNA, 530 bp, Cannabis indica
ggaaactgagggtccccctaaaaaagaacaaccaaattaccaactgaagcctctcacatcaatgagaacagaaggcgaaccgagaccagggagcaggaaatcgctcgtgagaactaaggaaatcctaggacgcaacctaggacaggtgggttgccgtcgaggcatcgccaacgtccttctcgcacaaacagggaaggggtgcgtacaaacctcaacaggatgcatacattgacccatacccaacggagaaggccgagacgtgacgagacgagtgccagctcgagacgcacaaaaacccatagtcgatcaacgcgaggaggagatggaactcatcccaatactgatcaagagagtgcaggcacaagtaaaactaaaagttactcaaggacgagatcaatgagtaggacgaggtccatgagtaggacgaggttcgttagtaactataaccagcagcaaccggatctccgtaatcacttgaactagaaaaaacctaaccttcaccaacagctcggtcaaaagcaagaggatcc

SEQ ID NO: 255867 - DNA, 983 bp, Cannabis indica
catcaacactaccgtatagtaaatacttatataattatatattgtgtaggaaggaggaggaggagtgatggtgtccaaaggtgaaaccgtttgtgtgactggggcatcaggttttattggttcatggctcgtcaggacacttctccacctcggttacactgtccgagccaccgtccgtgaccccagttcggttcctaattaattaattaattactcaatattacatattattattaattagtaatcaatttgaccatttaatttggttatatattaatgtgtagccaacttgaagaaggtgaagcatttggtggagttacctaaggcggagactaatctgactctgtggaaggctgacctatctgaagagggaagttttcatgaagctattaagggctgtaatggagtgttccatgtcgccacacctatggattttgagtccaaggaccctgaggtaatttcccttatccctatttatatatataaatatacgatgaaagaagtgtgagtgttgagtgtatatgtatatatattgaatctcaaacattaattagataatattgattgttctgaatatacactttctgtactttgggtgttcaacaatactcatttggctgtgctctgtatttttaaattgtgcatattggacactttaaagttaaatttaatgaacaaaattttatcaatttaactaaatttatcttaattatatacagtcaaatagttaaacttgaatttagaactgatatagttgaagacagtttgattttgataagaaaatttatttatcaatttaagtttaaagtacccaatttaaaccatttcaaagtacaagataccaataaatatttctaaaagtaaagaatactaaatttgcatccacataaaacacacctcacaaataagtacacgtttttttttggttagtaaaagtagaaaatgggaccaagtgagtatggtcttttgtttttttttttttt

SEQ ID NO: 255868 - DNA, 1457 bp, Cannabis indica
gcataaaacccaacatgatttttgcaaaaagactcagagagaagaactaggcgaggaagaagtggttgaagcagaacaaggttgaaacactataaaaggaacatgacgctgtcatctcatccacttgacaactgatcaaattcaaccaacctaaatctagttttcattctctggcaactagtagatgggagacaccttctatggtgattcaatccctcattcattgttcttcctaattcagccttagtgatagagtgccatgctcacatatagcaagtcaagtactcaatcatagtgagtaagacggtggtaaccaaacttgaaggagagaaagagatccaagcttgatcttgataatactctacgacataaaggaataagggttagagatctgagcgaagtgagtcattatattctgctgcaaccaatgtaagattttcaaaactcttatgtgtttaatttattatttttttaataaaaaaacaatgaaattaaacacataagagtttataatgttaattaacatacttgttagtaaatcaagatcttggtaaaatattcccaacaaccaatgaaggaggtgaaatcattataaaagaaactctctcatctactagttgtttaaaacacttcgatccatcttaaaattatatttccaatgcaatttgaatgcgatcatttggataaaagttgagagagttatgccagttttactaaggacactttgtgttatttgtctcagttgcgagcactgacatggcaaaatggtcagtgctcgaccatgcatgttctcaaaccccttggggtgtgttttgacttttttttatggggagtcatattttgggggtcctgagactgccacaaggtgatggtagtggtcgccacttacaaagcacaaagtcaaaatggcagtggtcttggaacacatttgaataatttttccatgggggttttatgccattttgagtttatgcacaaatctaagcctttttatgcctaaatgagtcaagtccttgttggtttccttggcgaattgaggtctgtagggtgaaaatgcttgcgtgagcccatgaactcttgtttgggcacacttggatgcgtgggttctggcaccaaatggttggttaatatttttgtgtcctctagaagtgtcattgggcccttaagatagatttcttaactcatttgacatttataagtcttggtcaaagtcgcaaggttgacttgagtatctttaaggtacttttagcatgtgggcccttatgcaaaagtagtagtagtcattttatttttatttttttgtcgaaaatcaggtatgacagtatgactccaaacaaaattactgtatttatgaataattttttagtgacaactgtataattaaaacttgccctaaataaaatgtaaaaaattattaagagcattaatgaatggtaaaaaaaataaataaaaaataa

SEQ ID NO: 255869 - DNA, 1390 bp, Cannabis indica
acatctcagacttgtggaaattaaccatttggccatatgccttagcataattatccaatagagttttgaacccctcacactccttctcattagcatcaaagaagaccaagctatcattggcaaaaaataaatatgagactgataacccatttccgccaaaattaaggccatgtaaccttcccacattttcctcatgagaaatcaaactagtaaaagcttcagcacagaagaaaaataaaaacggagatagaggatcccttgtctcaaccctctcccaggaaccacattacccacaacttcaccattcaccaaacacaccactattttaaaaaaaaagagaaaataattaaaaaaaacacacactatttttattttatttttcacctcattgattaaaatacaatggttatcaattatttacggaaaaaaaagctgttaaaagacaaaaattcaaaattttgagaaaacacaaattatttaggaccaagtactccaataaaaaataaataaaaatgcaatcgaagccattatcatgcaattcagaattgagatgccatttttttaattcaataaatatgataaatcagtacaaaaatctgatgcttttaaagacaactttttagtcacaacataatttttttgtgattaaatgtgacttttagtcacaacaaaatattacttgtgactaaagtataatatttagttacaagttatcactaatttagttgtagtcacaacaattgttgtgactaaaaatacatttattcacaataaattgtaattttagtgactaatacttttagccatgaactttttagtcataacataggaatcatgatttataattagtcacaattttttttacttttagtcacaagttttgttgtgactaaaagtaagattttttgtggtgtacataaatttagaaaattttcttcatgtaaaattaatattaattttgttttttaagattgtatatgcttaatttttaaattttatactaaaaatttataaagtagaaacgttctctcttgaggtatattcatataataacaaacccaacatttgtatgtatcaaagatggtaataattataattttccctatcgaaattcatactccaatattctcaccttcaaattttaccctccttcatgaatcttttcctttatcatcatcatcatcatcatcatcatcatcatattcatatcctatgtggtattattccttaaatccccaactaaaattcagttagttagttagtctctaactagtttgactgtcaaatatgacagcaagtagtattaagtccttaggcctatataaagaaaactacttctctcatttcgcaagagaagaaacacaagaataaaggagagagagagagagag

SEQ ID NO: 255870 - DNA, 514 bp, Cannabis indica
tttttttaatatttgaaatcgggccgggccgggcccggcccgaaataatttgtaccgggccgggccgggccgggccagaagcccgataagagcccgaataattcgggccacagtcggcccgtcgggccgggggcccggcccggcccgcgaaaatggcccagattgacattcctagaaaatattggttgagaatttgttgtggactaacattgttaacaattgatcttctttttattacaaataagagttttaatataaaattagggagctaacacaatagttattgcattttaggtaaaatgatttataaccgttgatttaattaaatttaaattaacttttgaaaattataacataattcataattttttatttataattaattttaaatattaataattagatttaactaacaatactccaattcatggattttctagagaataactctcaatttttatgagaggcggcaccgcccttaattcatataagtggagttttagtatctcacaac

SEQ ID NO: 255871 - DNA, 1265 bp, Cannabis indica
acgatctttctcaacagttttttgataggttctcgattatttgtcgaaatggtaaatgattttgcgtttgcaaccattcttgacatcttatctacgtgttctccatcgtttgtcaataattttttgatggtgtgtatagttgtctttttaaacttccttgcccatgttatcggtgatttctcaattaattatcgattgtttctcgatgattgattgtctatttttttcaacaggttcttgacactatttcctattattgtaatttttaatatttgttattctgattcagttattttttatttgtattgaattgcaagattgccgacatttttgattgtattgtatgatggtatttggagtattaagtgatttaattgggcatataaaagcgaaaaaaaagtatgatattgatggttgaagctgagacaatcttacaaaacatgcgcaacattttatatgaagagttggaggttgatccattggagtatgatttaaaattagtgataaataagtagtaacacagtctcaaaattgtgacaactatggcggttcaggccacaacaaaactacatgaaaagaccatgtttgaggcataatttaatgttacttgggatccataaaattgtttctgttatattttatgctaattgaaattgctatttagcttaaatgtattttttgatagtttcttggcagaaaatcaatgtgttctcgatgagtttttgataatatctcttgtgaaggctccaaatattgtcattgcaagttttaaaaattttcgatagtatattgacatgttctcgatgctttttcgatagtttgtggaatccttacaaaatttagtaaatgtgttctatgatgatttctcgatggtttttcgataatattttatatggaggctctggatgttattattacaatttttaaagtttaactttgataacaagaaaaagttagactaattgtctcaaaatgtataaaaccatacaaaatattttctaatacaaggatgttgttattttaatttgttctgctactttttagcatggctttcgaaaacagcaaggtcttgggcatcatattaaggatgcgtctcatcgacacccatctcaatcactatcttagcatcataagtgattgtcttggcatacgcttcttcatctgggagatgaatcataacaatcagttgctattgaagaaagaaaacatagcaaatgttagaattttattggaaacatatcaacaaccaatcgaaaacctatcaa

SEQ ID NO: 255872 - DNA, 841 bp, Cannabis indica
ttattaaataaaacaaaaaaaaatagcattaagtagaaaataaaattatttgcgtctacaatttttacctcggttacccaaaaccatgcaaaaagtttatatgtcacataaaaattaaagcaaagaaactatgtgcatgtttggcatcataactaaaaaacaattttttgtttttaaaaacagaaaattatttttgaaaacaatttgacttgtttggccttgttttttgaaaacagttttcagaaaacaaagttacaaaaaataacaattttgaaatcaacaaaatgttgttttctgttttagaaaccaattcacttttagtcaatattggttttaaaaaacactaaccaaacatgacttgtttttaaaaacttcaaaaactatttttcttttctcatttctaaaaacaattttttaaaaacaaaaaacagaaaacaatatcaaacatgctctatatttttatagaagtgatcttttaaattacaagttcgtgtaattttaactccggcatcccaagagtaggttcttaatgttatatgtcttcatgaattagattaagttattaaattttgaacttctatgccggagttttcaaagcgcggaccctccaaagtcaaccttctaatactcgaaagtactcgactctaagatatcatcttatcaagactactcttgatgtaaagagaatcaataaaggaaatcgattggagagcggtatctccatccgaaaacggaaattaattgagaaaatatccagtgaaacaaacgaaaatctcaaattggaagatagtgttagactttttatttgggcttacattaacttttattggtttattaaaac

SEQ ID NO: 255873 - DNA, 816 bp, Cannabis indica
ttttattttagtcacaaattttgttgtgactaaaagtaaaattttttgtagcggatcatgttgtgtgtggcatactaaaactgtacttaaacattgagagttgtatataatagacacaactgcatcaaagaaagaaaaaaagtaaagagtaattggcggcaaaaccccctcaactcttaattcacttgcaaataaccatccaaccttatattttggtgggaaaaccctccaaagtgctaaactgttagcaaatttaaggtgtcatctatttatctcagttaactgctgacatagactgtctacatgtacatcatgtacacatggcatatttatattggtccacttaatataattatttaaaattataaaaaataattcaaaaattaaaagaataatctaaatttataaagttattaataaacaaaaagatattcttttctttgattttttattttcccttactttctctctccctctcaacgatttgtttcctaccctctctcctcaagtctctttcttcctccagatctgaaaagatcccaacattcaacactattactcagacggtggtagttcaaacgagatgggaaagatgaaatggtggctattgttgtctccataggtgggcgagaggaatgaaagagagcgagagagatgaggggagtgctatgcgaatggctgggcatgatggcgtttcaggcgagagaaagtggtggagatctggagagctaaacggagttgaagggggaccgtggctcaggcgagatagggtggtgggggtgaagctcatcgagaagtgggtcaagcgagatggaa

SEQ ID NO: 255874 - DNA, 991 bp, Cannabis indica
gcccacacacagcaagtgataccttcaatcatagtgaggaagatcgtgaagaaagatcatcagcaaaggagtttcagcatcaaagattcagagaaagagatccaggttcagatattgataatgctctgctacagaaaggaatcaagggctagatatctgaacggaaggagtcattatgttccgctgcacccaatataaggtttcctaaactttatatgtgtttatttcatcgttttagaaagttcatatttagggtgttaataaacatacttgtgagtagatctaagatcctggtaaaataatttccaacaaaggcttggtaatttaaacttcatctcaatcaataatcctcataaccaagctaattcaacaacaaggtgagccaaagctctatactttgactcactgcttgagcgagccacaccaaattgtttcttagaggaccaagagattaggacttcaccaaggtaaacaccatatcctgcaacaaactttatatcgtcgacacaggaagccctatcagcatcagaagatccaatcaaggatagcctttcactaggagcaatatgaagaccatggtgcatggtacctttgaagtagcttaaatgcgtttagcagttcctcaatgaacattaataggtctcttcaggaattgactggacttattaacgacaaaagagatttctggcctagcgtggcttagatattgtaaagctccaacgatgcttcgataattggttggttaagacagaggtgttccatcatgtatagatagtggcttccctacagttataggtgtaacacttgactttgtgtttttcaattgtttttttttttgtaataattcaacaatatattttccttgagacaaataaatacctgtattgtccgtgaacactttaattctgaggaagtaattaagtgctccaagatcttccaaggaaaaagccttgtttaatttagtaatgaataaattgagttccctggaact

SEQ ID NO: 255875 - DNA, 511 bp, Cannabis indica
gctacaagcatatgtgcaatcatcaacaggttactattatctcacaccacaactattagaacatttaattttatctatgaaaatataaaaagaaaccgaatttcggacaaacgaattcataagtaacagtctaaaagttattgatgaacttgaaacttcaataacaagcacaaaataaacaaagcatactaattaaagccctgaagcatatcaaataaaactttgtgaacaatacctccgaaattgggtaaattatcacttgtagccatgtttttgagctatgaacaatactctctctaaatttgctctccaaccacacccagtttcattaagtgtaaggattttctaacacccattttgtgtaaaaaaaaattcaccttgttttccaaacatgtaaagatcaattaatttagagtgtatccatgagctttgagtgcacttagtaaattatgtccatcccattatgatcattagttaatacatacataattaactacatagatattgtaac

SEQ ID NO: 255876 - DNA, 3045 bp, Cannabis indica
tcttcaacagaactactgctaaagaaatctaagttataaaaaaaaatgaaccatgaaaaaattacatgataaaatatagcaatgaaaaatactaccttttattattaataacactttgtaaaatgttatagtgatgtgagactggtgagtataatttatcttgaagtgctcccatgtacacaatataaatctgtatcatataaattctctcaatttaaatagatttttgtaaaaaataaataaataaatatataaaaatcttacctttttatcttcattattagctttgcagaaaaagctaataagagtgatgagaatgaaaatgaagaagaaattgtaaagctgaagaagaattccacattttcccatgcttgaaaaataaaactacataaaaatatggtttatatgtataagtgtatataaataatgatttttatatattgtagattcaagactcatcaagaccaaattaactatacataaaaatttaaccatttaaatattacacctgttcaaatcaacatagtgaaaataataaaaggggtttttttgctaaaatagtttagtcaaaaagggaagatttccatgaatattctcactctcaattgaagtggaattttttgaagaaaaataaaaataaaaaccttgacttttttttcttttatcttcattcattactggctctgctggaaaatttaagggtgagaataaaaatggtaaaactgaaaaactccacacttgcccatgtttgaaaaccaattaatggtagaagaataaaataaatatatagatttaccaacaccaatacatgaatatgatattattcctaattgaaaaactcaaatcaaagtaatatatgttcaaaattttaagcatttaagatcacaataaacataattgaccaaatttgtgcttagtgcatgaacaaaaaaaaaaaaaaacttactagctatagacttcaattacaatcacttgcctctctgatttaatccctgaaataaaaataacttattttttgtatatatataaaaaaaaaaaaaaaaaaagtagtgatgaagcaattaatgtgatgatatttaggtttggtttagtccaactcaaacacatgatgttttcgtgaatagccataaaacctgtgtttttcttaaacttacgttacttttggaaaaaaaataaagtatatactaaatattatgtcatatgtatagaaattatggaaagaaacgacaaaatttgtgagagaataaaaagaaagaaagaaatctgtgctgtaatgacttgtaatatgtatgtacatgaacatgatgatgttattttttctttttttttttttttggaagaaaacatgatgatgtgattgtagccaaaaatggtgactgcataaatatgtattatatatgccaagtatgacattaacatatataaaagctaacctaatatcatacatttctctctaagggcaacatttaatcaaatctaatataatcaatctaattaccaaaaattagatattcaattataattagattgaattagattttaaatgttaaaagttgaattctaattgaattagatcgattgttaaatgttaatatcaaaatccaattaaaaatcaatccaatctaattacatttatatggagattacaattacaattacaatgtttaattgaatgttataacttttgtaattatttatattgtaatgagtattaaatcacttgcatgaaatatgatatgggtatgactaggattacaattactaatatattacaaaaaacttttttaccctttctctctttcttctttatcaaatgtaattgacaacaaaaaaaaaagaacattttggtcattatattaattcttcaattttatttttatataaaaccaaataaaaaatatttataatgtccattacaaaataataagtcaaacatcataatagttatctcattactataaccattatattctattacgacttctattaccattataattatattccactaaaccatatatcacctcaaatcatagatatacactatcttttcgaaaacaacaaacaaagaatcaataaaagtatacgacaaattatataataagcgacattgtctttaggaaaaaagaaattttacttgaattaaaggtaggactttctcattttattcggtcagtttggtcagtttataatataatttattcaacccaataaaaaaaaaaggttttaaaaatctaagtgcaaatatagaagaaaaaaaatcctaagtttgccggtttggtcacgttaatccacctaaactaactacaatttttttttattatttttcaaatttaattttatattttaattaatttgataaagagacaaatatagtttaaattcaaagttgaacttgaaataaaccactatcacacaaatataatttgaactttttatatatacatatttttaattatgtacataaattatattgcatataataacaacaaaaaaaaccttaatcgagttagttgaggtttattgtgtgtattggcatctttaacctgcccaatatactaattgggtgagttattttcatccgaattttcattttatagtttttatcggattttttgatttggtttaagcgggttattgagcggtgattgtttgagaaaaaaaaaagtaagctccttattcaatgggccctttcaaaaaaatttacttgttctattatttaatagcataaggtccattgctaaagaatataaaattacattcaatataattttttaaaactttgatataaaaatatgatatttttagatttggctacttttatgatatattttagttttaaaattattttatgatattttctatatcatatatgtaaatttaatttttaaagcccataattgatatttaaataaattatttcaaaaaaataaaaaatctcaaaactatttcttcaatttttaataatttcttcactataaccttttacgacacacttaaaatttaaatttggttagataattctatctattttttctaatagat

SEQ ID NO: 255877 - DNA, 1552 bp, Cannabis indica
cttagactcctcaatgatttcaatattaacaaaattcttcctctagagcaagagaatccgaccttccaccttagccatctttttttgaatttggtctcctttaatcttggtctcaactagggctccaatgccaattttattaactctccaaacttaagcagcttcatcttgcttctcctttttattcaaacccctaagattccaacaactaatattgtaaaaatccattaacaacacaagctcaagtcattctctccctctacttcttcatgctgtccccctgttaatatcgcaaaggaattcctaagcaatttctcacccttgtcactagctctccttgtcgaaccagagcctttagacacacggttctttagagcaatccaatccccactagctgtttagacagcagttttttcccttggccattgactgttttttcttttattacagctatagtagccgcctctatcactgaggcagtagcctcagcctcatccttgcttgcagtagcaacagaaggctactcaattatagcaggaccaccagcatcattcccctccttttctgtcttattttcttgctttttttccacctctttaggcttctcaaccttcctacattcagccattatatggccaaacccaccacaatgtttacacttaaccgggagccattcatattttattccttgttctaaaagctacccatattcattaacaaaccagaatgagcgttccgggttctccgttatgtccatttcaacaaggactcgagcaaattgaactcttgttctttccttggtgtgcttatctaccattatcggcttccccacagtgctaatgagaacactcaaagtttttttcccccaatattgaagaccaagactaggcaaccttatccaaagaagaaccgatttcacaatcctaacaacattcaagtccgctgtccatggtctaacaataattggtttcctgtcaaattgaatcattccattctagcaatttgaactattcctaaatgcccctaaattctacgaataaatccttcaaagaccactgcaggaacattagtacccaaaaccatacaaattacagctgatttcaaactctcttctttcaatttcacctcctccatatctatatgatctatctttctaccctctttaatcaccggttcactataagtgaatttagcatcagagtttaacaccttacctcctgagaaatattgccaatgggtctgagccgccgattgcagatccacttcttcggcccagctctttctcgcagagatcaacgaatcctcatcgaacctgttctccgtcgcaagctgctcagggccgaaaaccagcgattgtccatcttcacgcgaacactcgaagctctctttctacagatcttgattctccaatgatcccttcgcaaccttgaagcccgacctgcgccctggtttcttcttcctcgccatggagaaaagagagaactaggtcagaggtgcgatttttatggggtgttttcttacaggtaaacattatttattaaagtttttagtt

SEQ ID NO: 255878 - DNA, 970 bp, Cannabis indica
gatagttgatatgtagccgacccgtccacatgtagtttccaagtcagcttctctttactgttacttggctaaggcatttctactggctcggggttgcttttttatattctttcttccttgcctgtgcattctactacaaagtctgctaaggcctggcccttaattgttgttcggggtcggaagagaatctcgtattggaccaactccacttcccatttgagcaaccgtccagaagcatctggtttttgcaatatttggcgtaacggttggtcagtgtataccttaataggatgagcttgaaaataaggccttaactttcttattgctagaatcaggcagtaagtgagtttctctatcaatgggtatcgaccttcgacctcaatgactcttttactaatgtaatagaccggatgttgtatgttgttttcctctctgatcagtacggcacttacagcatgctccatgacagccaagtatatcccaagttcttctttgtccagaggtttcgatagtactggaggttttgcgagttgggtttttagctcttgtaaagctttttcacattcctctgttcactcaaattgcttgtttccttgcatgatgttgaagaacggaacacacttttctgttaattttttgaaacaaatctgctgagtgcggcaatccagccactcaagctttgaacttccttgattcttattggtgatttcatatcaaggagggcttgaattttctttgaattggcttcaattcctcaagcgttaacaataaagcctagaaacttacccgagctaactccaaaggagcactttaagggattgagtttcatgttatatttcttgaggacttgaagcattcatccaggtgatctatgtggcccccagccttctaggatttgacgagcatgtcatccccgtacacttccatgttttgtccaatctggtctttaaacatcttatttaccaatctt

SEQ ID NO: 255879 - DNA, 2992 bp, Cannabis indica
aagaggaaaaaaaaatttgggcccctgggctgggtgggccctaggcacaggcctagcccgcctatgcccagggtcgggcctgactattgcaatcatcatagaattaatccacaccaacagccacattacaattgatttttagtcagtccgatggaggaggggtccatcaattagcttgaggtggtttttattaaaagttagtctcacattactaatgtgtggaaataaagccaattggttttgagatggaaccctattcaccttatatctcaaattctaacatggtatcagagccacttgtgatccgttgtgagcccaaattgccaccggtccaaaaaagtcgtttgtgatccgttgtgagccaaaagtactgccggtccaaacagatacttccgctgtctctcctttaacctccgtttgggacctttcggccaatgtgtgccaatttataatgttgaggtctttgacctgttttaaaatccacaaatttctcgacgtttacacccacaaatttctcgatatttggccttgtgggattctttcaaatgtcacgttcggtcctgtggtctctcaaaggtcgtttgttatacccacacttttcaggcccaaacgtgagaagggtgtattaagagttagtcccacattgctaatgtgtggaaataaagccaattggttttgaaatggaacctcattcatcttattcctaaattctaacagttttggataaggaataagagtagaagcatactctgatgttgtgaattaatcaatggcttacgatgaaagaacaccaaatcaatagacactcattcaagaacaatattaaattactataatagataatcacaagaaccatataatggattaaattagtaaaacaaggagaagataacatcgggatttaacgagttcgagtcatgtgcaatgtttagcatctcggttggaacaacaacaaccatattttttattgataattgcttacaaggttacaagagtcttacaaactgtgtcatcgattacaagatgaaatttctctctacttttacgacactctctctctttaacctttcacagcattgatttcactcttaagctctaactcaactcaccactcttgattacaaagatgatagcaatatgtagacttatattggcgctaaattacttaactaacattacctttaagtctccacgtcagcttcaacaacacgctcttcgtaagtaaacaagtgtcccatacggacgatccagatgggtacaagctttgcaaacgagcgttccatactaacgacaagcactccaaaaggatgtttcagaataatgacaagctatcctgaatgaccattcggaatggccacaagctttttggaacaagcttattcgaaagatcaccaagcttcccgtaactctttttcagagggacagctagcttcgcagaactgaattttagaagaacaactagcttccaagatctagctttctaaaagacgaaacttgtaaccataaccaacaaatctccaccttggttgcaaattgaagttgcttaacaaaatacgatgttcgatgctgctgttccctagccccttccaagcttagttgactcctatcccaatcaagtttaggtcgtgctcatatttattactagttggcactatcaaattcttcccaacaaccttggcctagcactgccatcttttggcaccgaaagatggcaaaggtctccaattagtgtttcggacatcgagatgaggtttcgggaccccaaaacttgaaaaatatgattcaacataaaaaaaaaagttaaaacacactcgaaagtgtccgagaacatgcacgactgaccactgccactttttggcatgatgacgtggcacaagtcgaatttggagttgaaatgtacttacaatctttcagtaaacacatgcagaactctcaatatttatccaaaaaacttgggtcaactttaaatttaaagctcttttcaagacggatctaaacttgtctcatggtcatagcataattctgaagctatcaggctcaaaattggctcacaagacagactggcagactttgtgcaaaattcattggttagattaagttgggaccagaaggagttattgggagagctatgccatatcatttgtaatcacatactctccaatgtgatgtataattaaatatggtcacatatctctattttgcttattctccaaggatgaagcactatgccccataagcaaactttaaggaaaaaaaatgaaagttacccaagttcaacgacaatcccaatattatggagtattttcctataagtgtgggatctttttcctagattttttttatttatttacatttattattcattattttgtaatatgatacgagattttgagtgagataccccgaccaccttttgatcgcctcttgtagacataatggtaggataggatttggggatcgctttctgactaccttttgatctcctcttgagatctctctcttcttcatctctttcttagactttgagttcttcatactttaacgacatcatcttcatcatacattcaccattgactcttcaaatattattctaccaagaagaagggtcactctttattcttggctcttttggttcactgttcataagaacattgatcaccactactattgcgatcaagtttatgagtatttgttctcccatgagccttttgttcataaacttggatacagattttgtctagaaatctctaattgtattattgtatacacactcttgagaaaataactttagtatatcagattaaattaataaaagatgatgtaaacctagatgaactactatataaatcctagtgtcacctttattttcgtcggttttattttgcctaaaatattttattggaatcgtctaattttttacaattaatctgacaaaaaatcatgtcaatacacacatttttcatgttttcatatgaaacttgctttttttttt

SEQ ID NO: 255880 - DNA, 2596 bp, Cannabis indica
taggtcgggtagcttattagctatccgtaatccctactttatctagagttccaatatgtactttaaaagcatctgaagtgtgaggtcagagtgatccatatacggagttacgtgaatattgaattttaaacaaacttgttatatgaggaacaatcagtacagatatttgaacaaaaaaaggacagtgttgcggcacaaagactatatcactagttaaagtgatgtggaggaacaacgagtttgaaatgcgacttaggagttaaagtcgcagttgaggaagttgtatcacgagtcatttagataaattttgaggacgaaatttctataaggaggggatagttgtaatatcccaaaaaatagaatgatattaaattggatacattttattaaatatgtgattaagtgggtatcacagtaggattttaatcctagttaagctagttatgagtgaactagagaaatatgagtaatgagcaaataaagcgtaatttattaattacagagatttactggattaagtgggtatcgtagtacctacttttaaaataaaattgtttttgggctcggtgattgtgtaaatttggcagtgtggtcagaaatatcacaataataagttatggaacagaatggaaattatatcagacttgtttagaatgttaagttattgatttgagtggattggctaagattaccaaactacccctaggcgtgcttaaggtatagggttatttaagggggtaaaatagtctttttgagggaaatgatttattttgtctttaagttttattggtcggattagtttatttatttacttagttagaataatttatttagggtgttatttaattatgtaaggtaaagtttgattaaataaaagaaaaacaaaggaaactagaaattagaactcaccttttttctctctctttcctctcgctcaaaggaaccaactgaaccctaggaagatttcagctcatttcaagcaaatcttgtaaggatttcatagcactacctactagctagtttgaggtaagttcttcacttatttcctttgatcatagtaagaattaagtttaggttttggttagggtttgtgtgatttcagggctaaagtgtaaattgagtttagaatgtgttatgaggcttgatttaaaaatttgtttaagcatgaattggttagaaatagtggttgtttgatttgaattgatttaagtgaagattattgagtttgatttcatctgagtatacaattttgagtaaatggatgaattattataaattggtgcttgggatacattgtatttatgatttcgaactgttctgggaagtttgaataggtttggaggagatttggtcagtttttggtgtgaaaaaccagagtactcgatttttccagcagagaaaccggacaacctgtttcacaggtgctatgaaaccggtcaaccagttttgacagcagggaaaaaaactctggttttaagcctcaaaactagttttgttcggggtgttttttagagactagatttgggtattttagtgatgtttatcttattttggaccagcgggagtttagagatgtctggttatggaattagggtttattccagagttcgaataagctgttgacatgtttcattatcgtgacataggacccaggattgttgagcatggttccaccctggtcggcccgcacccttgatattgatttaaggtaagaaaattattaagctctgtatatggttaatgttatgattgttatagtctcgattatgacaagatcctagtatgtgtttgttgtgacttaatcttaatcgaggttaacgatatgtatttgttgtaactcgattatgattgagggaaataataggaaacgattatcatcgttatgactcgattatgatcgagggaaatgatataaaatgattatcattgttgtgactcgattatgatcgagggaaatgatatgaaatgattaatattgttgtgactcgattatgaccaagtaaaagaaacggtcattaccgtaatgagtgattactcctaaaactgtagataggttttttacttattctttgctgtatcgggcaacgatagtgacatatgtcgctcttggttaataagtggtaagggtactttatgaagtactgagattgtgttgttatgatattgtgaaataaatcaagcatgctattatgttatgagttgtaattgaatacgctttgttatagtgtgactgaatgaatattatattgcttatgaaattagtcactttccttacagagcctcattaactcgcgggaagtaagagtaagtgtttataggaacataagattggagtgctttatgaagcacttagaatatatggttatgtgttgattaaatattcatttagtgtaattatgaagatgttgactaagatgctgaggttttcttattgcgtaacatatatataattgtataaatgttaaaaccatatagatgtatctgatggacttgcgtgaatcacaaatatgtatgttatattgagatgtgaatatcagtgtttacaatgcttttgatttaataacttttcttgctgagtctttgtggctcacgggtg

SEQ ID NO: 255881 - DNA, 2470 bp, Cannabis indica
gaatgtgtgccagtataattaattactaaatgtttaaaaaacctgataactaattttactttatacataatcctatacaattaaggatgggcctataaaaacttttactaaattaatatcaattacaatctctcttttggtagatttatcttttagtcgatttaaatttaatcaagatatttagtatagatgtgagtgtaaaaaatataatcaatggctaaaggtttatatatcctttggtttttgtcaatactaacctaaaaatgatgtgggactaaaatttactttaattttcattaaaagaattatagttcacaaagttaacttttctaacaatttttaaattagatgagttctaattttggtataattttttttggaacaattttaatgctatttttgatggtgatgacaggaggatgagattatttagtgaattaaaaagatgaatggattgacaaatacacaaggagtaagagcatgggaaattcttgttgaaaatcaagttatattactattttttttagtttggatgatgagttcaaacatggattacttaggtaattattggagagtaagttaatttatttgtgttttaggatttagtagtttaggggtactcattcaatcaaatccgcatgttttgcttatagtgcattcgattcgcactgaacgcataatttatattatagatccaatccaatctacgttatagctcaaatttaatccaattcaatccacaaaagtacagattagatcgattattttagattggttactttttaatattgatcaattatttaatatttattaaaaagtatcgttttctacataactaacaacaaaataaaataatgtattgttattttatgttttcagcaacaaattaaaataaataaaataaaaaaataaaagaaaaaaattatatatatagaaagaaatgtttaattttaatttaaattaaatattctttataatataatatacatttaatatattaagtttttaaatatatttgtatcatatgtattaaaatttttaattattatttcttacattaaaatattaattgtatatataatttctttatgtaatatataaatatatgttgattggattgaatcgtacaaattaaattggagtggatattttatgaacacccctaaatgtcagtttaagatcttttttacttaattagctaggtacttttaagatgaaacctttgtttttctaaattcaattcaacatatctataaatgtgatggagacttaggtaactgaagagaccaaaaggactaatccccacgataatatttggccaaaaagatccttccccaaatcgattcacaaccagcagcaagatgccatcccaactcattaatcaaacccaaaatctggagcacccagtagatacataggcatacaggggttaactggtgtcaccattgcaagtggacgtgagcttgaacaagattgctaaggcttatttttcttattttcatttggggatcttattttttctttttctttttaatttccttccaggttatgaaagtttgattcttgattctctgaatttgaatttaaaattcacgacattttttttttttctgagatgacatttataattctaagattacttttttttttttttgtaaaaaatattctcattttgatattacaattttcattttcaattcaattccaaattagatgatcactaatgtaaaatgtaaatattatactaattttggcatgtaagaaaaatgttaaaataaaaaatatattaaatttatcattaataatcaataacaaaatactgcaattaaaagaattattgcattaatttacatgtgtgctataaatttagcacaataacatcacagaaaactataaatatagtgtattgtgatttttaaaatattatgttaaaatttaactccaataatgtaaaatatgtgttaaatttgatccaaattaaaatattatgttaaaatttaactccaataatgtaaaatatgtgttaaatttggcacggactttttttttttctgataaaggaaagggtgccaaagcacccaaaattcattacttaaaaaatgacccgtacaaaacagtcaacacacagaacaaccatctaacaaaacaacaacagaaggctaaaagaaaaaaaaaactaaagtaacaaaagaaaagagaagcaaacaacagcatccaaagagaccatcttgtcttcaaccattttcatgtctccactcgacatagtcatttagaattggtgatagtaggaactaaattttagtccacaataaatattatatttttaatcactactatatcactcattaatactatttattaatgaaaaagattttatattaataagatattaaaataataaatataaaattattattttgtatatttttaattagtattgacggtagtattgacttttgtatctaattta

SEQ ID NO: 255882 - DNA, 515 bp, Cannabis indica
gagtttttttttaaaaatactgtgtattatgttaaatttttactgttgttttttagctgttctactattgtttttaattgttctgttttgtgctccattgttttataaaaacacagtatttttgaaaataaaatctcgtgacagtatttttataaaagttaaactaaattctagtatttttgtaagtttcctagtatataaaattaaaggaatattcttcgtctttctgctaaacaaaatgtattgaaatcataattcattagagatatttttttttttttaaatgtcaattaagtattgtaactaaattgttgccggttattcaatcatttgatgaccatagtgattctttgataaatgatcactatgagtcagactcaatagaatttggtcaatcttttttttcttctatcgttaaggcagaaaattgaactaaaaactctctttccttaccatcaatccaatcactattcaagacccaaaattctattttattatcaatccaatcactgttc

SEQ ID NO: 255883 - DNA, 8734 bp, Cannabis indica
ctttcttaactgcatttcattttgacagggtagtgaagaggcagaggtcactggctctcctacagaaaggctatccttacttgggcattgatggtacctacttttaaatgtatctgatttgtaaataaaatgtttactttttgggacaaattttaatgtactacatatgtgttgtagttggggatgaagtttgacgtaattagatcagagactaccattctccatgttttccctttcaactcagagaaaagcgaggggtgttgctttgaaacaggtacgtgatttacttgtttgttgagttatgcagatatcacaactttggaacattccttgagttgtttttattttcatgtaggcggactcaaaagtgcatatacattggaagggggcagcagagatagtcttggcctcatgctcagggtatcttgatgcaaatggttgtgtgcagcccattgatgaagataaggttaggaatggtgatattataaatgaaaatggatgtattgatatgtgaaattgaaaaggaacaacagaatttgtggataccaacaaaaaacatatgtttacgaagctatggaaagaactccattaggtcaataattaggatattaagtcagaacgttttgggttagtgtaaatgtgtaagaaggttaaatcacaaacttgccataaattaaagttcataatgaatatatcatatttggtagttcagtgattattttgattgacgtgttattacttattagatcagttacaaatattttgtggaatcaaaattggaaattaaacaaaatgcaaaattaaatcaatttgtacatctcaaatttgtctccaatcattttggatcaattttctcttcatgttctgattgcaggaatttttcaagacagctattgataacatggcggcaagtagtctgcgatgcgttgccattgcatacaggtcctacgagttggaccaagttccttcagatgaagaagatttgagtcattggactttgcctgaagaggaacttaccttgcttgctattgtcggtataaaagtatgcacaaaacccagttttttatttaactgcacccacttcttttgtttcttatttttgaatttatgtgaaaagagttatattgtttgtggtatgtgatcattactgagtttgaaaatggtgcagcaataaccaggtcaatgtgattgcttgaatgagagttaaatatgagaaatttacttaaatatcaaatgcaagcttttgctccatctttgaaatggacaaagttgtgtttgattagatttcataataaaaaaaaatgtacaatctctagctctaggattggatttctgtgctaaccttcaaatttgaatgtttatgtaatctaataccttgtctgtatgtaggatccttgtcgtcctggtgtcagcgatgcggtgaaaacatgcacggctgctggtgttaaggtagtttattgcatattctcaacaatagctttgccaactttattgatatatgtattgtgtcattttctttttattgattacttgatctaaataagaatactgtaaatgtaaacaaattactaaagagatttattccaatgctattacacaaatttatgatttgattataaagtttaatggaaatcatatgtttgtcgctctctaggtacgcatggttacaggagacaatcttcaaacagctaaggcgattgctttggagtgtgggatacttagttcgatggaagatgctactcatcctacaatcattgaaggaaaagatttccgtgcgttatctgaaagggaacgggaacaaattgctaagaaaataacggtatggtttcaaaaataaggaaaacctaagctttataactatgcatcttcagagatttaataaatacaagaaaatgtggaaaataacacagattatgaacagtgattaactgtgaggaaatcatgcacaggtaatgggaaggtcttccccaaatgacaagcttttgcttgtccaagcattacggaagggaggagaagttgttgctgtaactggagatggcactaatgatgctcctgcacttcacgaggtttgttatctttatgcaaaatgaagttttttgtatattcttaaataggatatttagtggttgttatttccgggatatgaaatgtcttcacaatgcaattattaggggataccattgtttgtttcttgtttccattattctcatgtttcctggtaatagttaattgcatttataccaattttgtattttaggcagatattggactttctatgggaattcaaggaccgaagttgcaaaagaaagttcagatatcattattttggacgataactttgcttctgttgtcaaggtgagtatgcactttttgcattagtttggaagtgtgcatttagtggaattttctctcttttattttctcttatatgtttgccttaacaaaccacttaatgtttcttcatattactttttttttaatgtttgtaggttgttcgttggggacgctctgtatatgcaaatattcagaaatttattcagttccagctcactgttaatgttgctgcacttgtaataaatgttgtggctgctgtgtcctctggtgatgtccctctaaatgcagtgcaggttgatcctcttttctcgtatattaccatacagtaattgcttggtattttggccgattacccaattgctctgatttaaccatggtaaaatatattgaaagtttaaggcaaaacaaaactaatcaaaaatatgagattataaatcttatcagacctacatgtagaaatattattcaatttcatgaaatttgacagcatacttttacaaggtttattataatatagaagatttaggattatgctgttcatcaaattagcaagttacaatgtcaatgtatcgaactaatgacttttctttcacagcttttatgggttaaccttataatggatactcttggagcacttgctttggctactgaaccacctacagaccacctcatggatagaacgcctgttggccggaggttcgaaacatcgtgcttagtcaatttcagtatttttcatgctgtaattgttgtaattttgggctgctgtgatatttttttgttacaattttgtctttatgttgattaattgcattttttctagtagatttcatcaattattttttcattcattttttttctaaaataaaaacactatgttttcactatacctaaaaacattttctttatgatgtttcttgacagagtattttttttcctattaaaatagacaataaaaaaattgtgtacaagtttaaaaattccagttatttttaatccttttgtgttgaaaaagaagaaaacatttataccttgcttatgcatctgatcctgtcagtgatgttgatctcatttctccataataataatattttatgtaaatattgatttgtggcattcactaaatttaaatgccaacatttatgtcatgtgtgaatgtgcattcccttttaaagtaggaaaatgaaacataaagtcatgtctgtttaaatgtgtttaaatcctgattctgatatggggatttccccccttattaaaataacaggtaatctaagacccgagttgcatttattgtgaggttatttgagacaatattctctctccttctcttattttctttttcttatttaatgcagagaacctcttataacaaacattatgtggaggaacttactcatacaggtaccgaaatcacgcttactattcctttaatgtattttgtttttgtaaatgaaatgtaataaataactaataataacaataaaatctactcatgtaggctttgtatcaagttactgtgcttttggtcttaaatttttcggggaagagcgttcttcggttgaatggtgacagcaacaaagcgcacgctgaagatgtgaagaacactgttatattcaatgcatttgtactctgtcaagtgagtatttctttatgctgagaaacgactacaatctcacaagcaaattagatttgtttattaccacactgtttgacatatttgctttgttaaaatttcagatattcaatgaattcaatgctcgaaagcctgacgaaatgaacgtattcagcggggtaactaaaaaccgcctctttgttggaattattgctgttactttcgtccttcaggtaaagaccagtgtggttattatttacattatgcctatcattattattaaagggatctattccttctaactgtagactccttcctcaaacttatctgcagataatcatcatcgaattcctcggaaagttcacctcgacagttcatctgaattggtcacaatggcttatctgtttcggtattgctatcattgggtaagttcaaaacttaatttccaaagagtttgggcaatattgagcattacctaacatgatatctaaattatgtttgtcaggtggcctcttgctgttgttggaaagctgattccagttccgaagaccccattaagtgagtacttccgtcgaccaattcgtcgctacagaaatgctcgtaccacataatattttttccccttctcctttgattcatccatcaaagaacaaataactactactattactactactactactactactaaaaggctactgcaaaagcaaaacaaaacaaaagaaaaagaattatataaaaaatatatatatctatactgcaacaaagtactagccaaagatttatttttacattgtattattattactactgaattactgtttttcttttgtttgctttgcttaaagcttcgggtataatatgatatatatatatattatattatatatatacgttgaaaggatagtgtgtaaaaaataaaatttgttagttttccactttggcttttttcacctcccttgtgaattacatccgaattttggctttttactggattttgtcactacaattgtacactatgatatgataaagaggatatatattattatgttcttataatttggagttgctcaataaattcattaattccattttaattgaaagtcaaatgtatttttatggaataaaagaaccaaaataatagaagagtgatagtatggtttggtatttgttaattttggttgatgccaaagccaaatatttattaatctttgtccttggcttttttctgagttttctgctctgacactttttcttaaaaaaatcaaaaaaataaaatcaatttagattaagagctttatttacaaataagaatgtaaaagaaaaccaaacaattgtatttacttaaacacaaccaaggtatttcattcgttatacttatacttattattcattttacatgtctttggaactaaacttgatattttacgatttaagaataagtttaattttgaaaacaactttttctatatatatatattatatttatttatatagtgatgcatattatgatgcaataaatgagtaataatgaaatttaataattgggattttcaggtcccatttgttttgtttgaaatgtttaagaaagagttatcattgcttcacgagagttagatgagatgtaagaataacgataaaattcaatattaattacactaatagtaataatgttacactatagaaagtgctaagcaacactttgtcttttaacatttctcatttaatttaattgatagagagaatttgacatattatgcatctcgggttgccaccaccacaaactataatcttgttttaaacaaaattgaaagccaactaaagacattacaaagaataaacctaaaaaataaaagagtaagaaaaaaaaaagggtcttaaaattgtattaaacaatatatgaaccatgataagaaagaggatgggatggcaacttcttccatcaaaatgcagtctctaacaaaacaatcaccttcacttcacatagtaacttagctttttatacgtttctccaaaaaccaaatcataacaacattatacacctttgacctttgacctttcctttctatcttctcttctcttctcagctgccatgtttttttttgttacttaagctatctttgctaataatccatattccaattcaactctcttttagcagaagcatgagtatgccaaatggttcttctttgtcacatagtgagtgatgaaatccccgaaagaggcagatgattttggtatatcggcgggaacaattatctgtgtctttcccgatgcaattctcttaccggcaacatttgaatagaacaggcctgagattgcaggaacaaatacatcgctttgagaacacacgtagaagtcaacaaccttctcgaattcagtagtgtccgaatccaagatctttgattttttatccgcaggtataatcccatcctgcaatagttcaaagattaaagcttttgggcattttacaaattttgaagtaagaacataataaaatgcaaatgaatcaagcaaagattttagtcaaaccgataacaaagacgctaaagataagatttttatgtgaagatttctcacctgcaatagttcaaagattaaacctttttccaaaagttacacttttgaaaaggatattatacaaattataagtaaaaacataatgcagatgaataaaagggaagatttcagtcaaaccgaaacaaagaaaataagataagattttgtgtatggatttctcaccttaatataagtttttgggaagacatcttttaagtagtctaagctgctgtcccacttagattcagtcaaataaattgtggtatctttgctaaacccgagttttgtcaaaaaggtacctatctcgtctgcgctataacaactttttgtaccagaatcagcatctcctaggcaacccttatgctccaacatctcaagccgcaagtccactgcaacaaattgcccatctgactttcgactcagtgttcttagacgctcaaccatcgagtcaactacttcttgaatctcgggttgcaactctaaagttccaaacattgccaaacatgcaactgaatcactaggactctctttgtccgcctttttcatgtttaccgaagggaagtaagtaaccaacttaatagttcctttatttcgataaattggttcaatatgctccgcgatatactcttctgtaaccctattagggactttcacaacagcaagattccttgttgatagcttagcaggaggattctttgtcactctcaccactccttcaaggctcttcacaaacttctcgacatcataaatttcttcgaaactcctgtgcatattttcaagaaagttagtttaatatcaattgctttctcataagaaaagaacctattctttctttttcttcttttcattgcaaatacaaaagtaacttgtcataattattgattggaatattgagtaacaatgtgaataacactccttttcgagtaatacagaagtaacaaggacagtcttttcttcggttaatgtattttagttctagtgactaacctctggtcaccgggtttgtttcctctaatgtcgggaactacgagggttgctcctagagatcttgctactaccaccgcatcagcaatctgcgaaaatattcaggaaaacataacaaagttagagaataagggaaatttttatatgatcaaaagatgacaaagagatgcatctgtatcacataaacaaacaaccacttcaatgttcctagtgaaaggaaaaagaatcgatgaaatcatagacaccgaaaagcaaacaacatgaagggaattcatatattgaaggaatgaattggctgatgtgatgaaaggaactatgaacatgagatatcataaagcaatacatatgactgaatgtagtcattatcaagctatcgaaattcgaaacattcaactcgatgataactaataattgagggcttagcttggcctccctgattccaagatattgtttcagcttgctttcaaaataaaataaatcagaaagtgtgaacaaaaatgttataaaactaagctaatcaatagcagaactctgcaacaaaaagctgagaaaagttgatctaacaacaattacaaacaaatatattatattagaacaaaactaaaaaaacccaatgaactaataattgagtagttgatttggatacctgagaaacatgatattcagggccgtttgttaaagagaatatgacaaatccatttgtctgctccacaccatctgctaacagaaaaacacttaacaattgccatgaaaataagaacataatgaagcaaaattatcatgtaactatatacatacctaaacctggtttagaccaacatgctttcagttcttgattgttatctttccatggcactacactcttttctggaaaactaacaacttgctttgcaatcttggcattatccaaattaacatgtctatctcctgggaatgtttcctgtaaattaaaaacaaacaaaatacaaagcttaattataaatcttcattgatagattagactctaattgaactctccaccaactcaatttttctctcagattcaagtgagagcataaaacaattcattttgtttgtttgccaaattaaaaaacaatattgggatttctgccaatttcaaagctaattagagcaaatcaaacaaaacccatcacagaaaaacaaatctaacaacagaagaaaaaaaaaaaaaacgttaagctcaaattaaagagataattgagtgtgagtgagtgagaaagagtagag

SEQ ID NO: 255884 - DNA, 1654 bp, Cannabis indica
aaaaatctaatatatatatgatataaatatatttaaaaacttaatatattaaatgtatattttaataccattactgttgttcgagatcgggttagtactttgctgggtatgcgcgaagctgaggagggaagcttatatcttggcttgcctagcactatgaaatcgaaaaaaaaaaactagtggtcttgggctatttgaaagatagagtgcgcaaaagacttcagaattgggaaaacaagtttctttcgcgagcgggtaaagaggtgttgatcaagacaatggcctaatctttccctagctatgcgatgggtgtttttcttctctctttggatattagtagagatattgagtatatgatgtgtaaattttggtggcaatcgtccaagggtcaaaaccgtggtattcattggatgtcatgggagcggttaagaaagcataaacacataggaggtatgggattcatatacctgcgtgactttaatttggtacttctcagaaaacaaggatggcgtcttttcaaagcacctgaagtattggcctctcaaattttcaaagctcgttacttccaagaggtaattttttaaatgctgagctgggtaataattcaaactttgtgtggagaagtatttggggggctcagaaagtaatcaaaaggggtgtacggtggagtattggcaaggggaacgacatcaatgtcctcaatgaatcttggctgccacatgacaacaaccctttggtcatctcatctcggccggccctcgagcatgccaaggtaggaagcctattaactgttgatggtaattattgggacatggagatactttcgaatttgtttgaagaaaacgatagactcctcattttgaaggtacctctttacttgactcaagctaatgatcatcttgtttggtctaaagagttgtcaagggtatactcagttaaaagtggatatgatcttcttcaacatacccaaggaagatggaacgggaatgacaaagagctggctatatattggaagcacaagtggaagttaaaaatccctctaaaagtcaaaaacttgatgtggagggctggtatgaattgcttgccaacaatggtacaattgcgctctaagcatgtgaatgtgagctctctatgccctgtttgccaaattgaagatgagactacccttcatagactagtttcttgtcctgaagctacactttgttagaatcgggtgggaatcgacactaggagtacacccggtaacaactttcttgactggtgtattacttcatttaaggctttggatgtggaaaaatgttgtgtcttagccatgttttgttgggccatttgggaagctaggaacgacttggtgtggaacaaaaaggtaatgggggctggtgacattgttgtttctgcaaaaagatatcttgatcaatggagacatgctcaaaactctactttagaggtatcattgcctggtattcagacgggtgatggggctgagcattagattttaccacaggttaatagtatcaagatcaatgtagatgcagctatgtttgagaaggagaatggctttggctttggcatggtggctcgagattcaaacggctttctgatcagaggtcacactactttcttggttggtcaagttgaactggaggtagcagag

SEQ ID NO: 255885 - DNA, 764 bp, Cannabis indica
acaatgttatttcaagctggccttaaaaagatttaattcctgggaagaattctcctcagagttctatattcagttctcagcctcaaaacaaataccttcacgactggaggatcttgtcgagataaagcaaagacaagacgaacctttgaaagattatattcaaaggttcatggttgaggcaaccaaggtcaaaggcttgacaaaagaaggtcgatatacgactatacttggatggatcttaccgtcgagtgagttctagaaagatatcagaagaatattaagagcaacatgaaggagttccttgagcaagttgatggctttgtaaagtcaaagaagttctccggcaagcccagacaagagggaaggtcaacgttgaacaggaacaggcatcatactgccccaagtgctgtctaatgtgccgaccaatgcaggacctctgccaattctccaacaatgagaatattggaggcaagcgcaacaatgatggctctgactaaaataatggacaaaaaagggaaattcaacgattcccttatgccatgaagtctaagggagaaggaggagaagtgttcatgcttcactctcctaccaaaacttccaaagcaatgcatgccaaccggccatggcgacaagtgtcaccaaaacctgaggcacttagccgaccactcaagtgaaccactgaggctcagtcaatataacgccacctgtcgacctagcatggccataaaaggccaagctctcgcaagcgtcatggctaaatataa

SEQ ID NO: 255886 - DNA, 2165 bp, Cannabis indica
ataagtaaatgtacttagtgaattaaaagttgtgagctttttatttatttttttgtacaataataagttaattttaaaaaaaaaaatgcatacacaagctatatgtatatgcacatagcaaaggcgacaaaaaatcatttttctctacaaattaattatttgatatgtttaatttggtgatattagaactgaatatgtgtaaaatatttattaaatatatatataaattcaaccatgatcaagtatatatttttcttttcatttttttgtttaaaaaggctgtatatatataaatgaagttgtagcatgctgatcacatgtctaagacttatcaattaaaaaaaaaaaaagatatatctgtcctttgcacaattagcttaatgatgcacatgcgcaagtcatgtccatggcattatttccatgacagaacaaaagcagtgaacatatataaaatatattatatatatacatatatctaataatgctattatatatgtattatcacatatattaattgaatgatatatatatatatatatataattgagtacacatctttaatttaaacagtagtaaatcgcatttcaacactagctaaatatgcagagtgaaagcctaaactaagaataaaatgcacgtttaattttttggaagctaaagagttctaggattgaaaattacaagtgattatttttttttatcaaaattacaggcgcttaaatcatgaagatcgatattccttttcttattattattcgatgctagctagctagctagtgatatttaataaaggttcgatgttattgttatgcgttcaaacaaaaacgggattcatcactttaatattaaacttctttttttcaaaaataaaaagtcacatattcctatacaactgatatataaagtatatagtttgttgttagtaacgatattttcaatatcttaaacaatttcttttggtggctagttagcttgacaacacttttccattaaaagtgaagagagaataaagtacaatttgatgaaaaaagatcattgatgagctttggaaaaacaaactgatcttattattgatttcaaaccaaattcctaatcaacctcgatcgagatgatctgtcatcgtcatcttcatcatcaaggaaagcatgaatatagtataagatcatatcatacatacaaaaaagaataaacaaaagattaagatatatatagagagagatagagagagagagcttacagataaagctagcaagagaatatcagtgttggtgatctttgttaaattccaaagatagagatcgatctggagttttcctttgtaaaaaaccttctttgaacaagcaaattcttccaagaaagctgaattggttgaacaaaaactcaaactgatcagcgatctcaggtgctcttaataataatgttttctgattaaaacgatcccacttgaaaaagctagctttacatatacaaagctaaaaccagaaaaatgtccttcctagttaaatcagacaggaaaaaaacaagaccaaaaacaaaaagcagttctagtcatatgtggtatatatatcctactactttttaatatatcctcggaaattgaaacaccccaactatgttttttttttcttttttaacagtctcaggctgtctttttgtcgggtgatcagatcccgaggaagagagaaaaaggataataacccaagaaagggaagaaataacaaaagctgatcagaggaatggaagaaacgagaccaagtaggtttaaatataggatcaactaaaaaaccctaatgacacaaaaatacaaatcagacaaaaataataataataaagaatattaataatggtttatatattgattaggaaaaagacaaaagggggttatctaattaagtaactcatatataagctctcgttttcagagtaagctagattggtggcaaagatttggcgccaaaaaattataggtggcggattatttggtttaagggaagagaatattaaggatcaaaggaaagccaccgtctactgccacctccacccgccaccgatagagaccctaaatagtaataaaaatattatagctatatgatattattgacaacagtactatattgagagagagagagagagagagagagagagagagagaagtaagtaagtaa

SEQ ID NO: 255887 - DNA, 1124 bp, Cannabis indica
ctctcctcctctctctctctctctctctctctctctctctctctctctcgacttagaccggacaagagttaggacgaaggcccaaggtcccgacgttgacgaagatctctcttgctcctccaccacgtcgacaaaggccaaggtcccaacatcgtgacatgccccatccttctctttgatctttgtcaagcctcgttggacctctcttgtttttgaggttgtcgggctcaattttggcatcttagaccaccttgagtcatggccgagcaaggacagttattttcttaggacgtttggggttgttctaagatagggttttggtgagtgtggtttttaaaggtgaaaaggtttcgggggagaaaaagataaaaagaaggaaaataaaaaaagaattaaataaaataaaatattttttataatttatttatttttaaaaattttaaacatttaaaattatttttaataattaatattatgtagaccattacagatttgctacgtgtgcacatgggcaattatgagcaaaacagaagtgagattcagagattttcccaccaaaaattaagtttgtgaaagattaagtgtaattaaatgtgtaatttgagtagtatttccctcaatattcctattatattatatacttaagtgatatgcttatagagcccgttatgtctagtaccatgttgacaatagtgattttaatttgtttgatgcagcgtaggtctcctttgcggtgcagtttttgctaaaagcccagtgggggcggaggcttgggtgctttgtcactgttggaaaagttctcattacaagagagaatatgaaaattacaatcaaaatactcaaaataaaaacagaagtatttcgtcaagattacaagaaagctagagaagaagaagaagaataataacacacacaatgcttgactaaggctcaacggtctttgtcctaaaagtcatttcctccctcatatggacacttagagaaactctagaaatgctcttaaggatttatcaagcctcatatgctcagcctagtgtctaaggatgagcatatcctcacaaggttctaaccataacaaatggttttaactacttctcttataagtgaacaatatggcctctatt

SEQ ID NO: 255888 - DNA, 1269 bp, Cannabis indica
tcctttgataaattaaaaataaaatttaaaatttcggaagcgtactcttgccttggggaaggtttatgctcgtttcagcgagagcctcctagagaaaaattttaaatttccaattgcacgcttgctgcggcaaagctttaggctccctgcggccacaacacgctcgctgcagcgagagctccctactgaaaaatttctgtcgcgtcttcaaaattagtattttggccataactccttcaatacaactcgaaattagacgattaaagatgttgtgaaaagctgagaacgagatctacaacttccatgttcagcttcaaatccattttttccttataaaattgagctctgtaaaattgatctttttcaccaaagtattctaaaattattccaaaatactctaaatacatgattagcctttcaaaatcttaaagaattaaaattacactaatcaaaggttcaaagagttaatataataacaataatgagagaaaataacacaacttaatagacaaatatacacttatgaaatttcctcacacttaaattttgctagtcacttagcaaactatttaaataacaaagactcaaaattaaaaatcacgataatataaattaatctaaaataactaaacaaaggtcttatcgaaagcttgattttctatgagaatcacacaactaagtaatgccaacacaagtcagattttcatgctctttagaattttaaccctacatggaattaaaaatttaattttcaaaaataatttaataagcatataatcacaacaccaactagaatatatcaaaattgacctatacttgccaaattattctcttttaaaagagtccctatatagcaaaatatagttttcagtaaaaggaatccactccatagatattaatcaatatcattctccattaatataagcacataattaaaaaagaaattataaagtctttttaagcttgtaatataaaactaaggctaagggtagatgagaaaaatatatttaagcgtaaatcacaccaaagcatacatcaattttattctttgaatgagagatgggttaaggattttgggttacacaagaaaagtaaccgttcttatggctcaaatatagaaattaagaaataataattacaaaggtagactaaaaaagttcaaatgatctaaagaattacttaatcattttttaatcatgtgtacttattatttagcctcagaaactaatcaaaggtttttagagtggtagggacagtcaataactctaa

SEQ ID NO: 255889 - DNA, 539 bp, Cannabis indica
ctttcgacatgcgcataaggaggctcaaacaaggccttgtctaaggaacctctgacacgctttcttcaaaagcgtgtcatgaccaagtggccagccacatccgcgcgcacagggtgaaacccttcccctcattttatcaaaatcttaaaaaattcataattttttaaattttaatcgaaattaagttctataaataaaaatttgcttaattttttaccaactttctaaataaaataattgcagatcaaaaatcttattattttttataaaagtttttgtaatacgcaataaatcatcaattaaccacataaaccaatttgaacgcatccaaatcatacaaatatcgttttaaatctatatttcatgaaaataaattattaccatggctctattgccagttgttggagcttattttactaggatctagatttactaacatgtatattgattataggactataatctaacatcctaaatgtgatttttctaaaataataaaaataaaaacatataaatttataaaaaatcttatattggtg

SEQ ID NO: 255890 - DNA, 535 bp, Cannabis indica
aaaacttacacaatattttttaagaaaattccgccgtaaaaaaataaaattagaaatttcagcatgtggtgtaaaaactcttgtggaatattgcttgctaaacttcattcatgagcactatgcaaaatcattttttaggtgtaaaaatcaaaatatttaaattttaaattgctaacaaaagatattttaagatttgattttgattatacaaagtttagtacatggaattagagtcattaatctatatatacatttcattttaaaagcaaaggtaaaaactaaaaagtgaacaagaagctcttgacactatatccattttacaaaatttcatttatttttaattttaattgtgtacgattaagtataaaattaatttgagtatgtcatgacaattactctttatatataattttgtgtgtataattttgttttttttataatgttgttgttgactttaaatatattttttttgacaaggactctaaatattatttttacttcactttaaaagtatataaaatcattttttttattt

SEQ ID NO: 255891 - DNA, 3854 bp, Cannabis indica
tgtatgaacataacaaatactttcttttttgtatgaacataacaaatactttgttcgtgtgagatacattttcactagaaacgactctctgcttatgcagatgtgactagctaaagaaagacttttattgaaaaaataaatatgacatagtaaattttttaataaattaagaaacaacaatgataataatagcttaactcagatcaccattggcagaaatggatgattccagcttgaatttaggacacttctcattgagtacaatcagtttatcaagtggctgaaattgtatcccaaggcttgtacattccggcagttcgaacagccgcacgttgagagacttcttcaatgtacatggccctacttctgttttgcattcaaacaatgttttcaaattgtcacaaaattttacatgaatagtttcaagattttttggcagctgggaagtgttgaaaacatgttgtatcattggacaacagtcaatatacaagtgctttaggttctcaaggctcgtagtttggtgactcccgtagtatacattggtcaagcttggaacatttgagatccaaagaatctccaaatttctccacattctgctgccttcctcttttactgaaaaaatgttattcatttgtgagcatttttctatccaacagcctctcattgaccgcacattagcctcaccaagctctgataagcattttataaggctattatcaatcaaagacagatgatgacaatgcttgaggatgatttcgaaactatcaagtaaagaatatgatccacagatctccaaaaaccgctttgtgtctgcaggtatatgtctcatatggaaatagacgtctttgaagaaactttcaccttcgagtgaattggtatttctatctttgctttgcttctcgggaggaccaacaaagaaatgaaacttcctagtaactatctccaataacttttggtttttctccaaaaatttaaaaaagctggttccactcagagacatggaaatgatgttgctctccccaaaattttcgtcatgcttcaagatgccacacccatcccagtttacctcctctggcagatgttttatctttccccagtcaattttctctacatcctttaagcctggcagatctacatgttttaagctagtcaattctgtgatctcatagggaaacctttttaacttagttcctaatagatcaagaacttctagatggcttaatgatccaagaccttggacatcttctatttgtgagcaatcttttaacaacagttgtcggaggttgctacaagtggctaaggatggcaaacacactgcagttccagaaatatcaagaatctcaaggcctgtcagagaatccagagattcaacatctttcaagaatgaacattctcttagtttaagctgcctaagctcactgaattgtgacatggatggcaattcttcaagttgggttccagacagatcaagaatttcaaggcgagtcataccctccaagaaatgagatctaattttacacgtgggacttgcaccagatacaatgatctcctcaagtgaaagatccaccataggtaaaagcattgtcaagtctgtgcaacttctaagcaagaggtgactgagattggaggggttgcaaagggttggtagatgttgtacacgagtctttgaaagatcaagtttctcaaggcgagacaatttctcaaatgaatcatcttttattactgtcaaggagctgcaaccagaaagattgagtacctccagttcctcaagagcatttatctgtggcaactctttaagtttgctctcggagatgtttagaatgcgaagggaccttagatgattaagggattgattttcaatttcaaccaaatcactggcaccagagagatctaatacttcaagattttccattcttcttgtgcttgggagttgctgaattgcagttccagaaagatcaagaacttgaagcctagacagtgtttccagattaggcagtgttgtcaagcatgaacaaccacttaatatgagatgagtgagatcaacattgggaagggaaggtaagcaaataattttggatttagaaagattaagcatgctgagttttttcaatgatgagaagttctcgtcttcaattcctgttaaagaagtggatccagaaagatcaattacctcgaggtttttcaacgctttaaggcttggcagtttctccaattcagagcaccttctaaggatgaggtaacgcagttcttcttatttgaaaagagaactaggaagcgatttgatatttgttaaggagaagttaatactgcggaggttatgcatgttgccaaatagatcatcacggatgctagtcaaggagctactagatacttcaagagcacataagcttctaagtttatggatgtcatcaatattctccaatagaggacagcctctgagcacaagcacaagaagattgttcatgctggaatcaaaccaggacaaatttctaaaccagggattaaatatagaaaatacttcaagtccctgcattgactgaaaaaatgttttggtgtcttcgctattcaaatgacttccatccatcaatatagtggagactttttcccagctgctcagtgatttgatcataccatctgtctgtgtgatcctcccaaatcctcgaaactttccatcttccaacacattagccagctcaaggcctgtaatcccattaggacatgattgacgacgatcagttggaatcaaaactgatccctccatgaccactaaatcatcctccttctttgtaagcatattacgacttataagctccatcaaaacattgtgtacatcctcatatgccttttggatttgatcaacatttccaagacatccttctagaatccaatggctgatcaactcattgtaatgcacccaccatgtctgctgaaaaattgcatgcaatgccaaaagcagttgaccattatgctgtcaggcaacatattacaccaatagttcaatagatgacgagtccaggggtaagctgatccgcgatcataagctgctttctctaaaacacttcccagaaaaaagacatcttgtttgatgcactttaaggcttctgcaacggtgatgatagttgcagggatacctgaacaattgtctacaatagcttgagatagttgttcaaaacctggtttagaaatgacatcaccaactcttccctctaataaaatcaaagattatttcccatctagaggctttatttggtactcccttgtctttccattatgatatttcaacatcgtaccagttataagaaccttatacatttgctcacatgcagagagcagggtgttaaatactgatataatgtcttctacatcctgtttaggaggaacatcatccagaattactagaaaaaatttcttctcttcacgagcatccttaacctttttagttagtctctgtttcaaaagttttagcttctcttgcttcccttcctcagcatcttcctcccagtcctcgtcattaggggaaggagatagtgcctggcaaattttgtcatataaaatttgctcattgtactttctatttagagatacccataaagagtcgtagatgatgtgtcttttcttgactatctctcttgccatcatcgtttttcccactccttgtttcccattaagaatgattgttgttacattgccatcctccagcagttctcgtatttcctttgttgggattaaactcacttaacctctcaagtcagtatgcccatctatttgcctatttgatgaatctgaagaaagctgctgcaatttatgacagttggctttaatcccaacttaaaggggacccaccagcaactata

SEQ ID NO: 255892 - DNA, 1034 bp, Cannabis indica
tatataagttcagtcatgcttttcttatgtaagttaggctattaattattagagtgtttattatattatatgatttttactgcattctgccggtggtattttgtcgatttaaattatataatatgatagtatttttagaagtagtattaatttaattagagaacatatttttctagtgagcttaattatacacattttccaactataattaatggtgtagaattatagttgaggttaaagaatcaattttattaggaaaatataattgcatgtacaaagcttgtgtcttccataatcattttctgatcatttctcattttaattacttatttaattttaaaaatcattttctcaatattctcatcacattcaaggttcatattttattttcgtaaaattactaactgtccttttgagtgtacttttcctccctgtggatacgacatatagcccgtttactaccgcgaccgcagtgtaactaattgggcgacatcagtacaccacttttttggttttccattaaagatgctctaacaaaaagaaaataaaaacaaatgagttcattgcgggtaaaactctcaatactttcattttgcttgtacttaacccccaaaactcaatttttgcagcaaaaccctccaaaatcacgataccattggtaactcataattttttatctaaatttagctgttaagtactaagttggatattatccacgtgtacatagtgtacccgtagcacaattttattggtccacatacaattttattatttaattatttaaatattataaaatttattaaaaaattataaattaaaaaattaagattttagaaaataaataaaacctaaaaaaaccccatctttcccattaaaaaacacattctctttcttcctaaaaaaccctaaaattatgtcatctccctgcctccctctcttttttcctcggtgagctctgcaaccagacgtcactgccgatggaaccccaccgaacacgcctcatgctatccctgaacaacttctctctctctctc

SEQ ID NO: 255893 - DNA, 3160 bp, Cannabis indica
caattgaacatgtacttgagacaaatgaatgaaacaaatttgttgattctgcctagtacatgaaaacacaatattgcacattgacatggtaaaacaaactcagaaagttggataaaacatgcagtatcaatggaaattattccattgaccaaaagggaaaaaaaagatcatgagtttgttgacaccatcagttcattccacatgaaacatcccaaaatggattgtgtgaaattatgtcactccacagtttgccccagcaaaagagcatggactaaaactagataagttcaaatgcaagattgtcctcttgcaacacagttcttgggtaaattatacagcaggagatctgtttttaaccatttgaatcatacatctatgagaaaaatggagtcacataagttgctaaaagaaggagagaaaagactacttactactcgggctgcacttgtagtgatcgaaagcccaccgaagaaaaaagaaccccagatgataaatagcaaaataattgccccagtactgttattataccttccatgaaatgcatcgtacaatatctgtgctggtacaaacactccagcagtctcattgctcgtatcaaacagataatcaaaatcctgagatgaaaacatataaatcagttctgtaatttaagactatgagcaaggataggacatactctaacaggccattcttgattatctaaataaacatacatgaatgctgaaagtaagagccaagatataagcccagccgaagagtgaaatgatcccaatgctagacaaaattgcaatagggccattcttgtctgcgcctttggtttcttcagtcaaatgagctgcagcatcatatccgtacaaagaatactgactgacaagaaaagagagaatgactgcataaggtttgcttgatactccagtttgttcagttgccatttcaaattttgtgaacacatatgacgcagattgtgtactcagagctaccaagggaagcattattacaataatcagacctccaataacctgccacaagagaacttttggaatcagaagtttcccaaaataatcgataaatagatttcacgtttcaactactttttttttcagtaactcattgctaagacagtgggctgctgctaaccaaattgttcatattaggaaacacacaaataactagttcagttgaaacaagttacttgaagtaaaaacatttgagtaagtcaagaagttaagacacgctttagatataaatcaatgcctcaaatgtactttcaatagtaaaggaactgtaatattctagaaagtagttggaatatcaaattcaaaacctgccaccaaatggaaatcatgtcgataaaggcgatcacttccaaggcaaatgtattgagaaatgcccatataagtgtgaggcccgtatacatgcacaaaaacaaccattttggagcaagatagcctcctcctttgtttgttccagtgcataacagaatgatactctgtagtgtttgtgatcctgcatatgcctttccagccaagtaaaatttgttgattaagaaaagcctatatatacaaacaccacacacaaattataataatgaaagacatgaagaatgtccaggatgttagtacctgagtacctatgccagcaatgaggcctatggtctcaagccaagcacaacaccatgatgcaaatggaccccactttgggccagctagatgtgcagcccagaagtaaagagatccagtagtctgctcataatacaagattagttagctgtgttataaagagtgtgaaagcaaatcagtacattcaacttcatcttcaaattccaacacaataaaaaccagcttcaattgtttacgtcaagatcctttattcgctcaagcaataataaaatgtctcaatatggcactatttcggaatttcaatggttcaaaacatttaaactaaaatcaataacatgattgatatgaatatgatatgattttcatggtggaaaaagaaaataaatccatgtgatatatgtaaatatgtagaagaagaagaaaagaagtttaagaaggaggactaactggaaaagaggaacagatctcagccatagcaattccaacaaaccatgtgaagaatgacacaacaacccacccccacaccagagaagcaggtcctgcatataaaagacttgaaccatagagaggagtaattccagtgaaaagtgtcattgttgaaaatgatatcgccagagtcttgaaaagattctgcaagaaataatataattagataatctttaacaaattctcatctgggattcattaaagattatgctaggactcagtaccatttctctcctgagttcttgtttgtatccaagctcattaagacgtttctctccagaatccatttctgggatttgctgttccatgatgcgaaattagtcagggcaacaatctcttatatatatatatatgtgattttcgtatcagggaggctcaggctgtagtggtacaactcatgaagttagttaggtgatttctctcttctttttcttttttgacaaagttacatagcttctctttagtagagaagaaaatggcaaactaaaggatgatgagaaaattataataataagcgaagttgactatgtatggatcttttaatatcttggtaatattgaacgaaaataaaatccaatgtttcaaaccgttgaaatgtccagattgtcgttattggttccctcctaaaaatgtttacgtaatcattgcatatttgatgtttaaaatcatctcaaagcttggtatggtttcacattaaaatgcatgtgaaccaagggggtttgggtttcaaagttggaatgttttgcattaggtagctgccttaagctatggccccattttgaaaaaaaattaaaatataatcaaaaaataaaataaacaataatactcatagtactaaatatacattgcagtttagtagtaatttaattagagtattatttaggaggtttaatattcaaatctcaataatcttacttttttattgggtcttattttttatttttacctagcccaaattagtatatgaaaatttatgatagggttgttcatttgattaaattcgtacttttttggtcaaacaactttcaatttgcactaagcggatttaatatttt

SEQ ID NO: 255894 - DNA, 1370 bp, Cannabis indica
tgtttaaacaacatacttgtgagtagatctaagatcctggtaaaataaattccaacatgaaccacgtaaaaatattttattttctattcatttattcatattactattttttttcttaagctctaaaaatatttagttgctaaaaatcttggtaaatattttggtactttcattgagagctgaagaaagaaacatgcacggtggtcaccgactcaagcccgtcaaaaagagaacctgtgcaagaaaagaagaaggaagactactgattccctacccaaggtccgaccaaaggtcaggaacgcgttggtcagaggtgttgcccaaggtgagggttgatgacctcgtctgcacgaggaaaatatcgaagatgaatgcatatggtcttgaaatgcttgccgtactcgtactcgtccttaaaagctcagatctggccagccaactctctgtagggatgaccggccactggcatccccaggctcgagtcccctgcaggtgaaagaggtgttgcggccaggtgaagaagctaagatttgacgcggttacgacaaataactcatgaagggtcatcaaatacaacaactctatccagctcatgactccaacaccgatgctaatgcgaaggcaagatccattgccaatggctacttcccctacctttctactaaagctgtgaagccgaacggaaattgatcttataatggcgatggctaataggagaccatcagtaccactggcgcctgctggatttccagttaagcatggttatggtactgttagttgaggcaaaacatttttggcaaagttcgctgacagggacttctgtcattacaatgtaactatagctctagagttacatcaatgaaagtaacatattccatttaaaaccagttaggaagcctcttttggagtggagattgtcctgctggaggcccaagcctttgcctcaaaagctccttgcaatccactagaggaaacagactgcccaagagatcctagggcacacttggttgcatgtgtctcttggggcttcttgaagctcaggaggcgcatgcacattgtcttttgtgcgtgaaagatcactgagggtatggtacatctttaaccctccttcctggaatggaaggattgcttgaagtctatctcactcccagtgatgctttcaccctttgatcttttcaagtgaagttatcacttgaatttttatgaagctttagccttccctcacgaaagctaaagcttacctcataaaaattcaacatgattctcacatgcacgttgtttttcgtgcatgaaagattactaggggtacgacatgtcttcaactatacaaaagagataaaaacaactaaggctttgatgtgattagttga

SEQ ID NO: 255895 - DNA, 596 bp, Cannabis indica
aaagaagtgaactttccaggttcagggtttatggaaggatatcaatggaattagcaaatacctgagactgttttggactttcactctatgcccgtgacaaggttattgaactgacacctgtcttttatttctaatataatagtcatattggtgatctgatagtgaaatttcctcttctatattggtttttttcttgtagcttttacataaaataaataatgttgaaaataaaaagaaccatttctacaccaaaatagaaactacattcttaccatcaaaaaactttaactatgtgaattccaatgaacaacccatgaatatgtatctctaaacagaacaatttaaacaataaccagtacaagccacgttcatgttcaaattaatgtaacatcaaataaaattaactatgaaaaagtccaaatgatcttaactaaaattatattattagtatgtataaaacaattacaagaagtgatattttatctatcttgtattgcagcataacgactaactttatggaatctagcaatatcatttatccctatcttttatacacaaactaaaatcaatttctgtctagaaaacttggcaaagca

SEQ ID NO: 255896 - DNA, 554 bp, Cannabis indica
aaaagccaatctcaatttatattcattaataaattttcaagtatcttaagaaattaattttttcagttacataacatataaacattaaacaacataatgactatttatatatttatatacaaacatcctatattatatagtatatataccttttattagtaataaataatcatatcatgccatataaatgtttgtgtgattgataattaaaaaattaattacaataaaaattataaaaattataaaatagggtcgaaccggcgcgaagcgcagcttagttccctaattcacaataaactaaacatacacaaaacaaaacatataagtataagtaactacaaattacaatatttaaaaattttggaacaatgtttgtgagatgaacacaaaacaagataagaccactcatacttgaaataaatttaccaaaagttttaactataaaacaaataaaattgtacactttaaaatataaactaattattcacacagccattgttatcaaaacactatgtaggtcaactacaataactatacacacaatccttattttt

SEQ ID NO: 255897 - DNA, 820 bp, Cannabis indica
aaaaataaaagaaaaaagaaaaagaaaaagaagaagaaaataataataataaaaaaaaataaaaacaagagcaacatcattttcaattatatttttaagaattcttgattgcttgcttcaaaaagaaagattcattacacaataaaaatgaaagagagagaggcatcatatgtctctctaaaaaaattagttacatgcatttctttatttattagttagctaaaggttgtttatcatttaaattctattggtttgatatatatatatatatcttgtgatcaatatttcttcaaattgcttgtcctaaaaagtttatcctctcttatttgtgcgttgattattatatttccaacttcaaagagtgtcaccctttcaatacaaatactttcaatacccgtgagaaaattagagttgagacctttacagttttaagatttttcgatctatttgtgttatgacttaaaaaaatagataaagtttagtgcacacacaactctggagttacaacagatataacgttgataggaatttttaaccctctatatatattttgagaatgcttggatgattttgcttggtttgacattcaacttgataatttttttttttttttgcttgaattgctagggactagcaataagctagttgatggttgtgattaatgttgaaacatgcacacaaattaatcttaaaatttaaaataaattaaattaaaatcaatatttttatgaaatttatgagatatatttttatttttaaaatatgtgatttgaattttatttgtttatgttttgtaggaattaataattattgaagtact

SEQ ID NO: 255898 - DNA, 556 bp, Cannabis indica
aaaacaacaacccatctatccaaagtcaaaatcaattataccactccatatttagcctagttcatccaagcgaaacaactcaactcaaccttcactcactatagaatatagataatagaaatacttaatttgcagaatagaatctacagaaacaaacgtttcaatagaatactcaacagtctgaaacgaaacatttggtaaaaataagaacaaacttattgaaattatcactatatgtctatgaactgttactaagaccaacacgatattttcttcatattattattctctctaatttttttttttttttcattcgctacttaatcaaagctttcattttacgcatacagattcgcatataaaatcatcatcactataacagaaaagtgtatgtatgagaggtgcaaataatcttacatttttagctgagaatcaatttcgcatcagatagaaaacaagtggaggaaactataacatcataaagcagaaaaagaagagagagagagagagagagagagagagagagagagagagacgactgagcagcagagagaga

SEQ ID NO: 255899 - DNA, 1231 bp, Cannabis indica
attgataagatagatgccattttgttttggttgacataataactgtgcctgtgtgttaagcagttcacatggacatctttttttcttctaacttatgcttactttaatacagagaggttgataatatcaagaagcctttcactcctcctagagaggtccatgttcaagtaacacattccatgccacctcagaagattgagatctttaagtcattggaagattgggctgatcagaaccttttggttcaccttaagccagttgagaagtgctggcagcctcaggattttctccctgaaccatcatctgatggatttcatgagcaggtgatggaacttagggagagggctagggagcttcctgatgattactttgttgttctggttggtgatatgatcacagaagaagcactcccaacttatcaaactatgcttaatacattggatggagttagggatgaaactggtgccagcccaacttcttgggctatttggactagagcatggactgctgaagagaacaggcatggtgacctcctcaacaagtatctttacctcagtggacgagtcgatatgaggcaaattgagaagaccattcagtatctgatcggttctggaatggtgggtacctttgttctttattttctctattattgctaagcctataaaaattttcaaagggcctgtcttttacttggactaatgtctctttgttttcaggatccccggacagagaacaatccttatcttggtttcatctacacttcattccaagaaagagccacctttatctcacacggtaacactgccaggctagcaaaggagcatggggacttaaaattggcacaaatatgtggtaccatagctgcagacgagaagcgccacgagacagcctacactaagatagttgagaagctatttgagattgatcctgatgggactgttttagcatttgctgacatgatgaggaagaagatagccatgccagcacacttgatgtatgatggccgagatgacaatcttttcgataacttttctgctgttgcacaacggcttggagtgtacacggccaaggattacgcggacatattggagttcttggttgggaggtggaaggtggagaagctaagtggactttccggggaggggcttaaggctcaggagtatgttttgtgggttacctccaagaaatcagaaaggctggaggaaaagagctcaaaggaaagggtgaaaac

SEQ ID NO: 255900 - DNA, 839 bp, Cannabis indica
ctcatgcacggttttgaatgagagaaagagtgagatcctcttttcgactctgactctcccactccagttgttgctttttcttctgttacttcgaagtagctgcttcagcttcagccactcgaattttcgatattccttttttattctcatcaaccgagtatgctttgttcatgtcggaagttcccattactcatttgcttgcgactgcttgttttgagttgtcccattggctactgccttttgttagggagaggctctttgaggctgttttgttatctttatttgcttgctttaggctttttttgcggggtttgtctctctagatgcccctatgtgagcttattgctcctttgtttcttggtgtggttggctgcaagttgagtcatctccttgtgagatttgttcagctttgtctctgtctaacttgtaaggcgatgccctcttttaatagtgaattaatttcatttttcaaaaataaatacatacataaataaaaattttgtggggagacaaacattgacttttttttctttgtttgagaaaaataaaaatttccattaataggtaaatcagacatagtccattacataatgtaattgctcaaagagcataattaacaatattaggcaaatcatgtcgtttacaataataggaaagaaaatcctaacaccttcaactaaaagactaataaactggccgatagcgatgatgcatcgctcgaagaatgctagatctctaattcgaataaacatgtgacaatcacacctgccaatggctatcagtccggttggactccaccagatctgaagccaacaaacggaacccagcataggcaaaca

SEQ ID NO: 255901 - DNA, 1029 bp, Cannabis indica
aacttcaatatctaaatacaattaaaataaacaattttgaagtttaaattttgttgaggttgtgtttttgttgatttgggtggtatattttgggtttgacagtttgtaaaatttgttctacaatacactagtagttattctatgagtctctttttctttatggaagaaatattgtcaattactctattgcataattcatgtcaggcactgatgagactcgtctcatcaactcctttaacatcttttgacaagaccataaaagctgagatagaagagacacttgagaaattgaaacttcttctagacaataaagatcttggtttggaacgtgtgaagaatcataagcttccagagagggtttgtgctccatctctagaagaaaatgatatttatggaagggacaatgagaaagaagagattattaagttgcttttatcggatgaaacaactggtggtgacaaattatctgtgattcctatagttgggatgggcggtattggaaagactactcttgctcaacttgtttacaaagacgagagagtcaacaaaacgtttaacaccaaagtgtggattacgatgggagatgataaagttgattgtatgaaagtgatgaaactaattattgagaaggtcacttgtagaaaatgtgagattgaggagccatatgatcttcaagaagaagtaaagaaggctctgagagggaagaagtttctatttgttgttgacgatgtttgggatgaggatccttccaagtgggatgtcttaaataattgttttatatcagggttgcatggaagtaggatcattgtgacaactcggagtacagttgttgcatcgattatgaaaactgagtcaacttatcaactaggaagaataaatgaggttgctggctggaaattatttgcaaaacatgcttcacttgttgtggactcaaatgattacttggatctcaaacaaattggagaaaaaatagttgacaagtgtaagggtctccctttggcaatcaagtcaatgggtcttctcgtacga

SEQ ID NO: 255902 - DNA, 588 bp, Cannabis indica
gcatccatacatatatatttagaaaataatttgtattaatattattttaaaattagtgattttctttgcaaacataagtataaaatattattttaatctattttaaatgtttaatatttttttttttttgtaaacgattaaatgtttaataattgataagcaacatttactataacaactgttattattaaattataacttaacttcaagattcaagaaatcttcattatttatcatttctttttctaacttaattttttatcaatattttccactaatttttatttaaattaatataatcatattattatatatttttaagtataataatcaataggaaattactgcatatactattttttaatttttttttttaaatttacggtttaggttttgtgtcccctgattttgcccaaaatacatagaaccaactggacggtgacacgtggatgggaaggggttagcatttaaataaaatagctaagtctccttaaagcgcaggattaccttagacatgcctcccggagaaggcatgtaagtctcgtatgctcccggagagcaagattgcaacaaagcatctccgggtgg

SEQ ID NO: 255903 - DNA, 792 bp, Cannabis indica
taagaagatagcacccatgagaacagtgaatacaatccctaaaggcttgaacatagagcaatatagaggcccagcttttgacacacaccatgtaattagtgtataacgtatcacagttgacacaattgcctgcaacaataatatcatcaccatatatcataaacttatcattaattatatatatataatatacatgatcagtaatttcacgtgcttacttactgtgtacaaaattgcaaccaaacccatgtcaaattttagcttccaagcacttgtgtctttgactacaatgagagaaaagagtgcatccattagagctgaaaatgaggtttgatataagactgctaataccacagctgggtaccttttctgagttgatgcctgcaaataatacaaacacatttgtatgattgtatcaaagaagagagtgaaattttaagattaattaatcaataaataagatttttactttctaaaccataacccttcagtgaaatttttttcttaaattttagaaataattacaaattttttctttgagttgcatttggttcattttttgagataatttattgatgtgataattaactatgcttataattacagtaaagtgtatatttaattaacttataagctagttataactaactttaaatattcaaagattaaattcaaaattataaatatagattttattgttatagtactatctatataattatatttcacttagactcggatgaatttttcacagaaaaattattattagagcaaaaccaatgcaagtatagg

SEQ ID NO: 255904 - DNA, 755 bp, Cannabis indica
tttatcatttttttatttcaaataattcaatcctaaccctaagtgaattagtataaaaggaaaagaatggtctcataatccaactaatgactcttgacctaattttcttcttgtcaaacaactagagagcttgagacttcttattctttcccttctaattttttgaaccctatagtctcttcttcacaaaaaaaaaaatcaacatttagtgattaagtgcatgcccacccatagcaagttagtcctcaatcatagtgtgtaagattgtgaagaatccaaacaactgaaggagtgtcgggctcaaatcttgatgatactctgctacagaaaggatacaagggttagagatctgagcgaaaggagtcatttaattccactgcaaccaatgtaaggtttctcatactttatatgtgtttattttcatcgttttagaagttcatatttaggatcttaaaaacatacttgttagtaaatctaagtcctggtaaaatatattccaacaaaaacttcctaaatgaaatcacccaaggtcaaggacatttaaaccgtggagttccttcatagtgggctaccaaaacaagatacaccttgcaattatagatagtcccaagcaatccattcaagtcctcaaccactatgaagtcccacacctacataatctcagaatcactacatatgacatttcccctaggcgacgtggggctgtacaactcttagtctttgttaggttatttttagtattaattttagattaa

SEQ ID NO: 255905 - DNA, 624 bp, Cannabis indica
aatatataaacatgagaaataattaaaattaaataattaataaatataaattaaaaagttgaattataaaaataaataattgactgaataataataataataataaatagttcaagttaccaaaatatatgagatcatatctttgccatgaaatgattccaacaaaaaactaatttcaaaattttagatcaaaaattaaaaagcatacttgatgttattaaaagttgaaaagaagactcaactccattttgacaaaattttctcaccggagataccttttcttctctttgctgattagagaataaagtcaatttaactctgtaaatgagtttatgtaaacaaaaaattacaggccaatagagttcatccaaattcaaaggtctataaactctataatctagaaattaatcacaataaaataacacaaattataactaaaaaaaaaattagtatcttgtgaaacctagaatccttcccatttggaggagaacgagccatagctgagcaaagaagcaaagatgactcttctttcttaatctcacttaaaaaagaaaatcatgtagctgtaggtggaaaaattaggcaacaaaaacaatattctgttttttattttagaaaggaaaa

SEQ ID NO: 255906 - DNA, 521 bp, Cannabis indica
atgaaacttataaaaaaacacagtaaaaaagtaaaaaatactgcctggcagtatttttgtaaaaaaataataaaagttagtataccatgtaaatttttctatttattttttctttgttttctccatttgtatggaccccacaagtttttcctattctaaaatttaataatgggaatcaatctgaattttatataacttaataaaataatttttaaaaaatatcgctaaccaaggagaaaaaaatcttaaacactataataaccataacaatgctattaaatattacatggctatcattcatcttatcttgttattaattgcgactattaattattacgagtataagagacacgtggaataatgaagacaaatatgggtgatataaataacaatacaattgagactatataaagcatgggcggactatacaatacacaaattatgttatatattttttaaaattcaaaaaaaaaaaacaaaaaatctttagtattgtagttaaatgtgcatagtaacccaaa

SEQ ID NO: 255907 - DNA, 578 bp, Cannabis indica
ctatttatatattttccttaaaaaaaaaaaaattaaagcagtgcatgtacgaaaatatatattgagtttcctcttataataattcgaaattgtacatataattaattacagctggtacccataaactcaaaagcaaagtacaaggacattgtgaaatcgtccagggcttggggtcagtttggtcatttcgttatagtctgttggcgctttagattagctaatttcaactcaacttatttaaaataaaacaaacgcggtttctgtgtcctaagattatgtttggtaggaagtaagaagggagagtgctatggatgaaatattagaaagtggtgctgtaaatataggttgagatttttaatacagcacggaatcggcacaagtataagagcaacaaggatgatccgacacaaaaaaacatgtacttaggcacaagacggcacgacaaaaaaaaatataaacttaagcacgatacggtataacaagcctaatagcacgacacgtaaacacgaatagattaacttaaaagcacaacacattaaaatagcccaataatttaataataataacagtaataaata

SEQ ID NO: 255908 - DNA, 527 bp, Cannabis indica
tacaacacaccataataccatataaccaagttattcaaccaattaaaaacattaaaaaatatcctcatcaacaacgaagccagaaatttaactgagtgagggcttgaataaatattaagtcaaattaataaaaataactaataaatgtattatttcaaattttcatcttcaacaaaataaaataaaatattgtcaatagtattatttaatttttttaataaagtgttatttttttattatttgtattggactacttttaaaatggacttgattagaatgagggtggactcatgaatcatgattaagatattgagtgagggcttttgtgaattgggctttaataaattgagtgaagtgaattaatatatatatctatatgtgaaaagtttgatgtatatatttgagtgagggcttaaacctacatatgagctaaaatccctccgtccctggtcctcataggtgagagcaaaagtgatgctcacacctaagaattttcccataatatatatacatatacacctttccca

SEQ ID NO: 255909 - DNA, 5850 bp, Cannabis indica
ctaagaagacgtagctctaaaactatcgtaatatggagagtgaactactataattttagtgtggtctttattttatattattttttatttaccgctatcgcttaacaaactataacaagttaaaaaaaaaaaaacttgagttagtaaaataaaaaaaaaatatcgacttacaatatttttcttactcttttcattaatatagtctttttgtaaaaatctctatgtttaatatgcttataaatttggaaagaagagaaaaaaaatattataagcgatgtaatatcttctagttaattagtaatttatagagcgcttctatagtccaccccattaaaataggtgtattgatgcaacctctaactgtttcaatatctataagaattttttagtctaaattttttcataattgtgtatgttacagttatttatgacatcctataaaattttttgacattaagaattatttacaatatacaaattaatgttcaaaccatctatttcacacgcatataaaataaaaaaattatgcgtgcaacagactcttcaaactttatttttagcgtcttaaattttataaatttctcaaaaatatcttaaataactacaatatatatgactagaaaaaaatttagactaattttttaaataccaaaacagataaagatacattgatacacctattttttttttaaataaaatttattactagaagagaaattacaaaggaaattgtgagtcaaaccgaatagcttgactcacataagatggtgaaaccccaatccacatggctgtcgccttggttaataaagcgtaattggctaaacaaagggccactgtattggtgtctctaaaaataaaagttaaaccagaaacaagaggatgttgcagtagcttatgacactattgaattaaaccataaacctcccaacacccttcttcttgtttttgcatgagtaacaccgcttgtaagtagtttgattgaacactgaaaggggcaccacattgcataataccaatctttaaattgtcctttatagcagatagttcatttgttaaggaattggaaacctgtagtctatagttgtagaagtgaaactaacaagccttctactatctcaaatcaccaaaccttcagcgaatgtattatcacggctttgaataccagcatcaacattaatcacaaagcttacagttattggtgctcaccatttagcttcacccctttggcccttctccttattcctatcattagccttctggaactcagtcaaatgccaagatattacaaggaaaaatcaaaagtttcagctggccatatctttttaaaattgttaaataacgaaatagcatcaattgttctcagttgatggattcgacgccataaactactttttttttccatattttaatacttttttgacaatctcataagagatgaaacacatcttcatttttctgtacaacacagcaatgacatttcagttccacctccacccctcttttggccaatatatcattagttggtaaccaacaatagcacacgtttcatgtaaaatgtttaactttttgtggtactcttattttccataaagctttccaccacgtagtcattcattgggagtgtgattgtgataatacctctttctctcgcatctccacctctgttttatatccacttcatactgagtattctccattttgattgcaatgccatataatctaatcccaatcaccacttggaatgctagatatcaattgcacatcctctggttaaaattagcatgaataaaattcatatcccaagtacaattagcaagtttcaggtcaacaacatataattgatcaggcagtactgatttatcatatactttgaaagtgattggtctcggaagccaggggtcttccagtacacgcactttgttactatcaccaattcgtcatcgataaccccataaaattatctttttaccccaaactaaactgcacaacaaaaatgaagcatggttcccacatttggcaactagtacacatctttgtatggtaaatagcaaggcttcaacaccctactgcataaggacgatggtgttcgaattatttgccaaattttcttagctaagagtgcttgattgaacaaactcaaatcacgaaaactcatgccccttttttcctttggtttccataactgtgtcaattgatacaccgctttgaaggagatgtattatagaatttgtaacgccttaagaatttggcacgctacgacaagcggtaatatatcctaatcctgctaaactgggattattagaaaataagagaggaaaattttaaactttgattacaattgaataaaaacataacttgtaacaatttaaactttacaatcaatacaaatagacaacatgtttcgggatcccataaaacttttcgcaaaatattacaagtcattttacatgtcgacctaagggcaaaattcgagaatacaaaatatatctactggtagacccaacttgcttggtctaatatggcccgtatatgtacaatccatcgctaagctcccacactcatggctgattactaacagatttaccctttcatgtacagtaaagcacccgtgagccaagtccagcaagacagtataaataccaataaatacattaatatataaatcacataatttttaataccattgtattaattgtctatttgactagacttgcatgttacgctcacacgcccattgatgtctatgtgacataaactcacgtgttacgctcacacgtatatttacaataaggccttagaacggtttatctcggttttaattactgagtctaaccaattataccttgaacgcataattctttacttcaacatatatagcaggcatagtattcagaattattcaattactagggtaataaccctagaccatataaccgctcactttagggtaataaccctaatcctagttctcatttaatcacaattataatattaaacatgagcaccaccgcgcttaactctatgtgctaactactgtcttacctgatgtcctaagtacgtggagattccaaatccctgggtgctcctgaacaagtgctggtaatcctagtcacaattctcgagattcacaaataggattaatccctaaatccactttcacataatcatataattggcattcaaacacaaataaacatataaagcttcgaacgagcattccaacgataattggaacaccccaaacagagttcagatttaaaagttatggacaatataagttcaacatgcaatctgcccaaataaacccaagcgggccgcagcactccccaggcatgccgcggcgcctggattgaaaaacatagcgggtcgtggtgctcatagagcatgcagcggcgcctgggttccaaacccagaaaataccatttcagcaactcgaaataacaccaaatctcacagcagaaccctaacaaccatgcatataacccaagttcatcatacacaaattatagccattaataacagtgaatttaacacataatttcaagatttaaacaacatcaaaacatacaatttcaccaactttccaataatcaactcagctaacaagttgatctcaacaaccaaagcatcaaattctcaaatcatgctctaacaatttatgcaccaacctacaggttcaaagcataaattacagagattaaaaaaaatctcaattccaaccttaagaaatctcactaaaaaagcctagatgcaaaacacaaacacccacaagctcaaacaaccaagaaattaactatttctacatcaattccttccaacatgaaaccaacaagctatcaacaccaaaaataacgaaaaatcaacatgttattcagcaacaaattcagaattaaaaaatggagaaactacctcaagctctccaacacaactagcatcaacaacactaaaatccaagcttaaaccacccaaatctaacttgaagaagatcaagaaagtgagaaatggagagtgatagagagaggttcggttatgggctagaaaattcaggaattgtgtttttcattttacatatattcaattttgttaataatagtaattatggtcaaatgaccaaaatgcccctagggctaataaatcacataagcatacaattagggcaaagttgtcatttcatcacacacacacataacttaaataaattttagatttctcaattattcatataataccaaaataaaatctcgaaaatgtatttcggaccccgaaccccgttcggcccaaaatacccggttgtgactataccgggccaacttgtcagaaaatacctggagaaagacagaacaaatatactatataataatatagtccataagcacgatctaacactaaaattacggtttacccttctcagatcaatattacgaaaatgcccctgacttaccaacagggtcttaacatgtcatttatctgtataattcatatatattaaattatataataatataattccacattaatacatatttaactagttagggtttgttaatctgattctttaatcttagggtattacagaatttttctaatttatatatgtagtatgtagtattaaaccgttaggaaaaatattgtatatataaattaaaaaaaaaatattaggtaaagattgtttttaaataatttaattatgttattccaatattgtaggtttgacatgggcgaatatacttgctagttatgttctgtggttgatggcaccattcttgacagatgtatggaggcttaattaccaaaatgctgctatgggtattaatatattttggggcatcattgatatagctcctttcattacacaatattttgttgattcttacttaggtaactatcggatgggttcactaactactttaatgtatactagtgtaagtttcttattcaccgcaattaatttattaatcatttctgtaatatgaataaataaattaagagatatttacataatttaatcatatgttctctcattgttatgtttttgtgccattatatttttttcactaaatttttggatttcagtgattagtatgtttgtccttatcagcattggggacttgcaacgaagaacataaggcatcgtgtcatgttaaaaaaagatacaagttttattttacatagcataacctcaattaattggaggtatttcttttcaccgattaaattcaatacaagaacttcttcgtaaagaaggacaacaaacaataagttcattatcaccaacagttgaagaagtagcaattcctactaatgaattagaacaagatcagggctcatcatcaagatcaataataagaccaaataactcaaatggtgctactaatagggaagaagaagtggtattaaattcaattttaagatcatcaacaataatatttaaaaggtggcagttgttgaacatagttattttggcagtgattcatttagttggaacatttgcacttcctaacttgaaacaatggacaattagatttgggattccaactttgtttatgttggtggtaacagtgttgttcgtgagtgataaccacaaagattttaatgctccaattggaagtttcttaactactatgcgttcggttatcgtagcaagtttctcaaaatcaactaatgatcatcacctaaaccaagaatatcatcattctcaaacctcgccgccttatggtcgttacctcaggtactatatactatatacaatatagttagtcaaagtgattgatttatttattagtatatatttttagtatttctattccatcatagatataaactttacttatattttcttttttttttttt

SEQ ID NO: 255910 - DNA, 4860 bp, Cannabis indica
tctctctctctctctcttccatcttcggccctagaagaactaaggaaaaacctaggttaggcttccatattcaagctatttttcaacaatgattgaggagaaaccttaaaccaagatcaaaggtaagccctagatactttattccttgttgtttttgaagttttaagcttggttctcttttgtgatttttgggaattttggggtttagttttatttgaggatgaattgtgttagagactattttaaagcttgattttatttgtttatggcttgtttttggaagtagtagcagctatagcagatttgaggaagtttgggttctgtgaactcaagttttgctcatccatggtgaatttcattgcatgttgttttatatgcttttgagttataggttatgtttagattaccccaaattgctattttggaaagtttggtagcttttggttaggttgggagctagttttaggggcttaaaaattgggaatttttagagcccttgctgcccaagagaagcttctatgatcgaaggagcttccatgattagaggagcttccgtgattgaaggagcttccatgataggaggagcttccatgataggaggatcttccatgatcggaggagcttccatgatcgaaggagcttttatgatcgaaagcgcttccatgatcgaagagcttccatgatcggaggagcttccatgatcggagaagcttccacgattagggagcttccagaatgggactttaccaaggaaatcagcttttgtatttttgccataacttttcaatcggatgtccattttggactttctatataccgttttaaagcttatgacaagctctaccatatggaatataaattagagccgaactatgtattttattataagggtattttcattttatagtttaatagaaaaaccttaagttctatacaggcattagagaagtaatctagagtatacacctatccgtcttacattgtgacataaggcctccgttcaacatgtgaatttccattcaggttgactgacacacttgaatcaggaaatgaggtaagaccaacatagaatgtatatgtatatatgtatgtgtattatatgcatgctgattatatgattcatacactatcaacactagtatggtagcgatactgagtgcattgatacaacatatgatgtttaagggtacaatctggtgttgccaacactagtacaattaggtatgtggtacaacactcaatggtacttagggtacggttcaaaccctaccaacactagtacaatatcagtacgtagtgcatgtggtctagaggtcgtacctttgttaagaatgttcttaagcatttgttacaccttgtggatacaagtcggtgatatattgtatgttatatgcttttatctgtcgactcatagttattgcttgcatgtgtaggtaaatgagtatggagctcgaggataattgtacatgtcaagatggtatgacttggagagtttggtctcgggacgacttaggcttattttgtagtagattgtgcgacaaagttgtaaagttcattttgatcatgtgaattagtttaaaagcgggatctcgacctttttgtataattatatatttatagttataaaagtctaatgttaatcaaaagtttaaatttatcataacttttgagaaaaccctttgattagcaaaggagtgcagaataattaatagatcaatatagcgtgcctaatcattagggcattacatcttcagatcaatctcagcaagtcttttactcagtaagatgtgaagaaagctctattctccattctagacttaaagagcctagggtcagatggttttgggtctaaattcttcaagagtatgtggaaagaactgtgaaatgaaatctcttctgctgttattctatttttttaaaatgggaaattactgaatcagttgaatgaaactcttctcatgctcattctaaagacagaaatgccttcacaagttgtgtactatagaccaatagcgtgttgtaacaccttgtacaaatgcatattaaaaatgccttgctcgagattgtttgaagttctactaaacattgttgataagaatcaaggtacgtttattaagaatcgttctcttgctcttaatgttctcattttacaagatttgttgaacggttatcaaagaaagaacttctctccccgatgtttgataaaagttgatctaagcaaggattatgatacaattgattgggagttcttggaaaaattactaaaagcttactgctttccaaggcagtttattttgtggatgatggtttgtgttaggaattcaaaatatctatttatgttgaatgggaaagttcaaggtaatttttaaggtgcaaaaggtttacgacaagggaccctacttcactccttaccttcgttcttgtgatggaatattttgcttatcatccctgcagaagcttgaagctaattaacctatgctttttaaatgatctaatcgttttctgcaaagtaaatgctaattcagtcaagtgcattgctgaagctttctcaaatttcagcaactgttcagggctaatagcaaatcaccaaaagtcatatatttactttgcatgtgttaataaaactgctagacaggagattcagcaactggtttcttttaacacagggagtcttccgttaaaatatcttggggttttccttaaagcaaccaaacggagataggaggattgtgagaccatcatcaagaagctcaaaataagattacatacttaggctagttgtcatctctcatttgcaggtagagctctcctcattaacacaatcttaattggaattagatgttactggatgagtattttttagcttcctcagaaggtggccaaagagatagatcagatatgcaagaattttttatagggtgaaaaagggaacacaagtaagttgcacatggcttcttgggagcttgtttgtaaaccaaaacaacttagaggattgggattatgagagggacctaaatggaacaaggcgactttaaaaaagtacctttgggcaatcacttcaaaacaggatgtgctttggattaaatgggtaaataacatttatttgaaggatagagacatctggtctctagagctaaaaactgatgtaagttggtactagagaaagctcttgagacttagggatgtcttcatcaaggaggatattattcaagcaagggttactggtaaatttaagattgaataaatttatgataagcttgtacgtggtgatcaatatgagtttatggcagctacttggtgtaagctatcggctccgaagcacagatccattatgtggcaagcactccacaacaatctcctaactagagacaatatagtaaggaaacacataccaattgatacaaggttttttcctgtaagtgagtgggaatttgagtcacatagtcatttatttttttactgcccttactcttggagagtcttacaacagattaagagttggcttggaagtcaactttggcctaactcttttgaggatctttgaattggctcaaggcaaagagaccgagaacactcatgtaggatgaatttatttgttgtcctagcaggtgcaatttattgatatggttcaatcgaaatacatgtgtatatgggaacaaatgcttgagtctaagatgtatatatgagagtattaaagaaattctaaagagtagacttaatcttataaatgaaaggagattatctagtatagataggtatgttctcaatatggtaaaagagttgtaagtctatatctatgaggggcttcccttgagttgtaaatctggtcaggttgattaatagaaaatactttcttgataaaaaaaaaaatcactacatatacaacaagtcaccaacaagttgcctatctttatgtattttttattaaaaaattaattattgtatttaatattcttgtttaaatacaaaatagtattaaccattagattaagatctaagggtcataaataaattattaaaagtagtaattaattttgatcactgccattgaaggacccttatataaatgtgttgtgtatatatagatatataaatgaggaagataggagaggtcaggtctaggttttttttttttttgtttgatgatgggagtgagggttgaggaagttggatgtgggtttataattttatttaaaatatatatttttttaaaattttgggtatactgggtggaacccaccatactcaatcaaaactcggtatcgaaaatttgagactcagcacaaaaaataggtgggttacactcgaaactcaaaaatttgaacctaaaaaacctgaaattcagaatactaatatttaaaatatttttgcacatccaatgtgcaaccctattgtacatgtatattttaatttttacttcaataaggttatatatattgttttaacttttaaaatattttaagagaaattcgataagaaaagtttaaaataatttgattaattttaatgttaaaggagagaatgtttgattgtgcataaaaatatttaactaagttaaattatttggttgatagaatttgacgggtatatggcggcaaaacctccgatactttcgttttggtttcactaaactcccaaaacccaaatttattcaggtaaactcccaaaaccaggaaactgttagcaatttaacacttccgtctaaatttagctgttaactgccaggttggattgtccacgtggacacaataaacacgtggcacaattttattggttcacgtacaaaattatttaagaaaaaattaaaaataaaataaaattaatttaaaattttaaaaaaaattataaataatttttttt

SEQ ID NO: 255911 - DNA, 2243 bp, Cannabis indica
ttttttttatttttttaatatgttgatagtaattaactagttaaggtatgtgttaattattgtaattagttttctaattttttacgagaaaaacatacgtaccttatatatcactacaagaaatgtcacttttatcagcacagttcgctattgcgctggtaaaagtaacttttaccagcgcattttgcaaaccgtgctggcaaagagatcaaagttttaccaacgtacatttgcagtggctaaaatctaacttttaccagcacatttacgcgctgggaaaagtcttttttgctagcgcttttcattttatgctggtaaaagttctaatataccaacattgatttgccaacccccttttaccaacacatcataggtaaattctattttatcagcgcaataccaacttttgtcagcacaaaaatatattggcaaaagtaacatttcttatagtgtatgtttatggtttggtgcagtttgttggtacccattgttaagttctcttatgcggtattaaaattttgtatttttatctgcgctatgtttttcttgtaacccttatcacacatttattaaattgtaatttgaatcaaaataataaccattaggagaaataaatcaatttaaaatataaaataatcagaaataatattttattatgatgtttattaaattgttcgagaagaaaaccataatcattttattttatttgcataatatattgtagttgtaataggtaatgagaaaattttgaataatttatatgttgtggaaataaaatttaaaataatttattgcatacacatatgaaataaatcagacacacatgtaattaattttttacattttatttttgatattaaaaatattattaaaattttctaaaataaaaatggtacaatacttaatatactataatatacatcattacattaaagaaaaaattataatttctttatatacaaaaaaaaaatgcaaaattataagaggaaatgtaacaaatttatataagattccaattcaattcaaatatagagagatgtggatatatacccctattttgcatatcaagtggatcttgaacactctttgcttataaaccactacaataagtaacattaattacaacaaaattgggctttagaagatgaatctctttgtttaaataattaataatgctaattactttttttttaaacaaataaatattacatctttgtaattatacttgatatgtgtgtctaaatactaaactcactctaatttctttttgtctatttggtgaatggaaaattctatattattagatcgattgaataaagattagttaattatttgctacttataaattatgagactttacccaccaataaaatatgtgaaatatgatgaggaataatttataaaatacaattatcataaattttttgaagagataaattgtgtaagacattaactaaatttgtaaattttattttagatttgtggtttagtaaatgttattgatcagactatttgatttattaaatgataatttaaattttgtatttttttttttaaattgtacaaaatagtaccctcagcttaatttttacctaataataatctaacatagaagtattatgactagattgattatatattttttttttgcacctactcctacaaaaaaaaaaaagaaagttaaagggtttaattttgtactattttataaagtacaacgtctagtttatcatttaataaaataataaattagtaacttttataaaatttagaattcaaatcaatatttacagttaattatatgtataactaaataaacatgatgcatttttcttctaaagtttaattattgacaaaaatccattcattaaaaatatctcaaactatatagttattagctacaagtatttattttctttaatcttttcaaatatttatttttgaaaaaaatctaattaatagtaataaaaaaaagtgaccaccctattaattccgacattgaatatataccaaaatatatgcatgtgtttttcaccaaaataaatgaataaataaaatagcataatatataagaaaaacacaaaaaaaaataaaactaaagatcgaaaatgaagagttaattaacaacaaagaatctatgcatgtaatattaaactataataaataatactataaaagattttggttagtgcctttaaattaaacaaatatcccctcctttaatttggatgcatgattattat

SEQ ID NO: 255912 - DNA, 7180 bp, Cannabis indica
tcatacaatcatgtgcttctaagcaaatcaaaactacaaaattcatagtaatgtcttcccatttctacttgggaagtttcaaaagttctagtgaacccaaaggtctctaatattcaacatttatatgttcacatgtcaaacacttatatatttattctaccacatcctttttcatatcggaacaccaataaaagagtttcaaatcctgatacatcttgattttacctgtatataacaagtaaaaaatggtgtgagcttcatttgagatttccttttacgctctcatcactagccataacacaaacctcattcttgtcattaaatatttctatcatataatttaggtggcgtttggtaacacttttttaatcagttttctgtttttaaaagtagaaaagtgaaaatatttttcaaaaacatgttctataaaactgtttttacttttcaattttataattagaaatcaaaattttaaaaacaaaaagaatcactttcaatatttttttaaacagttttttttcttaatcaatcttttagattacgaccagacccggacccaaatcccctccctacggccctggcgctaaacccgacttttgacttgaacccgaatccgaccccggacctagacccgacttaaataaaatcaaaaaataaaaataaaaataaactttacagaacacacttttgttttctgtttttaaaattgaaaaacaaaagtggttacagaacgcatttttgtttttcaaaaataaattttttaaaaacaaaaattttactttcattttgtgattaaaaaattaaaaaacaaaagtgttaccaaacggcacaatttaataatttttttaaaaaaccactaattaattacaaaataatacttataagtagtgaatagtgattattttgcattagagtcccactatttcaaagctgacttgtcataattggacccatatggtactacagcctattatgttccttccacacaccataacaaaatgtccgtttaaatccacctcacaaaaaataaaaataaaaataaaatcttaatatcaaacggtatttcatttgtgtggcattcgctaagcttaatataatcccttctctctctaaattatctctctctctctgctaaattctttcttctcaacccaatccatagcttatttggccaaaatctagcttctcgctgagtctttcgagctcaatcaatgtctgaaattctttctgcttctcagttccagaggacgctctttgtatagtgtttttttttttgttctttcttggttttagttcgctgtagatattttcttcgtgacgttcctcttcttcttcacaacttcttcttggaattttctggggcgcctttcttttggttgtttaatgctccgcttgactcaatgattttgttctgttccattacaaatggcctctgctccttccatgtcgggtatgtgttttttaattattttctctgcttcctataaaaatggtggatacttagtggaattgtgattttggattttggattctgggttttgttatttttcattaataagtactgaattcgagtgaacttagagcatagtggattactaaggtgtcagtcttgtattgttttatcgaacctaaggagtatataaacttggaatttttaatttagtctgttaacagttttatgaggttcaaacaatttgattcttgattaattcttcatgagttttctgggttttgacttattaatccattgttatgtagtttctctagaatgcgtgaacatttgtaagttaccaaaaggggatggaagtggcagatatgactgtaattttctctcatgtgcgtggaaagctccgagggtcttgactgggttccttgcgagtacagctcatcctccaacgtgctctttgttgtcttatgcacgaaatgggagaagaactcgaatcaattttgtaagtttctacgagaatttaagcactggttgattccactccaattatgcaattttttaatttttgttttggtaaagttgatgcacatatcaatttaataatcattacttttaaggattgttaactaactcttcatgttttgaaggagaaaggttattacttttgtgtctttattttgcttaatattattgttttaacattgtactcttgccagatgagtgaatcttccactatatgtggttggtatggtggtgaaacttcagatttttcacacagaaatctcattagatcaagcatacttcatgttgcttgcaaacgatggaagttattatgctcttcatccttaacttcaaatgtcattgacgaggtttctcctgaaaggttgtgggaggtataatatgttttgccaaatctagaatgtttgaaaataatattaacctgccaatttggataatgtggtgttttctcatgatttttttaacttgttgtttggttcgtgcaggatcttagacccactatttcataccttccacctatagaattggatttggtccataatgctcttaaggtcagctctcacttacatgaagtaaatttagtacatatttttctgtaaaacccattacttcaaacatgtggttgtctttaaattcaaaatagttttgtgggttcacagctggcttttgaggctcatgatggtcaaaagaggcgcagtggagaacccttcatcatacatccagtcgaagttgcacgcattctaggagaactagtgagtcttataagtggaaaaacatgatactatttattacattttttgtatattgtttttgtgaactacaataagattaagtaccatcttctttctaggaattggattgggaatcaattgctgctggattattacatgacacagtggaggatactaatgtagtaacctttgaaagaatagaggaggagtttggttctactgttcgccgcattgtagaaggagaaactaaggtagatttttcattttttggataaatgcttttttggtacccattgttttattgaaatacaaacttggtacctatcttttcaataatatttatatggtaccttgtaatttgaaatagtacatatttggtaccatggactgaaatttggataaattaaatgtaactgaggacaacttggttatattgtttaaattagttaactttatttgggccacaagatacgaaatatgtacaacttcgaattacatgtactagatatgcattattgataaggaaagagaccaagtctgtattccaataaacacagggcacctaatagttaattaccttttttttttcttcttcacattagattaacttaaaatattttggattggcttaatgtttatttatatttttggcaggtatctaagctaggaaaattaaaatgtaagaatgaaagtgatacagtacaagacgtgaaagctgatgatttgaggcagatgttcttagccatgactgaagaggtacctcattattaccttttttttttcttttttaatttgctgtgtgtactttgaagtcttaacccatttgcaaattataacacgtgttgtttcaggttcgtgttatcattgtcaagctggccgacagattacataacatgcgtactctctcacacatgcctccacacaagcaggtgacttgttattcatttaatttactgtctgttatgtatctactttgtcagacctggtgttacattgaatattactcttgtgttccagttcagcattgcaagggagacactacaggtgtttgctcctctagcaaagttgcttgggatgtaccaaatcaaggtattgccctattcatccgtcttctgctattcttttcaactgcttaattaattagattttccatttctgcaatgtttgaaagagtagttgatttacattacagttatctttcatgatttgatttttcttttcatgttatccatttttaaaatgttcaaatatgttatagtggtatctggacttttaaatacaatttaagggatggaacaatttttgcattcaaataatgtacctacactgtattgcagtcggaacttgaaaatctttccttcatgtatacaaatcctgaagattatgctaaaatcaagaggagagttgccgacctctataaagagcatgagaaagaacttgagggggtacgagttatctagctctagagattactaattcgtgggatactatcataacatcagatggcagttatcaagtatagctttctagtacatgatataatatatggatttcaccatagtctgcttatcaatacttgtcttttacaggcagacaaaattctgacgaagaggcttgaggatgatcagttcttaaaccttatgactgcgaaaactgaagtttgtactgtttttaaggagccttataggtctaaaagaataattcctgcttatttttccttgcactttgcacttaatatattctattttaatatgcatgtttgtatttagaaggcctagaggcttttgtgattttattttgaggggatgagggttttcgttcagtttattgaatggtctacctattaacttgcagtatctataaatctgtgctgaaatctaaaggatcaatcaatgaagttaaccaaattgctcaggtttgtcttgatattttcttcaactttactatattttgcaaggaaacgtatgggactaatgaatttcttgacttaaatttgcattttccataaccagcttcgtatcgttataaaaccaaagacatgtgtcggagttggacctttgtgcgccccacagcaggtaagggttgcttgaacaattggtatcctttgctgcattctgtatccaatatattctttctcattcttttagctgtcttatctgcagatttgctaccatgttcttgggttggttcatggaatctggactcctattcctcgttctgtgcgttcacttttcttgctgattattcaatttacatatttgtggaagtgttactaatattctcgttaacagatgaaagactacattgcaaccccaaaacccaatggttatcaaagtcttcatacaactgtaatcccattcctttatgagagcatgtttcgaattgaagtgcaggtagtcttggattctcattattgagcatgtaccattttcacaagtagtttaggcatgtgccttaaattttgttatacgctcttgatgtattaacatattttcattcaaaagtttgttaaattcctttctatttgtcagttttatttatctgagttctcatcttttggcagataagaactgaagaaatgaatctaatagctgagagaggcattgctgctcattatagtgggaaagtatttgttactggtttagttggacatgctaagccaaatggtagaagttcaagaggaaagactgtctgtctaaataatgcaaacattgcactcagggtatttttctaattctcattgctgctttatgattgttaatcatttcctggaaaataattttcagaaaattctttccattcacttccctgccaattcttgtgaaatcctacttcagattggctggctcaatgctattagagaatggcaagaggagtttgtgggcaacatgagctctagggaatttgtagacactatcacgagagacctgttaggtagtcgtgtcttcgtgtttactcccaggggagaggtaatatgcggttattgattttcattggatgtaaatgagtaaagtcaattttagacatgagatttctatgcttcagtacccttacaattttctttacaaaacatacagataaaaaatcttcctaaaggggctactgtgattgactatgcttacatgatacacaactgatattggcaacaaaatggtcgctgctaaggtaccctcttctttgagtcatttatcagttgtctaaactttcacttctaaattatgaggaaaaatatctgaagaactttaactttctctgatgcaggtcaatgggaattttgttgctcccatgcatgtactttcaaacgctgaagttgtggagataatcacctataatgttcgtatattttgatcactgacatacaacttttgcatttttagtgtgaccataacacagaatatttttgctagcaaatagacactacatttgttgtgatctttttcttgcatataaaggtgttatgctaattcactctgtggtttttgttgggaatgatgttctgggatgtgaatccattcacctttcttaacaatctaatgttatagtgacagactgcattttattgatcttgttctgtttgttccggctcacatctttttatgttttttcaaataacattcaggctctttctgggaaatcagcttttcagaggcataagcagtggttgcagcatgcaaaaacgcgtagtgccaggcacaaaattatgaaagtaggcctctttcgccaagtgcttttattttgtttctttgacaacttggttttgcttatttgtttaatttcatctcgtgtagttcttgagggagcaagctgcactctctgcagctgaaataacatcagatacagtaaatgatttcactgctgactctgaagaggagagtgaagcagaggaactttctgataccccaaaaggatacaggccggtgtggaataaatttcttgcaaaaattgtcgaaatgtcatcacaaggaaatgaatccaaggcttcgcttcaaaatgaaaatggaagtgcttgggttcccaaagtaaatggaaaacataataagcatgtcaagtctgtaagtttgaacgttaaaggggaattatcacaaggaatcaatatttccaggatgatgcaagctaatattccaacgtacaaagaggtcttgccttgggttagaaagctggttatccagtaagatagcatcttggcataatgtcgaagggcactccatccactggctttttgtggtttccattgatagtaagaggtaattgcatttttatttattttttcaaatcaacaaggtgtggtttcatcttgcctttcagtgcttgggaaggggcgatgcgttacaactttatgttgcttttcggtataattggtactgtgttataccttgattgagtgccttacgaaggttgtagggttttaggtaggacgaagtgtaaaataaaatgaataacaataccagctataatatactctgtaatgtgttgtacgacttaa

SEQ ID NO: 255913 - DNA, 547 bp, Cannabis indica
gagcaaaacactaaagcatgctccgaagattccacttcctccccacacctactacacatcggttggacaagaaccttgcgcctaataagctgagaattagtaggaagagcccgatgatacattctccaaaggaagatctaaataagcttagtccgcgttcgggtggaggaggtaaaaggaagatggatattgagtataataatgaatgtgtcaagaagggaagaaaagatggaatttcggaattgaatcccgaggttatgaattcagtattggcgaagtctgcagagcaggctcgccaggagccatgagtttgttatgttggaacgcccggggcttggggaaccctagtgcgttgacagccttgcgagcagtggttcgtaagttctccccaagtttagtttttttgtcggaaactaaactttatggtggttgggcggaaggtattaggcgacaagttaatttgtcaaatagttttcatgttgattgtgttgggaagagtggtggcctgttattattatggaatgatgattgggaggtgagtgttaag

SEQ ID NO: 255914 - DNA, 1111 bp, Cannabis indica
atttcatctcttccaataaatctttgaggcatctttcttagaagcccaccaaaaatttgtcgtaattaatttgagttgattgcaaaaagtttttgataagtggaagcaactcaagacatatctcagtatcaattgcattgcaactttcaataggacctctttcctcctaatagaaaaaagttatcattctaagcatgtaacaatttccatattttttttctttaatattactgaacgattcttttttatcttgtcctgaataagatgggaggacaatgtaagattcatggcagctcaaatcaacattcccaaaattttgttgaaaaaatcttttgcacccattattgtattagggtgttcatccaattcaatcggcactatttttctcatagtacatccgatccgcgctaagtgcagattttattttttgaatccaatccaatccgcacaaaagctcaaatccaatctaatccaatccgtaaaagtgcagattgaatcgattattttgaatttgttactttttaatattaaattatttaatatttatgaatattttttttactaacaaaataaaataaattatagttattttatatctctaacaacacaataaaataaataaaataataaataatagattcaaaagaagaaaaaaaaattgtatgtataaaaaaatgtttaatttcattttaaattgtatgtaaaaaaattattaataaaaatagaatatacatttgatctattaagttttgaaatataattgtattatatgtattagatttttaaattacaattttcttacattaaaatgttgtttgtatatataattttttaatttttttttaaatatgtgtggattagatcggttacttttacatgtcaatcaacatccaatctgcacaagtgcagaatttgaatttttcaatccaatccacacaagtgcggatatccgcactttacaaattagatttgttgcccttgattttgcccaaaatgcgtggacctggataaggatgacatgtggagctgagaggaccagctggataaggtgcctcccggaggaggcatgagaaggatcttcacgctttcggaggccaaggacatattaagg

SEQ ID NO: 255915 - DNA, 1028 bp, Cannabis indica
ttatgcatttattattctattttgtgcaactattttattatttcatgatgtaatattattgactaaatactgaatcaacagtcgttattattgagttattattgatgatgttaaatgagattcatttaattagtgagaacttatgctattcatttaacctaaatttagataaatacaaaggaaaattaccatatatttagataggttatttaaaggtttaatttgaaaattacatgcaacgacgttaaatattttgcatcacgtaaaatacaaacaccttaaaaatacacaaaaaaataaaaagcattacccttaatatatttaggtaggttatttaaaaatattacatgcaacgacgttaaataatttgcagcaacatatgataatgtaaataataccaacactttaataaaaatatacacatgagctttaaaataactaaaataacaaattgtatgaattatttattctaaagttattaagtatttggaaatatttcagacaaacaacaataaaaaaaaataatttgataaaaattactatattattattttaaacaacataatgaatatatgaaaactaattcttcatatatatccctacaaagtaaaaaaaaaaaaaactaattctttacatatacttattcgaaacataattaaacgaccatattattataagagtacataacaatacattttatttattatgcagtaattaaataatatatcaacaaaaagaaaaaaaacatatgaattaactagctataagacacacaataacggaccagaataagtaaatatacaatgaaccatttttcttttactaaaaattataggggatcatcatatcattgataactttctacatacatattatttttttttgataaattttaattacacacatagtattttttatttttttaataaattttaatcatacacataatattataatattcatattcccctatttttaattatcaaaactatgtaacactagatgagtaaactaatccttcttcatca

SEQ ID NO: 255916 - DNA, 1131 bp, Cannabis indica
cattgtacatagacagagtttcagtagttgtccaatatcggaacacaactagtttgtttaggttccaagttttcatgtctcgtttgcattgaaaatattatgttttctagttttctgctataaatgatcagtatattatgtcgtttgaagatttttttttttttttcacatgcaccaactatgatgtgaaatatattttttttttttcacttttgctgaattgtgatatgaaatttcttattataatattatctttttgaaaaatgcatgacctcggtttctcccaaaactctctcaattcacatgtataaagaaaccggagtcatgcataaagaaattagaaaaaaaaagataattaaaaagaaaaaacaaatgaactggcaataaatttgtatccattaattaatgcaggtgtcaccggctctgagtcttaggttgtagtagttatgtaatctcgtggtcaaaagttaattgcaaataatcccttaatatatattgaaaattatatttatattctttttgtattgtcctcttttattattttttttttttaaagtctatcatatttatcctttttttttttaaatattgtaccaattttgcccatgtcactttaagatattctccatgtgattctcttatgtcagggtattttgagtacaatacgtataaaaagatatatgtttcaattaaatataaaattagaggtaaatttaattaattaattaatagaagtggtatttttcaacttacccctaatatattacaaaattatataagacctgtaattaaaaattataccacatacttaaattttttatttttttacttttatattgtggggcggaatttttttaaaaatattatattattttaaaaaaaaaatactatataagttttatactgtgtattgtattaaattttcactgttgttttatggttattttttaggtgttctactgttatttttagttgttttattatgtgtcctactattgttttataaaaacacagtattttgaaaagatttcgtatgacagaatttttataaaaattaacctaaattttagtatttttgtaagtctccttactaatactcaaactatcgaatcggtggtttttttttttttt

SEQ ID NO: 255917 - DNA, 832 bp, Cannabis indica
ttttatattataaagagattctaacttaagacttagatgtagggatgcacacggggcgtggtattagcggggagtgcttctcccgtcctcatccccgttaaggattttaatcctcattttcgctttttctcatcgaaaatggggcagggaatcccctaatagaaaaataaagtttataataaaattttcaatatacaaaaatattaaaatacataaatataaaaatattacacattaattattattcaataaactaattattatctaaaacacaacctaaaattcataaaaaaaaaatactaatatactaaaaaatacaaacataaattataaattataaaatattactagagatataagataaaatactaaatgggtccccgtcggggtggagagtgtgatccccgtccccgttccgtttaatattcagggacgtccctgccccattctccatttagatgggaaattcctgccccattagaggcaggtccctgcgggaccccatccccataggagaaatgtgcatccctacttagatgtaatatcatcaagttatatttattatcacatgcatttatgatttaaaaataatcaattgaatcaaattcacattttacttatactaatgaaaatttcaaaattatttacgcataaaataataattttaacttctactatagtaatacaagataaattatataatcaaaatcaaataaaagtatgtataatgtttttattttattttatttatttttagagaaaataaaaatatttattagttggcaaatcagataaaatttgttacatgaaaatataattcatagagcaaaat

SEQ ID NO: 255918 - DNA, 873 bp, Cannabis indica
tcctcaattggttcactgtttcattcaaatgtcaggatgtgaagaagctttttgtgctacgttcatctatgggtacaacacttctgaggaaaggaagtctctgtgggcggatctgaccaaattaaaatttcctgttaagtcgtggcttatattgggagattttaatgctgtgtttaaaattgaagatagagtgggtggaaatcctattacgctcagtgatacgagtgatccttgccagtggttaatgtcagcacatgttgattctattcctttcaatggatcaaagtacacttggtcaaataaccaggatgggcagagtcgtatttactcgaagattgatcatgcctttgccaatgagtattggtttgatagttttcccaattcaaaagcactttttagttgggaaactgtctcagaccattgctcttgcaccataactactatggtgtctaacaaaattgggtatgtgcctttcagatattataatttttggtctaatcatgctgattttaaagctacagttctccaaaattggaagaagcctatggtagccaggggtttgcttgctatttatcttaagctcatgcgtctaaagcactgtctcaagatcttcaatagggactctataggagatattgggaagacttaccaagcagctaaagatgaatttcttgaggccaagcttcttgctcaggcccacccgaaggacccaacttttcttgaaaaagaaaagcaagcaacagttatgtttttgaaccaagagaagatgtaccacagttttttgcggcaaaggagtaagatttcttggctccataaaggtgatgagaatacttccttctttcatgcttgtttgaaaaaaaggaaaatggagaa

SEQ ID NO: 255919 - DNA, 515 bp, Cannabis indica
caaataaattgatagttaagggggttttgcctcaaattactcaataatataatttgtgattaaatctagaaaaaacagataaaataatagctgggaatttggaagccattaacaactaacaacaataatccctttgtatttagttctgaatattcaacataactgctctcctctctcggccagataaaaggggttctattctggtgagtggtgaattcggagccaaaatgcgtcgtttcccggtgactctgcttctggtagcagtggtggctttggtggcccttggaatatcaacgaagggtgccgaagcctccaattcagcttctgccttcgttcagaacatcatctactccaataagatcgccatattttccaagtcttactgcccgtacgcctctactctctctctctttctctctctctctcattcgaatttcgaaatttaggcgtataagatttatgatttcatatcgtttcatgaactaattatgagtataataattcattcttgcaaa

SEQ ID NO: 255920 - DNA, 704 bp, Cannabis indica
attttaggtgtagtatgttagtaagtagtgttaaagctttggtaaaaaatgaaagaacacgtgtaaagtacgtgtctatgtagaaggaatgttgtgaagatgcggtggaagtaagggacagtgaggcaagtcgtgtgtggattggggctagtcataggaagatatatagccttatactggcaaatctcttgatcttctgatcgtgtgagtgtggagattagacgatgaaccgactttgtaacttatactataactataaaataatttataactatatattgtgtatatttatgacaagagtggatgcggaggcatattattatgtggtaaaaaaacaaggttaggaacttattggaatatcctttcttgttttgtcttgcacaagtttatagacctgtgttttggactttagaaacagttttcaaactaattagttttggaatatttttgtttttccatgagtggattttggtaattttcaatggtatttttccttttcttattaagattatcttagattttgtttagctctataaatcgaccatgatttgggttgtatgttggttttattggcattattgttggtagttggctaaccttttggggcaatttggaatagtggtttaccccaataattattgggttttatttttaagaaaagtatagatgatgtactaatgtgaaatattaacggttacattatt

SEQ ID NO: 255921 - DNA, 589 bp, Cannabis indica
taaaaaaaaagaaatcgttaaaccaacaaatgacgttagatagatactttttatatataaagatatatatatatatttatatatgtcttgtgaagtttggaatgttttggagctattttggaggtttaaagttaaggaaaatcgtatttcagattattcagaaccaaaattccagatggcaccaatcgaaatatcatttgttcaattttttacggaaagatgaattttgtattttagccataacttttcactcgagtgtctgttttagacttctatatacagtttcgaagcttgcaacgagctctacaatatggtttatgttttagagccaaaatatgtattttattttagggtgtttttaccacaaggttcggtaaaaaaaccctagattgttttatgtgagtattaggcaatattttggaataaacacttattagtttaccgttattgtgacatagggctcgggatcgttgatcgttctccatacaggttagccaacatacctaaattgagacttaaggtaagaaaaacataatataccacatgacttcaaaggttttttgattgtcgattatctaattaggcaatg

SEQ ID NO: 255922 - DNA, 1204 bp, Cannabis indica
ctataattaggggttcactcatagggaaatgggggaggcaattctgatttgcaagaacttttctaaattgtaaacataacgcaaaactcagaaataatactgactcgtgacgtatgtagatttaactataaaaccacgtaaacgtatatggtgttcatttattatttttgtctttttatttcttgaattaataatcttcttagattaagttgatgaaaaattgcattaacagtttggtgaattcattaagagaaggaagtttcaagagatttaaaaggaagagattcagattcatcatcttcacactctcaactatgaaattggttaaaattggaattttagtagaaccctctcctaatcatcaccaaagtatgtagaaagtaactttaaaatttttaccaactttacacaatattataaatatatatatatatgaagcgtatataagtttttgggccactacaaagacatacagaatatatatgtatatatgagaaaaatgttaaatggtgtcaacattctagatatcctattggcataatcagtaagaattcacttacaaactctatcaaaggttatatatataaatatatttcacgaggccaaggtgggacaaaaataatgaaaataaagaactcttattcactcatatattcaaaatacaatttactcataattaacaattacatttgttgacatatgtctcacaaatatgagttgtccacacaacttctcaataagttctcatcaccaaattcacatgagagtgtaactgaaatacataattttatatattatcatgctaattatgtctatatcgcatgtaagtactgagaaaaagagggcgacaaagcttagaagatatgcgaaaaattgtcatttttatactctgacaaaaaaaatgaggtggtgagcagataactcaatgatgatcgatctactcgcagatgactaaatctactcgtacataactctatttgtagataaatctgctcatagataactgtacacatagataactctactcgaagatgaagcaatctctttggacgaaaataggagatgaacaacttcttactcaataacatgtgatactcaacgagctgtagaaatggagacactcttttgttgaataactcaggatatttagcaagcaaaactataacaaactgaattcctctttgcagggagcacacctgaagat

SEQ ID NO: 255923 - DNA, 1114 bp, Cannabis indica
tacctttttagctttcagattttgtccaatgatgcatgacaaagacaatttaagtgctttagagaaatttacaagattgtaatccaccaaccatagtcttaacttgccccaaagtcttcctaatattttatttaatggcttattacaggaaagagactttcatgcagtctaccatgatgctcgtgttgtcgaaatccataggaaacaacatgatcaaagtagctgtcagtgtgtttttgtggttcgatacgactatgataacactcgtgtaagtaaatccccccatcccagtgtcactctctttctggtttcactttcgggtcttttgtgcttgtaactaaaaattgttactcggtcatgaattgtcgtaacaccaggaagatgttcatttgggaaggatatgttgcaggcctggttcttcagccggtgcaattacccaaagccaggatgaaatgtgtaaggatgagaattggaagatgtctttcctttactaaggcatatttagttcttgtttgcttttggttttggtaatgacttgtaaaaaagatgttttgctattgatttattccaatggcatgctactaatctctaattggaattggataaactattagagaaatgaatgtgaataaaatatttatgagtgttcaaattcgtaaccatcaatgaaaaaataaactagtttagtaacaagagaagtggttcgaccacaagtgaacatttattgttatgttgtaacactttgatagtggcgtcgtgtggatcctgaataatttggtaagtaatgctcctatttttcaatgacaaacaatttggttagaaatttcctcatattattttagaatgttcttaagaaaaattaaactgaataaggtaggggccgcgcgaacgcaggcccccgctacaacaaattatgacgttagctctcccacttggggagactataagccagcacccctccaaagtgcaatggaggccactgagcctaggccacgagccttcatgatcgcccgtagaccccgtccaggtaagtaccttagccagtccctttcattccattttgtaccctcactttcttcactcatttttgtatcattccaatgtgggactttct

SEQ ID NO: 255924 - DNA, 895 bp, Cannabis indica
gggccatgagaattggagagtaattgaaatccctcaattacttccaattacacagttacagtgtaattacatggtcagacaaacatgtcaaattgtgtaattacctccaattatacacaaatccaattacattgtggctttccaaacgcaccctagactcactcatttattatttatctaacaaagaaatataaaaaatatataacaaaagtatgtaattatacaaacaaaattattatatgtaagaaaatgaacaataaaacaaaaccatttcttatctattttagcgtttattcttctattctattgggtaaatatcattttaaatcctgtgttttgtaaaagttaccaattagatctcctgttttgttaaatgataaaatggatcctatattttccaaaatagtaaaaataagaccctaagctcaattttcaaaaattttattttttaatataaccaactttaagataatttttaacacgaacagatacagaaaatgcaactagttttatcataaaatctctacatcagattattattaagttttattttgacaaaaaatcagttcagggtcttatttatacaattttaaaaaatacagggtctattttgttatttaacaaatcagagggtccaattgataacttttaaaacacagggtccaaaatggtatttaccattcaatatactaattaagagcatcgtagtagtaagttatattgtggtcttaaaataataatttatagtttatattgtggtcttagaatagggttggtcctaagatttatagggcttaaggcgaaatcaaattttggggcccatatgtatactttaataattataaaaatgatagttctagtgatttagtgtaatggtaaagtttttaaaaactct

SEQ ID NO: 255925 - DNA, 1520 bp, Cannabis indica
aatcacgtaatacgcctatgttagttagggtgttacacagtaactcttgaagtaatccttttaagatcttgttctgccaaagtatcgaccatagaacaattttagaaaaagatgccactgggatgtacgtgcgaagctacagatttttttaaactataagcatggtgttgacaatggcgagtaagggtaggggtgatagcggcgagaatgacaagaacgctgatcactacttaaactcgacgtttgcgtctcgatacgtacatgagccagtccccaaatggaggatgcctgagagaagactatacccaaggacgctgcactccagttcataaacgatgagctcatgttggatggtactccaaggctcaacttggcttcctttgtcactacttggatggagcttgagtgtgataaactcatcatggcttccattatcaagaactacgtcgatatggatgagtaccccatagaaatctaggtatatatctttcttcatactatttattcctgatattttttttacttgttacagaaaccgatccttacaaaataaatacataaactttaatgatccgattatggtcgatactttagcagaacaagatcttaaaaggagtcaaataagatggataagatattgtgtgtgcgtgattaatttacaaattttgaaacaaaaaagaaccgactaagctattcttcaggaggtttcaattgagaggctcacgttatcatgttaccgtatcacgttaccgttccgtctgttttcaaaataataaaaaaagaattgttaaaaaaaattgttaaaccaccttagccaaaaaaaattgttatttttaaatagaaaactttttttttttttaaaaataaactttaagaaaaagtcacccaataattttttatagaccgaaaattctgttatataaccacactttatatagaatagatataacttatagggagtcgatttggtcatgccggacatgaaggcagaatctgtgccttccataaatctaaactatatttatcgattttgaacatgaaattcttaaaaaaaaataattccaacaatttattttaatattgctcataaaaaaatatcttattctaatatttatttcatatgttgaactcactatataaatccactaacaaaactcattacataactagaagaggcaaaccactctaataactatcaaaaacatatatttttttttagaaaaataacaaaattatcttattagtgcataaatattactgaatatatcactattttaatatatatagatgaaagtatgcacactttctaaaatgatattcccataaaaattttatctgttatggtatctaggagaatttttagttttttttttcatgatcatgtacgtaataattatttaggaccacgtgtaaattttaaaatattttgaataatttacaatgccgaaaataacaatcaattgcttactacgcatataaagaacacagtcacttgtgcaacaaaatacttaaattttatt

SEQ ID NO: 255926 - DNA, 721 bp, Cannabis indica
tgtcctttgtggctcaatagagacgtctccaaaatgcagagatgcataatgacgaacttcgcaagtctagggaacatcgcgaggttttggctaagcaatggtttgattagcagtcaaaaatctctaaaattaagaaagaggccaaagagcaacaaaagactctcaagacagacctcaaggctgcccagatgaatatccaggagcttaaagaggcgaacaagactacccaggtcgaagctgacagaaagcttgaagaggcaaaggccgatgccaaagccaagttcaatacaatccccaggcgatctatttatcaagcttggtttgccaaccctgggatggatctaagttttatgggaaacaaggctggagagatgttagcatactacgagcaaaccaagaaggaagagacaggaaatgccgaatgttgttggaggaatttcaacaacactaaaataaataatataataaagatatgaacagagaatgtgcaagtactcgacctagaatggcgagtattcaacttatgaacacacagacgtactagaaatataaagaacacaaggaaatatagtagttcagtcagaacacggtctgcttagtccactgttgcaacacttttctatcttgtccatttcatgttggatcactcctttatatacaaagcaagtgtcctttgattacacagacattgcattcattatcaatccatttgtacattgaa

SEQ ID NO: 255927 - DNA, 4775 bp, Cannabis indica
gaggacaatataaaaagggtatagagtgtttctgtatattttaacttacccctaatttctaagataaaattaactatgggctttcacaactattgtgatggaagaaaatgggccaggcctataggccttatggatggagaaaccaagtccaggggccagacttatccaattcgtatttcccacgtacgaacagatttccttattttcttcttctccttcttcttcttcttcttaccggttaaagaactcccactaaacgaccatggcgcaagggcttctgctatggagtccttgcctgctccactcttactcacttcgcttcatacctttcaaacctcacaacacaaaactcatcaccctctccatctctgccaccttagactcccaaaacgaaaccacccaagagctcactgctagagagagaaggcgtctcagaaacgagaagagagagagcaaaatggggaacaattggcgggaagaagttgaggagaagcttctcaagaaacccaagaagagatatgccacttggaccgaggagctcaaccttgataccctcgctaattcgggtcctcaatggtgggtcgttcgggtttctcggctcaggggtcacgagactgccgatcttatagctcgattgctagccaggaactttccccaactccccttcaaggttcttcaattttactttttgctttctgggttttttctttctttttttttttcagtgttcatttttggtactttagacttggtaatggcagtaactcagttaaataagaacgtagtttcattgtatgaactcgatggttttagtggaaagttatgacataattcaattgataggaataaagtaacaaatatcacttgaaactactgattttaatggttgtatgttgtgatgatatatatgctgtttagatatgtattttacaagctcaattgtaagatgtcaatgagtgaggatttaggaatgtgttaatcttattcttactatgttgatatgatattgtaggtgtatgcacctgcagttcaggtgaagaggaaactgaaaaacgggtccatttcagttaaaccgaaacctttgtttccggggtgtgtctttataaaatgtataatgaacaaggagattcatgactttataagggagtgtgaaggagttggaggttttattggctccaaggttggaaatacgtaagtatttactttagaatttaaccaagttagtttttgtttttaaaaaaatccatttttctcatatgaaggcaaccttggaagaaaaacaaatagattgatagaatcaaaatcactttaagaagtttacatggaatctaaaagagtttgttattttaagccaacttatcttatcgcattatgtcaccgagtgtcaaaatataatctgaaggaagataaggtactttcttcaacaattttacagttttgaagcatattatatttggcacaatagctatctgcatttttctacttctgagttttgaccatgattttctctgcttcaggaagagacagattaacaagccaaggccagtgtctgagattgacatggaagcaattttcaaaaagtcaaaagaagaacaagaaaaatatgagcaagagtttaaggagcaacaaaaagaagaagagatccttaactcttcgctacccaacgcagagtcacagtcagattccgtaccgaaacgccgatccaagaaggcttctgatccactgaagcttcttaccccaggctctactgtcaaagttttatctggggattttgcggaatttgaaggatgcctcaagaaggtcaatcgcaaaacaaaaaaggtatgtgatgtggtgctgtatattaaggtagcaaagaggaaaaaagacctaattatttaggcttttgtgaaattgagttcactggttgaaataataaaactctaaactgatattgtagggttagtttgggatcctagtttcaaaaaataaaaaataataatgaagctctaaactaggtaacaataaccttaaacattatatgaaacttaggttaaccccaaggggtctacaggtaaggaggagtgttggaaagtgctaataggcatttgttctaagattcgaatctgtcatagactcaaaaaccacagggtcattgactcactgggaagtctcctggttgaactgccagggccaaaaaaaacactattgaaaaatataagccctactatatattttgtgcatgcatgtgctcacataagctgttcctgcacgatgactgagataaaggttgataattttatcttgtttcaggtaactgtgggatttacactgtttgggaaagaaagcttagtagacctagatgccaatgaaatcgttgcaacaacaacgtgatgtaaatatgttaaattgtcaaaaacagtattaattggtaagttttaccctttttttaattttttcctgtgaaaaatatggtgccttacaaaatacccatgttctctaatacaaatgctaacttcctaacataaataaagatttaaactctgaaatatgtgtactgtgaaagtcaatcatcactttaaccaatagttttggtaagttcatgagtgttgaggtttcacaattcattaaattttcagtcttttgaaggtgataagcttgattagattttatatattcatttcaattacatgcatgtcaagtttcacccaattgtcttttatttgctttctatacttataccttatccaatataagatgctaatcaagtattgtgggatgggaatgaaaagaagtgctcaatatagcctaggatgataaaaacaatgttagtccacctccttataagttatcaattcatgttcatgagataataatgattagaaaatgcaatcagtagttttgaattattgagcttcactttgtgtttgaaacttgcccaaggcacagtagcctccttataagttataactcacgttcttggggtaaggatgatcatccaatgcatttagtagttgaagaaattgtcaatagtggtcctataaaaattattattgagcttcactttgaaacttgtacaaggcacggcaattttaacaaagagaacgctttattccacttttgtttttctcattgttgacttactcacaaacctcctggggcttaatagtttccatttaaccatctcatggaattttctttgtatgttgcaaaagtatgcatgattacatagctaaattggccgctttagtgaagagggcggctttccattaactttttcatttctattagaaatgggggaaatatttaaacttaaaattacatttactattgaaggtagtagtttagagaggacaagtggtaaaaattagggaaagctggattgtctttcttatctggatcatattagtaggtgaaattcattggttagattcattgatctttcaggttattttctacttcagaattgcatgaaggccttttatggcatggcaactctttttatctgtagactggtatacttctgtttaggtattttggcttttcaggggatttttttacttcagaactgcatcaatttggaaagaattatgaaaaatgtattagtgtatgttggttgtgattgataaaaatcatataccaaataaatcaaaattcataaaatgcaatggtaggttgaggctcattgttaaagatagtgggctaagattgtagatctttgacccctttacgccattctttttatcaaaggtgggtttgacagtaatggagttgcagcaaagggaattctttagtgattgtggtgaaactatctttttccttcttgggaataactagaattttggagttgaaaatggaggtcatgaacaaaaggactgcaatgccagtttcactttgtatattaatagaatttgagtaaagaaaggaagacctacaagctttgcttttgaaaagtcgaagagcctgcaagaatgcacatcttgaaacccaatcacagggttagagagtggaaccaggattgagagccaaacctatatttggttattaagtcatcatgatcttcaaagttgaagaaaagaattgctttaacataaagctttattagttgtcacaatttctttcttccagtctctttttcatatcccatggctgcctaaatatctgcataaagtaaagaatttttgttgttgttaataaatcatcttggatcatctgtgaaagtaccaattgttccctcaaattttggtcgtgtaaaaatttcatgggcaatttaataaaatgtcattaaatggagggaccaaattattaaatcatataattaactcataaattcaaccgtgctaaaaaaccatagaacaagctttcaccatagaaaaaatcactaagatttgtctttgactatataataaagaaaacttacaaaaatactgaaattggattaatttttataaaaatactgtcacacggaatttttttaaaaaaatactgtgttttataaaacaacaaaatagaataactaaaaataatagtggaacaactaaaaaataaccatagagcaatagtaaaaacttaatacaatacacagtttaaaatttacatggtatttttgaaaaaaaaattactttagcaaaaaagtaaaaaaattaaaaattaaaaatttcagtatgtggtgtaaataatcttataataaataggttgatgcatatagaattttgggataagttgagaaatacttcttttttgtatccattaatcaaaaatatcctcatattatatttcattaaaatatatccatt

SEQ ID NO: 255928 - DNA, 1299 bp, Cannabis indica
acataattattaatatttataacaatatctaattatttatgattcttagatctattatttatgactacaaaaacttatgtagggacaaaacaacaattttcaccataaacatgtcctatatatataaatttgattgtggagtacgtatcattgatacctctatctgtatagacgtctttatttcttttagaacagaaaataatagagagaaaaaagtattattgaatctgaatttgaatgaaaaaaaatagtttgttatagtgattagccttatataggcataaaagataaaaccgaaaacaacaaagggaaaatcacagagttaactaacttggactcatcaactaataaacctaactactaacagttttaacacgcaccctcaagatgcagtgtagaaattcttacactcgtcttgaatacaatgtcatgaaattgagttagaaagagaggttttgttaggatgtatgccaagttggttttggatggaacatgattcatcttgatgctaccattggtgaccgtttccttttcttttgttggtatctcatcaatggatctacatcgctttagcaaagacgtcttggtctctctttttgatcatcagatctaggggatctcctgatcattacataccctttgttatggccttcaatctttaatgattaagcattgcaacattattgttcgtgttattttctttatttatgattgaaatagtaggattgttctgtcctcaagtttgattgaaagatcattgactaataattattaatacgtggactctgtcagatgctcatttggttaagaaacctagtatatttcatacttctttgatgattgaccgttacaggcatattggtattttagttgaaagtgttgttggaatttttttctaatttattataaataacttagttgacttattattgttaattttgtctctttaaactatatatacatgtaatggactttgtccaatttactaaatttttctaattttcttctaaaagaatatatatatatatatatatactaggtgattgttacgtgccaagccaagccacgtagtgttagttttatttaatattttagttttttattttaattaataattatttgtaacgatttgttttattaaaaataaaaataatgtgtcagtatatttagtaagtaaaacatagttgtgttataataatgtatgttattaatagtaaaatagtacattaatcttctaattgaaaaaaaatactattatcccatttcatatctaataatagctacacaactatatattta

SEQ ID NO: 255929 - DNA, 966 bp, Cannabis indica
aaagtgttaccaaacgacacccttatttatcaactaactaactccttaaatttaaataaatacatattattaaagattaaagattaataatatgtgcatacacaaatttgacaatactttcatcgtaagttatttttaataagagaggttcaccttaaataaaaataattagttaaaattatttgacacataaatatatgtcaattttatgtttaatttatttctaaatatatcaccacacttatacataacatcataatttaatagaatttaattttttttccaaattactcttacttttcctaaattactcactaccatacaactaaatttttgtaccgcatttattgaaagtcatattatttatatgccaaatacaataattttttttttttaaaaggttgaaaaggtggggaaatgataaaaggcgcttatattactattaatataatttaataaaaattatagagcactgctaactaattataagatggcaaattatagtggtgttagacactttaatgctctataattaattcaaaaagaaaaatgctgaagaacactgtacctagcacccttataacatataatattactgttaatacaatttaatatgaatttgcttattttaattgtggtaagttaattagtacttcacttatagaaaaaagttaattagtacttccataatttaaggaataaaagcttaattaatttatattattaattatgacgttgtttttgtttgaattgattgacattttgttaattattggttagtattgaagattaacatgataaacggttagccaaacctaacaaataacaatcgataagtatgatgaaaagtttaatattgacaaagaccgaccctgattatggttagttgagctaagattttttggtgacgatattctaaaataattaatatataagaagatgagttaaaaataaataattaattaa

SEQ ID NO: 255930 - DNA, 1141 bp, Cannabis indica
ataatcggttaaaaagactctcgtttctaagtctgaagttgttacaagagaagttgtatggggagtcgtcgataacaatagttttgtttgtgttgggctcttacctttgagaaaaaaaaaaggcaataatggaagaatactaaaaaaaacattgagggcataaacaaagaagagaagaagtagagagtttgttaaagctctctagttctctaaaaatacgacgaaaagatggaattgagaaggaagatctcaatttatgtgggttaagtagaagctcataagaaccattcgatcaaacatgattgcaaatcaacagtgtttaacttatctggaagatgaaaggacagttagggtttatgctctgaaaaggctgtaaagatatttctgtatataaataagagttgaatattttcatatatgcttgaatgttaaattattaatatatataatattgaataatttatatataaatatcgaaaaattctatattcatacatgagactgtggcttgtattgtacggagaattaagatcacttagctatgaataaaatagtcaacaacatattaaagttatagaatctttaatcaacggttgctagtacagttcactgatacccattatttgatgcaagaaatcttgattcagattactgatgtagtatgacatctaagagaagttgttgtatacaatagagattatatatgacaaggaccaatatataattaagttgtctttattaaacatatcgtttactataaagaccaaattcatatcataaagatgatcaatagtagatcgacctaaatcttgagtaatcatgaactcttgttcatgttattagtttctttgattcactcattaaagtttctaagggaatatgattcttacaacttctattttgggaatctaataatacggatggctgcgaatatgatctacaattatagaatcttgactttcctaacagatcgaatgttggttccatttaagtgttaagtttggaactaaaaagttgtccataaatttaggttggatctaaattatactttcaatagtgaattaacggtactaaaggataaagaactaattagaagggtaaaatagtaattggaccaaaactaattacgaatcgaaacaag

SEQ ID NO: 255931 - DNA, 1691 bp, Cannabis indica
agcctattttatttcttatttttcccatccatttaggcctggatagctatgtggccatttcacatacctggcccattaatgaaaagctgaattccaatattcattactgataacgctatctgggtaccttcctctcttcgtgactgtatgaactcgtagttcataaagttctaataatgttttcgaaattccaaaaagcaactgataagcttaggacatttgtacataagagaacaaattattgtcgggcgttcggaaggccatcgactatgacgaagaatagctcttctaaccccaaaatccagacactttacgacctttgtaacaagacatttacgccttcggggtctcctcccccaacctcagaagccatccagaggatctgctctgttttgggtatttcactgtattacctttttctgctctcaatattttttttagtaagagtttctacaactgatatccccttctttacattttaagagttctgggttttactttttgtgcataagtttaatttgggttttgcttgtctcggtgatgagttgaagaatttagctatgtctcaagcattaaaaccataaaaactatttatgttttcataatctggtgctgcatggtgcataatgaagcattctttttagtcttaaaatttaattagtgttcttacttttacgtgataagcattgatgtggaataagctttaattgcactaatgcttaatattgagttttctgactttgtgaaacaaaattttacttttctatagctcagttttttatgcatcacagtgttgacaggttatttattttcttccattgcgcttaacatacagcttagtgatttcgtcagatcctattcttaagaagttattctattcttttaaaaaatattggttttgcgtttgtaattataattagtgacattgataatatttcagacacaataagtccggctgatgttggccttaaggaggaaaatcctgatgaagataggggtcatggcttttttggcattgaccagctaaatagagttgctcgatgggctcaaccaataacttacatggatgtatatgcatctgatagcttcacggtaagtgttgttatctctatactattctataattgaaatttttaaattttttgatccaggtatggattcaacatagtaaatctcaaataaaagcttttggttctagcatagagtttcttgcttcccaaaaaatgtagggtgagaacaagttttaaaaaataaaggcctttaagcccaattataattacatgatagctctcaagttttaaaaatctgctttgtgcctgtttggtcaccatttaaaattataatacataatactttggtgaaaaacaaggatgttatgtattatgttctcgagctttctatgtgccacattttcataagaagtttgagataaaattcagccaaaacagttttagttagttagcctttaaaaaggttgtgaaaaatttacttgaaaattcaagtaattgattttcatgcagatgtgcatattctgtttccctacttcatcagtcataccactccatgaccatcctgggatgaatgtttttagcaaaattctatatggctctttgcatgtaaaagcttatgattgggttgagcctgccatcatcaaggaaagcaacggaccggtatactttccaggtctgctc

SEQ ID NO: 255932 - DNA, 607 bp, Cannabis indica
aaggccgatatccattgatagaaaagctcacttagtgcctgattctagcaacaagaaagctgaggccctactttcaagctcaccctgttcgggtatactctgaccaactgttacgccaaatattgcaaaaattggacgcctctagacggttactcaagtgggcggtagaattaggttgtatgaaattacctttcaaccccaaacaacgattaaatgttaggccttagccgactttgtagtagaatgaacgggcaaggaaggaagcatatcagaaaataaccccgagccagtacaaatacctcagccaagtaacagtgaagacaagccaacttggaaattacatgtggacgggttggctacggatcaactatttgggaaatttcccttgtcacacatggagggtaacacatgcacgctggagtcaaatttggatttaaggcatctaataatgaggctgaacatgaagctttgatcgccggtctaagactagcttgggaaatgaaggctgaacatattgagatctgcagtgattcacagctggtggtaaatcatgtatttgaagaatatgaggctcgggggaaaagatgataacgtatctgagcaaaat

SEQ ID NO: 255933 - DNA, 10158 bp, Cannabis indica
acgatatatgaagtagtactatatatatttaatgatctgaaacattttattattttaggctcgtttgaaacgtcttattatgtcgtattgtattgtattatattgaattcgattatatatcatattttttatataatactatgttaaattttaattcatactaaaatattatatatttaatgtaccacaaaaattataccatatatagttttccataaaaatattgcacaaaatacaatttaatataatactatacaatacaatatggtataatacggcgtaccaaatgaattattttattataatataataatatctaatacgtatataacctaatatagttattatatattttttttatatttagctattttctttatttttaaaaaaaatacatttactaacttaatttttaaatttagtcattttacatctcaaccctatactgtatatttattagtttaatttgaattcacctcaatattttaactcaattattttttaaatcgtatcaaatccatccaatattttagatcatacagaatgaattgaactgaactcaaccaatccaaaaaaaaaaaaaaaaagtaaaattttaatattatttttcatatatacatataaattttacgtacaacaatataaaatataattatctatccaaactaaatgaaaatactaattagtttaattaaatgtattaatttttgaacacctcaaccaccatccaatccgatcaaattgaatatttaaaaataacattcaatctgatccaatcacaattgaatatctaatatttgacggtcagttgtaattaaatcgatcagttctcattgaattgaatcaatttatgcacactcaatatcaaacataactctataatcgaagttgccataaatgtatacaactatatatcaactcattgaatggcaatgccagattatcaaaacacaccataacagctttgaattcaaaaataaataaataaattaaacacaacgatagctaaaagcaggggaaaagaatagcaaaaattggaacatatacactcagaaaacgaatcacggtataatctctccaaacagacaaaaatggagatgatgagagagacgaagcaagaaccaaacctgcaagattaaaaaataaacaaatacaaataataattaatggttaatgtaattcaactaccattgcacaaagaacatgcaacactgtaataacaaaaacagaaaatactacaaacctaatcaccaaaataccaattagaagggaaaaaaactgttatcataataccatggcatcttttcaaatttccctgatctaatgatttttctttcacactattacaaaggtttcgcgaaacaaaaatttaaagtttaataaaagaaaagaacactacaatctgtaaagggaataaatttagaacaggttcccacaaggaatcaaacctagacatcatgcataaagttaacaaataacctttcccaacctaaaacctaagaggcacttttatatatatataactaacatgcaattggtttgttgtcaaaatcatatgcttacctgatgtaatgatgacttttaagaattaagccgtacccaaccgaaaaatgggtagaagaaatcactctctttgagaaacaacctcgccaataaatataagtgttggaatcgaggaagaacagattactagctgaatcaactagaatatcagatggaagaatgaaacaaggacaccagaaaaaacgtatgtgtgaaggaacaaatcacagttctagcagatattagctttttggtgaaaatgcagctagggcatttgcatgtgcaggagacaggttgctcaaaaggggctgcatttgttgtccataaagtgaaatcaagtgagaaaaagctctgccgacttgagctttaacttcaggagtttcatttggtgaaattacaacttgtgcgaacacattaaccaactcaggcactaaagatagaatctgcttcgcatacacagaagaaaagaaaaaccagaataagatcaaattgcatatgaagaagttaaaaaacaaaagatatcaacgttgcacaacaatttagttacctggggattagatgataacacaagagtggagacacaagtataaaccgtcatggactcctcgtgatcttctttgagtgggagagctttcaagaagaagggaagaacctgggaaaggtagcagaaaaattaacaccacgctatcaccatcacatgaaggtaatgtaaacgatcccttacgatctgctttaagaaattatgtaattacagtgagatttacctgatttaatgggatagattcagggtgcaccattatcattcttgcaactgcaccagctgcattatctcttacagcatcatctggctctgattctccaaacaatggaaagagtccacgcaatacatcaccataatatctggtattggttaaatgaaaaacctactgggagagaagtgctgaaataatataaactgtaaactgaccaaataagtttcagtgtttagataacaagattatcttcttcaactggatcattatatgacaggaatactttcaagcaggcagcacagcactacacaaaatgaaatggtgaaaattcacataaaaggatacttcaaagctccatcacccccatttttacacaactctccaacacaaaatgcagcatttctcctattggtaggatctgatgaagctaattctttgagcaccaagggcattaacctctgaaatgttacataaccgatcaacaacgaaatatgcagcagaaagcaaactacattaccaaacagtaaatcaaaataataatatttagataaatcacggaaaagattacgtcaacatagcctgcaattggagctcccatgtcctgagcgacttcagcgaggcaagcaaccaccattgtcctgtcttgagggggacgtgaagctttctgcatgaccaatggtgcaatcaaagagatgaagtgtttcaactaactcgctatcgtgttattattgccacatcagaaaacacagattataacatttatatgcaacataccgcaaatttcattaatggttcaaaaagcttggcaaagatgggcgcaaaatgagaccccattgactttgcaaatgcgggaagaagatcagaaacagcatccattagtatttcatcatgtccagtatcatcatcatcgatatcatcgtcagactctgttagctgacatgcagattcctcacgaagtaataccaaagttgcatcaacaagaggagatatatctgaaatttaatatttttatcatacatttgacagcttattaaatgatatgatggtacatataaagcaaattcacttatgacatacaaggttctacagctgcatatccaaaatccttgagtatgtcagctacacttgtgcatgcttgcgcaacaacttccttgtcatcatcttcaatcatagccttgatatatgtgctcatcacagtatctgcaaataaagaagagtgagctacgaattccaaaatggagttggatattacaaactaacgaacaaaaaaaaacatttccaaataatcatctaaccaaaaatttcatttgctttagctgctccttcctgcaaaaggatgagagttgataatattaaatggacataatgaaacaaaatcataatataactaaagtcaccaaaagcaaggttgctaaagaaaataaggtccaaactctttccatggatcatgtgattagactgaataataatcaaaactaaatatcaaaaaaacactgaagatgtattattgtgttcaatgtgcaagtcaaacatgtacgatggcaaatagagtaatgcagtaaaccaagaatgagaagggggaaacaggcaattgggtcaaaagaagtgctcacattgtgattttggagaatagcttgtgcggctgtcaaaagattgcagcaccaattaaccaaaacacggacagtcaaaaagcacaaaaaaaaaaaaaaaccaaagaaagtagttaatgccatgtcagactagatgctatcaactatatagatagttaatatatattatagtacagaataaagaattgaatgaccacataaaaacaatagatatgattgtagatgttgtttagcacaagactatgttccatacttgtaaaaattaatttgagataatagaaatacgagtactgtcatacatcagaatggattaagagatgaagcaacaggaaggacaccacataaaagattaaacagtaagaagtaaaagaacaaagaatgtcatgtcacaagagataacaccatatcatcaacatgtgatgatgctactcacgtttcaaggaaataattgcctgaagccgaacatcttcatgaaaatacgttgagtgcttaaccaaaatcctaaatgactcctccaaatagcttaaaggtaatcaaagaagcaaaaattatagatgttgtatttaccaaataaataatttgtttttgcaaacataacaaaaaagtatgttaatgtggtaggttaacatacggtccataagaactctttgtgtgcaatgcaaataacccaagtgcttgagttgcagctgccttttcatccaaaactcctgttcttatactaatatttcgcactctgggttcatcatgagcttcatcatcagatgaaactccaccaaagttattaatattctcatcatcagattcatcaacatccacagcagagccatcatcaaggttgcaggaagaaaatgcaagaggcacaacatgaggaagatactgtttgacaacaatagtttttcatataagtaaaggcacagtggataagtttaatttaatcagagcacagtggataagtttaatttaatcagagcacagtgaatagaagcctcatcaacctgtataaaaccatcatccaaaatttctgccacattgctgaaaaatccatgggtgtactctcgaagctcactgtactccaatccaaaaccctgacataagatattcaaacgaattaatatgtaaaacatttggattattatcagtcaaaataaatttcgatctcattacagaaattgcagcttctatgaaagggggcaaaataggctccatcttagctcttccaatggacatagcaactattccaactagctcagtagccctagctcgtgcacggagatcctcatcattcgtaagcactaagaatgttttcatcaactccaaaaccctctcagcatatgggatgaaggcctgttctgcagcacctgcaactgaaccaattgcagactgcaaagaaaatagcagaaaagttaagatattacatagctaaattaacaggggtaccgaccatatgttcatccgaatgttctttcactgctaaattatgggataggctattgtctgaatttaagtcacaaaagggcttatttagataaagcaaagtcaagggtagagagaaaagctttaaaaaactaccgattagtattatgttgcttgttatcgataaaaagagcattttcttaagatgtagggtatttatgagatgaagctaagatttgggtcaattataatttacatatatttaagatgaagttgaagactattttgatttctgattgataaagagggtcaaattctactgtgtaccatcttctaatggggtggaatttgttctcttgtagtacccaacatttaaattaataataatttgttaaaaaaaaatggttattcaatgagctgcaaggaagatgcatggtcttaccatgcatgtctcctgcaaattacgagcgctattttgaagagctcccagtagtttccccatcaaaggatcaagaaaaggaaggatttcttctcccatgttctcgcaaaatgctgccaaagcataatatgatttttcctgtgtatgtagattaacgttttagtcttaacacattcataaacaatctacaacagtctcccagaatttaattttctcccatattattaccttcacttcatctgatgtgtcttcaagggcattcaaaatgcaaggtagaacactttgatagtgagaaacaatttcaggctgcaggtactctgcaaattgacctaatgcaaaagatgcagccccccttaccatttgttccgggtctcttaaggcccctaaaacaatatgaagtactggttccagcctatctttaataaattctgaacagccctctgaaatgacacctaaagatgtagcagcagcttcacggaactttggatttgcattttgactgcttaaggaagcaaattccaaaacaggagaaaagatatgcttcggtagattcaaagccatagtgtcaatgacctcagcagcagctcgatctggtgctagatcatcgtcttcatcactattatttgattcagctagtaacggacacataacttgtagaatagggacaactagtttatgttttttaagggaagcaggtttgtattttgctagccaagaaattatctgaattgcctggacaaaggaaagcatgaagatcattttttaaaaacaacttacaaacgtgaaagcaataaatcaatcaacttaacaaagctgcaccagcagaggcctgctagagaaagtacaaatatatggatgtgtgtgtgaaaaagtgtacatgcatgcatgaaaaagtaagtgtaagtatgtgtgcgaaatagtgagtgtacatgtgtgtgtactataggtcctcttctccaacctgatggcgtgtattagaatccaaactttgactagagcaaacttcaagagagaactggacaatggatttaacagaatctccaagaagaggagcaggagattcaatcagctcgtcaaaaatttcaaacgcaattacagcaacatcctcctcaccagcagcaaggcattgtcgagaaacatttaaaatactgggaatgaattctcgaaacttgacctgcacaagcaaagatataatcaatactgaagagcaaaattaagatatcatgaattgcaaatgcaaatacagacataagctgataaaaaatattggaaataagaacatcccatgtgacatagaattaaaacccttttacatcattcaccatataagaataactacccaggagcagaacattcgccattaatataataatatttcaatctggaatacttgtgtccaaatcaatatcaccactaagtccatcacaattttctccaaagaaaaaggtatatgcataaaaataaatacaaaatcttaaccagactatgtttcctatattacatagtagtagtagtaataataataatgataataataataattttgactttgttctaagatgatattcagaaaacaatttcatggaacataaatctccaatacaatttatttcaccacttttacaaatcagatatcaggaacttttcagcatgtcaatttactttataatattatttggctttctatcatgtctgtttattttgtttcatgtatagtgttctttctacttgttcgctgagactgctctattttatgtgcagtcgacaaggaattaccaaagaagtaaactagaaatgaagcaaacagaacacatcttgggactataataaactaggtttttctctatctatacatttacataatgaagatactcagatatattaagactgtttacaaagaacactgtattcaggtagtgacacttagatcctctagcatcctccagcaatgagactaagttcatgccaacttatgtcttgtgagcttaatttagaattaagctagtttagactttgaaggccttccactattagatacttgaccaagtataaactgatgccagagattttcctaaccaacaaaaatatggataatatatagaaataagtaattgtgactgataaaacaacttgcatgatgcaagactaatagctctttattgtcagacactgaaaaacctttctatttgtttcctaattttggataacatcctccattgatttttatattatactattgtatcacaaagattattcaaacttcaatgtgggcttttatgttctcttaatgctattataatgtcaaagctattacttccagcacacacctgcgaagcaatactcaactatgtttcatactatgttaaataacacaatcaaaagtgaacggacaattaacgtgggaaaacaaatttatctacaaatacatttacaagtaacatagttaaagaagcatgtcccgcaaacaatgtctatggcaaaaatataatcatggtaagttcaatctaaccaccagaattagcaccacatactcaccacttcatcaccatcatgtgtgaattctataaaagatccaactgccctggataatagtaaaacaaatccagtgagcactcaggaaagtttataaaaagctttgttgggggtgacaataactgaatagcaatggaagagacagagagagagagagagagaagagagcatttacttcagagcagcaactctaacacgattgctagtctcatcttgcagacacttcagaagaagagcctgcaaatctgcgaaatgagggcgaaatgaagttccgatcgtttcagttaaagaactgaaaagaatcaatgccacctaatattaaccaaagaaagaaaaatacaaatgcatcagcctcctttatctagtaagcacaccaaccaagcaaaaagatacatactaggaggcgctaactgaactagcacaattgttggcatgaatattttcttcattgaaaaacaatgatattatttctttgattattccctacaataaacgtccataaatattatccactataatttagttgtcgaaatttttagatattcataaatattcaattcatgaactgccaacaatctcttgactttcagtttaaacggtggagaaaaatgaaaactagtatgtcaaggtttataggaaataataagctcccaataaaaagaagaacagaaaaaaaaaatgacattaactcacttctctatgttcctcctgtgcactctgactacattgaaagagaaagggcaatagatcgggccactccccggttggaacagcatattttgcaactatactaacaacattcgcactagcccgtcttacaggaggactgaaaaaaacgtcattataccacaatcattttctcagtttcaaaataaaaacatgaaggagtaactcaaattgcaacggacattaccacctatcgaacactaccttacataaacaaaaaacatacatgaattgagatattaagtcaaagcaaaagcagaaaaatacacacttgtatcaataccaatatattcaagcaaaccaacaactataacaaagtacatgcaattcacttctacaatcaaaagcaaaaatatcaacaattcaaattatttccaccttccctctcaaattttcccaatcaccaaacagaaaaacaatctccattgatcaaaacaaagccaaaaaaaaaacaaaaacctagtgctccatggtgatgctctcaatgagtgactgtttgacaagctgcttaagctgaggcgagagcttagcccaatggccagtgatcttcttgcggaggagaacggcagcgagttggcggacatttggggttttagccgttcggagatgctgaacgagcgcaggcaccacctgaggatccttggcgaggcgcttaatctgctcctctgcttgacgacgagcgtcattgtcaggcatcaggaattgtatgagaagaagctccagcgattgcgccatttttgattgaagttggattggagagaaggttttggagtggctgcgagggttttttttgggttttgggtctgcaatggcttttggttttgcttcgtatttaagggagaggtttagtgttatttagtggggacaattgggatgagaagtttaatgtagttgtttaactttatgtatattattataggttcgtttcgtttcgtataatgtggctcggtctttttactgtagtgtttagggacattttcacgcgctgtttgcgcctacatacagcccaataggaccactattagtctaagtccaatgtttttttttaaacgaaacgagtcaatggtaaaaaacactcactagtgtagtgttgtaagttcctgagtgttgtactggttcggttttatatgtgctttttaaaaaa

SEQ ID NO: 255934 - DNA, 598 bp, Cannabis indica
gtttgaagaaggggaaggagaaggagaaggagcccccgtgggagtccgggccgtgtctcagtcccagtcgtggctgatcaatccgaaaagaccagctaagcatcattggcttggtcagcctttacctgaccaactacctaatactacgcaggctcatcaaacagcgcttttttagctttcttcaggattttggcccgaactgttcggcagaaatataatttttcctataatgttctacatatatataatcatacatataataaaaattaaaatctctaaactaaacataggcttattaatgttcggtttcaacattttttttcttcttcgtatgtggatgatgatgaaattaatagagcaatacactcaaactatttctcccatgcaactatgtttgtaagtttcaatatgcattaatttttacattaagtttgtatgtatgcatataatatgtatgaatatcactatattatttagttcagtatacatatcatatttatattatttaattaaatttaaataaaaaagaaactttaaattcaaatgttaatttaatataagatataatatgtatcgcttaaccctaatcctattaata

SEQ ID NO: 255935 - DNA, 1219 bp, Cannabis indica
tgaaacaaaatatattgtattaattaaataagttttacatagacgggatgctaaccaagctgcacatggtttggctaagcaagctttatagttggataacgattgtatatggttagaagagatcccttttactattttttttttcagttgttgtaaatgattatctttaatttataataacaggcattttctacaaaaaaaagaaaaaaaaaaaaaaagataatcttacatatcaaatcctattaccaaagaattccaaaataataataatagaagtataaattttttaaagtaaccaattaagtatgaaatcacaaaaataattgtaataatatgtacataagttagttaaagaataaacttgctattttttttttataattatttttgtattacagtaatttttttttttttgttaaaaatgagaataagagataaaattctaccaaaataagaagaggacactaaaaattatatactactaaatgtaagtgtagctatgtaagatattatgttaaaaattaacatgatataataatgtaatttttctattttaaaggaataattaaaattttaacttatgcaagaaaaaaaaaattaaataataaaactaaatttaaatgagaattatatttattgcccataaaatataaatacatacattatattttgaaaataacaaattattaacttatttagattttaagtttttttttgtaagatattcttttaaaatacttaaatatttaagaataaatttaatttagtttttattttttttatttttatactttaaaataatttctttttatatttttatggaattctatatagaaaaacggagcaacctgcaacaaaaaatactttaaaaattggataatttacatgtggatacgtatttgtgtatttaatctccataataacttaatttttttaattattagtattaccgctactttataccgtttttaaaatttaatccaatcctgttgctttttgaacatgctgaagagaaggatgacgtcagcgacagttggatgggacgcgcgtcagaaggtgcagagcgcataatcatggttttctaaattttccaaaaaaattttaatacctctttctgtaaacctttgttgctttttgaacaagctgaagagaaggatgacgtcagcaatagtttgatgggacgtgcgtcaggaggtgcagagcacatgatcacagtttt

SEQ ID NO: 255936 - DNA, 501 bp, Cannabis indica
gctagataggcaaatttagtagaaaatgaccatttgattccttagtccaaatccacttatcactaccttgacacccaagcctaccgccttcaatgatactattggttgtctccaggtcaaacaggtttacgagtttggcaacatcccaattgccattgtctgtcagtaaatctgttactttctccaatccctcacgtcgcctgttaataggatgaggatagaagacccgaccatgaataacctacatatcttcccaaatgtttgtatcatgtccatccgatatgagtttacaagctcctttcataagaatttctctcgacttcacaacattcttccagaaccacgaataatctgagttcttggacgaacactttaagaaaggtctaccttttagatacttagcacttaaaaccttacaacacaaagattggtcctcagtaaggagagcccaactccatttacaagaaaggattgattcatttccaaagttctcctgaatct

SEQ ID NO: 255937 - DNA, 600 bp, Cannabis indica
acaggaggttgacggtagcactcatctgtcttataatttgattatctaaatttgtatagtactaatgcaaaagaaaatactaataattaaattaagaaaagactctaattgctaatgtgaaacaaaaataatgaatttatttttaagggagctaatatgttgacaattattaatattttgatcaattaatcaatgtgggcctttgaattttaatagctataggctatagccatcatgttttgttagtgcttaatatagtgtgcatttgataatatttttttaattaaaaataaaatatttttaaaaatatattttataaattattttcacttttttattttgttaattgagaatcaaaatttaaaaaattttgaaaataaaaaaaaacactttcaaattttttttaaataatttttttttcttaatcaatatttacacttcgactacaacttggactttggaattcggactccagtcatgtactcggaccacgaccctagcccgaaattcagacttggacccaatttgaataaaataaaaaaaaaataaataagaatgagtttgaaggttatataatacacttttgttttttatttttaa

SEQ ID NO: 255938 - DNA, 1094 bp, Cannabis indica
gtggacagatgcttgtcataaatttattggtgctcctgtaacagttgatttaatttgagttaatgacatgctttctaaaaaccaaaaaaaaaaaaaataggtcccacattacactcacttgtttagaatgtactagcaaagcaattgcgagaacttatatcaatcataattctgaatgggaataataattatcactttttttttgagcaaaagatgatttattcattcataaacattcaacatcaacaatagacttgagttcaagaggagcagtatgctcactaacaatacgatctgaatggtaacaagacgctctagcaaggcaatgagccgccctattagcagaccgtttaacaaaatgtaacgacacatgactaatacaagacagtaaattacgacaatcttgtaccaaaaaaccaaactgcgaaggcatctgaattgagcccgtgacagcctgcaccaccacaagcgaatccgtctcaatctccaccttcgaccaccccttacgcttgatccaactcagcgcttccttcaccccgataacttcagcaatctcaggccccacaacaccaagcctgctgcccgagatagcttcaatcatcttcccatcagccccacgagctatacacccaaaaccgtatctgcgttcatccgcaaagatagcaccatccacattcactttggttgtgtgtagcactggttttttccacaacacctgatccgaatgtggactataaaccagcaaagggccctgcttctccacacgagctgcagtccactgttgcagcgtggatcgggcagagagaaccacaccagcagccgtcctttgtttgctcttccaaaaggcatcgtttcgagcattccaaatactccaacttaccattgcagcatctaccgaaacatctacagaattggactccaagaccgtggaaaaccagctgccaaaatcaatgttgataccgtgatgcacattaggactagctaaattccaacaggattgagagaagttacactccatgagaacatgtgaaatggtctcataaaaattatggcaaaaaggacaaaagagatccacattaacatgtttagtactc

SEQ ID NO: 255939 - DNA, 460 bp, Cannabis indica
atctcaattaaactttggattagagtcataataaatcatccatagctatcttacacttaaactttagatgagtttcaaatgtgccattaaaaaatgataattacactacatactgaaatttttaatttttttacttttatactgtagggtagaatttttttttcttctaaaatactgtgtttttttttaaaaaaaaatactgtgtaagttttatattgtgtactgtgttaagttttctactgttgttctatggttattttttagtttgtttactactgttgtttttagttgttctgttttgtactaaaaacaccagtatttttgaaaaaaattactgtgtgacagttatttttataaaaattaaactcaaatttcaatattttttaagttttcctttaaaaaatagtctaaagaaacacgccaattgttacatgaaaggatataggaattaattaataaa

SEQ ID NO: 255940 - DNA, 787 bp, Cannabis indica
agcaatacgtggatcggcacgtacattcacctagtatgtattatataaataatgagatggcgcgcttattcatatttaaaaatacttttttaaaaattaagagatataaagttgtaacataacaatttaaaatttctttaaataatattatttttttatttaattttcttttttaaaatttttaattagattcataaaaactaattgattaattaattaaaaaatatttaatactttaaatatcctataattttctatttttttatttttttttttaaattttaagattaaaaataaataaataaaatcattattatatatatttttttttccatataactcaactataaaaaatatcaatcactctactcatatttttttctcatttttctcatttttttttttccatttttcatcagtattagttttaaaatatatatctattatatataaaatgtgactatataaccgaattcttagtttatgagaaattacactactacaaatataagaattcgcaacggccctaaaaacaatttttttttcggggaccgtcgctaaaaaaattaagtaactatttaaaaccgtcgggaaaaatttagtattcccgacggtttaaaatcatagtaaacaaaataggcgacgttttttaataaaatacgatttttaaatggacgcttatagtataagcgacggttttaaaccgtcacctatagtataggggacggttttaaaccgtcgcctataaggatctattaaaaaaaacgtcacctacttctcgccacat

SEQ ID NO: 255941 - DNA, 616 bp, Cannabis indica
caaagaaacttccccttttaaaaaaaatccaagatataaaagacaacgaagacaactaattgatgacaaatatcaaacatttcataaaagataagttaacaaaaataaataccttgatgacgaaaattttaaaataaataaataaaatgccaatttttatcaagtgctactattaatttagcctttcttgaaaattccttgaattttctttttttcttaaatgataaacgagaatgacataaccccccccaaaaaatacctatgatcaatgtgcattaccctgtaaaagaaataagacaagcaaaatgaaaatagatgttagtctatgataaaaataagacacttgtaatatttgaaaaattagaaagaatattctagagaaataaagcacaatctaatcataaaaacatatatttttttttttaagaaaatcaaccaacatgtaagagtgtaacaaacaattttttttaataaattgtgtagtatttttcttacaagattttaagcatatgtatgtgatagtgtatgcaagggagcattgcccattttacaatctttttctaaatgaaaaaattatcacccaacaagatgtcgtcacattagcccttttcttaaa

SEQ ID NO: 255942 - DNA, 507 bp, Cannabis indica
gtaacattcctgcttggcttatatatacacgagcaagtgtttctcactcgtatactctttgagaaaacttcccaggatgttacccatcttgaaattacccaaagtcaaacacgcttaactttaaagtctttcatgatgggctaccttttaacaagatgcaccttgttaatataggaaataccaatcaatacatttaagtcttcttcaactgtgtagtcccatacctacacattctcaaagtcatcccacttgaccatccccaggcaatgtgaaattgcacaacttacctgatatttccccttacagatcacatacgggattactgactctcacattcatccaatcatatatataatttggtaataaatcactatatttatatatacgagtaatttggtaaaaattatgagtttaatcgtgcttgagtgcaagcaattttcgaaatgcaagtgtttggtgatcagaatttatacttgaaccttcctaatactatcgaattgggaaaga

SEQ ID NO: 255943 - DNA, 631 bp, Cannabis indica
gtgcttctcaggtaccagctcaggataatgtttcacttagaaaaaaaattggtttcatcacttccaaaagtatctcgctattggaaaggtagttcaaaagatacccaattgcattgaagcctttccaatcactctgcctacatcctttcgaaatcaaatgttacattgaacttgttgtgaacgaagacagagaaagataaatgtagctaatatgtgtatcattttatcaaaaacttgcagggcgtcaaccattaattcgaggttccacaaacctacgctaccttgaagctcaaatctaacaaagatccaataaaaataacatataaccacaactaaccctgaaaatcttcagagaaacaaacaacgaaaacaatatcgtaaaagaaaagagagcaaaaagtaacaaaactcacctttggaacaagggtagtggagttggctgagctttaggactttcaagcgggtatacgtccgaaacaagatgggcttctgagattaaagtcagaaataaaatttgttaatggggggtgggtttcatttattcaaagtttggaccgccatgccccgctggggatttttttttttttttttggttcctccccattgaagcatttagtcaaacactttgaat

SEQ ID NO: 255944 - DNA, 1164 bp, Cannabis indica
ctacaagtacaagctgcagctagtcgatcgaacacataaataagaatatataataatttcaaaagggactaactatagctagtgttgctttcacattcacctaaccgatatatcgatcattacagagctaggcataagaggattaattaattattatattctacaattaataattacaaggttggcttaaagtatatatagataattataaacaaattaagaagtttttctttttttactcttaaagcagttccttatttttttttggtatttaaaattaacagcaaccacaacaacatatgtatagcaacttatttattagtatagttcgaagttggaaaacttgacttaccagatttccaaaagaaataaaaataaaaaggaaaagttgttaattataaataaaatatatgtacacacactagagtcaatgttcttatcttgacctacctaccccttgtacaagtgtagagaattcagtaagactagatcaattacttgtgatcattgtaatgaagtttttttttttcaatgaagtgtgttgttaaatatttattttttcatttttaaatttttgattacgttgtaggtgagcaaaatacgcgtaagaaagcatcaaaccatagtttacaaccaaattatcaatattaaaaattttatgaaacaaaaacaaatatatatgagagaatatttcaactcggattctgtataaataaatatatatatgtatgttgttttttgaaaaaaaaattacttattataatagattaatatacacaacaacgtaatttgtaaatatgcatatgtaatattatgagtgatatgcttacatgtccgtgataaaagactttacttgtatgtgtgtgtacatatgtataaagcattaatggctatttttttcttcatctttctatgaaatcaaaaggtagagaaaaaaatgtactggccggtttgaagacttgtaaataattaaaagggtccattcacattgaaaaatggtgtataaaataaattaatggaatattaaaaaagagaaatgctaaatggcactagtggtgcctagcacctttttatgtgtcaatatcgctattggtacaactaagtattgggtcccatataatttaatataatagtttttagggagtatcgctagccaatcgcaac

SEQ ID NO: 255945 - DNA, 983 bp, Cannabis indica
catttttcattgtacttttctttttgctgaatggaaagggaaaggactttaaaagagcaaacaaatcattacataaagagttgaaatctggaaaaatagcagaagcaaaagagtgaacttgcttatgtatgaattgggttcagttgagaacgtttctggatttattttaaagttattcatgttgttgtatgttagtttggttggttgtttgagattagacaatgttggagctttcaagcttaaacttattcctttaatggtggatttgagttcagagatttatagttgctgtttttagttggaatatgttgtttatgtcttaattatgtgttctgaaaagttaggttgaatttaggggtgttcattcaatccaatccgtactattttgtacatagtacatctgatcttcactaagtgcggattttttattttttggatccaatataatctgtacaataactcaaaatctaatctaatccaattcgcaaaagtgcagattggattggattggatcaattattttgaattggttactttttaatattaaattattaaatacttatggaaaaaaaatttaaataacaagcaacaaaataaaataaattattattattttatgtctctaacaacaaattaaaataaataaaaataacaaataacaaattcaaaagaaaaaaaaaattaatatgtataaagaaatgtttaattttgttttaaattgtatgtaaaaaaaattatatataagaatgaaatataaatttgatctattaaattttcaaatataattgtattacatgtttaaattactattttctttacattaaaatattatttgcatctataattttttttttaaattttttataaatatgtgtgaattggattgaatcggttacttttacatgtcaatcaacatctaatctgcacaagtgcgaattttgaactttccaatccgtacatgtgtggatatccgcactttgcgg

SEQ ID NO: 255946 - DNA, 2047 bp, Cannabis indica
cttgttgtagtcgtggattgattatgacgttagtcatttttatcgttgacaaagttaagccttatataaaattaaaacaatgaatgaataaattattatctataaaatctacccaataaattaaaatttctatataaattactgttattggtgtattactaattattaatatatatttataaatttcattgaatatatataaaagtctttgatataatatataatgaaattaatactcctaaaacttatttcgaaaaatttatatttttttctttttattatactatataattttttttataaattttgaacaatttcttataccaaaaatataatttaactttatatatttatactttaagaaaaaaaaaatatcactaattaaaatattaatgtaatttttttttagttgcaccataaaattctcttacccaaaaatagaatctatgtaggtgcactgcataattctcccatatatataattgggttttatgtatacgtatatacatggttcaaaaatagatgcactcacatcatcattatatttaatttatatgaaatgtggctatgtaataaaatttttaatttaacgttatttttggctttctacgttaattttaatagaatatcttaattacttaacaaaatatttttttattacttttataatattatttaatatatataaaaaaattatgtagatattttataaaaaaaattaattttattatattatatttaaaaataaaaattacacctatatataatcacatctatatataaaatatatatatttataccttaatttcatgacaactttaaaaatgttccgacataatacataaaatatattttgaaagtaattaactctaatcaaactcaaattttatcaaattattttctaatgaaatttatggggcccacgtatatgtgccacatcatttcatatatgtgtatttttttattgtatatattttcagtttattccaaataatatttttgttgtatatatgtgtatttattttgttattttacaaaaagataaatcatgttgtcaaaactaagtaaaaagaaaaaaaatcgtaatacaaatatatattgaagagtttataatattttgcttattgcaattagatcaatgttttgttatttttctattgctgtgtagttatatttttgttgttttataattattttttatttgtttgttaagttgctttagagttgtttttgagttatggtttttttatttgactgaaacacagtatttttgtaatttttaaactttaaacacagtattttttaaaagttggtatagtaaaaatgtaaaaagaactttgtgtcacagtatttttgtaaagttccctcattttacggtatttttgtaaatttctcaagcattttatcatataaaaataatgttgaaatattttatcacactcataattatacaagattatgagaaatttgaatagttagagcatctttaaaagagtatccaataagtgatgtaatgctacaagttgatattttgtaaaaaaatatttctctaataatttgttagaggttataccaaatttgataaacgttaaaaatttggcaaaatttgagtattatgtcaaatttaacatacaattaatgtacctttttatttataatattaccatttaatattaatgagcgaatttaatatatttttctaattataatattataattatatttttagagtatatttaatttatttatttcatcaatttacatacattttttttttttttgagagcgcatcaatttacatcttaatttgttatttttcattggatcacaattacaataaaagtagtattacatttattatttcatatgataaatttaacaaagttttttcattattgaatcaaacttgattatgtgaattgtgaagatagaacggtggtagtagaacataagggtgttcatccgatccaatccgcacatttttggtcaaacaacatccaatccgcactaagtgcggatttcatattttggatccaatccgatccgc

SEQ ID NO: 255947 - DNA, 1082 bp, Cannabis indica
tttgtggtatattagatgggtcttagggtacattagatgagtgtcagggtacgttactattttttaaccctaattacccctagatcaatctcagccctcagatcaaacaacttcctcatctaatatctgtcgtatatcacggaatacattccgtgaaagtacaatcacgggacaaaatcatgttatatgacctactgatgtttagtattaccttgatgttttttctcataatcatttatgatattttataaaaattattatattaaataatgtgacttaatactaattaattatactatactatgctaaatacactaatactttagtttatttttttaataaataagatttattttctagaactacaaattgtcgacttttatctcttaaatttatttttattataaaaatttcttctgaactataaaaatcattttaaatattctcctctgtataattacaatttatcaatataacactaatgtagtgttaatttagcccagattaaaaatctaaataaaaaataaatatataaacgacaataatgataaattatggaaatatttatgtgcattcttataaaactaatgtttatatatctcactcattcaccttggttatggtttgtgccgtcttgttctccggcactgtacaatcgtacaaccgtccaccgccacgtaaagatatcagcgttgattacaacaaagacgattaccatgattcttctccacaacaggtatttctatatcaatatatttctttttttcttgatttaattggttcttgagtatattttgtttttcctttttatttttatttttctctttgataaagtataattggtatatggtttatgatgttagaaaagtttggttaacaaaaatcagtttcagtttcaaaagtttgattcagaaagtactgtatgatcgttgtcgttatttgttttaatttttttaattaattcaaatctgtcgtttatttgattttgcctcatttacaataatatttttaaagctttaaaatagaaattttttaaaaaatattttgataatttaactaaaaataggaggtggatatctata

SEQ ID NO: 255948 - DNA, 1091 bp, Cannabis indica
ataagtatcatgttaatgttaagtgtcacgttgatattatactaaatatctaaaagagttaatagaaaagaccaatgctcgttatttatgatatgaaattatcctggaacattagtttcttggcaattatttaattttttttgtttttaaaaaaacttatttgtttaacttgtttttgaaaggttaagtctctatttgttaaataatattagttttgttggtttttatttatttatttaatatatattctttagtttatatattatataaatttcaaatattgattttatttttaatattttttatataaaaataatgtattaaattattgattcttttttttttaaaaaaaagaattattgagattgttaaatttaaaaattttaatttaattttattaataaaaatttgagtttattaaaacttgtttaagtgtataattttgtgcatattaaagtttaatagttaccacttaattaatattaaagtttagaagacaaatttagtacatattaaaataattttcctttttttttattcaaaaaaaatagtttctttttttttttaattggatgcatgatttggtaggtggaactggtttgaaccatctagtttgagtgagcttcaccatcttttctagagatgaagagctaaccatttattacatggataagctcaaaacagtcaaagtttttgctaaaaataaaataataagttgtcaaagttgacactaaaataattatataatttttcttttattgctcatgttcaataataactgacataaatataataaattaataattagaaggatgagatgctggttggactggtcggctggtccaagtggggctttcatatttaagctacggttagactatgggccctacttcaccaatttgccacgtgggatagccaattggtcagattcttcttctctattggtcaacccagcggtgctttcttgtaatttggttacaaatattttatttataaatattacatcaacttatataattaattatagtaataaaaatattataatgtaaaaaatacttaaatgtgttttagcatttctttattttattatt

SEQ ID NO: 255949 - DNA, 804 bp, Cannabis indica
ttatattttaatttatatcctggatatctaattctggtgatttttctgacgacgatgataacttcggtaacttttctggtgtattttccggtgacaatgacttttctggcaacagcaatttccccagtgacttttcgatgatacttattattaaaagttttatcaaatttatttatagtcttgaaataaaaatcatccataaaaattaatcagaagtaaaatctccgaaaaaaaaagaattaaacataaactatagtaggaacactcttgaaaacaaaaaagagaaaaagtagctagagagtgtatgtaataagaaaactaaactaaatttgtataaaaggaatggaaaaaaagaagccaattttcactccagggcttcccaatacttcaacttcaattaggaccgactagaatttggatctactagtacataaataaaatatagggttggtgaacaacctgaaattgtcgaggtgatgtcattagcaaaacttaactttgttaattggtacaatgctcaaaaataaaatttagctacgtaccaatagtgaaccaaatatggtatgtgtagagcattggaccctctgagatttttctacaataaaagttaatgttaatggagcacttctctctaatgagagacagtttggtattggtttggtggcatgtccagcagttggtatggttccacaagctaaaactttgaaatggataggattgttaatataaaaaaataacacatttgaaaaacaaaacttaggaaattagaaaagatcaaatgaaaaaatgctccaagaaagacga

SEQ ID NO: 255950 - DNA, 489 bp, Cannabis indica
accaacaacaacgttcacgtagaacaacaatgaataagaattagcttgagaattgtcgcgtttggttagaaggaataaaaatataagaataagaatgaaaatgaaaataagaataaaaatgaaattaaatttaaaatacataaaaaaattgataagaaaaatattaaatttattctcatcatgatgcattgaaatagttttttcttttattttaaaataaaataattatccatcaaaatagtagaaagttcattcaattagaatgatatttcaatatattaatatgtaagaccatctccaatgggagatgtaaaatttacaccaaattttagctttgtattccaaagcacaattgtaaaattttgatataaaatttaatatctaattaatattttattaaaaaaaataaaatctaataattttgtaatcaattttattattattttaatatgtaagacaataaaaaaataatataaatattttataatt

SEQ ID NO: 255951 - DNA, 903 bp, Cannabis indica
aataaaaaaaattcaatgttttattccatgattttataattacgtatagaagtgtgtcctaggtgtaaatgctatttttttgacaacgatacaatgaacagcagaattacgagtattattattgaaaataaaactaacaggatgaagttgagacttgctagaggtaaaaaaaaaatatgtccaacacgattagcagttccaatccaaatattctgacttgtgtcctaaaaaaataagctttgtgagtaaattaaactgagtattttgggtcttctataacagcgaaaaccgacaaaagttaaattgaaaatttggaacataaagtacgttagtaaggcgtaaatgacgatttaattacacaatttcagagttatgtatatgtattttaagtccattaggtagtgagatataagaagcaacagggactgtatgaagggaggaaaaacatgttatatcaaaataaacacagtgagtagtcccactatcaactatccatgacatagatttaccagtgaagtttgatgccattggagtgttggcagcagcaacagcttgagtttggtgaatctgttgagtgagttatgctatcatatcttggagagaggccagcatgtcggacaccgaaggagaaggaggagcggaagtagagttgaccgtaggtcccttggcaagttggcctcgaactgtaggactcttggaggactgaccatgatttgtggtagtgcattgtgtagatttagtcttccgtttgtcaccataaccaagggaaaatccatggagtatgtagcatttttccttcaaatggcttgacttctcacaatgggtgcaaaaaggatgttgtcgcttgttgcggggagggttcatcgagatcacagtatttagattgggaagggtgaaaatctt

SEQ ID NO: 255952 - DNA, 569 bp, Cannabis indica
atggccagtgtcaaggttcagctccgtaggtctaggttgaagtcgttggtttgggttatgtcgaggttgggtttgtatcagggtctaaaagtatggacgtgttttttaagaaaataaataaataaaaaacatttgcataagcatatcacttctttatgagattacatttgtgtttatacttaaaagaataatgagtatgggtgaataaattgtcaactattcctttcattttttttcatttggaaactccaagctgacagccacccacttgttttctctaatggtggggaacacaacaatgtattggacaactgtgggtacactctcgccttgttgcaaattcactggtcatcaagtttttaactaaaggagaagaaacatcaaagactttctcaacttcattcaattttaccatatgagatgttattgcagagtatgagctactgatgttattacagtaatttttgctgaatctgctaatatcatcatgagagtttatacaacattagtataatcattagtgtgagagtatcaccaaaaagatataatatatgtatatgtatgaatca

SEQ ID NO: 255953 - DNA, 1074 bp, Cannabis indica
ttctgtagaagaaaacaattaatcaaaattattaacagctaagttgcgtaatagcatattatatagtggctctaccaacaacctgagtgatctcttggagctcatgaacaaactcgaaggtgtacgcagctggagaagcattcatctcgtctaagtttctcagaataattaaatggccttacatcacataatttccatcgaatagttccattcggttaccagccattctctattatgctgagattatatcggaataaaagcaattggacttcgagataaaagtacgatagaagatgtttgttgtttcaatctcttaatttcctcctcttgtcgttgaatcctagcttccatttcattaaacttttgctctaaatctgatggactctgcagtggttttttgtgaccacctccaaaagtctcttcacaaccttgagtaatagggggatccctatctttccaatttccaccagcatcgctcacattagtccaactacaatattcttgctaggcgtccattctacaggaaaaccctggacgttcatgagttggctaggtcaggcagccatcaaagtcgaaatctaactaccgcttacatgtgaatttaaatatactcctattcagctatatgactacaaacatgcttcctatcacgcttctcttataacaaactaataagatgaaccactaaagtaataaaggcttactgaactgtgagtcgagcttatttttgattatgattgtacatgtcgtgataatcttcgaaagacaacctggcgactctgataccaaattgtaacaccctaatagtttaggcgtgttaatgtgatttttaactaactgtgcagctcgttgctaatcaatgagtttattgaaattcgtgaataattaaaactttatttatatatatatatatcataatagcatatttatataaaactgggatcccgtttacaaaataagtacaaatgtttcatagtgcatagaacaaagttgtcgcctagcgactaaacaaaatatgctcagttgtcccaaagaccgtacactccaggcccaacctccccaacatgtacaatc

SEQ ID NO: 255954 - DNA, 5567 bp, Cannabis indica
gtgtatcttaagtcacccacaccgaagcaaaactcaaataacagtcagcaaaagcctaatctgatgtggtgttaatcatattcccctttttacccctacgagcatacacataagtcaaaggtggcctatcaataccccctacaagtttcaccttgtcctcaaggtggaagtgagggaactgatcttgtatgacagcaaagtcttcccaagttgcttcagtttcaggtaggttctcccacttgatgagtgcttgaggaggtgtcttgtgagtgcctgggcgaatggacagtacatcttcggggttcagcagccattcgagatcagcagtgaggcttggaggtagttgagatgattgctggtgtggaccaagtgcaactcgtaactgtgacacatggaatacgggatggatcgatgcacctggaggtaattgcaaacggtaggcagcaccaccaatgcgagaaagaatcgggaaaggcccaaagtaacgtggtgcaagcttctcgttgaggcatttggtcactgtacgttgtctgtaggggcgaagtttgacataaaccaagtctcccacctcaaaattcacttctcggcgtttctatttgcttgagtcttcattttctgttgagcacgcagaaggttagctttgagtaacaccaaggtggcgtctcgagcttgcaaggtttgctccacttctgaaacctttgtgctggttggttcgaaaaagagcagaggtggaggctcccgattgtagatagctttgaacggagtcatgcctgtcgagacatgataagaggtgttataccagtactctacccacgccaaccacttcacccatttggtgggtttttcccctgcaaagaagcgtaaataagtctccaaacacctattaacaacctcagtttggccatccgtttgagggtggtaggccgtgctctgcttcaagttggttccatgtaaacggaagagctctttccaaaataggctgaggaagattttatcgtgatccgagacaatggaacgagggaaaccatgaagcttgacaacctctcgaacaaacacttcagctaccgtggcagctatataagggtgcctaagtgggatgaaatgcccatacttggtcaagcgatcaaccaccgccaatatggagtcatacccatgcgacataggaagtcctttgacaaaatccatggatatatcctcccaaacttgttcgggaatgggcagaggttgtagtagccccgcgggagattgagcgagatacttatttcgctgacaaactacacaatcagccccaaacttttggatgtctttccgcattgtggaccaatacaagtcccttgctaggtgttgaaaagttttaaacacccccgagtgtcctcccaccttgctgccatgatactcccctagtatcaatggaatgcatgaagaggtagacggtaatacaagtcgtccgcgaaattgcaaaatcccttgcattaaggtgtacccgcccccatccagccctttttccaagtcttggagcaccttcgagagcatagggtcagccctcacttagtcttgcagatccgatatagagatcacattaggtacagtaatggtggccatgagggtttcattttggaccctggaaagtgcgtcagccgccttgttctcaagccccggtcgatactgaatctcaaagtcataccccataatcttggtaagccatcgtcggtgctcctccgccactaaccgttgttccaggaggtatttgaggctgcgttgatcaatatgcaccacaaacttgtgccccagtaagtaagggtgccacttctgaatagcaagcacaatagccatcagctcccgttcgtacactgactttgtttgagtgcgaggggacaaggcttgactaaagtaagctataggtcgctggcactgcatgagtacagcctctaatccgatcctcgatgcgtctgtctccacaatgaaaggacaggaaaagtcgggtaaagctaacaccgacactgagcacatagcttctttcaacttttggaaagcattctgagcatcttcattccatccgaaggcatccttcttgagctggtcagtaagtgttcttgctatcgttccataatccttgacaaactttcggtagtaacctgtcaatcccaagaaccctctcaactccttaagagttcgagggaccggccattggcacatggctaccactttggttggatctgctgaaacaccctgagctgaaatgatatgccccaaatactccacactctcttgcccaaacaaacacttattgtggttcgcgtatagctggtgttgctataacctcctcaatacctcctgtaggtgacccacatgtgcttccaaagaagggttgtacactagaatgtcatcgaagaacacgagcacattatgacgaagtaagtcctgaaaaattgtattcatgagagcttgaaacgtagatggagcatttgtgagaccaaacgacattacgaggaactcgtagtgtccctcgttggtacgaaaagccgtcttctccacatcttgggctgccattcggatctgatgataactcgacttgaggtccaacttcgaaaataccttggcaccatataactcatcgagtagctcttcaattatcgggatagggaatttgtcagccacggtctccctattcaaagcccggtaatcaacacaaaacctccagctgccatccttctttttgactagtaataccgtgctcgaaaaaggacttgtgcttgacacacatatgcccgctcttagcgtttctcgcaccatcctctctatttcatccttttagatttgagcatagtgataaggacaaactaaaattggtcccactccctcctttagtatgattcgatgctccttatctcgaaccggtggtaaccccgaaggcatgttgaacacctccttatatcagtctactaattcagccactggccccggtatcgactgctcaacttcagcttcttgtgtatgtatagccccgagatggacccagaatccatatccactttgctccaccgaatagaacatggcttttagagtgatgggagacttacaaaggctaggatcgccttgcaaagtcacccaagtgccatctctttcgaacttcattaccatagacctccaattgacttgcatattccccaacgtttccagccatttaatacccaatatcacatcagctcctcccaattctaacgacaagaaatcggtgactactcgaagagcccctaactccaaggacacattagcacaaactccttctgccttcaccttatctctggtgcccaaaagaatgccatagccatttgtctgtgatattggtatacccatggcttctaccacttcaagagaaatgaaattatgggtagccccactgtcaattaacactgcgactggctgctgcccaatttttccagctaacttcatagtatgggctgaagaaattcctactagcgagtttaacgagagtgtcactaatgtttcttccgtcgtttcagcttcctcagctgtcggggatggtggtggtgattccacggtcggcttgggttcatcctcttcagcaaacagtaacacttgtagatacttctgttcgcattcatgtccacgatggtacttcttgtcacaacgaaaacacaatccttttgctcttttctcttgatactctgcctcggtcatcctccgcattgtcggggccttgccagtggtgttcatcattatggttggagagggtgtagtaaccggggcagccgtgagtgacttagtgtgaaacacattatgatttgggcggagcggattaatgggtgtcaagtggggtttgttgggctgaagtgggtgagtcacattcatgagttggcttccctcctcaatcctttgggctgtatctattatgtgaaccaaccccatgggttgcaacatgtgaagagtgcctctaattccttccttaaggcccttaacaaagctgccttctaagatgtactccggcacccctggtaatctcgacgccgccgcctcccaacggagtctatagtcgcgaacagtggtggtctgtgtaactgacaacaactcttccaacaaggacccaatctgagctgatctaaacctctacaataccatatgtttgagaacggtccatgatgtaatcggccgtctctgattttcccattgaaaccaggtcaaagcatccccatccaagccgattatggctgtttccaacataagtggttcagttagacgaaaaagaagaaaatacctctctgcctgatagatccatccttctgggttggagcatgaaaacacaggtaaatccattttcggagggcgtggatcggtgccggtttgagcggcttcggcgatgacgacgatgcatttctgggcatctcttggggttgctgatcgctgctggaaagggttgtctctaccggtgttttacccgcggcaaggaaacgggtcatctgagccaacaacaactccggtagccgctgcacttccgcccgagtctccgaaacctccttgcccagttgcaatttcacttccgccatctcctgttggacctcggctcgaagagcttccaatcgttcatctgctacttccatcgtcgcatccctcttaggccccatgatcttgctctgataccaatttgataggaactccctgtcaaattgagatcaaaaccagaaaagaaaaaaagaagaagaagaagagtagagcaaattgaagaaaatggtagatctgcctttgattaattcccaggaattttagagcctcgttctctccaagtacaactgaaaatacaaaataaaactcttcacaccccacactgattttccccacttattactaaaccgagtgtatcttaagtcacccacacccaagcaaaactcaaataacagttagcaaaagcctaatctgatgtgatgttaatcatattttcctttttacccctacgagcatacacataagtcaaaggtggcctatcaatggattaactcgaccaaatcgacaaaaattattggcggattataatttttttttattagacaggttacaattagatatttataacccgacatttatattaaattagtaaaaataatttataaccagaccaaacctattgatacagtgagagcaaacgtttcataagattaactaagtagctatatagatagagagtagagtaggtgtggggtcaaaggatggaatcccgtctctcggaaatcatgaaagccacggtggcgaaacgctttttgtaattttttgtcgtcatcctggaagaaaacagtccacctgagcctgacacccgatatataaaatcctaaaaaatcttcttagtggtgtagccagccactactctttctttacaaccttttctactgaaacaagataagagtccaaagccttgtgtaccaccagtaatctctttctcttcttcctcttcttcgtgtaagcgatcgatctctttcttctcgaatatgtatttcaggatgtgaaactgaaatttgtttctcatttctgtttggttgcctcgaaagttgacgaaa

SEQ ID NO: 255955 - DNA, 1675 bp, Cannabis indica
tactaagatgtctaactactattatgagatgacgtcatataattggttagtagtttattaatttttattaaattaaataagtatgacttaatattaaattatacttcgtgttaagtactataaaaatattaaaaaatatcactattatctaatattcttttattgtcgaattattattaatgtaattaagtaataaattaataaaattaaaaaaaaaaaaaaaaaatagatgggtatagaaaatgtgtgggcattggtgttcatttctctttccaaaagatatgtgattcataaaaaatagtatttttacattccacgcgcttgagtagcgcgtgtttataaagtggaagggaatagtgcttgtggcgtttgtggggtccactttatgaaagtttgtgattggtgtacggtgaagtatctagtggtgccgcacgtggggttcggtctcttcacttttccctattttacccttattatgttttttttaagaaaaataaataagtaaagttgctctttgagttagccaagagcccaatcttgttcgctttgggattaatcctctctcttactcttcacacactaaacatggtctttctgagtttggaacgacacgtgtcatataatgagaaagttagagttggactactttattcaccttttactttggaaatgagaaaggttaaaaggcaccagtagtgtcaagtaccttcttacgtgttaatatcgctattggtctaatttagtatcgggtcccatatagcttaatataatagcttttagggagtatcactagcaaatcgtaaggcaacacatcttaagggtgctaggcaccactagtgcccaatagcaatgctttttggaaattgttgtagtagaactcctggtaaattttttatcgatatttaagagagttctatatacattatagttatttaagattatttgtaaatttttagaaaatttaaaatattataatattaaaaataagatttaaataataacttaccacgcgtataagaaaaataattgtatttacaataaaatatgtaaatcttattttctgtattgtaaactatttagaatttttttaaaattttctaagcagtcctaattaattacaacattggcgatcataaaaaataaattaaaaagttctttagatactgaaataaataggaggtctaccgaaatatctctttaagaggtgcaatgtagatttaccctttacttttttagcatatataccctttgagtttttgctgttttgtaattcagctcctaaaatcttggcaatcaaattcttttatttttgtgtagagaaataaatactacaacgaggaaatatctccaagtcaatggtaaatttaatagctaaaaatttagccaaaaaaaattaatatctaaattaacttttttttttttctgaatgggaatgggaactttattatcaaaccaaatccgcaattacaaaagatttaagagtactaggaagggtactctcattaaaatgacgaccagaccaataacaagagccacgagccaaacagtgggcggccttgttagcagatcgcttgtaatatccgctaaccccgaaagggtatttttgtaattttatttagctgagagtattttttttttatgttacatatttatggatttaaatatgtatgggatt

SEQ ID NO: 255956 - DNA, 966 bp, Cannabis indica
taatgagtggaattgaaaatttttattcgttattctcaatcgtagaaaagaaaacaaatgaaaaaattaggtttataatggaattgtaaacttacaatcgtaatttttactttattttaattttaatatattttgggtttaaaaaattaataaagaatattatttaaaaacttaaaaaaaaaaagttaaacccataaatttctcataaaccaagaattctgttatatagacatactttatatagaatagatatataaatttaaatgattactatagcatataaaaatctacaataatgtaagatatgatatgagaattatgaaagcttacttggtagaataatttattagggtaagatgtggtaggagaatgatctaatttcttgactacttccaaaatcataaaatttatatttactataatactacaaaaaaaaataccattcatatatatatttatatagttttatatatacagtaaatcgctacctaaaaaatttacatatagatgttcatatatataggtacgattatgaagattttttttatagtttttttttttaaataattaggtatagttaaagaaataatagtggtttaaatatataaatatttttcttaatttttcttaattaattaattaatcaaatataattataaaactaataaaaagttcataatgagagaattaaggggtataattataaaactaataaaaaattaacataatgagagaattaaggggaaaataaataaagctaattagagagattgtagagggaaaatttgaaattgtatacttaataaataataaaattggacccctaatacaatactagacataatttgtaaagtgggatacattttcctaaaacctaattttgcccccctcatttcaaaagtcactctctctctctcttcatcccctattctctcaacggaccgaacccactccaccagtcaccgc

SEQ ID NO: 255957 - DNA, 1300 bp, Cannabis indica
taaagaccaatgtcctaaaactcaagcagagaaggaagaaatgagtgaggtgccttattcaaatgctgtagggtctattatgtatctaatggtatgtacaagacctgacttagcctactcaatcagtgtattgagtaaatacatgtcaaatccagggagagaacattggaaagctatgaaatgggtattcagatatctaattggtactaaaagggttggtttaaagttcaaaagacaaaacagcaacaacaccattgaaggttacagtgatgctgattttgcaggggacagagatagtagaaaatcaacttcagcttactattttctagtaggaggaaaatgtgtaagctggagagttcaactacaacctgtagtggccttatccactactgaagctgaatatgtagcaactacagaggcaataaaagaggctatatggattaaagggcttatgaaggatctaaacttattggacagaaatcctatagtctattcagacagtcaaagctgcatacatctttgtaaaaaccctatgttccatgacagaacaaaacatatagagatcaagtaccacttcatcagagacaaagtgacacaagaagaaatcaaaattgagaaagtaccaacagaggaaaacccagctgacattggcactaaaatcctaaacctgggcaaattcaagcattgcatggatttgctaggtatgggcaatggtgattaaccactgccacatgagttaggaccctcagaaaagacacaaaatacattcacctatggttagaaaagtcctagttggattgaggtggaatttgttggaattaaatccaacagtctttcctaaccataaatcagttacaagaaaagcaacttgcacaactacaacaacctaaatacagttacaataaaagatcctaactaaaataacagaacaacagaagtcttatacctgccagatcatcacccaagactacttactctactcctattgcagcagtataaataaccactcccagtttcaatttctggctagatctgaagatatagagtaagagagaacctgtaattgctctgagttcagtgataagaactcagagttgagaaaaagagagaaagagtgagaatctgtgagaagagagagattgttcttgagagagaaagaaggagaaacagtagataaataaaagcagtaaagaataaagtcttaccagttgatcttgtagctggaagctccatgaaatcttgtattggatctgatttgaatagtgcaagggcttagctcatttctgaggcgagctcaaga

SEQ ID NO: 255958 - DNA, 615 bp, Cannabis indica
cttttcttttttcttttattcttcttcttcactaaaaaaaaccctagcaaaccccagccaaccctaacgccaacgacaccccagacctccttgtgcgccatcagagccaccaattgtcgtggtcgaaaccggacaaaaaaccagtaactgccacatggcggcggccactctacctcttccgacgtcgcacactacaaccgcgtgtccccatgcgctcaaatctctaaaaccttctttatcaccagcttcctctttctcccttcctcttccttcgaaattgtcactctctaacgacttcttctccaactagaagaggctcgtagtacaggtccagagcaagattaagagctttgaaaactcttagaattggacaattgaagccaattcttttcgattcgttcccaactcttcgtctcattcctcctcatcacgcgagaaagaagagaggagagggtctgcgagaagaaggggggaggcgactgatggaagagatgagcaatttaggggttttttttatttggttcattaagaagaaaagaagaaagaaagaaagaaaaagaaaaaggaaaagaaataaaagaaaaaataaaaataaaaataaaaagaaaataaaaa

SEQ ID NO: 255959 - DNA, 540 bp, Cannabis indica
aagcttaatcacctgtaatctattttctttttattgtctttctaaggcacaatttatggatgattattggtagtacatatattaaattggctgtgaacatggtatcctctagtctagttaatatatttaggcattgcattttatttttatagctaagaaaatatttttaaataccatcttaatataatggttttggctcaagaattagaggatttgattatcgaactgtttaaggcatgagcgaaatattcaaattaaccttttcaattactaacgttatgtttaatgagacctgttgagtaagctactgaaatgtgcttggaattcttatagagatagagaatgggttcatatatcatgttgcagttgcctagtttgttcccttcaatttctgtttttgttttccattgtttagtgagagagcatttggttttgttaaagggcagcatagtcatggttaaaagagtaaaaagctgaatcaactaacgcctgagttaccaaaattgtgttattgatgctttgtggatgaaattagtaaca

SEQ ID NO: 255960 - DNA, 651 bp, Cannabis indica
agatgaaagcagtgagttgtgttgttattttacgcgtggcctcgatggctagtagtataattacttccgccaggtacatggtgaagagttgagcttgagtaaccagttcaattctctccacacttgtcatccagttgaagaatactttaagggagtagccactgcaatgctccagatgaccattctcgcagtgcatcatcataagacgatttggaattcattctagaaacatcactagtgttgccttcacgaaacccgtggttagaatacaacaataagacccaagtcgactcgagttcatgattagattcgataaacaaaagacatgtgtgacactttaaccaaaaaaacagttgatggaagtaggtgcttctagaggagaccctgatttggtaacaaaagttccaactgggacgcaaaccaccatccatggtgtcaacagggcagagttcaaaaacctagcaaccctagtgaaggaaatcatgcccccaaagttgttagagttcgaactcaatagagaacgatgctcaccacactttaatcgaatcaaagctctaccaatccctctaaagttcaagaatccttcccgacatcaatgaagatgccagagtataagccttcatattattaggatagccaaagaagatgcat

SEQ ID NO: 255961 - DNA, 780 bp, Cannabis indica
ttcatttatttcatacgaattttgaattatgttattttgtcggattgagattgttatccctacttgtgggtgaatgctaaattctaaaattaaaactcaaacccaacccaatttataaatgggtagacttgacctaacatgtttaacccgtttatataaagaatcatatttaattttcgttaatgtatcaactcattaacatatttacaatcttgttataacacattataagcaatttaatatgtttatgttctatttaactaaaaaatataatttatatgtaataaatataatatatttaagaggtatactcttacataagtcattattatgttatttttagattaacgtgtcaattcgaaaatgacccgtttaataaacaagttcaccgtgtcaacctaaaaatgacactaactcatttaaagtaaatttaaactcatttatttcatacaaatttcgaattgtgttattgtatcaaattgatattgctatccctacttgtgggttaaagctagattccatattataattcaatcaacaaatataaaaataaaaattgctattaatcgagagaatggaaattattagaaaataaaaatgtattaatttctttccattggttgataaagtcaaatgagaaatattttccagaaactcataaactatttcgacgaaaatgttattaaacaaaattagaataaataaaggtcctaccgggagtcgaacccaggtcgctggattcaaagtccagagtgctaaccactacaccatagaacctta

SEQ ID NO: 255962 - DNA, 2065 bp, Cannabis indica
tataatagaattgagagtagttcatcatctatcataaacgtagggactactaattcatgtacgactatattagatgtacgaaaaacatatgttaaagaataaatactataaaaaatagttacttttaatgataaatcttttagtcacaacataaaatttttgtcactaaatgtaatttttaatcacaacaaaatgttacttgtgactaaaacataacatttaggtaaaaattgtcactaatttagttttagtcacaacaaatattgtgactaaaaattactactatacaatttcttagctcataaaaactcaaatacatgaataaaaatgaaaacaacacaattatttatccactattaacgttaggatcactgttttttttcctttccaaaatttggaacaaattaattcattgtttgcttatcattttgtctagtattataacagcttaccaaggatcgttgacaaggcaatttcaggatgttatttttgcaaatttcaaatttttgttgttaatgagccttattcagacccatcttaaggggccattagcagtgagaaatactcttttcatgggctagctcttgtataaattaagaaatacctcctttttgtatccattaataaaaaaatacccttatattttattttattaaagtctatccatttttatgagtaggttgtctaatatatccttaccctatacttaagtatagcacataatttacattaatctaaggagtataatagtgatatcatctaacaaaaatgtgtatatcttaaagaatatgaaaatgaaaggaaaaaaattaaaacaaataaaataaagtggacatacaatgtaattttgaaaacatttccaaagataatgggcccagaaggtttatggattttcaaggaaaataaaaagaggaaattagactctatatcctttttaaattgttctcttttatttttaccctcttttttaaaatctattatttttacctcttttttaaaatctattatttttacctctttttttaaacattataccaattttacccctgtcactccaacatattctccatatgactcttatgtcagggtactttgggtacaatacataaaaaaagaggtatatttcaattaaataaaaattagagataaatttagttaattgattaataaaagaggtattgttcaacttactcctccaatccaggataacaagtgttaacaagagggccagtcagatattattgaaactttgggcttttctttttatcaaacaattataaaggaaattatatggtatacccattttactttacttgttttaatttttacctccatttttatatcctttaagatacccacttttatagatgatgtctccattagactccttaggttaatgtaaattatatgctagacttaagtagagagtgagggtatattagacaatctactcaaaaaagtgggtatactttaataaaatataatatgagagtatttttgattactaaatacaaaaaagtgatatttttcaacttatcccacaagacaatttaatctattctataaaagtgatatgtttgaaacttaattttaaatattaaggccttgttggaccttgaatttaagaggataaataaaaagaaatccaaaggatttaattttctcaattcaaattaaaacttgagtatattatatatttatgaaatttaagccaattaaaaaatatatatgaaaaaatttcaaaaaaattatatataaaaacgtagcaaagaaaataaaatgacactagcctatgtctcatatcaaattttgtttttatgaagtatgtttaataaagatttatttaatactattttttttatcaaacacgattttaactctttgattagcaaaagtttatacaataatgaaaaaacaccgtagtgtacttaagttagtagggcgtgatagttgactcagtcaatttttgtcaaaaagaaagtacccatccttttactttttctcaattaaattatattttttttttctttctaattttgattatgactctattaaattatatttt

SEQ ID NO: 255963 - DNA, 1039 bp, Cannabis indica
tttccaatcaagttctcgaaaaagtattccgtgcatttttttgtcatcataaatgatggagatttaaccaaactcagggagaaatccacaaacccgagatcctaaaaatagggcataacactcaaattgacaatcaacttggtgcgttggtttcgatcactcaaatatcgaatctaatttgatcattgaattcaaaatgttcgaaagcggtgtaggagacctcgtcctcaagctcaagaagcttgagagtatcaaaacgataacttgggagctcaaaaatgaagtacccagcgcccaagttgacaaatggcctagtacgataggtttgcttattcatttctgattttgttttgactgtctgtctagtttttcataataactaagatccataaagttagagaagtcaaattcacaatttcgaatttctcattgcaaccatgggaaacttactcagaaatgaatatttttgagtctctcatttctgcaaaaacagtaacatctttgagaactagtgaccgactttgccagaacacaaaaacaaactaagtgatgtcaaaatatcacttaggcattttaaagtacatcctaacattcaggttgacgtcatatgtcagcttgggcactgacctctcactcaatattgatctgattgacgcgattcaacttgcatttcgaagatattttaatgttctatcaagtcatgtctcatattttaatcgaaattctgaagttatcgacctcaaattttatcccaagagagttacaaaaataaactctatattacctgtagcgggtcctgccgggctccgaaaagtgactatcaacctcagaagttagttttcatcactagatcatcatctacggtcaaaaatattcaacttgtattttttcattattttattcatatttttgtaggcctccttcaacaataaaaggtgagctcttttagctcatttttcacatttagaatattacccacatggtcagagcttttatctctagtgtttctttttattaattggagctttgacacttagcc
